United States Patent Application Publication US 2012/0023611 A1 - sequence listing, part 4

SEQ ID NO: 11060 - protein, 502 aa, Zea mays
  misc_feature (155)..(155): Xaa can be any naturally occurring amino acid
  misc_feature (161)..(162): Xaa can be any naturally occurring amino acid
  misc_feature (173)..(173): Xaa can be any naturally occurring amino acid
  misc_feature (176)..(179): Xaa can be any naturally occurring amino acid
  misc_feature (187)..(188): Xaa can be any naturally occurring amino acid
  Coding DNA Sequence Number=SeqID_6568
  Homolog annotation: Hit_ID=A2YV67; Match level="QueryCoverage=68%, HitCoverage=70%, E-value=2e-89, Identity=56%"; Hit description =Putative uncharacterized protein
MAPWPRRPVLTLVLLLLLALLCSHVALCSSAEPGKPKPKPKVSGSRKALLADNDGDEVPAAKPGKSAAAGKTKKKLLAGDATSKNQTKVAKAKKPESAAAAKGAAKKPAGKAAAAAGGDAAIAKVSKAPKTPKADKAKVPKPDKAATAAAAGAKXKGADSXXPAKVSKTGAKXVKXXXXAKSEAATXXGKAKKPPPANSTVDAGAKTAKSGKKAPVVVDAEVKANATVVSKEKSAATETVEMEDEEEVVLAKEAGEGTDDLISEFRDLPSRLQETLMPDLARLSHHSKAYLSAANAGIADGVRPILGGRWAAVAASAASVAVLLLPLFMLTALVRRMGPYLPLLHRALLLAQAYLAIYFATLALAAAATGLEPLRFFHAASPAAYAWTQAAQSLGFMGYLVLQMVDLVAVFSDAASPEDDGNGDAAKALGLAQMVVGLAVGLHYYAAVFHRAAAGEAPRANWRVYAVYAACFAIVCACARAERRKKAYLAGTDGAAEEWKKS

SEQ ID NO: 11061 - protein, 81 aa, Zea mays
  misc_feature (6)..(6): Xaa can be any naturally occurring amino acid
  misc_feature (12)..(12): Xaa can be any naturally occurring amino acid
  misc_feature (26)..(26): Xaa can be any naturally occurring amino acid
  misc_feature (30)..(30): Xaa can be any naturally occurring amino acid
  misc_feature (39)..(39): Xaa can be any naturally occurring amino acid
  misc_feature (56)..(56): Xaa can be any naturally occurring amino acid
  misc_feature (60)..(60): Xaa can be any naturally occurring amino acid
  Coding DNA Sequence Number=SeqID_6569
  Gene Ontology: Mol. function=fumarate hydratase activity; Cellular component=tricarboxylic acid cycle enzyme complex; Biological process=fumarate metabolic process
  Homolog annotation: Hit_ID=Q10LR5; Match level="QueryCoverage=88%, HitCoverage=14%, E-value=2e-23, Identity=76%"; Hit description =Fumarate hydratase 1, mitochondrial, putative, expressed
KCAVKXNMDYGXLDPTIGKAILQAAXEVAXGMLDDHFPXVIWQTGCGSQSNMNANXVIAXGPSVILGHKRGEIVCAPTCLG

SEQ ID NO: 11062 - protein, 81 aa, Zea mays; identical to SEQ ID NO: 11061
  misc_feature (6)..(6): Xaa can be any naturally occurring amino acid
  misc_feature (12)..(12): Xaa can be any naturally occurring amino acid
  misc_feature (26)..(26): Xaa can be any naturally occurring amino acid
  misc_feature (30)..(30): Xaa can be any naturally occurring amino acid
  misc_feature (39)..(39): Xaa can be any naturally occurring amino acid
  misc_feature (56)..(56): Xaa can be any naturally occurring amino acid
  misc_feature (60)..(60): Xaa can be any naturally occurring amino acid
  Coding DNA Sequence Number=SeqID_6570
  Gene Ontology: Mol. function=fumarate hydratase activity; Cellular component=tricarboxylic acid cycle enzyme complex; Biological process=fumarate metabolic process
  Homolog annotation: Hit_ID=Q10LR5; Match level="QueryCoverage=88%, HitCoverage=14%, E-value=2e-23, Identity=76%"; Hit description =Fumarate hydratase 1, mitochondrial, putative, expressed

SEQ ID NO: 11063 - protein, 62 aa, Zea mays
  misc_feature (1)..(11): Xaa can be any naturally occurring amino acid
  Coding DNA Sequence Number=SeqID_6571
XXXXXXXXXXXWGSVGFGLGSLVVFIGLFSVGLYCIILVSSPCAVISRCCNQWNVLVSSLMT

SEQ ID NO: 11064 - protein, 162 aa, Zea mays
  misc_feature (35)..(35): Xaa can be any naturally occurring amino acid
  misc_feature (64)..(65): Xaa can be any naturally occurring amino acid
  misc_feature (96)..(96): Xaa can be any naturally occurring amino acid
  misc_feature (101)..(101): Xaa can be any naturally occurring amino acid
  misc_feature (104)..(104): Xaa can be any naturally occurring amino acid
  misc_feature (106)..(109): Xaa can be any naturally occurring amino acid
  misc_feature (112)..(113): Xaa can be any naturally occurring amino acid
  misc_feature (128)..(130): Xaa can be any naturally occurring amino acid
  misc_feature (138)..(139): Xaa can be any naturally occurring amino acid
  misc_feature (141)..(142): Xaa can be any naturally occurring amino acid
  misc_feature (144)..(144): Xaa can be any naturally occurring amino acid
  misc_feature (146)..(146): Xaa can be any naturally occurring amino acid
  misc_feature (152)..(152): Xaa can be any naturally occurring amino acid
  Coding DNA Sequence Number=SeqID_6573
  Subcellular localization annotation: CTP_CleavageSite=19; ConfidenceScore=5.40e-01
RTSLPPTSPPLPPPPRSPQAGLPPPPGLIGRGCPXPPLLSRPLFTPPPRPHPPPPPRPEPPPLXXPSSPFQLNRPPPPPPPPATPPPPPPTLPTPXSRTLXPPXKXXXXTLXXGGLLPASSALLPPPXXXPLSPPYFXXKXXGXEXGNLKVXAESYSQGPSG

SEQ ID NO: 11065 - protein, 262 aa, Zea mays
  misc_feature (26)..(27): Xaa can be any naturally occurring amino acid
  misc_feature (35)..(35): Xaa can be any naturally occurring amino acid
  misc_feature (38)..(38): Xaa can be any naturally occurring amino acid
  misc_feature (42)..(44): Xaa can be any naturally occurring amino acid
  misc_feature (52)..(55): Xaa can be any naturally occurring amino acid
  misc_feature (132)..(132): Xaa can be any naturally occurring amino acid
  misc_feature (143)..(143): Xaa can be any naturally occurring amino acid
  misc_feature (262)..(262): Xaa can be any naturally occurring amino acid
  Coding DNA Sequence Number=SeqID_6575
HYRRAMTSHARVRKLGIRLEHTLSIXXNLSILSTXEAXSAMXXXEKFFFIKXXXXTCSNALRDSCLPLPYIPTCRLRLLSGSPMVSMLCILRPTAPAPLAGRRGREAAPRTGGAPPAPRPGAAGRGGAAGAXGRARAAARPGXGFFSPPPRGAASLSPLPASPRPARRRPPAPRSAPAPSPFLLSALCFGAPPPSVAGLSFLASPPLRRPPPSRVSSPLPLPPPPSSSLPLPPSPLSSSRRVPCAVAVLARRLVAPRALPPX

SEQ ID NO: 11066 - protein, 92 aa, Zea mays
  misc_feature (2)..(2): Xaa can be any naturally occurring amino acid
  misc_feature (8)..(8): Xaa can be any naturally occurring amino acid
  misc_feature (12)..(12): Xaa can be any naturally occurring amino acid
  misc_feature (14)..(16): Xaa can be any naturally occurring amino acid
  misc_feature (18)..(18): Xaa can be any naturally occurring amino acid
  misc_feature (29)..(29): Xaa can be any naturally occurring amino acid
  misc_feature (31)..(31): Xaa can be any naturally occurring amino acid
  misc_feature (33)..(34): Xaa can be any naturally occurring amino acid
  misc_feature (49)..(49): Xaa can be any naturally occurring amino acid
  misc_feature (51)..(51): Xaa can be any naturally occurring amino acid
  misc_feature (53)..(53): Xaa can be any naturally occurring amino acid
  misc_feature (57)..(57): Xaa can be any naturally occurring amino acid
  misc_feature (70)..(70): Xaa can be any naturally occurring amino acid
  misc_feature (73)..(73): Xaa can be any naturally occurring amino acid
  misc_feature (79)..(79): Xaa can be any naturally occurring amino acid
  Coding DNA Sequence Number=SeqID_6577
  Subcellular localization annotation: CTP_CleavageSite=66; ConfidenceScore=5.19e-01
IXASEWDXSSEXRXXXVXTSSQHHLVPRXPXVXXMTWFMTSGLSSRGSXPXTXATGXQQERKADLSASGXVAXGGGDFXRRIGRFLLVRFSC

SEQ ID NO: 11067 - protein, 157 aa, Zea mays
  Coding DNA Sequence Number=SeqID_6579
  Subcellular localization annotation: CTP_CleavageSite=12; ConfidenceScore=5.53e-01
SLCGGARPPPPRGGGKKTPPRGVFFLKKRNPPPGGAPQKVFFLPPGVLNHPPPFFFFFYQRAKILFFSFGGGLPPFFSPPPPPPKGFPPKGVPNPRGFPRLHPNLFSPVRPPLIGNLSPQSPPRGINSHFPIQASRRVPPASPHARRTVLDVHRPLP

SEQ ID NO: 11068 - protein, 44 aa, Zea mays
  Coding DNA Sequence Number=SeqID_6581
HQSISMLLGPYGHNTVRWWANRNVIVYIYRIERQDCHSGRHAAH

SEQ ID NO: 11069 - protein, 96 aa, Zea mays
  Coding DNA Sequence Number=SeqID_6583
  Homolog annotation: Hit_ID=A9P0P2; Match level="QueryCoverage=82%, HitCoverage=32%, E-value=7e-20, Identity=59%"; Hit description =Putative uncharacterized protein
  Pfam annotation: Domain name=CBS; Domain location=1-91; Score=14.1; E_ value=0.0021; Accession=PF00571.18; Description=CBS domain
  Subcellular localization annotation: CTP_CleavageSite=83; ConfidenceScore=5.12e-01
ASTPACNPWSLHDGRCVGVISNKMKVRPPNGMDSTVAEVMTSPAITLTLYKTVLEAAALMLRNSCHRRPVVNEQQHVIGIVTRSDVFQALEATNKA

SEQ ID NO: 11070 - protein, 106 aa, Zea mays
  misc_feature (13)..(13): Xaa can be any naturally occurring amino acid
  misc_feature (40)..(40): Xaa can be any naturally occurring amino acid
  misc_feature (53)..(53): Xaa can be any naturally occurring amino acid
  misc_feature (69)..(69): Xaa can be any naturally occurring amino acid
  Coding DNA Sequence Number=SeqID_6584
  Homolog annotation: Hit_ID=Q5NBT9; Match level="QueryCoverage=93%, HitCoverage=8%, E-value=7e-28, Identity=74%"; Hit description =Putative CTV.2
MGFKILANADGLXTLRALGSRPPFEAFRPQYEASSMKVSXGAPVVASISPNIXPNGSLGIGNSPAKPSXPILNGGGYSIQGSIDIKPRISEEKPDKAKPWGPNGKF

SEQ ID NO: 11071 - protein, 206 aa, Zea mays
  misc_feature (201)..(206): Xaa can be any naturally occurring amino acid
  Coding DNA Sequence Number=SeqID_6585
  Subcellular localization annotation: CTP_CleavageSite=25; ConfidenceScore=5.08e-01
LSSRLVCSSSLRIRCLRLLRRFGFAAAAAANQSNHHPVAQPNRRSSPQPSHPPRSMRGTMPATDSSSSSSSSPAAAPLSSIGRSIRSLRRDQEPDPTPSRRRQTPQTAFQRRGRANSLADLPEAGRRPSPLALGRAPLPRIPFLLRPRREVPGPWLFGLPGTPPRLGRAPGFEPPLVARISPEPGPGKGGFRTSLETAWPXXXXXX

SEQ ID NO: 11072 - protein, 154 aa, Zea mays
  misc_feature (67)..(67): Xaa can be any naturally occurring amino acid
  misc_feature (102)..(102): Xaa can be any naturally occurring amino acid
  Coding DNA Sequence Number=SeqID_6586
  Subcellular localization annotation: CTP_CleavageSite=13; ConfidenceScore=5.52e-01
NLILFSFSFLPLVSSTRNKPPPHASACSHPRPPVHPPRPRPSRLPPPRPPLPPARPPPAPAPNAAPXQPQPSHSQGPSQSPSQTTQQASPQQQQVAAVAAAXAQAQTQAAWVRSPEMEMALQDAMRVCNPDVNTPFQSIEDAVNRLHMARRCLV

SEQ ID NO: 11073 - protein, 165 aa, Zea mays
  misc_feature (99)..(108): Xaa can be any naturally occurring amino acid
  misc_feature (110)..(110): Xaa can be any naturally occurring amino acid
  misc_feature (112)..(112): Xaa can be any naturally occurring amino acid
  misc_feature (115)..(116): Xaa can be any naturally occurring amino acid
  misc_feature (120)..(121): Xaa can be any naturally occurring amino acid
  misc_feature (125)..(137): Xaa can be any naturally occurring amino acid
  misc_feature (139)..(140): Xaa can be any naturally occurring amino acid
  misc_feature (143)..(149): Xaa can be any naturally occurring amino acid
  misc_feature (162)..(165): Xaa can be any naturally occurring amino acid
  Coding DNA Sequence Number=SeqID_6587
SRIDPREARELKPLANPVGAPKETGGAGGGAPPPPPRYRGGLNTNFGLENRHPAGAPLFLTKKGETSISPSPRLFPGLGSTNGPPKKSYKQPPLIEKTXXXXXXXXXXNXVXLGXXASGXXLDCXXXXXXXXXXXXXLXXINXXXXXXXLKKKKKKKKKKKXXXX

SEQ ID NO: 11074 - protein, 157 aa, Zea mays
  misc_feature (9)..(9): Xaa can be any naturally occurring amino acid
  misc_feature (46)..(46): Xaa can be any naturally occurring amino acid
  Coding DNA Sequence Number=SeqID_6589
  Homolog annotation: Hit_ID=A2XDS0; Match level="QueryCoverage=44%, HitCoverage=12%, E-value=6e-22, Identity=67%"; Hit description =Putative uncharacterized protein
  Pfam annotation: Domain name=WD40; Domain location=14-51; Score=25.1; E_value=0.00026; Accession=PF00400.22; Description=WD domain, G-beta repeat
MNVPVVDPXQGEFPETIEEYLHHGTMKCIAFNRKGTLLAAGCSNGXCIIWDFGNKGACKKNFVIKDSTAPYNKCGPWVQVWATRFAWPLLLDKSIDTFGDVAQLGEKNCTVLLLSAEFHYVASLSTWVLPTPFLFCFGHGPSNFSWTPFCIEKHGKT

SEQ ID NO: 11075 - protein, 355 aa, Zea mays
  Coding DNA Sequence Number=SeqID_6590
  Gene Ontology: Mol. function=nucleic acid binding; Biological process= DNA integration
  Homolog annotation: Hit_ID=Q109I2; Match level="QueryCoverage=83%, HitCoverage=86%, E-value=3e-77, Identity=51%"; Hit description =Expressed protein
MEDEVQRAAVSSWNELDYEAEARLVAEARASWDRKARGEEEDEEEHDPEMTLDYYAYQAKKFRNTWNILYFGHFGRFEDTTRIPPMRFTEKPPDSPAYPRTTLQVFSIKVAGIEGGLQWPLHVFGKVALRDAVDHNRNMVFDRTRDNCQILTKEVPNLKLTGPSRAVLLVDPVTIEADLKVKGRTESEDKHLSFLAVPFLITIPLESCLRTRDFTSKLSTLRFGLAIVVLSVEATISVRVRGGSWPDGLRAQFAAHTVSIGREEVVLLDSGDDKLPVSDDGTITLGRRVASVEVSGELNVSVKAWQGGEVFTHRERGFKPKEAGWSYGTLDVGFCQMDVSVAWSLLSSYGENEAL

SEQ ID NO: 11076 - protein, 171 aa, Zea mays
  Coding DNA Sequence Number=SeqID_6591
SAGDRAPPLIAGAPRAKGSLWGLWVPSECRRESSGGGQGMEAAFHAEGPPAPPLRVTFPSSFISRLGRGLPPGAFLLNEPVMHPRVIGGELQLVTFLLILGLGFSFLRRRHLRLRRRSFGHDYLVRGGRGGGCGGLWLRLLCHLSQRFESCALTPAFERRERWLAGREPKP

SEQ ID NO: 11077 - protein, 93 aa, Zea mays
  misc_feature (3)..(5): Xaa can be any naturally occurring amino acid
  misc_feature (13)..(14): Xaa can be any naturally occurring amino acid
  misc_feature (21)..(22): Xaa can be any naturally occurring amino acid
  misc_feature (31)..(33): Xaa can be any naturally occurring amino acid
  misc_feature (35)..(35): Xaa can be any naturally occurring amino acid
  misc_feature (40)..(42): Xaa can be any naturally occurring amino acid
  misc_feature (49)..(59): Xaa can be any naturally occurring amino acid
  misc_feature (61)..(61): Xaa can be any naturally occurring amino acid
  misc_feature (63)..(64): Xaa can be any naturally occurring amino acid
  misc_feature (67)..(68): Xaa can be any naturally occurring amino acid
  misc_feature (82)..(85): Xaa can be any naturally occurring amino acid
  misc_feature (93)..(93): Xaa can be any naturally occurring amino acid
  Coding DNA Sequence Number=SeqID_6593
AYXXXTGTTQFHXXRREDAVXXAEEAAFSKXXXWXGFGLXXXLQDESHXXXXXXXXXXXKXVXXKLXXAVDAPLEFGLYRIXXXXLRSIILIX

SEQ ID NO: 11078 - protein, 106 aa, Zea mays
  misc_feature (68)..(68): Xaa can be any naturally occurring amino acid
  Coding DNA Sequence Number=SeqID_6595
  Gene Ontology: Mol. function=nucleic acid binding; Cellular component= chloroplast; Biological process=cell redox homeostasis
  Homolog annotation: Hit_ID=Q10M18; Match level="QueryCoverage=95%, HitCoverage=36%, E-value=5e-37, Identity=70%"; Hit description =Thioredoxin-like 1, putative, expressed
HLKGVQLDLRAVGSSQDLIDNLPNACHRLIVVHFFSPACLGYRSFHPKLCQFADQNSDVLFLQVNYEXHKSMCHSLHVHVLPLFRFYRGAQGRLCSLSCTNASTIP

SEQ ID NO: 11079 - protein, 114 aa, Zea mays
  Coding DNA Sequence Number=SeqID_6596
  Subcellular localization annotation: CTP_CleavageSite=41; ConfidenceScore=5.61e-01
FFQVATLSLSVLCWPALSAPAAPMASSSSHLLCSLRGFLLPAASLRSVPPLHQRTCSVSLSSSWHGHGHDVILGEPHCCALAELSSLRSSSSALGHAGTRPTGPPLRHGRLLVP

SEQ ID NO: 11080 - protein, 139 aa, Zea mays
  misc_feature (20)..(22): Xaa can be any naturally occurring amino acid
  misc_feature (24)..(31): Xaa can be any naturally occurring amino acid
  misc_feature (33)..(34): Xaa can be any naturally occurring amino acid
  misc_feature (38)..(62): Xaa can be any naturally occurring amino acid
  misc_feature (64)..(68): Xaa can be any naturally occurring amino acid
  misc_feature (70)..(74): Xaa can be any naturally occurring amino acid
  misc_feature (76)..(76): Xaa can be any naturally occurring amino acid
  Coding DNA Sequence Number=SeqID_6598
  Gene Ontology: Mol. function=galactosylgalactosylxylosylprotein 3 -beta-glucuronosyltransferase activity; Cellular component=membrane
  Homolog annotation: Hit_ID=Q10N05; Match level="QueryCoverage=43%, HitCoverage=14%, E-value=2e-18, Identity=75%"; Hit description =Glycosyltransferase family 43 protein, expressed
MFSKLDLFKWCKSVPRAKAXXXKXXXXXXXXMXXPIRXXXXXXXXXXXXXXXXXXXXXXXXXHXXXXXNXXXXXAXAGRERHHQRNVALGHIEHHRLAGVVLFAGLGDVFDLRFFDELRGIRYQPAIIIACFTARTTCV

SEQ ID NO: 11081 - protein, 111 aa, Zea mays
  Coding DNA Sequence Number=SeqID_6599
STFSEMKLGGGGRLHVLLLCTPNSNPPATETLYGCLLDLSSGSGAPILDAQQVFEVMPVGCPFSFFFNQHCSKSERRRSSIISFLVLPSLHLASSTPLAFFPFIFPTTCKL

SEQ ID NO: 11082 - protein, 122 aa, Zea mays
  misc_feature (109)..(109): Xaa can be any naturally occurring amino acid
  Coding DNA Sequence Number=SeqID_6601
  Gene Ontology: Mol. function=structural constituent of ribosome; Cellular component=ribonucleoprotein complex; Biological process =translation
  Homolog annotation: Hit_ID=Q94ER6; Match level="QueryCoverage=94%, HitCoverage=96%, E-value=2e-26, Identity=55%"; Hit description=60S ribosomal protein L144
  Pfam annotation: Domain name=Ribosomal_L44; Domain location=36-112; Score=118.1; E_value=2.7e-32; Accession=PF00935.9; Description =Ribosomal protein L44
VAPEQVQRCTFPFAAAKMVNVPKTKKTFCKNKECKKHPLPKVAQYKKGKDSLFAQGKRRYVPQQSGYGGQTKPVFLKKAKTPQKIVFKLQCQSCKHYSQHAIKKCKHFXIGGGKKGKGTSLF

SEQ ID NO: 11083 - protein, 122 aa, Zea mays
  misc_feature (40)..(40): Xaa can be any naturally occurring amino acid
  misc_feature (45)..(45): Xaa can be any naturally occurring amino acid
  misc_feature (71)..(71): Xaa can be any naturally occurring amino acid
  misc_feature (76)..(76): Xaa can be any naturally occurring amino acid
  misc_feature (78)..(78): Xaa can be any naturally occurring amino acid
  misc_feature (107)..(107): Xaa can be any naturally occurring amino acid
  misc_feature (113)..(113): Xaa can be any naturally occurring amino acid
  misc_feature (119)..(119): Xaa can be any naturally occurring amino acid
  Coding DNA Sequence Number=SeqID_6602
  Gene Ontology: Mol. function=structural constituent of ribosome; Cellular component=ribonucleoprotein complex; Biological process =translation
  Homolog annotation: Hit_ID=Q94ER6; Match level="QueryCoverage=59%, HitCoverage=61%, E-value=6e-13, Identity=53%"; Hit description=60S ribosomal protein L144
  Pfam annotation: Domain name=Ribosomal_L44; Domain location=36-112; Score=103.3; E_value=7.3e-28; Accession=PF00935.9; Description =Ribosomal protein L44
  Subcellular localization annotation: CTP_CleavageSite=15; ConfidenceScore=5.11e-01
VAPDQVQRCTFPFAPAKMVTVPKPKKTSSKNKECKKPPLXKVPQXKKGKDSLSAQGKPRYAPNQSGYGGQXKPVFXKXAKPPKKIVLKLQCQSCKPYSQHAIKRCKXFEIGGXKKGKGXSLF

SEQ ID NO: 11084 - protein, 205 aa, Zea mays
  misc_feature (66)..(66): Xaa can be any naturally occurring amino acid
  misc_feature (69)..(205): Xaa can be any naturally occurring amino acid
  Coding DNA Sequence Number=SeqID_6603
LVVSNYCNNCFVSLNLFNVLLYVGLDCGCVFKSLLISAYMSSIIGFHSLTLAFINQFDTFQKKKKXPPXXXXXXXXXXXXXXXXXXXXXXXXXXXXXXXXXXXXXXXXXXXXXXXXXXXXXXXXXXXXXXXXXXXXXXXXXXXXXXXXXXXXXXXXXXXXXXXXXXXXXXXXXXXXXXXXXXXXXXXXXXXXXXXXXXXXXXXXX

SEQ ID NO: 11085 - protein, 80 aa, Zea mays
  Coding DNA Sequence Number=SeqID_6605
  Gene Ontology: Mol. function=metal ion binding
  Homolog annotation: Hit_ID=P25860; Match level="QueryCoverage=70%, HitCoverage=70%, E-value=3e-24, Identity=91%"; Hit description =Metallothionein-like protein 2A
  Pfam annotation: Domain name=Metallothio_2; Domain location=1-79; Score=156.8; E_value=5.7e-44; Accession=PF01439.8; Description =Metallothionein
MSCCGGNCGCGSGCKCGNGCGGCKMYPDLGFSGESTTTETFVFGVAPAMKNQYEASGEGVAENDACKCGSDCKCDPCTCK

SEQ ID NO: 11086 - protein, 47 aa, Zea mays
  Coding DNA Sequence Number=SeqID_6606
CQGKNESPEWHVPCLNGNAWLVLVKLCSMLFCCTREKGIMFMVCYYF

SEQ ID NO: 11087 - protein, 197 aa, Zea mays
  Coding DNA Sequence Number=SeqID_6608
  Gene Ontology: Mol. function=nucleotide binding; Cellular component =plasma membrane; Biological process=regulation of actin filament depolymerization
  Homolog annotation: Hit_ID=P92978; Match level="QueryCoverage=100%, HitCoverage=100%, E-value=9e-95, Identity=88%"; Hit description=Rac -like GTP-binding protein ARAC11 precursor
  Pfam annotation: Domain name=GTP_EFTU; Domain location=4-179; Score= -84.3; E_value=0.067; Accession=PF00009.17; Description=Elongation factor Tu GTP binding domain
  Pfam annotation: Domain name=Miro; Domain location=8-121; Score=66.5; E_value=9.1e-17; Accession=PF08477.3; Description=Miro-like protein
  Pfam annotation: Domain name=Ras; Domain location=8-179; Score=256.9; E_value=4.2e-74; Accession=PF00071.12; Description=Ras family
  Pfam module annotation: Pfam domain module=GTP_EFTU::Miro::Ras; Domain location=4-179::8-121::8-179
MSASRFIKCVTVGDGAVGKTCLLISYTSNTFPTDYVPTVFDNFSANVVVNGATVNLGLWDTAGQEDYNRLRPLSYRGADVFILAFSLISKASYENVSKKWIPELKHYAPGVPIVLVGTKLDLRDDKQFFIDHPGAVPITTAQGEELKKLIEAPAYIECSSKSQENVKGVFDAAIRVVLQPPKQKKKKSKAQKACSIL

SEQ ID NO: 11088 - protein, 227 aa, Zea mays
  Coding DNA Sequence Number=SeqID_6609
  Gene Ontology: Mol. function=nucleoside-triphosphatase activity; Cellular component=integral to membrane; Biological process=transport
  Homolog annotation: Hit_ID=A2YUZ0; Match level="QueryCoverage=92%, HitCoverage=22%, E-value=1e-76, Identity=62%"; Hit description =Putative uncharacterized protein
MDSPRGPASFATQANALLRKNLCVQKRNLKTNIGITFFPILICVLLIVLQNVINSELDKPKYKCGCVCLETSANGRCVRKECGIQYSTLDQVGSCPIPSPPQWPALIQIPRADFRAARTFSQPFNDLPDPFCRDSWSCPATVLVTGKDRAVAEAISRGLFPVLSPSLNATDLLDLFSMIVAGSDTQPWYTQLLEPAFFSGRTLYVIQPECTPVYELIIAWFLLVYLK

SEQ ID NO: 11089 - protein, 97 aa, Zea mays
  Coding DNA Sequence Number=SeqID_6610
IAPIFWEGTIEACQERESDLPWVSIRVWGTYQPWGLTMGVFWGARDFPITEACRTTLDCSPGPRSYRGAAKHRRRPTARPDCQSRTGTTGWGAWRML

SEQ ID NO: 11090 - protein, 182 aa, Zea mays
  misc_feature (3)..(3): Xaa can be any naturally occurring amino acid
  misc_feature (8)..(8): Xaa can be any naturally occurring amino acid
  misc_feature (14)..(14): Xaa can be any naturally occurring amino acid
  misc_feature (16)..(16): Xaa can be any naturally occurring amino acid
  misc_feature (23)..(23): Xaa can be any naturally occurring amino acid
  misc_feature (36)..(36): Xaa can be any naturally occurring amino acid
  misc_feature (176)..(176): Xaa can be any naturally occurring amino acid
  misc_feature (179)..(180): Xaa can be any naturally occurring amino acid
  Coding DNA Sequence Number=SeqID_6612
GDXELADXLRARRXVXRPGLVPXQVHQVHGPRPRRXVGIRRGGAARARGHQHGRVGARLAPERGERQRGHQRRGHDEEQRDGEEVRQAAHQAVVQEPGLVPRPLLHRPEQIPVHGDRTAGLSTSTRTLARTYLVNGTPSHHGSADRPPIRVSSLASYGSYRVCRGCHGSARWALAXSGXXRP

SEQ ID NO: 11091 - protein, 103 aa, Zea mays
  Coding DNA Sequence Number=SeqID_6614
  Subcellular localization annotation: CTP_CleavageSite=61; ConfidenceScore=5.70e-01
RRQHREATSLLRLAWGRCAAAASRRRRRASASWGSSSRPSSPWCSCSSVPRRSGAASPSTRAVEAEESPRISGCWEERSVVHGREQARQWSLVFFGSENNFYY

SEQ ID NO: 11092 - protein, 82 aa, Zea mays
  misc_feature (1)..(1): Xaa can be any naturally occurring amino acid
  Coding DNA Sequence Number=SeqID_6615
  Gene Ontology: Mol. function=binding
  Homolog annotation: Hit_ID=A7PA76; Match level="QueryCoverage=98%, HitCoverage=14%, E-value=3e-28, Identity=72%"; Hit description =Chromosome chr14 scaffold_9, whole genome shotgun sequence
XHSWLHAAVQALPSEYLNHGEAEAIVPLWSKALADAASDYLESKNSDGLKSDFGHMQGKGGRVLKRLVREFADSHRNIPNLT

SEQ ID NO: 11093 - protein, 90 aa, Zea mays
  misc_feature (1)..(3): Xaa can be any naturally occurring amino acid
  misc_feature (5)..(6): Xaa can be any naturally occurring amino acid
  misc_feature (11)..(12): Xaa can be any naturally occurring amino acid
  misc_feature (14)..(15): Xaa can be any naturally occurring amino acid
  misc_feature (17)..(20): Xaa can be any naturally occurring amino acid
  Coding DNA Sequence Number=SeqID_6616
  Gene Ontology: Mol. function=nucleic acid binding; Biological process= regulation of transcription, DNA-dependent
  Homolog annotation: Hit_ID=Q38896; Match level="QueryCoverage=64%, HitCoverage=31%, E-value=4e-10, Identity=50%"; Hit description =Glycine-rich protein 2b
  Pfam annotation: Domain name=zf-CCHC; Domain location=31-48; Score =33.5; E_value=7.6e-07; Accession=PF00098.13; Description=Zinc knuckle
  Pfam annotation: Domain name=zf-CCHC; Domain location=70-87; Score =35.2; E_value=2.4e-07; Accession=PF00098.13; Description=Zinc knuckle
  Pfam module annotation: Pfam domain module=zf-CCHC::zf-CCHC; Domain location=31-48::70-87
XXXGXXRGRGXXSXXVXXXXYGGRGGGGGDGACYKCGEQGHMARDCSQGGGGYGGGGGGRFGGGGGGGGGSCYSCGESGHFARDCTSGGR

SEQ ID NO: 11094 - protein, 104 aa, Zea mays
  Coding DNA Sequence Number=SeqID_6617
  Homolog annotation: Hit_ID=Q94GP5; Match level="QueryCoverage=95%, HitCoverage=40%, E-value=1e-11, Identity=46%"; Hit description =Putative uncharacterized protein OJ1124_H03.7
MFRSKVQEMILRRRSRSMNGAAQHAGSSPTASCDAGGGGKGAARAPSFAAPRLLHSSSLPAGGRAAVVIGSPARDPEALSAYAMSPTSVLDASAAFGSPGPAVD

SEQ ID NO: 11095 - protein, 127 aa, Zea mays
  Coding DNA Sequence Number=SeqID_6618
  Gene Ontology: Mol. function=threonine endopeptidase activity; Cellular component=proteasome core complex; Biological process =ubiquitin-dependent protein catabolic process
  Homolog annotation: Hit_ID=O23715; Match level="QueryCoverage=100%, HitCoverage=51%, E-value=2e-66, Identity=100%"; Hit description =Proteasome subunit alpha type-3
  Pfam annotation: Domain name=Proteasome; Domain location=31-125; Score=-27.7; E_value=0.00023; Accession=PF00227.16; Description =Proteasome A-type and B-type
MSSIGTGYDLSVTTFSPDGRVFQIEYAAKAVDNSGTVVGIKCKDGIVMGVEKLIASKMMLPGSNRRIHSVHRHAGMAVAGLAADGRQIVARAKSEARSYESVYGDAVPVKELSERVASYVHLCTLYW

SEQ ID NO: 11096 - protein, 81 aa, Zea mays
  Coding DNA Sequence Number=SeqID_6619
SSESISAMRVVRLPPCIERNETHIILVESSIVNTMKSGLCEGISQNQLHVGRIRRLSMELSDWERVCRRLNCTWGGFRGYP

SEQ ID NO: 11097 - protein, 141 aa, Zea mays
  Coding DNA Sequence Number=SeqID_6621
  Gene Ontology: Mol. function=peptidase activity; Cellular component =chloroplast thylakoid membrane; Biological process=lipid transport
  Homolog annotation: Hit_ID=A6N0R3; Match level="QueryCoverage=60%, HitCoverage=60%, E-value=9e-27, Identity=65%"; Hit description =Cortical cell-delineating protein
  Pfam annotation: Domain name=Tryp_alpha_amyl; Domain location=56-138; Score=86.6; E_value=7.8e-23; Accession=PF00234.12; Description =Protease inhibitorseed storageLTP f
MASRAATFVALSLLLSAVATHGCGPYCQPPVVVPTPPVVVPPPYHGGGAHGHGGQCSIDALKLRVCANVLGGLLGLKVGVPAHDECCPLLQGLVDLDAAVCLCTAVRANVLGIHLNVPVDISLLLNHCGKTCPSEFTCPAH

SEQ ID NO: 11098 - protein, 92 aa, Zea mays
  Coding DNA Sequence Number=SeqID_6622
YQPLAAKERTKFSRESKPGNFGFPDESALKDNGPSENRLLRTSKAPAPKNTTRERPRTPASTRWSIYLPRRDMYCVAPSTELLKTGLRRKLS

SEQ ID NO: 11099 - protein, 174 aa, Zea mays
  misc_feature (1)..(3): Xaa can be any naturally occurring amino acid
  misc_feature (5)..(5): Xaa can be any naturally occurring amino acid
  misc_feature (8)..(10): Xaa can be any naturally occurring amino acid
  misc_feature (12)..(23): Xaa can be any naturally occurring amino acid
  misc_feature (25)..(30): Xaa can be any naturally occurring amino acid
  misc_feature (32)..(32): Xaa can be any naturally occurring amino acid
  misc_feature (34)..(36): Xaa can be any naturally occurring amino acid
  misc_feature (39)..(40): Xaa can be any naturally occurring amino acid
  misc_feature (42)..(43): Xaa can be any naturally occurring amino acid
  misc_feature (45)..(46): Xaa can be any naturally occurring amino acid
  misc_feature (48)..(48): Xaa can be any naturally occurring amino acid
  misc_feature (50)..(51): Xaa can be any naturally occurring amino acid
  misc_feature (53)..(61): Xaa can be any naturally occurring amino acid
  misc_feature (63)..(67): Xaa can be any naturally occurring amino acid
  misc_feature (70)..(70): Xaa can be any naturally occurring amino acid
  misc_feature (72)..(76): Xaa can be any naturally occurring amino acid
  misc_feature (79)..(80): Xaa can be any naturally occurring amino acid
  misc_feature (85)..(87): Xaa can be any naturally occurring amino acid
  misc_feature (89)..(92): Xaa can be any naturally occurring amino acid
  misc_feature (94)..(94): Xaa can be any naturally occurring amino acid
  misc_feature (96)..(96): Xaa can be any naturally occurring amino acid
  misc_feature (100)..(100): Xaa can be any naturally occurring amino acid
  misc_feature (112)..(112): Xaa can be any naturally occurring amino acid
  misc_feature (114)..(114): Xaa can be any naturally occurring amino acid
  Coding DNA Sequence Number=SeqID_6624
XXXIXKDXXXGXXXXXXXXXXXXRXXXXXXGXWXXXNCXXLXXIXXTXSXXTXXXXXXXXXSXXXXXLLXIXXXXXCGXXNEKVXXXIXXXXFXVXPKGXLRRVIPGQEPQXRXARAAGRRRPRGLRRRPSRRATRTGPWVVGGSGRVYSVLKCVGWARVRLLMSAGGDRCGGD

SEQ ID NO: 11100 - protein, 117 aa, Zea mays
  misc_feature (1)..(16): Xaa can be any naturally occurring amino acid
  misc_feature (18)..(29): Xaa can be any naturally occurring amino acid
  Coding DNA Sequence Number=SeqID_6626
XXXXXXXXXXXXXXXXPXXXXXXXXXXXXQSFLEELPGQFLQYMRPGGIKPQRAPGLVSAPVFPPQQCPEENVPELIHFPQLGIPQASRPGVALLLFIRFWVSFFFAPVGKYPCCRI

SEQ ID NO: 11101 - protein, 159 aa, Zea mays
  misc_feature (128)..(128): Xaa can be any naturally occurring amino acid
  Coding DNA Sequence Number=SeqID_6628
  Gene Ontology: Mol. function=magnesium ion binding; Cellular component=chloroplast thylakoid membrane; Biological process =photosynthesis, light harvesting
  Homolog annotation: Hit_ID=Q9XF87; Match level="QueryCoverage=100%, HitCoverage=59%, E-value=1e-78, Identity=91%"; Hit description=Lhcb2 protein
  Pfam annotation: Domain name=Chloroa_b-bind; Domain location=64-156; Score=48.5; E_value=2.3e-11; Accession=PF00504.12; Description =Chlorophyll A-B binding protein
  Subcellular localization annotation: CTP_CleavageSite=38; ConfidenceScore=5.33e-01
MATSAIPHSSFAGQTALKASNDLLRKGGASNGGREAMRRTAKSTPQSIWHGPDRPKNLGPFSENTPSYLTGEYPGDYGWDTAGLSGDPETFAKNRELEVIHSRWAMLGALGCTFPEILSKNGVKFGEXAVWLKAGSQIFSEGGLDYLGNPNLIHAQSIL

SEQ ID NO: 11102 - protein, 175 aa, Zea mays
  Coding DNA Sequence Number=SeqID_6629
  Gene Ontology: Mol. function=zinc ion binding; Cellular component =extracellular region
  Homolog annotation: Hit_ID=Q6H5X0; Match level="QueryCoverage=88%, HitCoverage=80%, E-value=2e-72, Identity=77%"; Hit description =Putative ripening-related protein 2 precursor
  Pfam annotation: Domain name=DPBB_1; Domain location=92-172; Score =16.0; E_value=0.00012; Accession=PF03330.8; Description=Rare lipoprotein A (RlpA)-like double-psi
GPPAAFLALAASHLLLTAAGAGCEPSGTLRPTQSHACQDCCKAGQAYPTYRCSPPVSSSTRAVMTLNDFDAGGDGGDPSECDGAFHRSSERVAALSTGWYSGGSRCGKSIRIRANGRSVLAKVVDECDTVSGCDREHAFQPPCRNNVVDASQAVWDALGITGEEVGEYNVTWADA

SEQ ID NO: 11103 - protein, 189 aa, Zea mays
  misc_feature (170)..(173): Xaa can be any naturally occurring amino acid
  misc_feature (175)..(179): Xaa can be any naturally occurring amino acid
  misc_feature (182)..(189): Xaa can be any naturally occurring amino acid
  Coding DNA Sequence Number=SeqID_6630
  Homolog annotation: Hit_ID=Q5VPC8; Match level="QueryCoverage=86%, HitCoverage=12%, E-value=2e-53, Identity=67%"; Hit description=WD-40 repeat family protein-like
RPPPLPGLLFNLITAGHGCEAAFAAAVLGDNALMEKAWQDTGMLAEAVLHAQAHGRPSLRSSVITWNKMLQKELDHMPTVKTDAAAAFLASLEDPKLTSLGETEKKPPIEILPPGMPPLSAPPIIIKKAAAKPGLPNAAQTPGAPMNQGTPMAQGTPMNQSTPMAQGTPXXXXAXXXXXPPXXXXXXXX

SEQ ID NO: 11104 - protein, 79 aa, Zea mays
  Coding DNA Sequence Number=SeqID_6631
VNWETPPRLSQTPRCVALLEPPILLLGIACRRGPIPTSCGTAAVSQLRREIVVDLGLPTVRNPHTHLPRSLCFTIGLIR

SEQ ID NO: 11105 - protein, 130 aa, Zea mays
  Coding DNA Sequence Number=SeqID_6633
  Gene Ontology: Mol. function=imidazoleglycerol-phosphate dehydratase activity; Cellular component=cytoplasm; Biological process=histidine biosynthetic process
  Homolog annotation: Hit_ID=A3AXG0; Match level="QueryCoverage=99%, HitCoverage=42%, E-value=1e-28, Identity=60%"; Hit description =Imidazoleglycerol-phosphate dehydratase
  Subcellular localization annotation: CTP_CleavageSite=53; ConfidenceScore=5.74e-01
MTTARLVSTSPTRLPSTSASPIPRTSLCVVGRAPAFSARALGFSLRLKPSPAMAAAGVGGNGPPTAHGDSIGSSRIGEVKRVTKETNVHVKINLDGTGVAECSTGIPFLDHMLDALFVQKGRLVVNVKAS

SEQ ID NO: 11106 - protein, 322 aa, Zea mays
  misc_feature (1)..(188): Xaa can be any naturally occurring amino acid
  misc_feature (193)..(193): Xaa can be any naturally occurring amino acid
  Coding DNA Sequence Number=SeqID_6634
XXXXXXXXXXXXXXXXXXXXXXXXXXXXXXXXXXXXXXXXXXXXXXXXXXXXXXXXXXXXXXXXXXXXXXXXXXXXXXXXXXXXXXXXXXXXXXXXXXXXXXXXXXXXXXXXXXXXXXXXXXXXXXXXXXXXXXXXXXXXXXXXXXXXXXXXXXXXXXXXXXXXXXXXXXXXXXXXXXXXXXXXXXXXEARDXALAERCDAPSSLAMVAAVPSRPRYLGSAGAGSPEAGGGDDVVLQLERDLGRVERDGTYLCEACCDGAGREASGEGDVALGAVVPWHDCWRIPSPQWWQPWQGPLQEICLTLCRSRLVHIDTPPSCLHLN

SEQ ID NO: 11107 - protein, 175 aa, Zea mays
  Coding DNA Sequence Number=SeqID_6635
  Homolog annotation: Hit_ID=Q2QSN8; Match level="QueryCoverage=85%, HitCoverage=33%, E-value=1e-25, Identity=46%"; Hit description =Expressed protein
  Pfam annotation: Domain name=DUF295; Domain location=86-146; Score =15.4; E_value=0.016; Accession=PF03478.8; Description=Protein of unknown function (DUF295)
MPFPEWSFFRDCMWEYPGSAVVRACYLVESRASLDMVVRLAAHDHAPTSSFKVFYMDPIDIIEPGDDDEEADEYLRTWNWFGENAWGGRMLFVGRGCSRSYEVREYPGLKDGIFFLDDRSFYDDEMMFGRVNERQYPCSDIGRWSPPEGPLPSHVELYFPERVPSYNSPPAWLLH

SEQ ID NO: 11108 - protein, 129 aa, Zea mays
  misc_feature (1)..(8): Xaa can be any naturally occurring amino acid
  misc_feature (12)..(16): Xaa can be any naturally occurring amino acid
  misc_feature (21)..(21): Xaa can be any naturally occurring amino acid
  Coding DNA Sequence Number=SeqID_6636
XXXXXXXXERPXXXXXFVPAXGGPLALFFLGLREAPPFPLVFVDGKGGGPSKIRSSWGAIRGGSFCSYARNGGAPKCWEPCLIPGDHPIPDGERMETSLMPSNHQSVGAPVFFFCPPTNGHNTGVFIGN

SEQ ID NO: 11109 - protein, 105 aa, Zea mays
  misc_feature (3)..(3): Xaa can be any naturally occurring amino acid
  misc_feature (5)..(7): Xaa can be any naturally occurring amino acid
  misc_feature (10)..(10): Xaa can be any naturally occurring amino acid
  misc_feature (12)..(12): Xaa can be any naturally occurring amino acid
  misc_feature (23)..(23): Xaa can be any naturally occurring amino acid
  misc_feature (46)..(46): Xaa can be any naturally occurring amino acid
  misc_feature (73)..(73): Xaa can be any naturally occurring amino acid
  misc_feature (75)..(75): Xaa can be any naturally occurring amino acid
  misc_feature (88)..(88): Xaa can be any naturally occurring amino acid
  misc_feature (100)..(101): Xaa can be any naturally occurring amino acid
  Coding DNA Sequence Number=SeqID_6638
  Subcellular localization annotation: CTP_CleavageSite=34; ConfidenceScore=5.19e-01
LVXNXXXGEXKXPPPPPPLVAAXLSRNLRFSFIRIHRREKTINKRXCWGTKIFSPVMSFCLTLSLTRRLENGXLXEVKGKGGYCGSLXMVNIGGQSIWLXXGVRG

SEQ ID NO: 11110 - protein, 146 aa, Zea mays
  misc_feature (1)..(32): Xaa can be any naturally occurring amino acid
  misc_feature (35)..(40): Xaa can be any naturally occurring amino acid
  misc_feature (42)..(59): Xaa can be any naturally occurring amino acid
  misc_feature (61)..(86): Xaa can be any naturally occurring amino acid
  misc_feature (88)..(88): Xaa can be any naturally occurring amino acid
  misc_feature (92)..(92): Xaa can be any naturally occurring amino acid
  misc_feature (94)..(95): Xaa can be any naturally occurring amino acid
  misc_feature (108)..(108): Xaa can be any naturally occurring amino acid
  misc_feature (121)..(121): Xaa can be any naturally occurring amino acid
  misc_feature (126)..(126): Xaa can be any naturally occurring amino acid
  misc_feature (131)..(131): Xaa can be any naturally occurring amino acid
  misc_feature (142)..(142): Xaa can be any naturally occurring amino acid
  Coding DNA Sequence Number=SeqID_6640
XXXXXXXXXXXXXXXXXXXXXXXXXXXXXXXXGGXXXXXXGXXXXXXXXXXXXXXXXXXGXXXXXXXXXXXXXXXXXXXXXXXXXXIXVPQXWXXVAEPHGCPGGGSXTRGQKVSPVIPPXPGRQXIFRTXRSPARAESGRXRSGR

SEQ ID NO: 11111 - protein, 130 aa, Zea mays
  misc_feature (114)..(114): Xaa can be any naturally occurring amino acid
  Coding DNA Sequence Number=SeqID_6642
  Gene Ontology: Cellular component=integral to membrane; Biological process=photosynthesis
  Homolog annotation: Hit_ID=Q9SUI5; Match level="QueryCoverage=100%, HitCoverage=100%, E-value=7e-51, Identity=81%"; Hit description =Photosystem I reaction center subunit psaK, chloroplast precursor
  Pfam annotation: Domain name=PSI_PSAK; Domain location=50-130; Score =89.7; E_value=9.2e-24; Accession=PF01241.9; Description=Photosystem I psaG  psaK
  Subcellular localization annotation: CTP_CleavageSite=32; ConfidenceScore=5.60e-01
MASTVMTTLPQFNGLRASKISAAPVQGLATVVPMRRKGNGALGAKCDFIGSSTNLIMVTSTTLMLVAGRFGLAPSANRKATAGLKLEARDSGLQTGDPAGVTLADPLPCGTGGXSIGVGVGLGPKNIGAI

SEQ ID NO: 11112 - protein, 192 aa, Zea mays
  misc_feature (132)..(132): Xaa can be any naturally occurring amino acid
  misc_feature (160)..(160): Xaa can be any naturally occurring amino acid
  Coding DNA Sequence Number=SeqID_6643
  Gene Ontology: Mol. function=enzyme inhibitor activity; Biological process=double fertilization forming a zygote and endosperm
  Homolog annotation: Hit_ID=Q8LE11; Match level="QueryCoverage=100%, HitCoverage=94%, E-value=1e-60, Identity=64%"; Hit description =Ripening-related protein-like
  Pfam annotation: Domain name=PMEI; Domain location=28-187; Score =156.4; E_value=8e-44; Accession=PF04043.6; Description=Plant invertasepectin methylesterase inhibitor
MAPPQKLFLAAIVSAVIVAATTGHGPNSTAEDIVHSSCVHASYPSLCVRTLSTYSGPTITNQRELAQAAVKISLSHAQAAAKKLAAVRETVGKKRVKAAVVDCVEMIGDSVADLSRTLGVLKHLHVSGGSAXSFRWQMSNAQTWASAALTDDDTCLDAFXGVEAKVNPDVKQWMTKVARVTSNALYMINQLD

SEQ ID NO: 11113 - protein, 217 aa, Zea mays
  misc_feature (98)..(98): Xaa can be any naturally occurring amino acid
  misc_feature (155)..(155): Xaa can be any naturally occurring amino acid
  misc_feature (197)..(197): Xaa can be any naturally occurring amino acid
  misc_feature (201)..(201): Xaa can be any naturally occurring amino acid
  Coding DNA Sequence Number=SeqID_6644
  Gene Ontology: Mol. function=enzyme inhibitor activity
  Homolog annotation: Hit_ID=Q8LE11; Match level="QueryCoverage=95%, HitCoverage=98%, E-value=2e-46, Identity=53%"; Hit description =Ripening-related protein-like
  Pfam annotation: Domain name=PMEI; Domain location=28-189; Score =48.3; E_value=2.8e-11; Accession=PF04043.6; Description=Plant invertasepectin methylesterase inhibitor
MAPPQKLFLAAIFAAVIVATTTGDGSNSAGEDIVHSSCMHASYPSLCIRTLSTYSGPTITNRRELAQAAVKISLSHAKAAAKKLAAVRETVGKKRQKXAAVVDCVEMIGDSVDELSRTLGALKPLRDLGGGPVKRVSGWQMSNAQNVGESAALDXRTTRCPRWGFQGQSTGETPGRGGGECMTKGGRGLRATRLYMXHQLXDKRGKPHVERSLEGYN

SEQ ID NO: 11114 - protein, 186 aa, Zea mays
  misc_feature (113)..(113): Xaa can be any naturally occurring amino acid
  misc_feature (121)..(121): Xaa can be any naturally occurring amino acid
  misc_feature (126)..(129): Xaa can be any naturally occurring amino acid
  misc_feature (135)..(136): Xaa can be any naturally occurring amino acid
  misc_feature (141)..(142): Xaa can be any naturally occurring amino acid
  misc_feature (145)..(146): Xaa can be any naturally occurring amino acid
  misc_feature (148)..(148): Xaa can be any naturally occurring amino acid
  misc_feature (150)..(155): Xaa can be any naturally occurring amino acid
  misc_feature (158)..(160): Xaa can be any naturally occurring amino acid
  misc_feature (165)..(165): Xaa can be any naturally occurring amino acid
  misc_feature (167)..(167): Xaa can be any naturally occurring amino acid
  misc_feature (169)..(169): Xaa can be any naturally occurring amino acid
  misc_feature (171)..(172): Xaa can be any naturally occurring amino acid
  misc_feature (174)..(176): Xaa can be any naturally occurring amino acid
  misc_feature (178)..(178): Xaa can be any naturally occurring amino acid
  misc_feature (180)..(180): Xaa can be any naturally occurring amino acid
  misc_feature (182)..(182): Xaa can be any naturally occurring amino acid
  Coding DNA Sequence Number=SeqID_6645
  Subcellular localization annotation: CTP_CleavageSite=57; ConfidenceScore=5.63e-01
PPPPPDADRTPLRIHHPSAMAGRTVPASLPSFSLTPDSLAAPLSWISSWTLPRPTVRRSRRRTLRPGTEPVPTRHRPPPPRAPPRTGYYVIRTNNGYMLRERYKLCQCFLLSXFATLCAMXSISHXXXXVIAACXXKKLTXXGPXXNXPXXXXXXASXXXSLLFXPXRXHXXYXXXLXHXLXFPTP

SEQ ID NO: 11115 - protein, 151 aa, Zea mays
  Coding DNA Sequence Number=SeqID_6647
  Gene Ontology: Mol. function=structural constituent of ribosome; Cellular component=ribonucleoprotein complex; Biological process =translation
  Homolog annotation: Hit_ID=P59223; Match level="QueryCoverage=100%, HitCoverage=100%, E-value=2e-77, Identity=96%"; Hit description=40S ribosomal protein S13-1
  Pfam annotation: Domain name=Ribosomal_S13_N; Domain location=1-60; Score=136.2; E_value=9.6e-38; Accession=PF08069.3; Description =Ribosomal S13S15 N-terminal domain
  Pfam annotation: Domain name=Ribosomal_S15; Domain location=65-152; Score=106.8; E_value=6.5e-29; Accession=PF00312.12; Description =Ribosomal protein S15
  Pfam module annotation: Pfam domain module=Ribosomal_S13_N::Ribosomal_ S15; Domain location=1-60::65-152
MGRMHSRGKGISASALPYKRSPPTWLKTTALDVDESICKFAKKGLTPSQIGVILRDSHGIPQVKSVTGNKILRILKAHGLAPEIPEDLYHLIKKAVAIRKHLERNRKDKDSKFRLILVESRIHRLARYYKKTKKLPPVWKYESTTASTLGA

SEQ ID NO: 11116 - protein, 127 aa, Zea mays
  misc_feature (123)..(123): Xaa can be any naturally occurring amino acid
  Coding DNA Sequence Number=SeqID_6648
  Gene Ontology: Mol. function=structural constituent of ribosome; Cellular component=ribonucleoprotein complex; Biological process =translation
  Homolog annotation: Hit_ID=P59223; Match level="QueryCoverage=100%, HitCoverage=84%, E-value=6e-63, Identity=95%"; Hit description=40S ribosomal protein S13-1
  Pfam annotation: Domain name=Ribosomal_S13_N; Domain location=1-60; Score=135.5; E_value=1.5e-37; Accession=PF08069.3; Description =Ribosomal S13S15 N-terminal domain
  Pfam annotation: Domain name=Ribosomal_S15; Domain location=65-127; Score=40.4; E_value=6.6e-09; Accession=PF00312.12; Description =Ribosomal protein S15
  Pfam module annotation: Pfam domain module=Ribosomal_S13_N::Ribosomal_ S15; Domain location=1-60::65-127
MGRLHSKGKGISASALPYKRSPPSWLKTTSQDVDESICKFAKKGLTPSQIGVILRDSHGIPQVKSVTGNKILRILKAHGLAPEIPEDLYHLIKKAVAIRKHLERNRKDKDSKFRLILVESRIXRLAR

SEQ ID NO: 11117 - protein, 141 aa, Zea mays
  misc_feature (120)..(120): Xaa can be any naturally occurring amino acid
  misc_feature (131)..(131): Xaa can be any naturally occurring amino acid
  Coding DNA Sequence Number=SeqID_6649
  Gene Ontology: Mol. function=ribulose-bisphosphate carboxylase activity; Cellular component=chloroplast ribulose bisphosphate carboxylase complex; Biological process=carbon utilization by fixation of carbon dioxide
  Homolog annotation: Hit_ID=P10796; Match level="QueryCoverage=87%, HitCoverage=67%, E-value=1e-60, Identity=91%"; Hit description =Ribulose bisphosphate carboxylase small chain 1B, chloroplast precursor
  Pfam annotation: Domain name=RuBisCO_small; Domain location=66-142; Score=58.5; E_value=2.2e-14; Accession=PF00101.10; Description =Ribulose bisphosphate carboxylase, small chain
  Subcellular localization annotation: CTP_CleavageSite=54; ConfidenceScore=5.83e-01
MASSMLSSAAVVTSPAQATMVAPFTGLKSSSAFPVTRKANNDITSIVSNGGRVSCMKVWPPVGKKKFETLSYLPDLTEVELGKEVDYLLRNKWIPCVEFELEHGFVYREHGTTPGYYDGXRYGTMWKLPLXFGGTDSASRV

SEQ ID NO: 11118 - protein, 153 aa, Zea mays
  misc_feature (21)..(21): Xaa can be any naturally occurring amino acid
  misc_feature (23)..(23): Xaa can be any naturally occurring amino acid
  misc_feature (75)..(75): Xaa can be any naturally occurring amino acid
  misc_feature (78)..(78): Xaa can be any naturally occurring amino acid
  misc_feature (81)..(81): Xaa can be any naturally occurring amino acid
  misc_feature (94)..(94): Xaa can be any naturally occurring amino acid
  misc_feature (98)..(98): Xaa can be any naturally occurring amino acid
  misc_feature (105)..(105): Xaa can be any naturally occurring amino acid
  misc_feature (108)..(108): Xaa can be any naturally occurring amino acid
  misc_feature (118)..(118): Xaa can be any naturally occurring amino acid
  Coding DNA Sequence Number=SeqID_6650
  Gene Ontology: Mol. function=ribulose-bisphosphate carboxylase activity; Cellular component=chloroplast ribulose bisphosphate carboxylase complex; Biological process=carbon utilization by fixation of carbon dioxide
  Homolog annotation: Hit_ID=P10796; Match level="QueryCoverage=72%, HitCoverage=59%, E-value=8e-45, Identity=81%"; Hit description =Ribulose bisphosphate carboxylase small chain 1B, chloroplast precursor
  Pfam annotation: Domain name=RuBisCO_small; Domain location=67-139; Score=2.8; E_value=1.1e-05; Accession=PF00101.10; Description =Ribulose bisphosphate carboxylase, small chain
  Subcellular localization annotation: CTP_CleavageSite=55; ConfidenceScore=5.89e-01
MASSMLSSAAVVTSPAQATMXRXPFTGLKSSSAFPVTRKANNDITSIVSNGGRVSCMKVWPPVGKKKFETLSYPXLTXTEXELGKEVDYLLRHXWIPXCVEFELXHGXVYREHGSTPXYYDGRYWNNGGSFPLVRMALPLPGLKGSRGQNGVP

SEQ ID NO: 11119 - protein, 169 aa, Zea mays
  misc_feature (140)..(140): Xaa can be any naturally occurring amino acid
  misc_feature (168)..(168): Xaa can be any naturally occurring amino acid
  Coding DNA Sequence Number=SeqID_6651
  Gene Ontology: Mol. function=transporter activity; Cellular component= integral to membrane; Biological process=transport
  Homolog annotation: Hit_ID=P25818; Match level="QueryCoverage=98%, HitCoverage=66%, E-value=8e-79, Identity=89%"; Hit description =Aquaporin TIP1-1
  Pfam annotation: Domain name=MIP; Domain location=13-167; Score =150.2; E_value=5.5e-42; Accession=PF00230.10; Description=Major intrinsic protein
MPIRNIAVGRPDEATRPDALKAALAEFISTMIFVFAGSGSGMAFNKLTENGATTPAGLVAASLAHAFGLFVAVSVGANISGGHVNPAVTFGAFVGGNITLLRGILYWIAQLLGSVVACLLLKFATGGLVVPAFGLSARGXVSNALVFEIVMTFRLVYTVYATRRDPKXR

SEQ ID NO: 11120 - protein, 290 aa, Zea mays
  misc_feature (1)..(75): Xaa can be any naturally occurring amino acid
  misc_feature (77)..(81): Xaa can be any naturally occurring amino acid
  misc_feature (84)..(86): Xaa can be any naturally occurring amino acid
  misc_feature (88)..(88): Xaa can be any naturally occurring amino acid
  misc_feature (90)..(125): Xaa can be any naturally occurring amino acid
  misc_feature (127)..(132): Xaa can be any naturally occurring amino acid
  Coding DNA Sequence Number=SeqID_6652
XXXXXXXXXXXXXXXXXXXXXXXXXXXXXXXXXXXXXXXXXXXXXXXXXXXXXXXXXXXXXXXXXXXXXXXXXXXGXXXXXGGXXXGXQXXXXXXXXXXXXXXXXXXXXXXXXXXXXXXXXXXXXAXXXXXXGNFFLPSQVSGIIKEPGGGGVFFFSLHPGGSWGLSGFCCPTQKPSFGRAPFSPPFVFGRFFLGPLQARVFQRFTPLESFLLQPRSSGGALFFSIPREVLVFFPGTKCYFGGGKKKELPCPFFVKKKKKKKKKKKKKKKKKKKKKKKKKKKKKNSRGGP

SEQ ID NO: 11121 - protein, 150 aa, Zea mays
  Coding DNA Sequence Number=SeqID_6654
  Homolog annotation: Hit_ID=A5EUA7; Match level="QueryCoverage=89%, HitCoverage=64%, E-value=6e-26, Identity=47%"; Hit description =Putative uncharacterized protein
  Pfam annotation: Domain name=DUF1109; Domain location=2-142; Score =30.4; E_value=1.7e-13; Accession=PF06532.2; Description=Protein of unknown function (DUF1109)
MKTDDLVAMLSASVEPVGRRLVVRTICIAVVAASVFALGIILIGPGIRPDLTTARAFTFLLLKLVFTVVIVGVALIYLTRLARPGGEQKTPSIMAAMPFIVIVLLAAISLGFAPRSHWDAMIVGDQWLECLFSIPITAISGWCDWHRRVV

SEQ ID NO: 11122 - protein, 116 aa, Zea mays
  misc_feature (2)..(9): Xaa can be any naturally occurring amino acid
  misc_feature (14)..(33): Xaa can be any naturally occurring amino acid
  Coding DNA Sequence Number=SeqID_6655
  Homolog annotation: Hit_ID=A2WN70; Match level="QueryCoverage=71%, HitCoverage=34%, E-value=4e-18, Identity=61%"; Hit description =Putative uncharacterized protein
IXXXXXXXXKIQVXXXXXXXXXXXXXXXXXXXXSMAQHVCFQVKEKTEFFGTEFSETDSEYFAALKEGILGVQVGGSSINERMEEVRFEIFGLEAETICSKWSEVEEAFPGNLFIK

SEQ ID NO: 11123 - protein, 116 aa, Zea mays
  misc_feature (1)..(2): Xaa can be any naturally occurring amino acid
  misc_feature (7)..(35): Xaa can be any naturally occurring amino acid
  misc_feature (115)..(116): Xaa can be any naturally occurring amino acid
  Coding DNA Sequence Number=SeqID_6656
XXAPPRXXXXXXXXXXXXXXXXXXXXXXXXXXXXXETGGFPFKPPLQTPWLVPLQRVGIPVFKKTFRGGGHSSYNPLEKAGETMEGGLPFPLRPVYLKKRFPWGALGALLKPTTXX

SEQ ID NO: 11124 - protein, 97 aa, Zea mays
  Coding DNA Sequence Number=SeqID_6658
SLVATRRADDCAAVAATLLASCPDLLRPLGNRRPQPGQTGSFARMPWCTIDESDPGVFTELIQQMQVEGVQVSFQGSVRPLSELFVFSSFELLLYLQ

SEQ ID NO: 11125 - protein, 104 aa, Zea mays
  Coding DNA Sequence Number=SeqID_6660
FFFFFYSTQTNFQIRKEETQITGSTAVYKQAIIRVLHFRPRSPRPPAAGTRPWPRAAAPAGRGRRRRRPLPQTLARSRAGAGVDGRGSWRRGGGEENEEFSEGR

SEQ ID NO: 11126 - protein, 111 aa, Zea mays
  Coding DNA Sequence Number=SeqID_6662
  Gene Ontology: Mol. function=selenium binding; Cellular component =endoplasmic reticulum lumen; Biological process='de novo' posttranslational protein folding
  Homolog annotation: Hit_ID=A9PBN4; Match level="QueryCoverage=98%, HitCoverage=65%, E-value=3e-44, Identity=74%"; Hit description =Putative uncharacterized protein
  Pfam annotation: Domain name=Sep15_SelM; Domain location=30-106; Score=144.5; E_value=3e-40; Accession=PF08806.1; Description =Sep15SelM redox domain
EFVKDQELVDDCRKCCTEDSDDSISKLVYSGAIIEVCMRKLVFYPEVVGFLEEDKDAFPYVESRYAYGSPPKLIMLDDKGEQKETIRIDNWKREHIRQFLTEKVKPAKSET

SEQ ID NO: 11127 - protein, 277 aa, Zea mays
  misc_feature (1)..(22): Xaa can be any naturally occurring amino acid
  misc_feature (24)..(25): Xaa can be any naturally occurring amino acid
  misc_feature (29)..(30): Xaa can be any naturally occurring amino acid
  misc_feature (216)..(229): Xaa can be any naturally occurring amino acid
  misc_feature (231)..(238): Xaa can be any naturally occurring amino acid
  misc_feature (240)..(277): Xaa can be any naturally occurring amino acid
  Coding DNA Sequence Number=SeqID_6663
  Subcellular localization annotation: CTP_CleavageSite=78; ConfidenceScore=5.55e-01
XXXXXXXXXXXXXXXXXXXXXXGXXAPPXXFFFFFFLFFFFFFFFFFFFFFFFFFFLGKERYPGLPNPLKRPKIPGKLGEIFQNKFTFYKTQKGLVGDKKEKRPRINPIGGNPLFNLDWEKAKNKRDDTQGSNGIWEKPNRRGNPGRFFPPKNWCNLGKGCWGNPQWRVGGLREGPLAIDPLKRFPPREGVTLVKKNGGLIFKMDKNNPLSLGGGXXXXXXXXXXXXXXGXXXXXXXXFXXXXXXXXXXXXXXXXXXXXXXXXXXXXXXXXXXXXXX

SEQ ID NO: 11128 - protein, 199 aa, Zea mays
  Coding DNA Sequence Number=SeqID_6664
  Gene Ontology: Mol. function=phosphatidate cytidylyltransferase activity; Cellular component=integral to membrane; Biological process=phospholipid biosynthetic process
  Homolog annotation: Hit_ID=Q67ZM7; Match level="QueryCoverage=77%, HitCoverage=50%, E-value=7e-61, Identity=75%"; Hit description =Probable phytol kinase 2, chloroplast precursor
  Subcellular localization annotation: CTP_CleavageSite=84; ConfidenceScore=5.95e-01
TKSFSLILSSPLIVDSPSSSSSSSSSSSSSSSLAVPCFFSPTSLKPSSASLPATYFHRYSHPRSLTSSLAALMSPENSVLSDVCATGISGVVAFSCLGFWGEIGKRGIFDQKLIRKLVHINIGLVFILCWPLFSSGLQGALFASLIPGLNIIRMLLLGLGVYQDEGTIKSMSRHGDRRELLKGPLYYALSIHRDDSSLE

SEQ ID NO: 11129 - protein, 208 aa, Zea mays
  misc_feature (186)..(186): Xaa can be any naturally occurring amino acid
  Coding DNA Sequence Number=SeqID_6665
  Gene Ontology: Mol. function=nucleoside-triphosphatase activity; Cellular component=chloroplast; Biological process=chlorophyll biosynthetic process
  Homolog annotation: Hit_ID=P16127; Match level="QueryCoverage=84%, HitCoverage=41%, E-value=6e-82, Identity=88%"; Hit description =Magnesium-chelatase subunit chlI, chloroplast precursor
  Subcellular localization annotation: CTP_CleavageSite=59; ConfidenceScore=5.81e-01
MASLLGTSSIRASPSLSSSSSSTPSISPICFRPGRICGRASNAGIQIRPKKNRSRHHVSVMNVATEINSTEQQVGKFDSKKSARPVYPFAAIVGQDEMKLCLLLNVIDPKIGGVMIMGDRGTEKSTTVRSLVDLLPEITVVAGDPYNSDPLDPEFMGVEVRERVERGEQVPVIATKINMVDLPLGXTEDRVCGTIDIEKALTEGASFR

SEQ ID NO: 11130 - protein, 152 aa, Zea mays
  misc_feature (122)..(122): Xaa can be any naturally occurring amino acid
  Coding DNA Sequence Number=SeqID_528
  Gene Ontology: Mol. function=nucleoside-triphosphatase activity; Cellular component=integral to membrane; Biological process=transport
  Homolog annotation: Hit_ID=A2ZPW4; Match level="QueryCoverage=53%, HitCoverage=5%, E-value=3e-29, Identity=75%"; Hit description =Putative uncharacterized protein
MHTSSLLRARNLSRVLGHHIATILLLFLQHNGSINAFHLWFLYLRHYRCFVDHHHFITPFINPRLRFKHRMHWANPVSWTLYGLLTSQFGDLDQPLLMADGVTSTTVVAFLEEHFGFRHDFXGAVAAMVAGFCVLFAVVFALAIKYLNFQRR

SEQ ID NO: 11131 - protein, 143 aa, Zea mays
  Coding DNA Sequence Number=SeqID_529
  Subcellular localization annotation: CTP_CleavageSite=55; ConfidenceScore=5.33e-01
KIGAPRPSCSPTHESPSHRRHSEVASRANPSRRERERLSPLPTFTSVGARVLETSPSSVGDRMDRVPLLPRSDRQSGELEFLTGGGSAPPQRRACGRGPRHRRYSTSKPQRIQGFSRWRLLSRSSLKEKNMWFKRSRLTRSST

SEQ ID NO: 11132 - protein, 188 aa, Zea mays
  misc_feature (184)..(184): Xaa can be any naturally occurring amino acid
  Coding DNA Sequence Number=SeqID_531
  Subcellular localization annotation: CTP_CleavageSite=27; ConfidenceScore=5.31e-01
RFSVGTLSRRCRPLPLVSPLALELSLSVSSRRELGFGARTSSAGPGAPPGPRSRSPCRSPSTPARPPSPPGGCRSRTASRGPCRVASRPPRQDRSVSVRRCNSSSVCLVAPGNLFCVCSCGSCVLVSLAIFPHFCFRFSSRRENNFGAHNFFTLSLSCLLNLGISFFWLLQMNLSFPKAMSGGXRGCR

SEQ ID NO: 11133 - protein, 173 aa, Zea mays
  misc_feature (114)..(114): Xaa can be any naturally occurring amino acid
  misc_feature (125)..(125): Xaa can be any naturally occurring amino acid
  Coding DNA Sequence Number=SeqID_533
  Gene Ontology: Mol. function=aspartic-type endopeptidase activity; Biological process=DNA integration
  Homolog annotation: Hit_ID=O24587; Match level="QueryCoverage=63%, HitCoverage=10%, E-value=8e-37, Identity=70%"; Hit description=Pol
PSRCAQPLRVRYRCFGLRITRTSDHCLAHVGMKNLHKPFRVEHILGLMNVCFEKDRSCAVCQVGKQVGGGHHPNNVMTISRALELPHMDLLGLVAFLSIGESKYGLVIVDDYSXFTCVFFLHDKXTQETLQRFLKPSSPPPHSCRRCRLLPHKNHRPLPLPCVVASPSLSLGP

SEQ ID NO: 11134 - protein, 84 aa, Zea mays
  Coding DNA Sequence Number=SeqID_534
SQTNTPLIFPSMRGNVTGVFHGPEPPGLGPGEALHQLPHLRQQPSGSITTSPSPPPSSERSESRRDLAAAATAEWNGWEVSLCS

SEQ ID NO: 11135 - protein, 129 aa, Zea mays
  Coding DNA Sequence Number=SeqID_536
RRLERGHHRSPRLVAATSLLLTSCGRCAASHHDCPVSPFGLLTASSSPSHCCWRHQLLTIEQGATPRSSRRPAVGRRRRSAIHLQASRSRRSSFDDQVIKLSEFYEVEDPEHLFGEGKCPLTHYVPFTL

SEQ ID NO: 11136 - protein, 137 aa, Zea mays
  Coding DNA Sequence Number=SeqID_538
GNQEQQITCIIRIKTAIAKRSQASPTALMVGEAMGVTLRPLLICPVFSTPWLTNSMIASICSLVSGLEKRRAILGDADAWDRSEAMLLSRPLSSIGLEFPSAATGVLLPGRCRVFVTLVQSNPIHQPQTLCISLIFS

SEQ ID NO: 11137 - protein, 158 aa, Zea mays
  misc_feature (29)..(29): Xaa can be any naturally occurring amino acid
  misc_feature (140)..(140): Xaa can be any naturally occurring amino acid
  Coding DNA Sequence Number=SeqID_540
  Homolog annotation: Hit_ID=A2YZX5; Match level="QueryCoverage=83%, HitCoverage=11%, E-value=1e-43, Identity=65%"; Hit description =Putative uncharacterized protein
  Pfam annotation: Domain name=DUF220; Domain location=1-87; Score =83.2; E_value=8.3e-22; Accession=PF02713.5; Description=Domain of unknown function DUF220
MQYLLQVKFRQGRARFMRKFEGCWTIEPXFVDKELCLPLNPHSLEEYESCTSGKGRVGSAITLDQLIEPALLPPPPISWYLRGITTRTTEMLVNDLIAETARLRTISNNASAKQGTEETCDANIGDPARECGDIKERWRXRRKSGRHGSSLRLTSLFL

SEQ ID NO: 11138 - protein, 269 aa, Zea mays
  misc_feature (17)..(17): Xaa can be any naturally occurring amino acid
  misc_feature (22)..(22): Xaa can be any naturally occurring amino acid
  misc_feature (27)..(29): Xaa can be any naturally occurring amino acid
  misc_feature (51)..(51): Xaa can be any naturally occurring amino acid
  misc_feature (54)..(54): Xaa can be any naturally occurring amino acid
  misc_feature (75)..(75): Xaa can be any naturally occurring amino acid
  misc_feature (80)..(80): Xaa can be any naturally occurring amino acid
  misc_feature (89)..(89): Xaa can be any naturally occurring amino acid
  misc_feature (92)..(92): Xaa can be any naturally occurring amino acid
  misc_feature (114)..(114): Xaa can be any naturally occurring amino acid
  Coding DNA Sequence Number=SeqID_541
VSCLQPWVNRVQGRCSXRGCAXRWQAXXXRDNGGKGFLMSCGAPARAFDGXGHXCSGEAPRTADRTTATSSDGKXEYGAXREREESVRXRTXEEERERVRAFYRGRGERNGDRXFMAAIDTALKFHLRTEKRMHRSFLKTDDTVGWAGPFGLSCHGCWLLRLRAGARRVVTGRSDLGSRGRLGSWARAPWAVGAGARARARSAPGGDALGGVRSGWGGLDGALALGRAGRGGEEQQHTARTTEERLELGDEEAPDVWVVFELAAILDRP

SEQ ID NO: 11139 - protein, 109 aa, Zea mays
  Coding DNA Sequence Number=SeqID_543
  Subcellular localization annotation: CTP_CleavageSite=64; ConfidenceScore=5.24e-01
RHTQQRATRCRAVLRWPSSPVHRGGLPWCSRRSLIPRRKSPGRCARRGFGGGLMALTIAFHKCRLRHDSDENLICRGSGESEHHRRKKRHITTGQGHKEVKRWAVLTET

SEQ ID NO: 11140 - protein, 104 aa, Zea mays
  misc_feature (50)..(50): Xaa can be any naturally occurring amino acid
  misc_feature (62)..(62): Xaa can be any naturally occurring amino acid
  Coding DNA Sequence Number=SeqID_6666
  Gene Ontology: Mol. function=aspartic-type endopeptidase activity; Cellular component=chromatin; Biological process=DNA integration
  Homolog annotation: Hit_ID=Q8W0X9; Match level="QueryCoverage=88%, HitCoverage=6%, E-value=4e-14, Identity=44%"; Hit description =Putative copia-like retrotransposon Hopscotch polyprotein
KTRARTINVWLFLTNTKKSNLSVSEYFEQMKSLGDEMSIVGRSLEDKKNXVKYILIDLNDDXTPTSLCYYTRKKPIIVSELFDQLLNSETGLISNSRFVNATSR

SEQ ID NO: 11141 - protein, 125 aa, Zea mays
  misc_feature (1)..(16): Xaa can be any naturally occurring amino acid
  Coding DNA Sequence Number=SeqID_6667
  Gene Ontology: Cellular component=intracellular; Biological process =cell proliferation
  Homolog annotation: Hit_ID=Q851S7; Match level="QueryCoverage=86%, HitCoverage=18%, E-value=1e-11, Identity=40%"; Hit description =Pescadillo-like protein
XXXXXXXXXXXXXXXXKKRKLGILEKQFLDELKKEIEGVAFFCLSNQGAGKSPNAKDDSPSDRGGGARYPGGGEEDDFGTAFKSRKQGGLFKALKMGQEKKKGEVGLLQKGKKNAGFGAFSQKRP

SEQ ID NO: 11142 - protein, 129 aa, Zea mays
  misc_feature (13)..(13): Xaa can be any naturally occurring amino acid
  misc_feature (121)..(121): Xaa can be any naturally occurring amino acid
  Coding DNA Sequence Number=SeqID_6668
LLLSGKDIEVLGXHLEERSGPHLALCSSSSRTELSGYRPPLQLKTWKRVQKMSQPLGAVWLVDSARCPSLFLSSYLFFWFSILNQSACPNASLCGGVAGVGTHRQCGRNMRPPTVRSWRFXSRNDRRRF

SEQ ID NO: 11143 - protein, 206 aa, Zea mays
  misc_feature (35)..(35): Xaa can be any naturally occurring amino acid
  misc_feature (58)..(58): Xaa can be any naturally occurring amino acid
  misc_feature (61)..(62): Xaa can be any naturally occurring amino acid
  misc_feature (66)..(66): Xaa can be any naturally occurring amino acid
  misc_feature (71)..(71): Xaa can be any naturally occurring amino acid
  misc_feature (73)..(73): Xaa can be any naturally occurring amino acid
  misc_feature (77)..(77): Xaa can be any naturally occurring amino acid
  misc_feature (79)..(79): Xaa can be any naturally occurring amino acid
  misc_feature (84)..(84): Xaa can be any naturally occurring amino acid
  misc_feature (86)..(89): Xaa can be any naturally occurring amino acid
  misc_feature (93)..(94): Xaa can be any naturally occurring amino acid
  misc_feature (96)..(96): Xaa can be any naturally occurring amino acid
  misc_feature (99)..(100): Xaa can be any naturally occurring amino acid
  misc_feature (104)..(104): Xaa can be any naturally occurring amino acid
  misc_feature (108)..(114): Xaa can be any naturally occurring amino acid
  misc_feature (116)..(116): Xaa can be any naturally occurring amino acid
  misc_feature (118)..(120): Xaa can be any naturally occurring amino acid
  misc_feature (123)..(124): Xaa can be any naturally occurring amino acid
  misc_feature (126)..(129): Xaa can be any naturally occurring amino acid
  misc_feature (131)..(136): Xaa can be any naturally occurring amino acid
  misc_feature (139)..(142): Xaa can be any naturally occurring amino acid
  misc_feature (144)..(144): Xaa can be any naturally occurring amino acid
  misc_feature (146)..(147): Xaa can be any naturally occurring amino acid
  misc_feature (149)..(151): Xaa can be any naturally occurring amino acid
  misc_feature (153)..(154): Xaa can be any naturally occurring amino acid
  misc_feature (156)..(158): Xaa can be any naturally occurring amino acid
  misc_feature (161)..(161): Xaa can be any naturally occurring amino acid
  misc_feature (163)..(164): Xaa can be any naturally occurring amino acid
  misc_feature (168)..(174): Xaa can be any naturally occurring amino acid
  misc_feature (176)..(178): Xaa can be any naturally occurring amino acid
  misc_feature (180)..(181): Xaa can be any naturally occurring amino acid
  misc_feature (183)..(185): Xaa can be any naturally occurring amino acid
  misc_feature (187)..(192): Xaa can be any naturally occurring amino acid
  misc_feature (195)..(196): Xaa can be any naturally occurring amino acid
  misc_feature (198)..(199): Xaa can be any naturally occurring amino acid
  misc_feature (201)..(206): Xaa can be any naturally occurring amino acid
  Coding DNA Sequence Number=SeqID_6670
SLSLLSLFFSAVSIKSTEFEFLFRFRRWGHSPDPXELTELAHPEFSEEFSQTDDADEXTCXXSYGXELSHXFXFLFXSXNLTKXNXXXXPQFXXAXPPXXGGGXAINXXXXXXXPXFXXXSLXXHXXXXLXXXXXXGGXXXXHXCXXLXXXPXXLXXXISXEXXNTRXXXXXXXTXXXPXXHXXXVXXXXXXAPXXLXXLXXXXXX

SEQ ID NO: 11144 - protein, 183 aa, Zea mays
  misc_feature (69)..(69): Xaa can be any naturally occurring amino acid
  misc_feature (77)..(77): Xaa can be any naturally occurring amino acid
  misc_feature (109)..(109): Xaa can be any naturally occurring amino acid
  misc_feature (116)..(116): Xaa can be any naturally occurring amino acid
  misc_feature (120)..(120): Xaa can be any naturally occurring amino acid
  misc_feature (122)..(122): Xaa can be any naturally occurring amino acid
  misc_feature (125)..(125): Xaa can be any naturally occurring amino acid
  misc_feature (128)..(128): Xaa can be any naturally occurring amino acid
  misc_feature (136)..(136): Xaa can be any naturally occurring amino acid
  misc_feature (147)..(147): Xaa can be any naturally occurring amino acid
  misc_feature (149)..(149): Xaa can be any naturally occurring amino acid
  misc_feature (153)..(153): Xaa can be any naturally occurring amino acid
  misc_feature (157)..(158): Xaa can be any naturally occurring amino acid
  misc_feature (160)..(162): Xaa can be any naturally occurring amino acid
  misc_feature (167)..(168): Xaa can be any naturally occurring amino acid
  misc_feature (170)..(173): Xaa can be any naturally occurring amino acid
  misc_feature (178)..(178): Xaa can be any naturally occurring amino acid
  misc_feature (181)..(181): Xaa can be any naturally occurring amino acid
  Coding DNA Sequence Number=SeqID_6672
  Subcellular localization annotation: CTP_CleavageSite=46; ConfidenceScore=5.71e-01
PPPPPPRRLAAGQLTTCPANHVASATAVRYLSSSTPSLLRFPLRPRASAFSKRGIALHLSSNFQKQPPXPDPFPLFXILTRKGEGANFLLFSFPLGKNDSKGPNFPQKXGIWKRPXLKIXGXWKXQRXPGFFKRGXKREKKNFFFGXPXLFFXPPGXXPXXXPKNFXXKXXXXLGGPXPPXNF

SEQ ID NO: 11145 - protein, 163 aa, Zea mays
  misc_feature (61)..(61): Xaa can be any naturally occurring amino acid
  misc_feature (95)..(96): Xaa can be any naturally occurring amino acid
  misc_feature (117)..(117): Xaa can be any naturally occurring amino acid
  misc_feature (121)..(123): Xaa can be any naturally occurring amino acid
  misc_feature (125)..(133): Xaa can be any naturally occurring amino acid
  misc_feature (136)..(138): Xaa can be any naturally occurring amino acid
  misc_feature (141)..(163): Xaa can be any naturally occurring amino acid
  Coding DNA Sequence Number=SeqID_6674
SRRAADNALYRPRPQAPARRRGAAATMAVGKNKRISKGKKGGKKKTVDPFLLRRIGMTSGXPSGWFSVRKHREDSRIQGHRVTRIGLPEGLKHEXXFWRVWPSLIFRGDEDQAYREXQAPXXXMXXXXXXXXXFWXXXFYXXXXXXXXXXXXXXXXXXXXXXX

SEQ ID NO: 11146 - protein, 145 aa, Zea mays
  misc_feature (37)..(37): Xaa can be any naturally occurring amino acid
  misc_feature (50)..(50): Xaa can be any naturally occurring amino acid
  misc_feature (79)..(79): Xaa can be any naturally occurring amino acid
  Coding DNA Sequence Number=SeqID_6676
  Gene Ontology: Mol. function=magnesium ion binding; Cellular component=integral to membrane; Biological process=photosynthesis, light harvesting
  Homolog annotation: Hit_ID=P04778; Match level="QueryCoverage=35%, HitCoverage=17%, E-value=1e-10, Identity=74%"; Hit description =Chlorophyll a-b binding protein 2, chloroplast precursor
  Subcellular localization annotation: CTP_CleavageSite=36; ConfidenceScore=5.57e-01
MAASTMALSSAAFAGKAVKTSPAASDVLGKRRVTMRXKTVAKPKGPSGSXPWYGAEKSQGLWGPFPPGGAPRVYLSGEXPGDYGGGTPPGLSARFPKTFPRENRGLKEFSPRGGGAMCPEAPRLRLPPSCWPGKGSPGSEKAGLV

SEQ ID NO: 11147 - protein, 145 aa, Zea mays; identical to SEQ ID NO: 11146
  misc_feature (37)..(37): Xaa can be any naturally occurring amino acid
  misc_feature (50)..(50): Xaa can be any naturally occurring amino acid
  misc_feature (79)..(79): Xaa can be any naturally occurring amino acid
  Coding DNA Sequence Number=SeqID_6677
  Gene Ontology: Mol. function=magnesium ion binding; Cellular component=integral to membrane; Biological process=photosynthesis, light harvesting
  Homolog annotation: Hit_ID=P04778; Match level="QueryCoverage=35%, HitCoverage=17%, E-value=1e-10, Identity=74%"; Hit description =Chlorophyll a-b binding protein 2, chloroplast precursor
  Subcellular localization annotation: CTP_CleavageSite=36; ConfidenceScore=5.57e-01

SEQ ID NO: 11148 - protein, 99 aa, Zea mays
  misc_feature (7)..(7): Xaa can be any naturally occurring amino acid
  Coding DNA Sequence Number=SeqID_6678
  Gene Ontology: Mol. function=magnesium ion binding; Cellular component=integral to membrane; Biological process=photosynthesis, light harvesting
  Homolog annotation: Hit_ID=P04778; Match level="QueryCoverage=73%, HitCoverage=27%, E-value=1e-23, Identity=76%"; Hit description =Chlorophyll a-b binding protein 2, chloroplast precursor
  Subcellular localization annotation: CTP_CleavageSite=23; ConfidenceScore=5.53e-01
MAASTMXLSSSAFAGKAVNLSPAASEVLGSGRVTMRKTVAKPKGPSGSPWYGAERVKYLGPFSGEPPSYLPEVPRRLTGGDTSRVSSPDLREHSQGPGS

SEQ ID NO: 11149 - protein, 99 aa, Zea mays; identical to SEQ ID NO: 11148
  misc_feature (7)..(7): Xaa can be any naturally occurring amino acid
  Coding DNA Sequence Number=SeqID_6679
  Gene Ontology: Mol. function=magnesium ion binding; Cellular component=integral to membrane; Biological process=photosynthesis, light harvesting
  Homolog annotation: Hit_ID=P04778; Match level="QueryCoverage=73%, HitCoverage=27%, E-value=1e-23, Identity=76%"; Hit description =Chlorophyll a-b binding protein 2, chloroplast precursor
  Subcellular localization annotation: CTP_CleavageSite=23; ConfidenceScore=5.53e-01

SEQ ID NO: 11150 - protein, 174 aa, Zea mays
  misc_feature (95)..(95): Xaa can be any naturally occurring amino acid
  misc_feature (102)..(102): Xaa can be any naturally occurring amino acid
  misc_feature (118)..(118): Xaa can be any naturally occurring amino acid
  misc_feature (130)..(130): Xaa can be any naturally occurring amino acid
  Coding DNA Sequence Number=SeqID_6680
  Gene Ontology: Mol. function=magnesium ion binding; Cellular component=integral to membrane; Biological process=photosynthesis, light harvesting
  Homolog annotation: Hit_ID=P04778; Match level="QueryCoverage=100%, HitCoverage=63%, E-value=8e-70, Identity=82%"; Hit description =Chlorophyll a-b binding protein 2, chloroplast precursor
  Pfam annotation: Domain name=Chloroa_b-bind; Domain location=65-148; Score=35.2; E_value=5.4e-08; Accession=PF00504.12; Description =Chlorophyll A-B binding protein
  Subcellular localization annotation: CTP_CleavageSite=39; ConfidenceScore=5.54e-01
MASSTMALSSPAFAGKAVKLSPAASEVLGSGRVTMRKTVAKPKGQSGSPWYGFERVKYLGPFSGEPPSYLTGEFPGDYGWDTAGLSADPETFARXNRELEVXHCRWAMLGALGCVFPXELLARNGVKFGXAGLGSKAGSQILQAKEDFDYFGQPRGLVPPPSVSATWATQVILM

SEQ ID NO: 11151 - protein, 193 aa, Zea mays
  misc_feature (187)..(187): Xaa can be any naturally occurring amino acid
  Coding DNA Sequence Number=SeqID_6681
  Gene Ontology: Mol. function=magnesium ion binding; Cellular component=integral to membrane; Biological process=photosynthesis, light harvesting
  Homolog annotation: Hit_ID=P04778; Match level="QueryCoverage=92%, HitCoverage=66%, E-value=5e-96, Identity=95%"; Hit description =Chlorophyll a-b binding protein 2, chloroplast precursor
  Pfam annotation: Domain name=Chloroa_b-bind; Domain location=65-189; Score=144.8; E_value=2.4e-40; Accession=PF00504.12; Description =Chlorophyll A-B binding protein
  Subcellular localization annotation: CTP_CleavageSite=23; ConfidenceScore=5.52e-01
MAASTMALSSSAFAGKAVNLSPAASEVLGSGRVTMRKTVAKPKGPSGSPWYGAERVKYLGPFSGEPPSYLTGEFPGDYGWDTAGLSADPETFARNRELEVIHCRWAMLGALGCVFPELLARNGVKFGEAVWFKAGSQIFSDGGLDYLGNPSLVHAQSILAIWATQVILMGAVEGYRVAGNGPLGRAXDLRYPE

SEQ ID NO: 11152 - protein, 64 aa, Zea mays
  Coding DNA Sequence Number=SeqID_6682
YRAPPRACAVYSSAEVQINLMVNWRGLLSGEIAVYLLRSNGCGWRAKAPKEGKLKHGAGQGGGG

SEQ ID NO: 11153 - protein, 61 aa, Zea mays
  misc_feature (13)..(14): Xaa can be any naturally occurring amino acid
  misc_feature (28)..(30): Xaa can be any naturally occurring amino acid
  misc_feature (54)..(57): Xaa can be any naturally occurring amino acid
  misc_feature (59)..(61): Xaa can be any naturally occurring amino acid
  Coding DNA Sequence Number=SeqID_6684
LSLPSHRQAYYYXXSKQDHLYYTMTPPXXXFTLRLPLHCLSTNVPLWIKKKKKXXXXGXXX

SEQ ID NO: 11154 - protein, 154 aa, Zea mays
  misc_feature (49)..(49): Xaa can be any naturally occurring amino acid
  misc_feature (59)..(59): Xaa can be any naturally occurring amino acid
  misc_feature (66)..(67): Xaa can be any naturally occurring amino acid
  misc_feature (69)..(80): Xaa can be any naturally occurring amino acid
  misc_feature (83)..(85): Xaa can be any naturally occurring amino acid
  misc_feature (87)..(87): Xaa can be any naturally occurring amino acid
  misc_feature (89)..(91): Xaa can be any naturally occurring amino acid
  misc_feature (94)..(100): Xaa can be any naturally occurring amino acid
  misc_feature (102)..(118): Xaa can be any naturally occurring amino acid
  misc_feature (120)..(121): Xaa can be any naturally occurring amino acid
  misc_feature (124)..(128): Xaa can be any naturally occurring amino acid
  misc_feature (130)..(136): Xaa can be any naturally occurring amino acid
  misc_feature (139)..(142): Xaa can be any naturally occurring amino acid
  misc_feature (144)..(152): Xaa can be any naturally occurring amino acid
  Coding DNA Sequence Number=SeqID_6686
  Gene Ontology: Biological process=cell redox homeostasis
  Homolog annotation: Hit_ID=Q84NN4; Match level="QueryCoverage=60%, HitCoverage=30%, E-value=4e-15, Identity=46%"; Hit description =Putative thioredoxin-like protein CDSP32
FASSDGEDNSQIYAIMVKINRSCDDVDFLLFLPDHNSDATKELFRREGXTNLPHFIFYXGLDNVHXXEXXXXXXXXXXXXYYXXXHXAXXXLHXXXXXXXLXXXXXXXXXXXXXXXXXLXXCGXXXXXYXXXXXXXRSXXXXTXXXXXXXXXHF

SEQ ID NO: 11155 - protein, 66 aa, Zea mays
  misc_feature (1)..(14): Xaa can be any naturally occurring amino acid
  misc_feature (39)..(40): Xaa can be any naturally occurring amino acid
  misc_feature (54)..(55): Xaa can be any naturally occurring amino acid
  Coding DNA Sequence Number=SeqID_6687
XXXXXXXXXXXXXXVSSMLKPANLLSLGGICRATCKAIXXGCKDTVPSCSHNKXXIQENAERPTLI

SEQ ID NO: 11156 - protein, 85 aa, Zea mays
  Coding DNA Sequence Number=SeqID_6689
  Gene Ontology: Mol. function=DNA binding; Cellular component =chromosome; Biological process=nucleosome assembly
  Homolog annotation: Hit_ID=A2XF66; Match level="QueryCoverage=57%, HitCoverage=32%, E-value=1e-11, Identity=75%"; Hit description =Histone H2B.1
ESSLVPPPPPVGGEGAKVARDNKKATITSREIQNSVGLVLPGEVAKNAVSEGNKGGTKFTSNWAAWSGHGFVKSPLLKRGLRRGL

SEQ ID NO: 11157 - protein, 181 aa, Zea mays
  misc_feature (169)..(169): Xaa can be any naturally occurring amino acid
  misc_feature (176)..(176): Xaa can be any naturally occurring amino acid
  Coding DNA Sequence Number=SeqID_6690
  Gene Ontology: Mol. function=magnesium ion binding; Cellular component=integral to membrane; Biological process=photosynthesis, light harvesting
  Homolog annotation: Hit_ID=Q0WR83; Match level="QueryCoverage=90%, HitCoverage=60%, E-value=4e-80, Identity=87%"; Hit description=PSI type III chlorophyll a/b-binding protein
  Pfam annotation: Domain name=Chloroa_b-bind; Domain location=59-181; Score=98.5; E_value=2e-26; Accession=PF00504.12; Description =Chlorophyll A-B binding protein
  Subcellular localization annotation: CTP_CleavageSite=46; ConfidenceScore=5.83e-01
MAAQALVSSSLTSSVQTARQIFGTKPAVSVRKTSFVVKAASTPPVKQGANRPLWFASSQSLSYLDGSLPGDYGFDPLGLSDPEGTGGFIEPRWLAYGEIINGRFAMLGAAGAIAPEILGKAGLIPADTALPWFQTGVIPPAGTYSYWADPYTLFVLEMALMGLLSTGGXQDWYNPXSMGKQ

SEQ ID NO: 11158 - protein, 64 aa, Zea mays
  misc_feature (54)..(54): Xaa can be any naturally occurring amino acid
  Coding DNA Sequence Number=SeqID_6691
SLGMISSRIISLIYGNFDEPKRIPVHSSTSEWALKDLQTQECKFQSKKKKKKKXKKKLEGGPGT

SEQ ID NO: 11159 - protein, 90 aa, Zea mays
  Coding DNA Sequence Number=SeqID_6693
LGDDGLDLSRTHHSILHAPHLAVPALDLGLEIPGTRMIFRWLVTSRGDESTHDYVHASQRQAARGEVRRRIIRPSIASALNWSSVRVCCT

SEQ ID NO: 11160 - protein, 158 aa, Zea mays
  Coding DNA Sequence Number=SeqID_6695
  Gene Ontology: Mol. function=hydrogen ion transporting ATP synthase activity, rotational mechanism; Cellular component=proton -transporting ATP synthase complex, catalytic core F(1); Biological process=ATP synthesis coupled proton transport
  Homolog annotation: Hit_ID=Q96252; Match level="QueryCoverage=99%, HitCoverage=77%, E-value=2e-65, Identity=79%"; Hit description=ATP synthase subunit delta', mitochondrial precursor
  Pfam annotation: Domain name=ATP-synt_DE_N; Domain location=72-155; Score=56.0; E_value=1.3e-13; Accession=PF02823.6; Description=ATP synthase, DeltaEpsilon chain, beta-sandwich domain
  Subcellular localization annotation: CTP_CleavageSite=62; ConfidenceScore=5.52e-01
MLRQASRLISRSATAASSKSVTARAFSTELPSTIDSTFVESWKKVAPNMDPPQTPSSFMKPRPSTASSIPTKLTVNFVLPYASELSWKEVDMDIIPATTGQMGVLPGHVPTIAELKPGIMSVHEGTDIKKYFVSSGFAFLHANSVADIIAGEAVPLEI

SEQ ID NO: 11161 - protein, 173 aa, Zea mays
  misc_feature (89)..(89): Xaa can be any naturally occurring amino acid
  misc_feature (99)..(99): Xaa can be any naturally occurring amino acid
  misc_feature (107)..(107): Xaa can be any naturally occurring amino acid
  misc_feature (126)..(126): Xaa can be any naturally occurring amino acid
  misc_feature (142)..(142): Xaa can be any naturally occurring amino acid
  Coding DNA Sequence Number=SeqID_6696
  Gene Ontology: Mol. function=zinc ion binding; Cellular component =nucleus
  Homolog annotation: Hit_ID=Q9LYB9; Match level="QueryCoverage=87%, HitCoverage=79%, E-value=1e-53, Identity=71%"; Hit description =Putative uncharacterized protein T20O10_130
  Pfam annotation: Domain name=MBD; Domain location=82-159; Score=3.3; E_value=0.018; Accession=PF01429.10; Description=Methyl-CpG binding domain
  Pfam annotation: Domain name=zf-CW; Domain location=26-74; Score =66.5; E_value=9.2e-17; Accession=PF07496.5; Description=CW-type Zinc Finger
  Pfam module annotation: Pfam domain module=MBD::zf-CW; Domain location=82-159::26-74
MAEEENGIVAKPRAKKEIAPGRLIDTYAAQCENCHQWRVIDGQEEYEDIRSRMIDDPFTCDKKQISCEDPADLDYDSSRTWVIDKPGLXPKTPQGFKRXLALRKDYXSKRDTYYSPPTGKKLRDPXRSSLPTVEPIPGFRGXAPLEDFPFTWPPGEWRDLAPPGPKGGGPLPV

SEQ ID NO: 11162 - protein, 162 aa, Zea mays
  misc_feature (141)..(141): Xaa can be any naturally occurring amino acid
  Coding DNA Sequence Number=SeqID_6697
  Gene Ontology: Mol. function=structural constituent of ribosome; Cellular component=intracellular; Biological process=protein modification process
  Homolog annotation: Hit_ID=Q8MY15; Match level="QueryCoverage=95%, HitCoverage=99%, E-value=6e-57, Identity=71%"; Hit description =Ubiquitin
  Pfam annotation: Domain name=Ribosomal_S27; Domain location=101-147; Score=109.1; E_value=1.3e-29; Accession=PF01599.9; Description =Ribosomal protein S27a
  Pfam annotation: Domain name=ubiquitin; Domain location=6-74; Score =138.0; E_value=2.6e-38; Accession=PF00240.13; Description=Ubiquitin family
  Pfam module annotation: Pfam domain module=Ribosomal_S27::ubiquitin; Domain location=101-147::6-74
MQIFVKTLTGKTITLEVESSDTIDNVKAKIQDKEGIPPDQQRLIFAGKQLEDGRTLADYNIQKESTLHLVLRLRGGAKKRKKKTYTKPKKIKHKHKKVKLAVLQFYKVDGSGKVQRLRKECPNATCGAGTFMASHFDRHYXGKCGLTYVYQKGGCRGMIYNR

SEQ ID NO: 11163 - protein, 114 aa, Zea mays
  Coding DNA Sequence Number=SeqID_6698
  Gene Ontology: Mol. function=superoxide dismutase activity; Cellular component=cytoplasm; Biological process=superoxide metabolic process
  Homolog annotation: Hit_ID=P24704; Match level="QueryCoverage=100%, HitCoverage=75%, E-value=8e-58, Identity=92%"; Hit description =Superoxide dismutase [Cu-Zn]
  Pfam annotation: Domain name=Sod_Cu; Domain location=2-114; Score =175.3; E_value=1.6e-49; Accession=PF00080.10; Description=Copperzinc superoxide dismutase (SODC)
MAKGVAVLNSSEGVKGTIFFTHEGNGATTVTGTVSGLKPGLHGFHVHALGDTTNGCMSTGPHFNPDGKTHGAPEDANRHAGDLGNIIVGDDGTATFTITDSQIPLSGPNSIVGR

SEQ ID NO: 11164 - protein, 339 aa, Zea mays
  Coding DNA Sequence Number=SeqID_6699
  Gene Ontology: Mol. function=hydrolase activity; Biological process =proteolysis
  Homolog annotation: Hit_ID=Q8VZV6; Match level="QueryCoverage=98%, HitCoverage=99%, E-value=1e-164, Identity=83%"; Hit description =Putative phospholipase
MGLHPIADADESNPFGSLSADEFYAKHSVTHSSAFTTNPRGLKIFTQWWSPLPPTTPVGIVAVVHGFTGESSWFLQLTSILFAKSGYITCAIDHQGHGFSDGLVAHIPDINPVVDDCISFFDDFRNRNRQETPDLPCFLYSESLGGAIALYISLRQRGVWDGLILNGAMCGISAKFKPPWPLEHLLFVVANLIPTWRVIPTRGSIPDVSFKEPWKRKLAIASPRRTVARPRAATAYELIRVCNELQGRFEEVEVPLLIVHGGGDVVCDQACVEELHRRASSGDKTIKIYPGMWHQMVGESEEDVDLVYGDILTWLKTRSERAAERKRELRVGGGALESF

SEQ ID NO: 11165 - protein, 222 aa, Zea mays
  Coding DNA Sequence Number=SeqID_6700
  Homolog annotation: Hit_ID=Q9FY56; Match level="QueryCoverage=95%, HitCoverage=98%, E-value=2e-71, Identity=69%"; Hit description =Putative uncharacterized protein T5K6_80
  Subcellular localization annotation: CTP_CleavageSite=21; ConfidenceScore=5.82e-01
MQRKTMVTTSSRTKSNGPVLRSQSPSGRFCGAYSNPIPSSSSSSAFASSTSSSFSSPSSAFFSNRHDNHHHSHHRSASPTRVNLYKQPQPIAFSLDTRSISPTTTNRSISVAKKPQPSKISSPRRCMCSPTTHPGSFRCSLHKNVANPHGQGTASYPTNSLNMRRSAMTNSLVRIGGVEGEWVRRALTTLIRPSSHHLRRRAAYQPRPSRLSIMSKAATECN

SEQ ID NO: 11166 - protein, 139 aa, Zea mays
  Coding DNA Sequence Number=SeqID_6701
  Gene Ontology: Mol. function=actin binding; Cellular component =intracellular; Biological process=response to stress
  Homolog annotation: Hit_ID=Q9ZSK4; Match level="QueryCoverage=100%, HitCoverage=100%, E-value=9e-65, Identity=86%"; Hit description =Actin-depolymerizing factor 3
  Pfam annotation: Domain name=Cofilin_ADF; Domain location=12-139; Score=203.9; E_value=3.9e-58; Accession=PF00241.10; Description =Cofilintropomyosin-type actin-bindin
MANAASGMAVHDDCKLKFLELKAKRTFRFIVYKIEEQHKQVVVEKLGEPGQSHDDFAASLPADECRYAGFDFDFVTAESCQKSKIFFVAWSPDTARVRSKMIYASSKDRFKRELDGIQVELQATDPTEMDLDVFKSRAN

SEQ ID NO: 11167 - protein, 201 aa, Zea mays
  misc_feature (3)..(3): Xaa can be any naturally occurring amino acid
  misc_feature (5)..(6): Xaa can be any naturally occurring amino acid
  misc_feature (13)..(15): Xaa can be any naturally occurring amino acid
  misc_feature (18)..(18): Xaa can be any naturally occurring amino acid
  misc_feature (20)..(21): Xaa can be any naturally occurring amino acid
  misc_feature (27)..(27): Xaa can be any naturally occurring amino acid
  misc_feature (30)..(37): Xaa can be any naturally occurring amino acid
  misc_feature (39)..(45): Xaa can be any naturally occurring amino acid
  misc_feature (48)..(50): Xaa can be any naturally occurring amino acid
  misc_feature (54)..(79): Xaa can be any naturally occurring amino acid
  misc_feature (81)..(95): Xaa can be any naturally occurring amino acid
  misc_feature (98)..(104): Xaa can be any naturally occurring amino acid
  misc_feature (107)..(112): Xaa can be any naturally occurring amino acid
  misc_feature (114)..(115): Xaa can be any naturally occurring amino acid
  misc_feature (117)..(119): Xaa can be any naturally occurring amino acid
  misc_feature (121)..(126): Xaa can be any naturally occurring amino acid
  misc_feature (133)..(136): Xaa can be any naturally occurring amino acid
  misc_feature (143)..(145): Xaa can be any naturally occurring amino acid
  misc_feature (149)..(149): Xaa can be any naturally occurring amino acid
  misc_feature (155)..(155): Xaa can be any naturally occurring amino acid
  misc_feature (158)..(159): Xaa can be any naturally occurring amino acid
  misc_feature (188)..(189): Xaa can be any naturally occurring amino acid
  misc_feature (199)..(201): Xaa can be any naturally occurring amino acid
  Coding DNA Sequence Number=SeqID_6702
RAXRXXPWNYYEXXXKKXQXXHLSTSXSDXXXXXXXXSXXXXXXXGPXXXALSXXXXXXXXXXXXXXXXXXXXXXXXXXVXXXXXXXXXXXXXXXGSXXXXXXXAKXXXXXXGXXGXXXEXXXXXXQPRLIGXXXXVSGGHLXXXRGAXRIHRLXAAXXDWIGTQRGSLRRRVLNGGGGGGGCSGEMXXTGEGDEGVGXXX

SEQ ID NO: 11168 - protein, 122 aa, Zea mays
  Coding DNA Sequence Number=SeqID_6704
  Homolog annotation: Hit_ID=Q3ECN3; Match level="QueryCoverage=77%, HitCoverage=91%, E-value=8e-39, Identity=81%"; Hit description =Uncharacterized protein At1g56220.2
  Pfam annotation: Domain name=Auxin_repressed; Domain location=7-121; Score=165.3; E_value=1.6e-46; Accession=PF05564.3; Description =Dormancyauxin associated protein
MGLLDHLWDDTVAGPLPENGLGKLRKHHTFSFRPSSANDQSDVRSYGGDSPEEAVKVTRSIMIIKPPGYQGGSAPVSPAGSTTPVSPSPFSGGKEPFRFRRRSASDAFDKAAGSENGPRNSP

SEQ ID NO: 11169 - protein, 140 aa, Zea mays
  misc_feature (133)..(133): Xaa can be any naturally occurring amino acid
  Coding DNA Sequence Number=SeqID_6705
  Gene Ontology: Mol. function=translation elongation factor activity; Cellular component=eukaryotic translation elongation factor 1 complex; Biological process=translational elongation
  Homolog annotation: Hit_ID=Q9SCX3; Match level="QueryCoverage=50%, HitCoverage=31%, E-value=3e-30, Identity=90%"; Hit description =Elongation factor 1-beta 2
LISYHSLSLSPNLAKQLQWAVTFSDLHTEQGVKSVEEHLAGKTYISGDQLTVDDVKVYAAIVEKPSDAFPNASKWYDSVASHLAKSFPGKAVGVSIGGSAASAPAQAEAPAAVADDDDDMDLFGDETEEEKKXAEEREAS

SEQ ID NO: 11170 - protein, 122 aa, Zea mays
  misc_feature (6)..(7): Xaa can be any naturally occurring amino acid
  misc_feature (9)..(17): Xaa can be any naturally occurring amino acid
  misc_feature (66)..(67): Xaa can be any naturally occurring amino acid
  Coding DNA Sequence Number=SeqID_6706
  Homolog annotation: Hit_ID=A7P4Y1; Match level="QueryCoverage=97%, HitCoverage=36%, E-value=4e-25, Identity=51%"; Hit description =Chromosome chr4 scaffold_6, whole genome shotgun sequence
LIHVRXXKXXXXXXXXXLYHSLPYHMVEFVLDDSHCKVTASLRYADLISVVPTRISVLTWRMFNKXXMSRKEVGLSGSHFCTIRLTYAEDALRTLSFSEAYPEIVFTFPQAIRQPYHQKAPA

SEQ ID NO: 11171 - protein, 238 aa, Zea mays
  misc_feature (1)..(2): Xaa can be any naturally occurring amino acid
  misc_feature (5)..(7): Xaa can be any naturally occurring amino acid
  misc_feature (10)..(11): Xaa can be any naturally occurring amino acid
  misc_feature (201)..(238): Xaa can be any naturally occurring amino acid
  Coding DNA Sequence Number=SeqID_6707
XXLEXXXEWXXFTPELTSLCSVHFVLAGSAAAAVAAATRAVHLGLIWRPGVQVPSRPSPWRRQRLLLCASGGHALALALGPPRSDRSKGHSSASSLAPHWHHTLPPPPGGVPIPLSFGPPPPLIICVLPSWIKPSIIFPSPQASSLSSARNFLLTSPLFLPVATKLPPLLILSIHTLCPSPPLLFRFRSPCAYGLALLVMXXXXXXXXXXXXXXXXXXXXXXXXXXXXXXXXXXXXXX

SEQ ID NO: 11172 - protein, 108 aa, Zea mays
  Coding DNA Sequence Number=SeqID_6709
  Gene Ontology: Mol. function=hydrogen ion transporting ATP synthase activity, rotational mechanism; Cellular component=proton -transporting ATP synthase complex, coupling factor F(o); Biological process=ATP synthesis coupled proton transport
  Homolog annotation: Hit_ID=Q9FT52; Match level="QueryCoverage=100%, HitCoverage=64%, E-value=2e-53, Identity=92%"; Hit description=ATP synthase subunit d, mitochondrial
MSGAGKKVADVAFKASRTIDWEGMAKVLVTDEARREFSNLRRAFDEVNTQLQTKFSQEPEPIDWDFYRKGIGSGIVDMYKEAYDSVEIPKFVDTVTPEYKPKFDALLV

SEQ ID NO: 11173 - protein, 96 aa, Zea mays
  Coding DNA Sequence Number=SeqID_6710
  Homolog annotation: Hit_ID=A9P8B4; Match level="QueryCoverage=100%, HitCoverage=100%, E-value=1e-25, Identity=59%"; Hit description =Putative uncharacterized protein
MALNTGIRSVSRLIASSESSVSRSVSRSFHSTGAKKMSGGHGHDEPYYLHAKHMYNLDRMKFQGLKMSLAVFTAFSIGVGVPIFAVVFQQRKTASG

SEQ ID NO: 11174 - protein, 178 aa, Zea mays
  misc_feature (126)..(126): Xaa can be any naturally occurring amino acid
  Coding DNA Sequence Number=SeqID_6711
  Gene Ontology: Mol. function=protein binding; Cellular component =ribonucleoprotein complex; Biological process=translation
  Homolog annotation: Hit_ID=Q9LTF2; Match level="QueryCoverage=55%, HitCoverage=54%, E-value=7e-47, Identity=93%"; Hit description=40S ribosomal protein S10-3
  Pfam annotation: Domain name=S10_plectin; Domain location=3-99; Score= 253.4; E_value=4.9e-73; Accession=PF03501.5; Description=PlectinS10 domain
MIMSEENRREICKYLFKEGVLFAKKDFNLAKHPLIESVPNLQVIKLMQSFKSKEYVRETFAWMHYYWFLTNEGIEFLRTYLNLPSDVVPATLKKSAKPIGRPFGGGPPGDRPRGPRFEGGDRPRYXDRDGYRRGGEGEKGGAPADYQPSFPGSGGRPGFGRGAGGYSAAAPSGSGLPL

SEQ ID NO: 11175 - protein, 118 aa, Zea mays
  misc_feature (9)..(16): Xaa can be any naturally occurring amino acid
  misc_feature (21)..(21): Xaa can be any naturally occurring amino acid
  misc_feature (23)..(23): Xaa can be any naturally occurring amino acid
  misc_feature (26)..(26): Xaa can be any naturally occurring amino acid
  misc_feature (35)..(35): Xaa can be any naturally occurring amino acid
  misc_feature (40)..(40): Xaa can be any naturally occurring amino acid
  misc_feature (45)..(45): Xaa can be any naturally occurring amino acid
  misc_feature (50)..(50): Xaa can be any naturally occurring amino acid
  misc_feature (65)..(68): Xaa can be any naturally occurring amino acid
  misc_feature (78)..(78): Xaa can be any naturally occurring amino acid
  misc_feature (80)..(80): Xaa can be any naturally occurring amino acid
  misc_feature (85)..(85): Xaa can be any naturally occurring amino acid
  misc_feature (107)..(109): Xaa can be any naturally occurring amino acid
  misc_feature (116)..(116): Xaa can be any naturally occurring amino acid
  Coding DNA Sequence Number=SeqID_6712
  Gene Ontology: Mol. function=protein binding; Cellular component =ribonucleoprotein complex; Biological process=translation
  Homolog annotation: Hit_ID=Q9LTF2; Match level="QueryCoverage=94%, HitCoverage=62%, E-value=8e-32, Identity=64%"; Hit description=40S ribosomal protein S10-3
  Pfam annotation: Domain name=S10_plectin; Domain location=18-91; Score=84.5; E_value=3.4e-22; Accession=PF03501.5; Description =PlectinS10 domain
FPDTIFYLXXXXXXXXNKDFXLXKNXLIDVPKLQXIKLMXSFKSXEYVRXTFAWMHYYWFLTNEXXXXLRTYLNLPSXVXPATLXKPAKPRVVVPLEGPPGDRQRGXXXSDGDRPXWG

SEQ ID NO: 11176 - protein, 151 aa, Zea mays
  Coding DNA Sequence Number=SeqID_6713
  Gene Ontology: Mol. function=protein binding; Cellular component =thylakoid membrane; Biological process=photosynthesis
  Homolog annotation: Hit_ID=P49107; Match level="QueryCoverage=98%, HitCoverage=87%, E-value=1e-48, Identity=70%"; Hit description =Photosystem I reaction center subunit N, chloroplast precursor
  Pfam annotation: Domain name=PsaN; Domain location=34-150; Score =250.2; E_value=4.5e-72; Accession=PF05479.2; Description=Photosystem I reaction centre subunit N (PSAN or PSI-N)
  Subcellular localization annotation: CTP_CleavageSite=80; ConfidenceScore=5.20e-01
MAAMNSSVLTCSYAISGAGSVELNQKVGLVSSSVGFGQKKQTVPVIKAQRVGGDDVDGSSGRRSAMVFLAATLFSSAAVSASANASVFDEYLEKSKANKELNDKKRLATSGANFARAFTVQFGSCKFPENFTGCQDLAKQKKVPFISEDWR

SEQ ID NO: 11177 - protein, 53 aa, Zea mays
  misc_feature (7)..(7): Xaa can be any naturally occurring amino acid
  Coding DNA Sequence Number=SeqID_6714
  Gene Ontology: Mol. function=sugar:hydrogen symporter activity; Cellular component=integral to membrane; Biological process =carbohydrate transport
  Homolog annotation: Hit_ID=Q6K8S7; Match level="QueryCoverage=94%, HitCoverage=12%, E-value=1e-14, Identity=80%"; Hit description =Putative PLRR-4 polymorphic leucine-rich repeat protein
SKRHSRXTMILICNNAAEGVLSSFFFKYGDTILNKDSTTDAAIFTGLASAAFL

SEQ ID NO: 11178 - protein, 150 aa, Zea mays
  Coding DNA Sequence Number=SeqID_6715
RGRLRMQQLRVKKYLRIWRRTAVLGEIPQVPEDHGGGRRKVPLPVGGERHPSGLPSGCLAADPLRPSHPVISRGATSSSCSRPTASEAYDASAMRHHQQRHPCCDNALREDPASVYLCLRHQLRRREKGVLICHRMLLIRSQEAGGRPTA

SEQ ID NO: 11179 - protein, 113 aa, Zea mays
  Coding DNA Sequence Number=SeqID_6717
KAQHAPPGSEMRTFFTGKLPVTPRQIENDPDAGRSRPQTTPTIEKPRSEQQRTRSATKKRNPSAENNAGDGRERRQNTGGTSVRRPRKEAAAAGEGHTIRVLVRLERRGSNLF

SEQ ID NO: 11180 - protein, 79 aa, Zea mays
  Coding DNA Sequence Number=SeqID_6719
  Subcellular localization annotation: CTP_CleavageSite=28; ConfidenceScore=5.25e-01
IARVHGHCASHLKFSTEESRIGPHSTVSTRRKSSLRPVRRSCTLSLLQHTINLLVLPSKDGDTWSRARNNCKKKGDLVL

SEQ ID NO: 11181 - protein, 165 aa, Zea mays
  misc_feature (31)..(31): Xaa can be any naturally occurring amino acid
  misc_feature (36)..(36): Xaa can be any naturally occurring amino acid
  misc_feature (57)..(57): Xaa can be any naturally occurring amino acid
  Coding DNA Sequence Number=SeqID_6721
  Homolog annotation: Hit_ID=Q9LSR1; Match level="QueryCoverage=39%, HitCoverage=4%, E-value=4e-14, Identity=58%"; Hit description =Genomic DNA, chromosome 5, BAC clone:F24B18
PPPPPPQLTKGAADNYHRSWWKRHGVVLDGXIAALXFKHGKFWTWVGNPSEKVLGFXFLAKGWEKILGKRFPPVFGKGAKKIFGKGFLALLGEKINFGGGGGFFFLKKRGGGFPQKKFFPLQKKKKKFLPQKPPKKFFLGGGGGPPPQKNFGGGGAPPFPFGGPP

SEQ ID NO: 11182 - protein, 113 aa, Zea mays
  misc_feature (109)..(113): Xaa can be any naturally occurring amino acid
  Coding DNA Sequence Number=SeqID_6722
  Subcellular localization annotation: CTP_CleavageSite=47; ConfidenceScore=5.49e-01
RAVCTRNSSGASSCHFLPSPAFAPLPMASPLGCLLSSVQERNLQQAVAAQVQERNKIGRREASFTGVQEKSKQLQGSGVQERSKQLRGLLYRVFSLLPSFFGVQLLFLXXXXX

SEQ ID NO: 11183 - protein, 145 aa, Zea mays
  Coding DNA Sequence Number=SeqID_6724
  Gene Ontology: Mol. function=lipid binding; Cellular component =cytoplasm
  Homolog annotation: Hit_ID=Q9ST43; Match level="QueryCoverage=100%, HitCoverage=100%, E-value=4e-75, Identity=91%"; Hit description =Pleckstrin homology domain-containing protein 1
  Pfam annotation: Domain name=PH; Domain location=27-127; Score=93.7; E_value=5.9e-25; Accession=PF00169.19; Description=PH domain
MENLWRIATGQDPNRQDYEGIEFWSNPERSGWLTKQGDYIKTWRRRWFVLKRGKLLWFKDQSSALTRGSIPRGVISVGDCLTVKGAEDVVNKPFAFEISSGNITMFFIADNEKEKEEWINSIGRSIVQHSRSVTDSEVLDYDQRR

SEQ ID NO: 11184 - protein, 202 aa, Zea mays
  Coding DNA Sequence Number=SeqID_6725
  Gene Ontology: Mol. function=oxidoreductase activity, acting on sulfur group of donors, disulfide as acceptor; Cellular component =cytosol; Biological process=protein metabolic process
  Homolog annotation: Hit_ID=Q6V5K7; Match level="QueryCoverage=100%, HitCoverage=100%, E-value=1e-116, Identity=98%"; Hit description =Peptide methionine sulfoxide reductase
  Pfam annotation: Domain name=PMSR; Domain location=36-189; Score =246.1; E_value=7.6e-71; Accession=PF01625.11; Description=Peptide methionine sulfoxide reductase
MNILNRFGLGSGGQTSTDPSPIAQGSDDDSPAPGNHFAQFAAGCFWGVELAFQRLPGVTQTEVGYTQGITHNPSYEDVCSETTRHAEVVRVQYDPKGCTFESLLDLFWSRHDPTTLNRQGNDVGTRYRSGIYFYTPEQEKLARESLERHQQRMERKIMTEILPAKKFYRAEEQQQQYLSKGGRYGMGQSCAKGCTDPIRCYG

SEQ ID NO: 11185 - protein, 296 aa, Zea mays
  misc_feature (1)..(78): Xaa can be any naturally occurring amino acid
  misc_feature (80)..(155): Xaa can be any naturally occurring amino acid
  misc_feature (157)..(164): Xaa can be any naturally occurring amino acid
  misc_feature (167)..(169): Xaa can be any naturally occurring amino acid
  misc_feature (172)..(177): Xaa can be any naturally occurring amino acid
  misc_feature (179)..(182): Xaa can be any naturally occurring amino acid
  misc_feature (259)..(264): Xaa can be any naturally occurring amino acid
  misc_feature (266)..(272): Xaa can be any naturally occurring amino acid
  misc_feature (274)..(278): Xaa can be any naturally occurring amino acid
  misc_feature (280)..(280): Xaa can be any naturally occurring amino acid
  misc_feature (283)..(285): Xaa can be any naturally occurring amino acid
  misc_feature (287)..(295): Xaa can be any naturally occurring amino acid
  Coding DNA Sequence Number=SeqID_6726
XXXXXXXXXXXXXXXXXXXXXXXXXXXXXXXXXXXXXXXXXXXXXXXXXXXXXXXXXXXXXXXXXXXXXXXXXXXXXXKXXXXXXXXXXXXXXXXXXXXXXXXXXXXXXXXXXXXXXXXXXXXXXXXXXXXXXXXXXXXXXXXXXXXXXXXXXXXLXXXXXXXXRRXXXVPXXXXXXQXXXXRRCCAQRASFVGLWLVMEPDEGGVMIRRFSCGVSSLGVELFSGCTTSVGGNVPLDAPVSTNVVSALYSLSPHFRLIXXXXXXYXXXXXXXAXXXXXFXFPXXXYXXXXXXXXXK

SEQ ID NO: 11186 - protein, 121 aa, Zea mays
  Coding DNA Sequence Number=SeqID_6728
  Gene Ontology: Mol. function=structural constituent of ribosome; Cellular component=ribonucleoprotein complex; Biological process =translational elongation
  Homolog annotation: Hit_ID=Q9LVC9; Match level="QueryCoverage=57%, HitCoverage=57%, E-value=3e-29, Identity=94%"; Hit description=60S acidic ribosomal protein P3-2
  Pfam annotation: Domain name=Ribosomal_60s; Domain location=29-120; Score=28.8; E_value=1.9e-05; Accession=PF00428.9; Description=60s Acidic ribosomal protein
MGVFTFVCKSKGGEWTAKQHEGDLEASDSSTYDLQRKLVQTALSADSSGGVQSSFSLVSPTSAVFQVIIGGGSGGGFAAGGGAAAGGASGGGESAAAAKEEEKKKEESEEEEGDFGFDLFG

SEQ ID NO: 11187 - protein, 121 aa, Zea mays; identical to SEQ ID NO: 11186
  Coding DNA Sequence Number=SeqID_6729
  Gene Ontology: Mol. function=structural constituent of ribosome; Cellular component=ribonucleoprotein complex; Biological process =translational elongation
  Homolog annotation: Hit_ID=Q9LVC9; Match level="QueryCoverage=57%, HitCoverage=57%, E-value=3e-29, Identity=94%"; Hit description=60S acidic ribosomal protein P3-2
  Pfam annotation: Domain name=Ribosomal_60s; Domain location=29-120; Score=28.8; E_value=1.9e-05; Accession=PF00428.9; Description=60s Acidic ribosomal protein

SEQ ID NO: 11188 - protein, 148 aa, Zea mays
  Coding DNA Sequence Number=SeqID_6730
  Gene Ontology: Mol. function=small conjugating protein ligase activity; Cellular component=cytosol; Biological process=ubiquitin -dependent protein catabolic process
  Homolog annotation: Hit_ID=Q9FKT3; Match level="QueryCoverage=100%, HitCoverage=100%, E-value=3e-80, Identity=93%"; Hit description =Ubiquitin carrier protein
  Pfam annotation: Domain name=UQ_con; Domain location=5-142; Score =265.2; E_value=1.4e-76; Accession=PF00179.16; Description=Ubiquitin -conjugating enzyme
MASKRINKELRDLQRDPPVSCSAGPVGDDMFHWQATIMGPTDSPFSGGVFLVSIHFPPDYPFKPPKVSFRTKVYHPNVNSNGSICLDILKEQWSPALTISKVLLSICSLLTDPNPDDPLVPEIAHTYKTDRVKYESTARSWTQKYAMG

SEQ ID NO: 11189 - protein, 148 aa, Zea mays
  Coding DNA Sequence Number=SeqID_6731
  Gene Ontology: Mol. function=small conjugating protein ligase activity; Cellular component=cytosol; Biological process=ubiquitin -dependent protein catabolic process
  Homolog annotation: Hit_ID=Q9FKT3; Match level="QueryCoverage=100%, HitCoverage=100%, E-value=4e-67, Identity=78%"; Hit description =Ubiquitin carrier protein
  Pfam annotation: Domain name=UEV; Domain location=34-119; Score= -39.8; E_value=0.061; Accession=PF05743.3; Description=UEV domain
  Pfam annotation: Domain name=UQ_con; Domain location=5-142; Score =262.0; E_value=1.2e-75; Accession=PF00179.16; Description=Ubiquitin -conjugating enzyme
  Pfam module annotation: Pfam domain module=UEV::UQ_con; Domain location=34-119::5-142
MASRRINSELRDLQKDPPLSCSAGPVGDDMYHWQATIMGPTDSPFTGGVFLVSIHFPPDYPFKPPKVSFRTKVYHPNVNSNGSICLDILKEQWSPALTISKVLLSISSLLTDPNPDDPLVPEIANIYKSDRTKYENTARSWTQKYAMG

SEQ ID NO: 11190 - protein, 84 aa, Zea mays
  Coding DNA Sequence Number=SeqID_6732
FFFFLNTKILTSHRFKPHIQTPRFSTTHEHLEGSYATQSKRRYIFHHNENKFIPRLEINCLLHHLLLPYETETYKPKHNEIYTR

SEQ ID NO: 11191 - protein, 175 aa, Zea mays
  misc_feature (2)..(2): Xaa can be any naturally occurring amino acid
  misc_feature (24)..(26): Xaa can be any naturally occurring amino acid
  misc_feature (29)..(29): Xaa can be any naturally occurring amino acid
  misc_feature (35)..(35): Xaa can be any naturally occurring amino acid
  misc_feature (46)..(47): Xaa can be any naturally occurring amino acid
  misc_feature (50)..(51): Xaa can be any naturally occurring amino acid
  misc_feature (56)..(56): Xaa can be any naturally occurring amino acid
  misc_feature (58)..(61): Xaa can be any naturally occurring amino acid
  misc_feature (65)..(65): Xaa can be any naturally occurring amino acid
  misc_feature (67)..(75): Xaa can be any naturally occurring amino acid
  misc_feature (77)..(80): Xaa can be any naturally occurring amino acid
  misc_feature (82)..(175): Xaa can be any naturally occurring amino acid
  Coding DNA Sequence Number=SeqID_6734
LXRLAAGRGTPLHEAGTSGPTWPXXXTTXIAPTPXAPPGRTGVHAXXVWXXIDLGXLXXXXSLYXTXXXXXXXXXTXXXXPXXXXXXXXXXXXXXXXXXXXXXXXXXXXXXXXXXXXXXXXXXXXXXXXXXXXXXXXXXXXXXXXXXXXXXXXXXXXXXXXXXXXXXXXXXXXXX

SEQ ID NO: 11192 - protein, 93 aa, Zea mays
  misc_feature (45)..(45): Xaa can be any naturally occurring amino acid
  misc_feature (58)..(58): Xaa can be any naturally occurring amino acid
  Coding DNA Sequence Number=SeqID_6736
  Gene Ontology: Mol. function=metalloendopeptidase activity; Biological process=proteolysis
  Homolog annotation: Hit_ID=Q9FNU9; Match level="QueryCoverage=61%, HitCoverage=11%, E-value=2e-16, Identity=75%"; Hit description =Mitochondrial processing peptidase alpha-chain
  Subcellular localization annotation: CTP_CleavageSite=26; ConfidenceScore=5.15e-01
MYRVASGLGALKRHGANAQMMNAAIRCASTSVAQRSSGGLCTWLXTGARSNEIPPPDXHTFSGSDYSPLRCLDPWWRLDKTRVQQHFPQWSLK

SEQ ID NO: 11193 - protein, 166 aa, Zea mays
  misc_feature (61)..(61): Xaa can be any naturally occurring amino acid
  Coding DNA Sequence Number=SeqID_6737
  Homolog annotation: Hit_ID=Q10MP8; Match level="QueryCoverage=57%, HitCoverage=15%, E-value=2e-29, Identity=66%"; Hit description =Transducin family protein, putative, expressed
TKPRNLRPRISSRLQTEFADIPAVEAGAGAESKRGHLSLDYTCMKWVQLSSKVTRRRGTLXSSLIVLGTGSGDVLALDVAAGHWKWKVSDCHPGVKTTSLEGRGGPPRPVAEPGARQAWACPRAPALPCARRVLSYALLHARRRRATKVLGRDGFNDREDGCNGRQ

SEQ ID NO: 11194 - protein, 160 aa, Zea mays
  misc_feature (28)..(75): Xaa can be any naturally occurring amino acid
  misc_feature (77)..(88): Xaa can be any naturally occurring amino acid
  misc_feature (90)..(91): Xaa can be any naturally occurring amino acid
  misc_feature (93)..(106): Xaa can be any naturally occurring amino acid
  misc_feature (108)..(143): Xaa can be any naturally occurring amino acid
  misc_feature (145)..(160): Xaa can be any naturally occurring amino acid
  Coding DNA Sequence Number=SeqID_6738
VRTSSGPIKIEPQANPPKRQAHNTSEKXXXXXXXXXXXXXXXXXXXXXXXXXXXXXXXXXXXXXXXXXXXXXXXXPXXXXXXXXXXXXPXXPXXXXXXXXXXXXXXPXXXXXXXXXXXXXXXXXXXXXXXXXXXXXXXXXXXXPXXXXXXXXXXXXXXXX

SEQ ID NO: 11195 - protein, 134 aa, Zea mays
  misc_feature (31)..(31): Xaa can be any naturally occurring amino acid
  misc_feature (35)..(35): Xaa can be any naturally occurring amino acid
  misc_feature (38)..(38): Xaa can be any naturally occurring amino acid
  misc_feature (41)..(42): Xaa can be any naturally occurring amino acid
  misc_feature (45)..(46): Xaa can be any naturally occurring amino acid
  misc_feature (49)..(50): Xaa can be any naturally occurring amino acid
  misc_feature (52)..(52): Xaa can be any naturally occurring amino acid
  misc_feature (54)..(55): Xaa can be any naturally occurring amino acid
  misc_feature (57)..(57): Xaa can be any naturally occurring amino acid
  misc_feature (59)..(59): Xaa can be any naturally occurring amino acid
  misc_feature (62)..(64): Xaa can be any naturally occurring amino acid
  misc_feature (70)..(70): Xaa can be any naturally occurring amino acid
  misc_feature (72)..(72): Xaa can be any naturally occurring amino acid
  misc_feature (74)..(74): Xaa can be any naturally occurring amino acid
  misc_feature (76)..(79): Xaa can be any naturally occurring amino acid
  misc_feature (83)..(84): Xaa can be any naturally occurring amino acid
  misc_feature (86)..(87): Xaa can be any naturally occurring amino acid
  misc_feature (89)..(90): Xaa can be any naturally occurring amino acid
  misc_feature (92)..(93): Xaa can be any naturally occurring amino acid
  misc_feature (95)..(95): Xaa can be any naturally occurring amino acid
  misc_feature (100)..(100): Xaa can be any naturally occurring amino acid
  misc_feature (103)..(103): Xaa can be any naturally occurring amino acid
  misc_feature (105)..(106): Xaa can be any naturally occurring amino acid
  misc_feature (108)..(109): Xaa can be any naturally occurring amino acid
  misc_feature (111)..(111): Xaa can be any naturally occurring amino acid
  misc_feature (113)..(115): Xaa can be any naturally occurring amino acid
  misc_feature (117)..(117): Xaa can be any naturally occurring amino acid
  misc_feature (119)..(119): Xaa can be any naturally occurring amino acid
  misc_feature (122)..(123): Xaa can be any naturally occurring amino acid
  misc_feature (125)..(126): Xaa can be any naturally occurring amino acid
  misc_feature (128)..(128): Xaa can be any naturally occurring amino acid
  misc_feature (130)..(132): Xaa can be any naturally occurring amino acid
  Coding DNA Sequence Number=SeqID_6740
QLSITFSSLTNLAALYTTRTNGSVWEEGYQXTALXLTXPLXXDAXXSSXXLXPXXRXYXEFXXXTRFKTXGXSXWXXXXYRGXXNXXRXXAXXDXTKNGXYGXIXXGXXIXVXXXCXPXNNXXFXXYXIXXXAV

SEQ ID NO: 11196 - protein, 63 aa, Zea mays
  misc_feature (8)..(8): Xaa can be any naturally occurring amino acid
  misc_feature (13)..(13): Xaa can be any naturally occurring amino acid
  misc_feature (17)..(17): Xaa can be any naturally occurring amino acid
  misc_feature (21)..(21): Xaa can be any naturally occurring amino acid
  misc_feature (28)..(28): Xaa can be any naturally occurring amino acid
  misc_feature (30)..(30): Xaa can be any naturally occurring amino acid
  misc_feature (45)..(48): Xaa can be any naturally occurring amino acid
  misc_feature (62)..(62): Xaa can be any naturally occurring amino acid
  Coding DNA Sequence Number=SeqID_6742
  Subcellular localization annotation: CTP_CleavageSite=52; ConfidenceScore=5.07e-01
VSVSWCAXPLSLXVDDXNRAXPPYVLGXRXRRDLRWRRATTRRPXXXXENVSAGERPDPSEXR

SEQ ID NO: 11197 - protein, 126 aa, Zea mays
  misc_feature (1)..(4): Xaa can be any naturally occurring amino acid
  misc_feature (91)..(91): Xaa can be any naturally occurring amino acid
  misc_feature (124)..(124): Xaa can be any naturally occurring amino acid
  Coding DNA Sequence Number=SeqID_6744
  Subcellular localization annotation: CTP_CleavageSite=63; ConfidenceScore=5.53e-01
XXXXSILSRSRSLQQPPAAPHARPAGSPAPARRAPHAPRRLARPAQSAPPPAVRHLVYRAPAPPMAASGLLYRAPAPPMCRRHLHYELQAXNLRPQSHAPSVSPWQISALAILLHSPHQIASNXQG

SEQ ID NO: 11198 - protein, 98 aa, Zea mays
  misc_feature (92)..(92): Xaa can be any naturally occurring amino acid
  misc_feature (98)..(98): Xaa can be any naturally occurring amino acid
  Coding DNA Sequence Number=SeqID_6170
  Gene Ontology: Mol. function=protein binding; Cellular component =integral to membrane
  Homolog annotation: Hit_ID=Q9ASD3; Match level="QueryCoverage=98%, HitCoverage=40%, E-value=3e-40, Identity=79%"; Hit description =Putative uncharacterized protein P0456F08.33
  Pfam annotation: Domain name=DUF778; Domain location=34-98; Score =17.7; E_value=2.1e-11; Accession=PF05608.2; Description=Protein of unknown function (DUF778)
MLTEVFSSMEAEADFDVEDSRSNNELQELWPVGEIDPKGGRFPCCIVWTPLPVVSWLAPYIGHVGICQEDGSVLDFAGSNLVSMDNFAYGSXARYLQX

SEQ ID NO: 11199 - protein, 87 aa, Zea mays
  Coding DNA Sequence Number=SeqID_6171
HTIDNSVELVKSIDPGHDLVFCDIYIALFSVILDNNRCRHETSTHFGICHPCCSTPQICHHSKKCTPSLTSYPSPYATADLASSTLH

SEQ ID NO: 11200 - protein, 55 aa, Zea mays
  Coding DNA Sequence Number=SeqID_6173
  Subcellular localization annotation: CTP_CleavageSite=33; ConfidenceScore=5.33e-01
PAAARAGTMQKDDSRRNAPLPLPPQNSQPILLTLSNLQSSRFSRWGNCPSGGSSV

SEQ ID NO: 11201 - protein, 49 aa, Zea mays
  Coding DNA Sequence Number=SeqID_6175
FLRYMIMFAPVMFLILSSLAAVRDYHSDVITRLSLMHAVLATRYVNSRG

SEQ ID NO: 11202 - protein, 74 aa, Zea mays
  Coding DNA Sequence Number=SeqID_6177
  Subcellular localization annotation: CTP_CleavageSite=36; ConfidenceScore=5.20e-01
AATHSSIDVHLFKAFHFPNIMHYVSSNCVVIPSSVASASVSNAAAPQAIINSDDVAWAHCFFPDANKKHWLKCK

SEQ ID NO: 11203 - protein, 206 aa, Zea mays
  misc_feature (108)..(109): Xaa can be any naturally occurring amino acid
  misc_feature (115)..(115): Xaa can be any naturally occurring amino acid
  misc_feature (117)..(127): Xaa can be any naturally occurring amino acid
  misc_feature (129)..(131): Xaa can be any naturally occurring amino acid
  misc_feature (135)..(135): Xaa can be any naturally occurring amino acid
  misc_feature (142)..(142): Xaa can be any naturally occurring amino acid
  misc_feature (201)..(202): Xaa can be any naturally occurring amino acid
  Coding DNA Sequence Number=SeqID_6179
YNLLLRTTPSTRPLTLAWREYPKKREELYSGVDTPKLTTGRGPTRHEQSIVRAKKAGVAGASKKAREQQRTSISMVQQHVVVQVHVVVYRCIGTVQSFTTMPLSLFLXXEPPGRXRXXXXXXXXXXXNXXXGQRXEKEARTXRAGHEAEAGAAAAALHFTSLGSPEQQVHHLGRLAVAVAVVLSLPPAPPAAGALLAPVAXXRRCC

SEQ ID NO: 11204 - protein, 88 aa, Zea mays
  Coding DNA Sequence Number=SeqID_6181
ERGNCGNQNYCCKQNRELTHGSISNTSVFLYGNVKARVKGLNLPQKRGIPGMAIHSIKREGHNLETILIQKGSTLGITKLDEHFSSAS

SEQ ID NO: 11205 - protein, 98 aa, Zea mays
  misc_feature (38)..(38): Xaa can be any naturally occurring amino acid
  misc_feature (55)..(55): Xaa can be any naturally occurring amino acid
  misc_feature (65)..(65): Xaa can be any naturally occurring amino acid
  misc_feature (79)..(79): Xaa can be any naturally occurring amino acid
  Coding DNA Sequence Number=SeqID_6183
  Gene Ontology: Mol. function=aspartic-type endopeptidase activity; Cellular component=chromatin; Biological process=DNA integration
  Homolog annotation: Hit_ID=Q2R8K9; Match level="QueryCoverage=97%, HitCoverage=15%, E-value=1e-17, Identity=45%"; Hit description =Retrotransposon protein, putative, unclassified
LGPATPPGVTAHELDEQLLLANEVKPMTFNETQEHKSXHQTMLNEFTSIKANDTXELVELPPRVXPINLKWGYNTKHDXPGSSVITKFKARLVHRGVC

SEQ ID NO: 11206 - protein, 98 aa, Zea mays; identical to SEQ ID NO: 11205
  misc_feature (38)..(38): Xaa can be any naturally occurring amino acid
  misc_feature (55)..(55): Xaa can be any naturally occurring amino acid
  misc_feature (65)..(65): Xaa can be any naturally occurring amino acid
  misc_feature (79)..(79): Xaa can be any naturally occurring amino acid
  Coding DNA Sequence Number=SeqID_6184
  Gene Ontology: Mol. function=aspartic-type endopeptidase activity; Cellular component=chromatin; Biological process=DNA integration
  Homolog annotation: Hit_ID=Q2R8K9; Match level="QueryCoverage=97%, HitCoverage=15%, E-value=1e-17, Identity=45%"; Hit description =Retrotransposon protein, putative, unclassified

SEQ ID NO: 11207 - protein, 55 aa, Zea mays
  Coding DNA Sequence Number=SeqID_6185
SEYMPCIPDIKLRILHFILAKSSEIYELKISLSFFYSSISRAAAQKGAELPGRLV

SEQ ID NO: 11208 - protein, 55 aa, Zea mays; identical to SEQ ID NO: 11207
  Coding DNA Sequence Number=SeqID_6186

SEQ ID NO: 11209 - protein, 49 aa, Zea mays
  Coding DNA Sequence Number=SeqID_6188
  Homolog annotation: Hit_ID=A5AF12; Match level="QueryCoverage=83%, HitCoverage=8%, E-value=5e-07, Identity=68%"; Hit description =Putative uncharacterized protein
TRGRSCAVSTQRTILSPFTKEYRVLAALSSIQIFLEGFTSVRGETNNYR

SEQ ID NO: 11210 - protein, 191 aa, Zea mays
  misc_feature (82)..(82): Xaa can be any naturally occurring amino acid
  Coding DNA Sequence Number=SeqID_6189
  Gene Ontology: Mol. function=zinc ion binding; Biological process=DNA integration
  Homolog annotation: Hit_ID=Q8LN47; Match level="QueryCoverage=100%, HitCoverage=53%, E-value=2e-47, Identity=43%"; Hit description =Putative mutator protein
  Pfam annotation: Domain name=SWIM; Domain location=136-168; Score =35.2; E_value=2.4e-07; Accession=PF04434.8; Description=SWIM zinc finger
YRRERFDFHFGQIINACPDVVGYLNEHHNHLWSRSMLSTEIKCDYVNNNLAECFNSWIKNIKDFPVVDLVDRLRQMTMELCXKRRKIADKLSGSILPAIISQLRAKTKGLGQISVCKNRHKAEIFGNYQDMTPWRHEVDLHEHTCSCREWEVIGKPCRHALAFIQTERNVDLDSFVHEYYSVWRFKVAYSG

SEQ ID NO: 11211 - protein, 58 aa, Zea mays
  Coding DNA Sequence Number=SeqID_6190
SLSKSHMLLCILNTSYLKFSFTQMITRWIKAINFPCVFPFSCNHFFHITMPLVFTLQG

SEQ ID NO: 11212 - protein, 183 aa, Zea mays
  misc_feature (48)..(48): Xaa can be any naturally occurring amino acid
  misc_feature (77)..(77): Xaa can be any naturally occurring amino acid
  misc_feature (81)..(81): Xaa can be any naturally occurring amino acid
  misc_feature (97)..(97): Xaa can be any naturally occurring amino acid
  misc_feature (100)..(101): Xaa can be any naturally occurring amino acid
  misc_feature (103)..(103): Xaa can be any naturally occurring amino acid
  misc_feature (105)..(106): Xaa can be any naturally occurring amino acid
  misc_feature (108)..(108): Xaa can be any naturally occurring amino acid
  misc_feature (112)..(112): Xaa can be any naturally occurring amino acid
  misc_feature (115)..(117): Xaa can be any naturally occurring amino acid
  misc_feature (119)..(119): Xaa can be any naturally occurring amino acid
  misc_feature (124)..(124): Xaa can be any naturally occurring amino acid
  misc_feature (126)..(136): Xaa can be any naturally occurring amino acid
  misc_feature (139)..(139): Xaa can be any naturally occurring amino acid
  misc_feature (142)..(145): Xaa can be any naturally occurring amino acid
  misc_feature (147)..(147): Xaa can be any naturally occurring amino acid
  misc_feature (149)..(149): Xaa can be any naturally occurring amino acid
  misc_feature (151)..(154): Xaa can be any naturally occurring amino acid
  misc_feature (156)..(158): Xaa can be any naturally occurring amino acid
  misc_feature (160)..(164): Xaa can be any naturally occurring amino acid
  misc_feature (166)..(166): Xaa can be any naturally occurring amino acid
  misc_feature (168)..(173): Xaa can be any naturally occurring amino acid
  misc_feature (176)..(176): Xaa can be any naturally occurring amino acid
  misc_feature (178)..(180): Xaa can be any naturally occurring amino acid
  misc_feature (182)..(183): Xaa can be any naturally occurring amino acid
  Coding DNA Sequence Number=SeqID_6192
  Subcellular localization annotation: CTP_CleavageSite=76; ConfidenceScore=5.89e-01
DASCPLNFHTHNFTYHRRSSTFAFHPTSSSRLPVPPSASSGPPTLGSXAPPSPRPLARSDELLLGSRHLASRGPPRXSSPXRAPQSALRCSDRLVAXPDXXHXDXXRXNRGXGNXXXDXPHPSXHXXXXXXXXXXXIYXFTXXXXSXPXLXXXXRXXXYXXXXXFXIXXXXXXIVXQXXXFXX

SEQ ID NO: 11213 - protein, 181 aa, Zea mays
  misc_feature (66)..(66): Xaa can be any naturally occurring amino acid
  misc_feature (72)..(72): Xaa can be any naturally occurring amino acid
  misc_feature (86)..(86): Xaa can be any naturally occurring amino acid
  misc_feature (88)..(88): Xaa can be any naturally occurring amino acid
  misc_feature (98)..(100): Xaa can be any naturally occurring amino acid
  misc_feature (102)..(102): Xaa can be any naturally occurring amino acid
  misc_feature (106)..(111): Xaa can be any naturally occurring amino acid
  misc_feature (114)..(115): Xaa can be any naturally occurring amino acid
  misc_feature (117)..(120): Xaa can be any naturally occurring amino acid
  misc_feature (122)..(123): Xaa can be any naturally occurring amino acid
  misc_feature (125)..(128): Xaa can be any naturally occurring amino acid
  misc_feature (131)..(132): Xaa can be any naturally occurring amino acid
  misc_feature (135)..(181): Xaa can be any naturally occurring amino acid
  Coding DNA Sequence Number=SeqID_6194
  Subcellular localization annotation: CTP_CleavageSite=55; ConfidenceScore=5.09e-01
LPVASQYLTPQSPPHIQIRDGNGQGRNPKTIALPPPPLIPNGGCAALPSGSRPPVARQGGGGSGGXLERRLXPEAGAVFRAGWVPXSXAEQKKQGRAXXXAXKGTXXXXXXPGXXPXXXXKXXLXXXXLSXXPRXXXXXXXXXXXXXXXXXXXXXXXXXXXXXXXXXXXXXXXXXXXXXXX

SEQ ID NO: 11214 - protein, 197 aa, Zea mays
  misc_feature (1)..(86): Xaa can be any naturally occurring amino acid
  Coding DNA Sequence Number=SeqID_6196
XXXXXXXXXXXXXXXXXXXXXXXXXXXXXXXXXXXXXXXXXXXXXXXXXXXXXXXXXXXXXXXXXXXXXXXXXXXXXXXXXXXXXXYQWEGIVPTAGGGPGGAERIISPAPHGWWDVLVAPPPEKKYGFWGAPPSFYKGSHRKGGGVFFFLRGGKKKTGFLGGGRARARGVLVKPWGESSQGAPLPRLDLPLFGYEK

SEQ ID NO: 11215 - protein, 85 aa, Zea mays
  Coding DNA Sequence Number=SeqID_6198
  Homolog annotation: Hit_ID=A3ABX3; Match level="QueryCoverage=97%, HitCoverage=6%, E-value=2e-30, Identity=80%"; Hit description =Putative uncharacterized protein
LTIRFFSCKVLRLQECLSKYQRTAGTTPQVDLAHLLATRDQELRALTAEMNQVHSELQHARGLIDEKDSELQRIRLSNNQYVEEN

SEQ ID NO: 11216 - protein, 207 aa, Zea mays
  misc_feature (1)..(1): Xaa can be any naturally occurring amino acid
  misc_feature (34)..(34): Xaa can be any naturally occurring amino acid
  misc_feature (60)..(60): Xaa can be any naturally occurring amino acid
  Coding DNA Sequence Number=SeqID_6199
  Homolog annotation: Hit_ID=Q8SA86; Match level="QueryCoverage=87%, HitCoverage=19%, E-value=6e-92, Identity=95%"; Hit description =Putative retrotransposon protein
XAEAKISELNTKLLRQSEQFEREKQDLNAKLEAXEAQQNSDLRKLLTNLQEKCLEFSNKXIQRLRTIFYSVGANSEKFTPSAEDLPKTDAWVEGEIDELDEVIAGHGDFCAWVASRGTAAAFMKAGCDHGKIVNRPNFTLSPSILDDIPDLARSISNRFVKMIWTKGGREKAGDEARSHLDPVRNHTLCLPFPVNLILTSNDLIHVG

SEQ ID NO: 11217 - protein, 232 aa, Zea mays
  misc_feature (200)..(200): Xaa can be any naturally occurring amino acid
  misc_feature (223)..(223): Xaa can be any naturally occurring amino acid
  Coding DNA Sequence Number=SeqID_6200
  Gene Ontology: Mol. function=DNA binding; Cellular component=nucleus; Biological process=regulation of alternative nuclear mRNA splicing, via spliceosome
  Homolog annotation: Hit_ID=Q6ZBS5; Match level="QueryCoverage=98%, HitCoverage=18%, E-value=5e-76, Identity=65%"; Hit description =Putative uncharacterized protein P0583B06.21
  Pfam annotation: Domain name=HSA; Domain location=15-81; Score=47.7; E_value=4e-11; Accession=PF07529.4; Description=HSA
YIEANIKRAGEWSLCNISLEKKQKSHWDFVLEEMVWMANDFTQERLWKNTVAAQMSHWISSRGRAVFEEASIQRKQKSVARVLANGIMNFWCSVHTLRASGGIPKPMQIQQPNELEENKLGGVKTRKADEECLEQEKSRQSPIQSFALRLLEYNINASEFLPLAEAPSTPDRLNDFGILKVPDQLSEANLFYGVAPGAMXAYRESMERLLIYNNKKVGDTVLXDDYEPSTYA

SEQ ID NO: 11218 - protein, 295 aa, Zea mays
  Coding DNA Sequence Number=SeqID_6201
  Gene Ontology: Mol. function=ATPase activity, coupled to transmembrane movement of substances; Cellular component=integral to membrane; Biological process=transport
  Homolog annotation: Hit_ID=Q8GU79; Match level="QueryCoverage=100%, HitCoverage=23%, E-value=1e-126, Identity=78%"; Hit description=MDR -like ABC transporter
  Pfam annotation: Domain name=ABC_membrane; Domain location=59-295; Score=10.6; E_value=0.00065; Accession=PF00664.13; Description=ABC transporter transmembrane region
MAMNYYEDHSMSSSSHADDTDERKSTVSVSVSPEASADEESFSFFGLLCYADTVDWLLMALGTLGSIIHGMAFPVGYLLLGKALDAFGTNINDPEGMVHALYKVVPFVWYMAAATLPAGMVEISCWIYSSERQLARMRLAFLRSILNQEVGAFDTDLTTATIITGVTNYMSVIQDAIGEKLGHFVASFSTFFAGVIIAFISCWQVAMLSFLVIPLILIIGAAYTKKLNVLSLSRNAIVSEAVSVVEQTLSHQLTVISFSEEPWAMKSFVQCMESQFNLSKKEALIKGIGLGMFQA

SEQ ID NO: 11219 - protein, 159 aa, Zea mays
  misc_feature (66)..(66): Xaa can be any naturally occurring amino acid
  Coding DNA Sequence Number=SeqID_6202
  Homolog annotation: Hit_ID=Q10H82; Match level="QueryCoverage=60%, HitCoverage=10%, E-value=6e-19, Identity=54%"; Hit description=Nop14- like family protein, expressed
NLSDDDEDEINIHNVLLSENDDFDEEVPLDDGSDQEGKMVLSKKRLSLQRDDHASVAGLPHETHAXNSTKEAMTAIISDSLLYVALAAPGRLEDHHPPHCASPLSLSCARPPCMLLFNSSLLSSFSPPSLPSLFFLPVPPSLFFPPVSLHSCGRFLLFL

SEQ ID NO: 11220 - protein, 145 aa, Zea mays
  misc_feature (123)..(145): Xaa can be any naturally occurring amino acid
  Coding DNA Sequence Number=SeqID_6203
SVSLDVWKGPLATAIEDVRPAGRREKAPRPAAYSNWRKGAIPDIPFWAPRVLNRLRVFLFPKPFRFLNHTPLGAGCFPWTNATQSPPRSWPSHGRPSPPLQSNGGGGGFPGAPRVAKGRGPLXXXXXXXXXXXXXXXXXXXXXXX

SEQ ID NO: 11221 - protein, 138 aa, Zea mays
  Coding DNA Sequence Number=SeqID_6205
  Homolog annotation: Hit_ID=A3B0H9; Match level="QueryCoverage=97%, HitCoverage=14%, E-value=4e-08, Identity=34%"; Hit description =Putative uncharacterized protein
MWKGVHTYSSVTGLWSDRSSEWVRWKHGGGWVNGEHTEPLERDVAGPLSMACCIFSSTTSRQSCMTVAVNGQGNACRIIPWPDQRECPQVAFISQSQGHLHCISELVKGSDFSFPGLSIWVLEDYDSIEWVLKHSLSF

SEQ ID NO: 11222 - protein, 138 aa, Zea mays; identical to SEQ ID NO: 11221
  Coding DNA Sequence Number=SeqID_6206
  Homolog annotation: Hit_ID=A3B0H9; Match level="QueryCoverage=97%, HitCoverage=14%, E-value=4e-08, Identity=34%"; Hit description =Putative uncharacterized protein

SEQ ID NO: 11223 - protein, 225 aa, Zea mays
  Coding DNA Sequence Number=SeqID_6207
RGGPGGGTEPSPATATRKQPKRTRGMPRKYSDTMIDLGKDTTGQPVLFGRSMDHTACTESNSSFSIVAVDASSPFASSSTATCGDKSKGQSIRGKDEKKTISNALYCPVVSGVESQSICSTEILPNDPAVSVENALPSAQNTVSMHELCSASLLNREGNACKSALSDDSELPIHISPKSSNKRESSGRRGRGRPKTIPLSAGTGHFVASVASLPKTTCVPRPRPR

SEQ ID NO: 11224 - protein, 113 aa, Zea mays
  Coding DNA Sequence Number=SeqID_6209
  Gene Ontology: Mol. function=heat shock protein binding
  Homolog annotation: Hit_ID=A2WSY6; Match level="QueryCoverage=93%, HitCoverage=12%, E-value=5e-12, Identity=38%"; Hit description =Putative uncharacterized protein
  Subcellular localization annotation: CTP_CleavageSite=68; ConfidenceScore=5.25e-01
MSLPIKKVYPDPTSASAAIKQSINFPEPRLKPAKALLQVKGLSFKFRNKPSHLKSSRSTEIKSPISVEADTSEQKLWVKKSSEEEKNPDDSLSDKHKKLTAVRLDHFDDNGKK

SEQ ID NO: 11225 - protein, 200 aa, Zea mays
  misc_feature (165)..(165): Xaa can be any naturally occurring amino acid
  Coding DNA Sequence Number=SeqID_6210
  Gene Ontology: Mol. function=RNA binding
  Homolog annotation: Hit_ID=Q7F1D1; Match level="QueryCoverage=100%, HitCoverage=33%, E-value=6e-70, Identity=68%"; Hit description =Putative nucleolar protein
GEVVALDRSHNKVMDILKLASEMDLSCIKAYKLDALKSVRKTDEARSLGMADNHSEAIETPTEDPCHATLGGKSTSVDEDSSTTTVVFSDNKNLNSKRYISKAELRKNLRQMKNGPGRNNCSGGRVEKSKGFCPNSFDRVLLDAPCSALGLRPRLFAGETHYYDXETLESLREHSKYQRKMFDQAVKLVRPGGVIVYSTC

SEQ ID NO: 11226 - protein, 198 aa, Zea mays
  misc_feature (164)..(165): Xaa can be any naturally occurring amino acid
  misc_feature (167)..(167): Xaa can be any naturally occurring amino acid
  misc_feature (170)..(170): Xaa can be any naturally occurring amino acid
  misc_feature (174)..(174): Xaa can be any naturally occurring amino acid
  misc_feature (176)..(178): Xaa can be any naturally occurring amino acid
  misc_feature (183)..(185): Xaa can be any naturally occurring amino acid
  misc_feature (189)..(190): Xaa can be any naturally occurring amino acid
  misc_feature (192)..(192): Xaa can be any naturally occurring amino acid
  misc_feature (195)..(195): Xaa can be any naturally occurring amino acid
  Coding DNA Sequence Number=SeqID_6211
  Gene Ontology: Mol. function=ribonucleoprotein binding; Cellular component=spliceosome; Biological process=mRNA processing
  Homolog annotation: Hit_ID=A3AWA0; Match level="QueryCoverage=94%, HitCoverage=27%, E-value=2e-75, Identity=79%"; Hit description =Putative uncharacterized protein
  Pfam annotation: Domain name=NOSIC; Domain location=95-147; Score =89.8; E_value=8.7e-24; Accession=PF08060.3; Description=NOSIC (NUC001) domain
MASLADSFLADLDELSDNEAYPEEDNAEAVGMDEDGDDDMPDLESLNYDDLDSVSKLQKTQRYSDIMQKVEGALEKDTYLSNQGFILEEDPEYQLIVDCNALSVDIENELIIIHNFIRDKYRLKFPELESLVHHPIDYARVVKKIANEVDITLVDLEGLLPSAXXMXVSXTASXTXXXPLSQXXXVKTXXHXTEXLIL

SEQ ID NO: 11227 - protein, 124 aa, Zea mays
  misc_feature (124)..(124): Xaa can be any naturally occurring amino acid
  Coding DNA Sequence Number=SeqID_6212
ALLPPPAIIYRTNIYTHNTILDNFLVAPVQVWQPLSPGGLDDGGWLPCVLVQRASEESSAVDSRSRTPDEGRRRAGPPEAGTWSPGRGKCRRAATTDGRTAGEGCAADLPCWCWVFRVWTLRRX

SEQ ID NO: 11228 - protein, 76 aa, Zea mays
  Coding DNA Sequence Number=SeqID_6214
RPRTTKISEALFNESSRFCRNVRNMGMDGTLTSTGITSADSKCCTVFILLTIGDSNYTKSNLKETVQISQKKSACL

SEQ ID NO: 11229 - protein, 118 aa, Zea mays
  misc_feature (114)..(114): Xaa can be any naturally occurring amino acid
  Coding DNA Sequence Number=SeqID_6216
  Gene Ontology: Cellular component=mitochondrial matrix
  Homolog annotation: Hit_ID=Q2RAS2; Match level="QueryCoverage=78%, HitCoverage=45%, E-value=2e-29, Identity=70%"; Hit description =Mitochondrial glycoprotein, expressed
MFLRRLRTSAALRRGATTGGVLAAVRAELANELSSSAPPPFRSELAPDFDTVSDAPRAQDVLLRRRDGSEEVLVSALLAPLQFVGRDPLPRAALVKVFVSKPGAAPVLHFDCRXSWVG

SEQ ID NO: 11230 - protein, 70 aa, Zea mays
  Coding DNA Sequence Number=SeqID_6217
  Gene Ontology: Mol. function=sequence-specific DNA binding; Cellular component=intracellular
  Homolog annotation: Hit_ID=Q7WXZ7; Match level="QueryCoverage=62%, HitCoverage=5%, E-value=3e-11, Identity=79%"; Hit description =Plasmid related protein
QEEFVDISMSAEQASAYQQLAGKLTQELRQALARRDTTLLGVVLTKIRRSCRTDISLLQTCFYTSAATTL

SEQ ID NO: 11231 - protein, 70 aa, Zea mays; identical to SEQ ID NO: 11230
  Coding DNA Sequence Number=SeqID_6218
  Gene Ontology: Mol. function=sequence-specific DNA binding; Cellular component=intracellular
  Homolog annotation: Hit_ID=Q7WXZ7; Match level="QueryCoverage=62%, HitCoverage=5%, E-value=3e-11, Identity=79%"; Hit description =Plasmid related protein

SEQ ID NO: 11232 - protein, 290 aa, Zea mays
  misc_feature (1)..(1): Xaa can be any naturally occurring amino acid
  misc_feature (8)..(8): Xaa can be any naturally occurring amino acid
  misc_feature (10)..(10): Xaa can be any naturally occurring amino acid
  misc_feature (92)..(92): Xaa can be any naturally occurring amino acid
  misc_feature (112)..(112): Xaa can be any naturally occurring amino acid
  misc_feature (117)..(117): Xaa can be any naturally occurring amino acid
  misc_feature (125)..(125): Xaa can be any naturally occurring amino acid
  misc_feature (137)..(137): Xaa can be any naturally occurring amino acid
  misc_feature (193)..(193): Xaa can be any naturally occurring amino acid
  misc_feature (225)..(225): Xaa can be any naturally occurring amino acid
  misc_feature (246)..(246): Xaa can be any naturally occurring amino acid
  misc_feature (253)..(253): Xaa can be any naturally occurring amino acid
  Coding DNA Sequence Number=SeqID_6219
  Gene Ontology: Mol. function=DNA-dependent ATPase activity; Cellular component=nucleus; Biological process=DNA replication initiation
  Homolog annotation: Hit_ID=A2XAK9; Match level="QueryCoverage=87%, HitCoverage=34%, E-value=1e-101, Identity=77%"; Hit description =Putative uncharacterized protein
  Pfam annotation: Domain name=MCM; Domain location=142-290; Score= -151.5; E_value=2.1e-07; Accession=PF00493.13; Description=MCM235 family
XRSVRTVXCXPGLGGAIVPRSCDHVPQPGEEPCPLDPWIAVPDKSKYADLQTLKLQENPEDVPTGELPRNVLLSVDRHLVQTIVPGTRLTVXGIYSVYQASTTQKGAVGVKXQPYIXAVALEQSXENNNSNGPLKLXTLDEGIWEFKEFCTEGQDAYAKLCSMIGPSIYGHSDVKKAIACLLFGGSKKSYLMXYFLKFVKKTAPIAVYTSGKGSSAAGLKESELXDKTSRQVFLERRTMVLAGGGXILVPEFXKMRPENKGGFPGAGGPKKIFLPKGGFKKGPLFGVFFF

SEQ ID NO: 11233 - protein, 47 aa, Zea mays
  Coding DNA Sequence Number=SeqID_6220
FPYCCVQFFMDTISDEKGPNGFYFLISTGIEQKLVIVCCSKHLSNNI

SEQ ID NO: 11234 - protein, 71 aa, Zea mays
  Coding DNA Sequence Number=SeqID_6222
FSLDLIYEISTLLDYAEGLGDHVRAFAKATLNLFFYLGPGACPRSWLCRGRHRALRASSRALADESMLTYG

SEQ ID NO: 11235 - protein, 77 aa, Zea mays
  Coding DNA Sequence Number=SeqID_6224
RGMGNRATNVFSLYGPIPCMPLENILIPCMPLAPHVIAPKNYTYMPPSGPQGMRLKSDGIPGIFSIYKCVSSNLVSQ

SEQ ID NO: 11236 - protein, 46 aa, Zea mays
  Coding DNA Sequence Number=SeqID_6226
RGRGRGTLPRMQYRCVTCVAVCACESSVYRFKVKFVLFNLINRFIQ

SEQ ID NO: 11237 - protein, 58 aa, Zea mays
  Coding DNA Sequence Number=SeqID_6228
LSNSIKFIFLKGNMAGLIETIWISFIYIYSFKARVPCFVCHMNYAPIASSGEDTVRIS

SEQ ID NO: 11238 - protein, 113 aa, Zea mays
  misc_feature (97)..(97): Xaa can be any naturally occurring amino acid
  Coding DNA Sequence Number=SeqID_6230
  Homolog annotation: Hit_ID=Q7XDD0; Match level="QueryCoverage=92%, HitCoverage=49%, E-value=2e-23, Identity=53%"; Hit description =Putative uncharacterized protein
  Pfam annotation: Domain name=DUF640; Domain location=26-114; Score =43.6; E_value=6.8e-10; Accession=PF04852.3; Description=Protein of unknown function (DUF640)
  Subcellular localization annotation: CTP_CleavageSite=71; ConfidenceScore=5.40e-01
MDLVPHPDSPHSDNSGGGGGSASGALSPGASSAGAASALASPSRYDSQKRRYWNTFGQYLRNHRPSLYMARCNGAHVLEFLRYLDQYGKTNEHTPAXPIIGYPATVGSLSEPG

SEQ ID NO: 11239 - protein, 66 aa, Zea mays
  Coding DNA Sequence Number=SeqID_6231
LASTSINRQQLLPLIPNKKENNCFKSGGIIEMYTVYRDMLGLLIVYPVDSSAIVSHQRSITITLWL

SEQ ID NO: 11240 - protein, 150 aa, Zea mays
  Coding DNA Sequence Number=SeqID_6233
  Homolog annotation: Hit_ID=A2WLD4; Match level="QueryCoverage=100%, HitCoverage=9%, E-value=5e-42, Identity=60%"; Hit description =Putative uncharacterized protein
TCDQDTGTKFCSKTEFLAEKQSHLSGEPPIAVHVDKGVYDYVKDDDGDSLEENAAWMLCSLSDNKCAGSPRKGTDRLSKRSFSQISNHFKNSYGKIKDICSPARLLRKRDGKVPFLKRRQRRHFYEVSPSDVDPFCIVKERIRVFWPLDE

SEQ ID NO: 11241 - protein, 71 aa, Zea mays
  misc_feature (32)..(33): Xaa can be any naturally occurring amino acid
  misc_feature (36)..(38): Xaa can be any naturally occurring amino acid
  misc_feature (48)..(51): Xaa can be any naturally occurring amino acid
  misc_feature (68)..(70): Xaa can be any naturally occurring amino acid
  Coding DNA Sequence Number=SeqID_6234
LSLRKATIIPNVWLSPDQGWDRDSNLCYLISXXLTXXXTLFRFAYGYXXXXNDNANLNNVYIAVNTIXXXA

SEQ ID NO: 11242 - protein, 82 aa, Zea mays
  Coding DNA Sequence Number=SeqID_6236
  Subcellular localization annotation: CTP_CleavageSite=76; ConfidenceScore=5.19e-01
DELSLPDSCVSPPHLTWLLLCFSSLVSLLCSNPSQQRWLECLSTLSTTAQCRTRLYTTPYSPLPSSRSVEKLHQINLSMNPC

SEQ ID NO: 11243 - protein, 115 aa, Zea mays
  Coding DNA Sequence Number=SeqID_6238
NLEDAAGDSLRLDPSCSPLARAKNYRFYELPRRAPVPPSETLASAASGSKVRNLTGHPIRLAPNSKGSSTLNIEDQMVLYALQQRPLNGPLNLENAAGFSIYRVSLNVPLSILIL

SEQ ID NO: 11244 - protein, 97 aa, Zea mays
  Coding DNA Sequence Number=SeqID_6240
RVTGVNESKHLLMGGLDFHKIAFFTLNDENFANQLMATNGQTDQFFSILVDTDQYCTGTAAPCYCTPRSKPNLGAARTGTPALRFGPRANEELVGIS

SEQ ID NO: 11245 - protein, 75 aa, Zea mays
  Coding DNA Sequence Number=SeqID_6242
  Subcellular localization annotation: CTP_CleavageSite=18; ConfidenceScore=5.05e-01
STPPLRRSSSSPAVCATRARMASYPAADLRHVMTRPIHRSCMDEPGQTQSDTVKPSLYSRCTDPRYRTRLRETIE

SEQ ID NO: 11246 - protein, 238 aa, Zea mays
  Coding DNA Sequence Number=SeqID_6244
  Gene Ontology: Mol. function=glycerophosphodiester phosphodiesterase activity; Cellular component=anchored to membrane; Biological process=glycerol metabolic process
  Homolog annotation: Hit_ID=Q6ZFH9; Match level="QueryCoverage=98%, HitCoverage=30%, E-value=1e-67, Identity=57%"; Hit description =Putative glycerophosphoryl diester phosphodiesterase 2
LDPTSSAGQEVLIKSKDSDVLVKLKQQTTKCKLVYTLPSGIGDASNSSLKDIKKFAEYVAVDSKSVFTLSSDFIIRQNSLVQDLQSAGLALYAEVFQNEFVAQPLDFFGDETVEINYYIQSFNLSGIITDFPKTVRRYKRNTCTVLGKDMPSYMQPPQAGSLAQFLQTFKTQPPSLPPMSTLNSSSVEEPPLPTVALRSVSDGSASGATKTPGTPSDAPTATVNAGMLLVMVFTALLI

SEQ ID NO: 11247 - protein, 121 aa, Zea mays
  misc_feature (79)..(79): Xaa can be any naturally occurring amino acid
  misc_feature (89)..(89): Xaa can be any naturally occurring amino acid
  misc_feature (96)..(96): Xaa can be any naturally occurring amino acid
  Coding DNA Sequence Number=SeqID_6245
  Gene Ontology: Mol. function=nutrient reservoir activity
  Homolog annotation: Hit_ID=Q41818; Match level="QueryCoverage=42%, HitCoverage=24%, E-value=6e-24, Identity=98%"; Hit description=Zein precursor
  Subcellular localization annotation: CTP_CleavageSite=66; ConfidenceScore=5.04e-01
MAAKMFALFALLALCATATSATHIPGHLSPLLMPLATMNPWMQYCMKQQGVANLLAWPTLMLQQLLASPLQPCQMPMMXPGMMPPMTMXMPMPNMXPSDGWCPTMMSPINDGWPSMMALRR

SEQ ID NO: 11248 - protein, 158 aa, Zea mays
  misc_feature (99)..(99): Xaa can be any naturally occurring amino acid
  misc_feature (130)..(134): Xaa can be any naturally occurring amino acid
  misc_feature (136)..(136): Xaa can be any naturally occurring amino acid
  misc_feature (139)..(141): Xaa can be any naturally occurring amino acid
  misc_feature (144)..(144): Xaa can be any naturally occurring amino acid
  Coding DNA Sequence Number=SeqID_6246
  Gene Ontology: Mol. function=transporter activity; Cellular component= integral to membrane; Biological process=transport
  Homolog annotation: Hit_ID=A7Q502; Match level="QueryCoverage=88%, HitCoverage=28%, E-value=8e-32, Identity=48%"; Hit description =Chromosome undetermined scaffold_51, whole genome shotgun sequence
  Subcellular localization annotation: CTP_CleavageSite=59; ConfidenceScore=5.19e-01
MAQSQQMASKKPPGLRLFGGAGSLRTYQTLVLVLTFFAYACFHMTRKITSIVKSALDPQTKMGFSHWGRLHLHTSEAPALNTGWLPFNTADGSALLGEXDVAFLAAYSIGMFFAGHIGDRIDLRIFLTIXXXXXAXFTXXXGAXDLLNVSFSSSMDEP

SEQ ID NO: 11249 - protein, 55 aa, Zea mays
  Coding DNA Sequence Number=SeqID_6247
  Gene Ontology: Mol. function=oxidoreductase activity
  Homolog annotation: Hit_ID=Q2GTV5; Match level="QueryCoverage=94%, HitCoverage=22%, E-value=6e-11, Identity=55%"; Hit description =Putative uncharacterized protein
SGRPGTTKPSRLEENWASRDVDLTDDDLSEMRSLIEKLRPQGPRYNEVAMVNIGN

SEQ ID NO: 11250 - protein, 55 aa, Zea mays; identical to SEQ ID NO: 11249
  Coding DNA Sequence Number=SeqID_6248
  Gene Ontology: Mol. function=oxidoreductase activity
  Homolog annotation: Hit_ID=Q2GTV5; Match level="QueryCoverage=94%, HitCoverage=22%, E-value=6e-11, Identity=55%"; Hit description =Putative uncharacterized protein

SEQ ID NO: 11251 - protein, 83 aa, Zea mays
  Coding DNA Sequence Number=SeqID_6249
  Gene Ontology: Mol. function=catalytic activity; Cellular component =cytoplasm; Biological process=protein transport
  Homolog annotation: Hit_ID=Q871U2; Match level="QueryCoverage=100%, HitCoverage=12%, E-value=3e-24, Identity=66%"; Hit description =Autophagy-related protein 7
GVAAIASALLGEMLTSLLQHPLKHAAPAPQPVHGQDLERDPPSHPLGLVPHQIRGYVSTFNNIVIRGQSYDSCRACSPKILDA

SEQ ID NO: 11252 - protein, 69 aa, Zea mays
  Coding DNA Sequence Number=SeqID_545
  Subcellular localization annotation: CTP_CleavageSite=39; ConfidenceScore=5.08e-01
STTNFCTAYLLVHDLLPKSCCKNLVFLSSKSELTMVLLTAATGWRSRGRGDNVAAGWRSRGRFSQRKGS

SEQ ID NO: 11253 - protein, 177 aa, Zea mays
  misc_feature (143)..(143): Xaa can be any naturally occurring amino acid
  Coding DNA Sequence Number=SeqID_547
  Gene Ontology: Mol. function=transcription regulator activity; Cellular component=nucleus; Biological process=regulation of transcription
  Homolog annotation: Hit_ID=A2YFN1; Match level="QueryCoverage=35%, HitCoverage=17%, E-value=5e-19, Identity=56%"; Hit description =Putative uncharacterized protein
  Subcellular localization annotation: CTP_CleavageSite=63; ConfidenceScore=5.28e-01
SSLLPLLFSGRRHLPGLPAAERPCSSLHLHPARSLSSSTSDGRRGVEQRCGRAAATCSRARLAASADRSSAWPTGARPPRHAQRAHTPGCWRWPAGGRHAGPTSHARRTWLGGSRSDNDPARYHDGYSRLIAWAYSSLDQYKXQSFFHTFREAHKVMHSRDLQKLEGILSTSHLEVI

SEQ ID NO: 11254 - protein, 57 aa, Zea mays
  Coding DNA Sequence Number=SeqID_548
DTYCDSPPKLSGPHAPIFALMASDGCARVPDNLTRLSSSPTETHHPKDLPHNRYINQ

SEQ ID NO: 11255 - protein, 269 aa, Zea mays
  misc_feature (36)..(36): Xaa can be any naturally occurring amino acid
  misc_feature (142)..(142): Xaa can be any naturally occurring amino acid
  misc_feature (163)..(163): Xaa can be any naturally occurring amino acid
  misc_feature (187)..(187): Xaa can be any naturally occurring amino acid
  misc_feature (216)..(216): Xaa can be any naturally occurring amino acid
  misc_feature (246)..(246): Xaa can be any naturally occurring amino acid
  Coding DNA Sequence Number=SeqID_550
  Gene Ontology: Mol. function=aspartic-type endopeptidase activity; Cellular component=chromatin; Biological process=chromatin assembly or disassembly
  Homolog annotation: Hit_ID=Q8SA91; Match level="QueryCoverage=100%, HitCoverage=12%, E-value=9e-78, Identity=50%"; Hit description =Putative gag-pol polyprotein
  Pfam annotation: Domain name=rve; Domain location=57-193; Score=49.6; E_value=1.1e-11; Accession=PF00665.16; Description=Integrase core domain
HQSTVCGHSGIPVMYRRLKQLFAWQGMKNDVQVFVXVCQQAKPNRSKLPSLLQALLVLTMAWQVISLDFVTGLPLSGGFDRILVVVDSFTKYAHFLGLKHPTHLISDRDRVFTSQLWRDLFKLADVQSCMSTTTYHPQSDGXTERVDECMETFLRCFVHTCPXSKWNSWLALAEYWYNNSPHSSIVXPFEALYGYVPRHFGISVDIVVRVGSLSPXLMTDAIKLHLPHAKHRMKRRADKGRFERQXVFLKLQPYVHSSLVARANQKLAF

SEQ ID NO: 11256 - protein, 110 aa, Zea mays
  Coding DNA Sequence Number=SeqID_551
RESTPFEEKSTGGSRGPQDTVAGCMWRPVMRRASDDGGSTSSSKPPSSSWQGAYPMEEVLRRGREAPTFRCPPRAGYEGIEGPSPSSRPKPRPLLERERRGGGEGMGASS

SEQ ID NO: 11257 - protein, 157 aa, Zea mays
  Coding DNA Sequence Number=SeqID_552
  Subcellular localization annotation: CTP_CleavageSite=55; ConfidenceScore=5.04e-01
RAAHHSAAPLRCYGDLRLRSGSALSTSPSPLLHGGLVATGALGSCCRWSELWRVPSAARADLAERAREGQQCPRRLLRPRPAAHSGYRAGLLRCSAAADQAGFFTWPPARSSWRRAPRRGAPPRPAWRTLTRARRHRGRRGSRGSSTRLALLQFPFT

SEQ ID NO: 11258 - protein, 143 aa, Zea mays
  Coding DNA Sequence Number=SeqID_553
  Gene Ontology: Mol. function=serine carboxypeptidase activity; Cellular component=extracellular region; Biological process =proteolysis
  Homolog annotation: Hit_ID=Q9XE81; Match level="QueryCoverage=99%, HitCoverage=38%, E-value=4e-45, Identity=62%"; Hit description =Serine carboxypeptidase
  Subcellular localization annotation: CTP_CleavageSite=40; ConfidenceScore=5.23e-01
MSSSSGQYCSPWRAATTTTTALLLSLAAASASLLLPALARASSGEDDRILGLPGQPNGVAFDMFGGYVTVDEQAGRALYYWLQEADRTAVEDPDAAPLLLWLNGGPGCSSVGSGALEELGAFRVHNDGERLLLNEYAWNRGNV

SEQ ID NO: 11259 - protein, 471 aa, Zea mays
  Coding DNA Sequence Number=SeqID_554
  Gene Ontology: Mol. function=glycine hydroxymethyltransferase activity; Cellular component=cytoplasm; Biological process=one -carbon compound metabolic process
  Homolog annotation: Hit_ID=UPI0000D575E5; Match level="QueryCoverage =99%, HitCoverage=94%, E-value=0.0, Identity=76%"; Hit description =PREDICTED: similar to CG3011-PA isoform 3
  Pfam annotation: Domain name=Aminotran_1_2; Domain location=7-410; Score=-108.8; E_value=0.074; Accession=PF00155.11; Description =Aminotransferase class I and II
  Pfam annotation: Domain name=SHMT; Domain location=16-414; Score =926.7; E_value=1e-275; Accession=PF00464.10; Description=Serine hydroxymethyltransferase
  Pfam module annotation: Pfam domain module=Aminotran_1_2::SHMT; Domain location=7-410::16-414
NFVRKMSDIKVLNASLADSDPELYDLIKKEKKRQLSGLEMIASENFTTMPVLQCLSTCLHNKYSEGLPGQRYYGGNEFIDEIEVLAQKRALQTYKLDADKWGVNVQPYSGSPGNFAVYTGIVEPHGRIMGLDLPDGGHLTHGFFTPTKKISATSIFFESMPYKVNPDTGLIDYDQLAKSARLFRPKVIIAGVSCYSRPLDYKRFREICDEVGAYLVSDMAHISGLVAAGVTPSPFEYSDVVTTTTHKSLRGPRAGVIFFRKGVRSVNAKGDKIMYDLESRINQAVFPGLQGGPHNNTIAAIATAMKQAATPQFVEYAKQIVANAQRLSDRLQEAGYKVVTGGTEVHMLLVDLRSKGLTGAKGEFILEEINIACNKNTVPGDKSALNPSGIRLGTPALTTRGLKEADIDQVVKLMDDALKLGKEISDKSGPKLVDFKKLCHEDATFSKKIRELKERVAQFSTKFPLPGYDEC

SEQ ID NO: 11260 - protein, 97 aa, Zea mays
  Coding DNA Sequence Number=SeqID_555
MHIDSANASGQLRSTYYMLMKFLSSLDQNQVHLNGRQMVDRITQERVTRVIKHKLLHEASSPGCKPLPHDERTRDKDRSKDDKNKHRSYRQIDSFGS

SEQ ID NO: 11261 - protein, 182 aa, Zea mays
  Coding DNA Sequence Number=SeqID_557
AEGHAQELYGRGMEAATLDIRESAAGSSREGAAEQMDRGAAGESAMGAAMDGTPRELGEGSYDAAAIAVLHDEQSAVQGSLAGHSVHGRWRSVAAWGEVERRQATAAMGRAQRLWELEGGTSREMGAELEQGLAAGHGKVAGHQGKEQGRAGEAGHGEELGTSEQRDPAGEDKGPAAKRARG

SEQ ID NO: 11262 - protein, 108 aa, Zea mays
  Coding DNA Sequence Number=SeqID_559
  Subcellular localization annotation: CTP_CleavageSite=60; ConfidenceScore=5.04e-01
KTIIILIEFLFDQMHDLFVSLLKKQRHAPSSVQARRDKKKKNSDMQVFRRGKKKTNAFCSGGQKRAIHSNSLFLKLELLFLPNTFLSIKLRVQLHAWSCSVVEQQLQS

SEQ ID NO: 11263 - protein, 68 aa, Zea mays
  Coding DNA Sequence Number=SeqID_561
MKTSMNKHSHYPLKLHGGEGGVRPQEEGLPRRRDPWPSKLPFSSLLIRLRKDGGKTRKHQTTNHCCMM

SEQ ID NO: 11264 - protein, 83 aa, Zea mays; identical to SEQ ID NO: 11251
  Coding DNA Sequence Number=SeqID_6250
  Gene Ontology: Mol. function=catalytic activity; Cellular component =cytoplasm; Biological process=protein transport
  Homolog annotation: Hit_ID=Q871U2; Match level="QueryCoverage=100%, HitCoverage=12%, E-value=3e-24, Identity=66%"; Hit description =Autophagy-related protein 7

SEQ ID NO: 11265 - protein, 79 aa, Zea mays
  Coding DNA Sequence Number=SeqID_6251
HEAACLVHSSSIHVQQAREKKYVHGMFSALFEHHVQQAREKKYVHPGYKHEQLRKYNRQTHPGSEIRNEHECKITGGVV

SEQ ID NO: 11266 - protein, 54 aa, Zea mays
  Coding DNA Sequence Number=SeqID_6253
HHPRCRCMLVRISRKHQLAFGDPSSLLRLFLLPGRSFFLRRVFRFILLFLDAFF

SEQ ID NO: 11267 - protein, 54 aa, Zea mays
  Coding DNA Sequence Number=SeqID_6255
LGDPTADNAFFILPIENFEVEVLVIYSYICYGRVVFVTVCKYNMPIKLKNKKSD

SEQ ID NO: 11268 - protein, 58 aa, Zea mays
  Coding DNA Sequence Number=SeqID_6257
  Gene Ontology: Cellular component=spliceosome; Biological process =mitosis
  Homolog annotation: Hit_ID=Q5GAP2; Match level="QueryCoverage=100%, HitCoverage=18%, E-value=2e-21, Identity=87%"; Hit description =Putative uncharacterized protein
SCRKLFWKLAKSSWDISKFAMVALADMDSEEIQVYIDYFDITLVPATIFFFNAHHMKM

SEQ ID NO: 11269 - protein, 144 aa, Zea mays
  misc_feature (1)..(34): Xaa can be any naturally occurring amino acid
  misc_feature (40)..(44): Xaa can be any naturally occurring amino acid
  misc_feature (48)..(50): Xaa can be any naturally occurring amino acid
  misc_feature (52)..(52): Xaa can be any naturally occurring amino acid
  misc_feature (54)..(56): Xaa can be any naturally occurring amino acid
  misc_feature (61)..(61): Xaa can be any naturally occurring amino acid
  misc_feature (65)..(65): Xaa can be any naturally occurring amino acid
  misc_feature (84)..(84): Xaa can be any naturally occurring amino acid
  misc_feature (89)..(89): Xaa can be any naturally occurring amino acid
  misc_feature (98)..(98): Xaa can be any naturally occurring amino acid
  misc_feature (103)..(103): Xaa can be any naturally occurring amino acid
  Coding DNA Sequence Number=SeqID_6258
XXXXXXXXXXXXXXXXXXXXXXXXXXXXXXXXXXGPLFSXXXXXGGPXXXGXGXXXFPGFXGRTXNSATRSQKIFAPRRRRKKXRPRPXDWNLLKVRXLVWWXLFTGKAPDEDLAAGRRAAAAVALVAASEAWTQESDSSGVAS

SEQ ID NO: 11270 - protein, 51 aa, Zea mays
  Coding DNA Sequence Number=SeqID_6260
VPSKIARSKRNYSSSRSLCIQVDMIATVLEIARCSVRCGALATALLRRDHA

SEQ ID NO: 11271 - protein, 66 aa, Zea mays
  Coding DNA Sequence Number=SeqID_6262
  Subcellular localization annotation: CTP_CleavageSite=60; ConfidenceScore=5.82e-01
RAGARTSPTSSWRSAATAPCCRCPSRPRSRCSARRRRTRTGGCPTRSMSPTPPAISPSPCCMGGSS

SEQ ID NO: 11272 - protein, 66 aa, Zea mays; identical to SEQ ID NO: 11271
  Coding DNA Sequence Number=SeqID_6263
  Subcellular localization annotation: CTP_CleavageSite=60; ConfidenceScore=5.82e-01

SEQ ID NO: 11273 - protein, 88 aa, Zea mays
  Coding DNA Sequence Number=SeqID_6264
VLACSTVSGVMDFQTLVCHAKCHEMACWGANPECTSIQTMTPTQHCVVIHSISTSAVLDNDNPFDRLGRHCQVAAFQGPQPFDCSTSG

SEQ ID NO: 11274 - protein, 128 aa, Zea mays
  Coding DNA Sequence Number=SeqID_6266
  Subcellular localization annotation: CTP_CleavageSite=37; ConfidenceScore=5.30e-01
SGIGCTDSVIKITSAPYSARFAVGNFSTLQIHAACPVCARSSSIGFRACSRLAALEGTRHPLMNHTSPARSRHDLVVVPCVVKKFQASGEDEASRVVFTKCTTKSSNILRDSSSIRQNYLVEEKIFIN

SEQ ID NO: 11275 - protein, 130 aa, Zea mays
  misc_feature (31)..(31): Xaa can be any naturally occurring amino acid
  misc_feature (38)..(38): Xaa can be any naturally occurring amino acid
  misc_feature (43)..(43): Xaa can be any naturally occurring amino acid
  misc_feature (49)..(49): Xaa can be any naturally occurring amino acid
  misc_feature (78)..(78): Xaa can be any naturally occurring amino acid
  misc_feature (111)..(113): Xaa can be any naturally occurring amino acid
  misc_feature (117)..(118): Xaa can be any naturally occurring amino acid
  misc_feature (122)..(123): Xaa can be any naturally occurring amino acid
  Coding DNA Sequence Number=SeqID_6268
GERERERDRESSLVPPPPLPGVLLGEVEPKXNEQHAKXREQSXESTSEXETELHDDFQTSATEHQLEVKLDGGGKESXDKDKEKGKDGEKEKGRALGRWQVWITSCRGYRXXXGRDXXDQLXXEFCYPKF

SEQ ID NO: 11276 - protein, 59 aa, Zea mays
  Coding DNA Sequence Number=SeqID_6270
DLIVDNHLISSLINTLRVASAGPLFLLALIRLSEKFVLVTLDDWRHLDGSIAIRSATII

SEQ ID NO: 11277 - protein, 60 aa, Zea mays
  misc_feature (25)..(25): Xaa can be any naturally occurring amino acid
  misc_feature (38)..(38): Xaa can be any naturally occurring amino acid
  Coding DNA Sequence Number=SeqID_6272
  Gene Ontology: Mol. function=nucleic acid binding; Biological process= DNA integration
  Homolog annotation: Hit_ID=Q2QXB7; Match level="QueryCoverage=100%, HitCoverage=11%, E-value=2e-11, Identity=55%"; Hit description =Retrotransposon protein, putative, Ty1-copia subclass
GAIIGVLSDDIVDSYITCATGKEMXDILDSKYGLCDTXGELYIMEQFHDYKMSYGLSTVE

SEQ ID NO: 11278 - protein, 68 aa, Zea mays
  Coding DNA Sequence Number=SeqID_6273
NRRPPKRTPALRTQLTTFSAIHNHVVKFVLWDANIHLPDAPDVDVLKPLASNLCALRVWCEWCARKTQ

SEQ ID NO: 11279 - protein, 155 aa, Zea mays
  misc_feature (49)..(155): Xaa can be any naturally occurring amino acid
  Coding DNA Sequence Number=SeqID_6275
MLMVHHLMICLIIKLNRKLFYYLFSKISEFYYFISLYIFSYTNFRPYRXXXXXXXXXXXXXXXXXXXXXXXXXXXXXXXXXXXXXXXXXXXXXXXXXXXXXXXXXXXXXXXXXXXXXXXXXXXXXXXXXXXXXXXXXXXXXXXXXXXXXXXXXXX

SEQ ID NO: 11280 - protein, 171 aa, Zea mays
  Coding DNA Sequence Number=SeqID_6277
  Subcellular localization annotation: CTP_CleavageSite=25; ConfidenceScore=5.17e-01
PPYSLSSLLSPALSRPPAELRPCTRVAAAPCPAPPTPSAPPAEPSDLSCQELAKAARSTKPRRPAPCPERTLAAPHRSTPRAPDIETPRDPPAPAARTACHPARSSPRLRSRDARDTVPLQLPRRPRQDTLPRTEGQPTNPAPSVRYWNFNASVPLPPPLLPLLHERHQHP

SEQ ID NO: 11281 - protein, 124 aa, Zea mays
  Coding DNA Sequence Number=SeqID_6279
  Gene Ontology: Mol. function=ketol-acid reductoisomerase activity; Cellular component=mitochondrion; Biological process=branched chain family amino acid biosynthetic process
  Homolog annotation: Hit_ID=A1W6T4; Match level="QueryCoverage=99%, HitCoverage=36%, E-value=3e-57, Identity=90%"; Hit description=Ketol- acid reductoisomerase
  Pfam annotation: Domain name=CoA_binding; Domain location=12-109; Score=-2.2; E_value=0.0045; Accession=PF02629.9; Description=CoA binding domain
  Pfam annotation: Domain name=IlvN; Domain location=13-123; Score =162.6; E_value=1.1e-45; Accession=PF07991.2; Description =Acetohydroxy acid isomeroreductase, c
  Pfam module annotation: Pfam domain module=CoA_binding::IlvN; Domain location=12-109::13-123
MKVFYDKDCDLSLIKGKTVAIIGYGSQGHAHAQNLNDSGVKVVVGLRKGGASWDKVGKAGLTVKEVNDAVKEADVVMILLPDEQIAEVYKNNVEPHIKQGASLAFAHGFNVHYNQVVPRADLDD

SEQ ID NO: 11282 - protein, 73 aa, Zea mays
  Coding DNA Sequence Number=SeqID_6280
  Subcellular localization annotation: CTP_CleavageSite=16; ConfidenceScore=5.12e-01
ASLQRAESSPFFKLVVAARRAELARFSSRAKVEPSLSRQLVDWTSRAELIQVSSRTVSSPRWQGLLIKINRFP

SEQ ID NO: 11283 - protein, 124 aa, Zea mays
  misc_feature (116)..(116): Xaa can be any naturally occurring amino acid
  Coding DNA Sequence Number=SeqID_6282
HTRTYARTYIARNKRRETVHMQADSLVWITTTVLTNKSYLKREQAKLPCVQHINLSTYQSIRSYVTWLCQEASRVPVQLVIFGKRFVRVLHICARSRDKNKEKEPTNLAVARTSYXKKKKKKKK

SEQ ID NO: 11284 - protein, 137 aa, Zea mays
  misc_feature (1)..(3): Xaa can be any naturally occurring amino acid
  Coding DNA Sequence Number=SeqID_6284
XXXRSIPHTEKHPPLAAAEKTWTSSWSRAYAVNRDSPTGSGASPHLQDCARGLRGCGATLVLDELLIRVSTPMDLHLPEENPAIALTTGKGVCPHFAMAYSSYYTHWQPGLWVGAPTRPSPTNPLSWTRGAIAWCRR

SEQ ID NO: 11285 - protein, 137 aa, Zea mays; identical to SEQ ID NO: 11284
  misc_feature (1)..(3): Xaa can be any naturally occurring amino acid
  Coding DNA Sequence Number=SeqID_6285

SEQ ID NO: 11286 - protein, 168 aa, Zea mays
  Coding DNA Sequence Number=SeqID_6286
  Gene Ontology: Mol. function=binding; Biological process=intein -mediated protein splicing
  Homolog annotation: Hit_ID=Q880E1; Match level="QueryCoverage=100%, HitCoverage=58%, E-value=2e-39, Identity=32%"; Hit description =Filamentous hemagglutinin, intein-containing, putative
  Pfam annotation: Domain name=Fil_haemagg; Domain location=4-87; Score= 9.7; E_value=2.1; Accession=PF05594.4; Description=Haemagluttinin repeat
  Pfam annotation: Domain name=Fil_haemagg; Domain location=91-162; Score=16.8; E_value=0.08; Accession=PF05594.4; Description =Haemagluttinin repeat
  Pfam module annotation: Pfam domain module=Fil_haemagg::Fil_haemagg; Domain location=4-87::91-162
SVDNRAGEISSQIAAELSGQSLDNSGGKLLAGTTLQLTVAQVINQAKGLVFAQEARFTGTRLDNAQGTFAGQRALAIQLAAGLDNTQGKLSSEGTLTLGSQRIDNTGGSISSAGTLGITSASDLLNQGGIVETAQGLTLTSTRLDNSQQGLLKSQGAATLNTGLFDNT

SEQ ID NO: 11287 - protein, 199 aa, Zea mays
  Coding DNA Sequence Number=SeqID_6287
  Gene Ontology: Mol. function=structural molecule activity; Cellular component=flagellin-based flagellum hook; Biological process=ciliary or flagellar motility
  Homolog annotation: Hit_ID=B0KR06; Match level="QueryCoverage=98%, HitCoverage=29%, E-value=6e-49, Identity=54%"; Hit description =Flagellar hook-associated protein FlgK precursor
LTDPNKLAFAGPLAGVAGKNTGTGTFTPPQLTVPLDIHGGADTAQLRTGIENSMPVKMVFGDKAADGTQPYTVTDAQGFKIGTGSIIPGQGNKITINVPMRDATGAVITGKSFSFDTTVGGSPANNDSTTFSFNSGATSDGRNAQSLLALQTKATVGVTDGNGGVSLVSANSRLVSQVGSKAAQANTDSTATGALLTAN

SEQ ID NO: 11288 - protein, 243 aa, Zea mays
  misc_feature (175)..(243): Xaa can be any naturally occurring amino acid
  Coding DNA Sequence Number=SeqID_6288
  Subcellular localization annotation: CTP_CleavageSite=39; ConfidenceScore=5.57e-01
QMKVSLKPRWGLPAKKTSVMASVKRSKNKGARQGPFILYSSAAQRLRVWRSLGSRLTVFVDIQWLGLAFYNAFVDHHFTHLGLRGDFVHGVEQYAFEDRAQTTGAGLALQCPLGHRFERVRTELEVHTFHLEQLGILLGQGVFRLGKESASTQPHPKRPTTVTTADGQRIPGSDXXXXXXXXXXXXXXXXXXXXXXXXXXXXXXXXXXXXXXXXXXXXXXXXXXXXXXXXXXXXXXXXXXXXX

SEQ ID NO: 11289 - protein, 89 aa, Zea mays
  Coding DNA Sequence Number=SeqID_6289
  Gene Ontology: Mol. function=protein binding
  Homolog annotation: Hit_ID=Q4ZSJ6; Match level="QueryCoverage=100%, HitCoverage=77%, E-value=2e-39, Identity=91%"; Hit description =Putative uncharacterized protein
MSTATDTAEFLEELNGGAFASQIGHALSEVAAGVVDHGKAGKVVITLDFSQIGESHQVKIKHKLEYKVPTKRGTRSENTTLDTPMHVGT

SEQ ID NO: 11290 - protein, 325 aa, Zea mays
  misc_feature (280)..(280): Xaa can be any naturally occurring amino acid
  misc_feature (296)..(296): Xaa can be any naturally occurring amino acid
  misc_feature (300)..(300): Xaa can be any naturally occurring amino acid
  misc_feature (325)..(325): Xaa can be any naturally occurring amino acid
  Coding DNA Sequence Number=SeqID_6290
  Gene Ontology: Mol. function=cyclic-nucleotide phosphodiesterase activity; Biological process=tRNA 3'-terminal CCA addition
  Homolog annotation: Hit_ID=Q3K5S5; Match level="QueryCoverage=99%, HitCoverage=78%, E-value=1e-153, Identity=82%"; Hit description =Multifunctional CCA protein [Includes: CCA-adding enzyme (EC 2.7.7.25) (EC 2.7.7.21) ...
  Homolog annotation: Hit description=(tRNA nucleotidyltransferase) (tRNA adenylyl-/cytidylyl- transferase) (tRNA CCA-pyrophosphorylase) (tRNA-NT); 2'-nucleotidase (EC 3.1.3.-); 2',3'-cyclic phosphodiesteras e (EC ...
  Homolog annotation: Hit description=3.1.4.-); Phosphatase (EC 3.1.3. -)]
  Pfam annotation: Domain name=HD; Domain location=205-310; Score=34.4; E_value=4.2e-07; Accession=PF01966.12; Description=HD domain
  Pfam annotation: Domain name=PolyA_pol; Domain location=1-99; Score =50.5; E_value=5.9e-12; Accession=PF01743.10; Description=Poly A polymerase family
  Pfam module annotation: Pfam domain module=HD::PolyA_pol; Domain location=205-310::1-99
RVVVGATTEEMLALGYKPVGSDFPVFLDPKNGDEYALARTERKSGRGYGGFVFHASPEVTLEEDLIRRDLTINAMAEDDEGNLTDPYHGQRDLEARILRHVSPAFAEDPLRVLRVARFAARYASLGFRVAPETLELMRELSNSGELEALTPERSWKEISRALMEDQPQVFIQVLRDCGALKTLMPEIDALFGVPQPEAHHPEIDTGIHTLSVLEQAAIHAQPLTVRWACLLHDLGKGLTPVDKLPQHIAHEHRGLALIKAVNERFKVPRECQELALLVGXYHTHGHRALELRPSTXLLGXLQSFDVYRRPPRFEEFVVACEVDAX

SEQ ID NO: 11291 - protein, 227 aa, Zea mays
  misc_feature (203)..(204): Xaa can be any naturally occurring amino acid
  misc_feature (211)..(212): Xaa can be any naturally occurring amino acid
  misc_feature (214)..(215): Xaa can be any naturally occurring amino acid
  misc_feature (217)..(222): Xaa can be any naturally occurring amino acid
  misc_feature (224)..(225): Xaa can be any naturally occurring amino acid
  Coding DNA Sequence Number=SeqID_6291
  Gene Ontology: Mol. function=transcription factor activity; Cellular component=intracellular; Biological process=regulation of transcription, DNA-dependent
  Homolog annotation: Hit_ID=Q4KK90; Match level="QueryCoverage=95%, HitCoverage=94%, E-value=1e-81, Identity=70%"; Hit description =Cyclic nucleotide-binding protein
  Pfam annotation: Domain name=cNMP_binding; Domain location=33-123; Score=92.9; E_value=1e-24; Accession=PF00027.19; Description=Cyclic nucleotide-binding domain
MDVEKWHPRLATGHWYSHLPDDLQNSLLTSARLRQLTAGQYLFKRGDPPCGLYVVLEGSLRISAVNEQGKEAVLSLAELPYWFGEISLFDGLPRTHDACAVGPCTLLQVPQPALLQILEETPRYWRDMALLMSQKLRLTFINIEQLSLMPASVRVAHRLLMIAEGYGDIEQARHVLQLPQEDLAAMLSLSRQTTNALLKDLQXXGIVRLGXXEXXIXXXXXXRXXGW

SEQ ID NO: 11292 - protein, 222 aa, Zea mays
  Coding DNA Sequence Number=SeqID_6292
  Gene Ontology: Mol. function=transcription factor activity; Biological process=regulation of transcription, DNA-dependent
  Homolog annotation: Hit_ID=Q48GX1; Match level="QueryCoverage=99%, HitCoverage=92%, E-value=1e-110, Identity=93%"; Hit description =Transcriptional regulator PsrA
  Pfam annotation: Domain name=TetR_N; Domain location=10-56; Score =70.7; E_value=4.9e-18; Accession=PF00440.13; Description=Bacterial regulatory proteins, tetR family
MAQSETVERILDAAEQLFAEKGFAETSLRLITSKAGVNLAAVNYHFGSKKALIQAVFSRFLGPFCISLDRELERRQAKPENKPSLEDLLEILVEQALVVQPRSGNDLSIFMRLLGLAFSQSQGHLRRYLEDMYGKVFRRYMLLVNEAAPRIPPIELFWRVHFLLGAAAFSLSGIKALRAFAETDFGPNTSIEQVMRLMVPFLAAGMRAETGPTDQAMAATQY

SEQ ID NO: 11293 - protein, 86 aa, Zea mays
  Coding DNA Sequence Number=SeqID_6293
DFQIVPPSLGFNPPRDEFLAWLKNLLIVSRPHLDYVLCTTLRPNRCIVDNDGGSGFRDFVPGPLGLVVKRERVREAPPTTRGHPLV

SEQ ID NO: 11294 - protein, 89 aa, Zea mays
  Coding DNA Sequence Number=SeqID_6295
  Subcellular localization annotation: CTP_CleavageSite=44; ConfidenceScore=5.14e-01
RTPPRYWTPCRGSSDDTANNDDDGSLQTLFSSLSGRLTMPGSRVAMATWGKKFGYTTRTLSVYTLLGNPNKLPMIYGSGYMYTYPNGSA

SEQ ID NO: 11295 - protein, 96 aa, Zea mays
  Coding DNA Sequence Number=SeqID_6297
  Subcellular localization annotation: CTP_CleavageSite=45; ConfidenceScore=5.55e-01
ECPYATSFASKTLVSSQFNNESPQKTHRNRGTARMKPSTGSSPFSASLTTNDDWTHSIAFGQEHGGAGQGIFIQNTTTLTIPNAILAQYHGVVSYV

SEQ ID NO: 11296 - protein, 66 aa, Zea mays
  Coding DNA Sequence Number=SeqID_6298
  Gene Ontology: Mol. function=glutathione peroxidase activity; Cellular component=mitochondrion; Biological process=response to oxidative stress
  Homolog annotation: Hit_ID=Q38703; Match level="QueryCoverage=83%, HitCoverage=47%, E-value=6e-24, Identity=98%"; Hit description =Glutathione peroxidase
MGAPLLPLTSTYKFLKSSKGGLFGDSIKWNFSKFLVDKEGRVVDRYAPTTSPLSIEKDIKKLLGSS

SEQ ID NO: 11297 - protein, 190 aa, Zea mays
  Coding DNA Sequence Number=SeqID_6299
  Gene Ontology: Mol. function=cinnamoyl-CoA reductase activity; Biological process=cellular metabolic process
  Homolog annotation: Hit_ID=Q8VWI9; Match level="QueryCoverage=34%, HitCoverage=17%, E-value=4e-16, Identity=66%"; Hit description =Cinnamoyl-CoA reductase
GRYLCAESVLHREDVVRILAKLFPEYPVPTRCSDVRIPRTRPCRRSSRLLPHLGLALPPVCLSRFGAPTSRPRGGPRAGPRARSSGTSASSAARRAGRPAARRRPPGGSATRPCGGGTCRRPPRRRRLAARTARPPSACPGRPAPSAPATGCLAGLLPRGDACSFVLPSCRAHAPAGLLCVSKLVFFLIN

SEQ ID NO: 11298 - protein, 190 aa, Zea mays; identical to SEQ ID NO: 11297
  Coding DNA Sequence Number=SeqID_6300
  Gene Ontology: Mol. function=cinnamoyl-CoA reductase activity; Biological process=cellular metabolic process
  Homolog annotation: Hit_ID=Q8VWI9; Match level="QueryCoverage=34%, HitCoverage=17%, E-value=4e-16, Identity=66%"; Hit description =Cinnamoyl-CoA reductase

SEQ ID NO: 11299 - protein, 64 aa, Zea mays
  Coding DNA Sequence Number=SeqID_6301
  Homolog annotation: Hit_ID=Q2QR07; Match level="QueryCoverage=87%, HitCoverage=18%, E-value=9e-14, Identity=67%"; Hit description=N3 like protein, putative, expressed
  Pfam annotation: Domain name=MtN3_slv; Domain location=2-63; Score =16.7; E_value=0.00022; Accession=PF03083.6; Description=MtN3saliva family
KLSRRPLLRSLAIQDMPFSLSLSLTLSAVVWFLYGLLIKDKYVALPNILGFTFGVVQMVLYVLS

SEQ ID NO: 11300 - protein, 180 aa, Zea mays
  Coding DNA Sequence Number=SeqID_6302
AVFHDSIERKNESGKTSNAKIVEAKAMFLELHKKAFSLFHAWNILRLEPKWSPNKANYVGKTLPECNNGTGEVHPVVQRPPGRKAEKEKAKAKKHGDDESDPFIDEVKKMRESRIEIEKDRKDRDDKFLELEKKKLQLEQDQHDKIIMTTDTSTMDDQSKQYFQLLKDEILARRFGSSQP

SEQ ID NO: 11301 - protein, 82 aa, Zea mays
  Coding DNA Sequence Number=SeqID_6304
  Gene Ontology: Mol. function=carbon-sulfur lyase activity
  Homolog annotation: Hit_ID=Q8LL95; Match level="QueryCoverage=95%, HitCoverage=18%, E-value=1e-22, Identity=60%"; Hit description =Putative alliin lyase
HASDENPAFCNFTKGPAAVHPAFAWLRCDREDVEDCASFLRGHGILTRSGSQFGADPRYVRVSMLDRDDAYDIFVKRLSSLH

SEQ ID NO: 11302 - protein, 54 aa, Zea mays
  Coding DNA Sequence Number=SeqID_6305
LYLNLDDHGVRFQALLLRRNLLHIQKTPKKLKTWTLNQLGMSKINFILTFYTKS

SEQ ID NO: 11303 - protein, 156 aa, Zea mays
  misc_feature (8)..(8): Xaa can be any naturally occurring amino acid
  misc_feature (10)..(10): Xaa can be any naturally occurring amino acid
  misc_feature (12)..(14): Xaa can be any naturally occurring amino acid
  misc_feature (18)..(20): Xaa can be any naturally occurring amino acid
  misc_feature (31)..(31): Xaa can be any naturally occurring amino acid
  misc_feature (40)..(44): Xaa can be any naturally occurring amino acid
  misc_feature (70)..(70): Xaa can be any naturally occurring amino acid
  misc_feature (79)..(82): Xaa can be any naturally occurring amino acid
  misc_feature (86)..(86): Xaa can be any naturally occurring amino acid
  misc_feature (88)..(89): Xaa can be any naturally occurring amino acid
  misc_feature (96)..(97): Xaa can be any naturally occurring amino acid
  misc_feature (148)..(151): Xaa can be any naturally occurring amino acid
  misc_feature (154)..(155): Xaa can be any naturally occurring amino acid
  Coding DNA Sequence Number=SeqID_6307
SCQPPSLXDXAXXXCPHXXXWACSTGSPRPXPWPPTIAPXXXXXHGLPVAGSCPPLTWSTPTLQLLRELXKEIDLLSNXXXXEEAXKXXKWLNPTXXRRRAHSLPTSRPHEAKSKARMGSTVAMMTCATSSPWTPKDVQFHALTSLFXXXXGFXXC

SEQ ID NO: 11304 - protein, 131 aa, Zea mays
  misc_feature (1)..(9): Xaa can be any naturally occurring amino acid
  Coding DNA Sequence Number=SeqID_6309
  Subcellular localization annotation: CTP_CleavageSite=72; ConfidenceScore=5.29e-01
XXXXXXXXXPGFGHYGRGPQACSLLCAQRRWHSSAPATLRCVVGGPVVPVRRGFIVEREVPFTSTEVSITTLAGALGPTRSGPEVGGTKPGGRFGSLGSFLTETPRRSVFWPHGDDRRLAYFWKLPLYGYR

SEQ ID NO: 11305 - protein, 109 aa, Zea mays
  misc_feature (1)..(1): Xaa can be any naturally occurring amino acid
  Coding DNA Sequence Number=SeqID_6311
  Subcellular localization annotation: CTP_CleavageSite=69; ConfidenceScore=5.66e-01
XSLYKYLALASWSQFPATLPLSPCPCSLAERSPRRRCCSPTPGRPGRLSTLVTAPTSSSVAPLCPTSFSAAIAEARTTNVLHCSPARSFTLQQEADCVVEDPNSFEDDP

SEQ ID NO: 11306 - protein, 76 aa, Zea mays
  Coding DNA Sequence Number=SeqID_6313
  Subcellular localization annotation: CTP_CleavageSite=41; ConfidenceScore=5.37e-01
SPHKAITRPSPFVTITSSQPTKMSRVTAAVLFYILAVAALSAAEAPAESPKEGSAAKAPEAAKRTAAPAEAPGAAY

SEQ ID NO: 11307 - protein, 170 aa, Zea mays
  misc_feature (1)..(13): Xaa can be any naturally occurring amino acid
  Coding DNA Sequence Number=SeqID_6314
XXXXXXXXXXXXXLPPLVVSYYSCVARRSPSSFVSDVMLLCCRHPLPYDGFLVPCHSISTMLCFSIAVRRRSPSPDCCIIVINPQVPVAKASPSLLLAGDLSLDANNRVRLLTDRRVPVLPSWRHCTCSFSSAVVRRSLAVIEISSVSCYPASPSVLCSDLLVYHPKWLI

SEQ ID NO: 11308 - protein, 100 aa, Zea mays
  misc_feature (94)..(100): Xaa can be any naturally occurring amino acid
  Coding DNA Sequence Number=SeqID_6316
  Subcellular localization annotation: CTP_CleavageSite=35; ConfidenceScore=5.21e-01
NVSLASSADTSPFHITCHIIFPHHLPCHLSTSPVRSRERAQHDRNTSRRSLATVRWKDGCFGHQIMEWQLMNWRELTWWLGTRALACNTDHRDXXXXXXX

SEQ ID NO: 11309 - protein, 94 aa, Zea mays
  Coding DNA Sequence Number=SeqID_6318
  Gene Ontology: Cellular component=endoplasmic reticulum
  Homolog annotation: Hit_ID=A2XCK0; Match level="QueryCoverage=97%, HitCoverage=58%, E-value=5e-30, Identity=67%"; Hit description =Putative uncharacterized protein
  Pfam annotation: Domain name=HR_lesion; Domain location=1-94; Score =72.4; E_value=1.5e-18; Accession=PF05514.2; Description=HR-like lesion-inducing
MGFISFVGRVLFASLFLLSAYQEFIEFGNDGGPAAKTLKPKFNLFVKLVSKNTGLGLPHMDIKTVIAATMFLKGFGGLLFIVSSSFGASLLVSI

SEQ ID NO: 11310 - protein, 106 aa, Zea mays
  Coding DNA Sequence Number=SeqID_6319
RSDHAVQFHLLVDAHEMLCLAGTWLISSRGFACGGRSDLDTKLLGGYIFSRQEWIPLTMHYIGQQQWINSRSFFFLSFQQSHHELKKFYTVIHHTYTSNLYLKWRA

SEQ ID NO: 11311 - protein, 191 aa, Zea mays
  Coding DNA Sequence Number=SeqID_6321
  Gene Ontology: Mol. function=carbon-sulfur lyase activity; Cellular component=vacuole
  Homolog annotation: Hit_ID=Q9SB62; Match level="QueryCoverage=92%, HitCoverage=38%, E-value=8e-45, Identity=51%"; Hit description =Putative alliin lyase
  Pfam annotation: Domain name=Alliinase_C; Domain location=2-191; Score=14.8; E_value=4.6e-14; Accession=PF04864.4; Description =Allinase, C-terminal domain
DASSFTGDAYIELVCSPNNPDGAIREAVLAAPYYSVYPAVTAYYRPGLFRWAGDASSFTGDAYIELVCSPNNPDGAIREAVLPSGGSGVAVHDLAYYWPQYTAITRRADHDIMLFTVSKSTGHAGTRIGWALVKDRDVAKRMAKFIELNRVSKDKELRARAAKGAGSDADELAEAEGAQHLDYGRGRRMER

SEQ ID NO: 11312 - protein, 112 aa, Zea mays
  misc_feature (37)..(40): Xaa can be any naturally occurring amino acid
  misc_feature (43)..(43): Xaa can be any naturally occurring amino acid
  misc_feature (46)..(59): Xaa can be any naturally occurring amino acid
  misc_feature (61)..(62): Xaa can be any naturally occurring amino acid
  misc_feature (64)..(67): Xaa can be any naturally occurring amino acid
  misc_feature (69)..(70): Xaa can be any naturally occurring amino acid
  misc_feature (72)..(80): Xaa can be any naturally occurring amino acid
  misc_feature (83)..(85): Xaa can be any naturally occurring amino acid
  misc_feature (87)..(94): Xaa can be any naturally occurring amino acid
  misc_feature (96)..(103): Xaa can be any naturally occurring amino acid
  misc_feature (105)..(106): Xaa can be any naturally occurring amino acid
  misc_feature (108)..(112): Xaa can be any naturally occurring amino acid
  Coding DNA Sequence Number=SeqID_6322
IVHVSINLKLGLPFSIYSMENPITARRGYPVLPEHGXXXXTGXVPXXXXXXXXXXXXXXGXXGXXXXGXXPXXXXXXXXXPLXXXTXXXXXXXXKXXXXXXXXGXXVXXXXX

SEQ ID NO: 11313 - protein, 118 aa, Zea mays
  misc_feature (33)..(33): Xaa can be any naturally occurring amino acid
  misc_feature (78)..(78): Xaa can be any naturally occurring amino acid
  misc_feature (81)..(81): Xaa can be any naturally occurring amino acid
  misc_feature (107)..(107): Xaa can be any naturally occurring amino acid
  Coding DNA Sequence Number=SeqID_6324
  Gene Ontology: Mol. function=DNA (cytosine-5-)-methyltransferase activity; Cellular component=nucleus; Biological process=DNA methylation
  Homolog annotation: Hit_ID=O65343; Match level="QueryCoverage=80%, HitCoverage=6%, E-value=9e-28, Identity=71%"; Hit description =Cytosine-specific methyltransferase
  Pfam annotation: Domain name=BAH; Domain location=5-99; Score=28.9; E_ value=1.9e-05; Accession=PF01426.8; Description=BAH domain
PRRSSNGSPGLQFSSLVPPPPPPRTFYRPDDIXSAKAYASDIREVYYSEDVIDVPVDMIERKCEVRKKNDLASSDLPXMFXNMVFFCELIYGPCQWELSSSCPPNVXAYHGAKGTSGV

SEQ ID NO: 11314 - protein, 156 aa, Zea mays
  misc_feature (35)..(35): Xaa can be any naturally occurring amino acid
  misc_feature (39)..(39): Xaa can be any naturally occurring amino acid
  misc_feature (54)..(54): Xaa can be any naturally occurring amino acid
  misc_feature (58)..(58): Xaa can be any naturally occurring amino acid
  misc_feature (79)..(79): Xaa can be any naturally occurring amino acid
  misc_feature (125)..(125): Xaa can be any naturally occurring amino acid
  misc_feature (142)..(142): Xaa can be any naturally occurring amino acid
  misc_feature (150)..(153): Xaa can be any naturally occurring amino acid
  Coding DNA Sequence Number=SeqID_6325
  Gene Ontology: Mol. function=serine-type endopeptidase inhibitor activity; Cellular component=extracellular region; Biological process=defense response
  Homolog annotation: Hit_ID=P01088; Match level="QueryCoverage=100%, HitCoverage=100%, E-value=2e-33, Identity=47%"; Hit description =Trypsin/factor XIIA inhibitor precursor
MASSSSSSHRRLILAAAVLLSVLAAASASAGTSCXAGWXIPHNPLPSCRWYVTXPDCXIGAALPVAELKRRCCPEAGEXIPGYWRCTGLNILMDGGIPPGPDGKLKAPLKNLAGFPREGQKGIPXPLPRGPGGNLAPLRGVXKCPWIFGXXXXPPK

SEQ ID NO: 11315 - protein, 87 aa, Zea mays
  misc_feature (1)..(9): Xaa can be any naturally occurring amino acid
  Coding DNA Sequence Number=SeqID_6326
  Subcellular localization annotation: CTP_CleavageSite=84; ConfidenceScore=5.52e-01
XXXXXXXXXIDDCSIPTSRRPAATSCNTRTSAASYSPFVVEFFIPAVTRSPPLFLCSSPRIHPQFVGQFRGRVPHESTPIPTILLML

SEQ ID NO: 11316 - protein, 282 aa, Zea mays
  Coding DNA Sequence Number=SeqID_6328
  Gene Ontology: Mol. function=zinc ion binding; Cellular component =intracellular; Biological process=regulation of transcription
  Homolog annotation: Hit_ID=A7Q3B8; Match level="QueryCoverage=23%, HitCoverage=93%, E-value=2e-21, Identity=64%"; Hit description =Chromosome chr12 scaffold_47, whole genome shotgun sequence
  Pfam annotation: Domain name=zf-B_box; Domain location=17-63; Score =41.4; E_value=3.2e-09; Accession=PF00643.14; Description=B-box zinc finger
MSAAWEGGKEKGAATPAPGGACELCGAMARVYCGADEATLCWGCDAQVHGANFLVARHARALLCRGCARPTSWRAAGPRLGPSASLCDRCVRRGSGAVGVGGDVEMGGTGDGRGDDEEEEDDDEDDDDVVVEDDDDEEEGEGENQVVPWTEEAEATPPPVASSTSSSSREAPANGASGGECAKENMPCSTSQTGVLCHNWSSARHGGPNGEVHVCRNGGRFLAWGHRKRSPSDDIRRSLLVYRILGKTWITTRSASTRHTPSFGHRIGACNFFRSQPCTLGS

SEQ ID NO: 11317 - protein, 115 aa, Zea mays
  Coding DNA Sequence Number=SeqID_6329
SFVICETILYVPFLLLNATVQTQQKKREKNIWRILQWRDAILVKSNQIISSPRTNPARAAPPRAQHQHQPPPPPFHGGGGRGGPGVRVGKPGAPLRFAPVPPVRACAPASFLSLT

SEQ ID NO: 11318 - protein, 105 aa, Zea mays
  Coding DNA Sequence Number=SeqID_6330
  Homolog annotation: Hit_ID=A3C8F1; Match level="QueryCoverage=27%, HitCoverage=2%, E-value=8e-08, Identity=93%"; Hit description =Putative uncharacterized protein
  Subcellular localization annotation: CTP_CleavageSite=55; ConfidenceScore=5.38e-01
EGRRIDFTYTPPAASTSSKPATARIIAALFPSSVPLPRARLSLPPLSPPWPFALGGQHKSYPFFSCAFFFCFAKRRNEQAALPQGIVPFVFAKEYNVHPDILSTA

SEQ ID NO: 11319 - protein, 121 aa, Zea mays
  misc_feature (1)..(6): Xaa can be any naturally occurring amino acid
  misc_feature (9)..(9): Xaa can be any naturally occurring amino acid
  misc_feature (11)..(17): Xaa can be any naturally occurring amino acid
  misc_feature (19)..(26): Xaa can be any naturally occurring amino acid
  misc_feature (28)..(33): Xaa can be any naturally occurring amino acid
  misc_feature (35)..(36): Xaa can be any naturally occurring amino acid
  misc_feature (43)..(51): Xaa can be any naturally occurring amino acid
  misc_feature (59)..(59): Xaa can be any naturally occurring amino acid
  misc_feature (62)..(64): Xaa can be any naturally occurring amino acid
  misc_feature (66)..(66): Xaa can be any naturally occurring amino acid
  misc_feature (69)..(69): Xaa can be any naturally occurring amino acid
  Coding DNA Sequence Number=SeqID_6331
XXXXXXPHXPXXXXXXXWXXXXXXXXAXXXXXXRXXMPPGAIXXXXXXXXXSGFRAGAXPPXXXLXLSXSKENVLGGHDGPVRCVENFYAAETFIFMDLLLDFFFRVFFFFARYFCSLMQL

SEQ ID NO: 11320 - protein, 155 aa, Zea mays
  misc_feature (8)..(8): Xaa can be any naturally occurring amino acid
  misc_feature (12)..(12): Xaa can be any naturally occurring amino acid
  misc_feature (20)..(20): Xaa can be any naturally occurring amino acid
  misc_feature (22)..(22): Xaa can be any naturally occurring amino acid
  misc_feature (25)..(25): Xaa can be any naturally occurring amino acid
  misc_feature (27)..(28): Xaa can be any naturally occurring amino acid
  misc_feature (88)..(88): Xaa can be any naturally occurring amino acid
  misc_feature (105)..(105): Xaa can be any naturally occurring amino acid
  misc_feature (152)..(153): Xaa can be any naturally occurring amino acid
  Coding DNA Sequence Number=SeqID_6333
  Subcellular localization annotation: CTP_CleavageSite=38; ConfidenceScore=5.03e-01
KNSKDPSXERFXLPSSDAPXPXNTXLXXAALSHTQNAQAQAGQENSVGQSASWMAFFLALVCILILLAIASYVQYTRWQKRGKDRFAXHGRSAPLEAALLAPWAXLTLARPSSFTSQDPSLLLASNRGKGTARISKTHLPGCPGGNVENRKXXPV

SEQ ID NO: 11321 - protein, 201 aa, Zea mays
  misc_feature (46)..(46): Xaa can be any naturally occurring amino acid
  misc_feature (59)..(59): Xaa can be any naturally occurring amino acid
  misc_feature (70)..(70): Xaa can be any naturally occurring amino acid
  misc_feature (101)..(101): Xaa can be any naturally occurring amino acid
  misc_feature (201)..(201): Xaa can be any naturally occurring amino acid
  Coding DNA Sequence Number=SeqID_6335
  Gene Ontology: Mol. function=protein binding
  Homolog annotation: Hit_ID=Q8GWH3; Match level="QueryCoverage=76%, HitCoverage=54%, E-value=6e-46, Identity=59%"; Hit description =Putative uncharacterized protein At5g35080/F7N22_50
  Pfam annotation: Domain name=PRKCSH; Domain location=128-198; Score =16.6; E_value=0.0004; Accession=PF07915.3; Description=Glucosidase II beta subunit-like prot
RWRDRTRPLPLVRSSRLPPGTTTHIPISRGGEGKQQGSCGGLVPSXRPPKYTIEYLPEXPPFHPRHNLDXLWSMLDKRGRRFLCFLPKEEESATGWASTHXNASTALMQTHMQLKLKTPDELLQPLTDQCLLRQEAWRSHGFWHLGSVRQLHVADVNKTVQEFSLANYDAEATAAFNQKVSHASTRKERHPSHIFPKGTTX

SEQ ID NO: 11322 - protein, 52 aa, Zea mays
  Coding DNA Sequence Number=SeqID_6336
GMPARQQGDSWLFVGFWFTTDFSKYKELIVSLFDNVYYQATFIIEVIKWLGF

SEQ ID NO: 11323 - protein, 88 aa, Zea mays
  Coding DNA Sequence Number=SeqID_6338
PRLFLSIVSTRTLLRPYHLACIGDRESRSPEQSPSTISHWERANKVFGKHSARLIDHFRVVFNLIVTTRGGYRASSTRYGSARYSSLL

SEQ ID NO: 11324 - protein, 74 aa, Zea mays
  Coding DNA Sequence Number=SeqID_6340
  Gene Ontology: Mol. function=glycerophosphodiester phosphodiesterase activity; Biological process=glycerol metabolic process
  Homolog annotation: Hit_ID=A5NM26; Match level="QueryCoverage=89%, HitCoverage=14%, E-value=5e-23, Identity=78%"; Hit description =Glycerophosphoryl diester phosphodiesterase precursor
TFKPTSLISDAHKAGLFVHIFTFRNEAKYLAGAYKGNPAAEYLAFFRAGVDGVFTDFTPTAVAARNTYLKEVAR

SEQ ID NO: 11325 - protein, 146 aa, Zea mays
  Coding DNA Sequence Number=SeqID_6341
  Gene Ontology: Mol. function=isochorismatase activity; Biological process=metabolic process
  Homolog annotation: Hit_ID=A9H559; Match level="QueryCoverage=100%, HitCoverage=78%, E-value=3e-42, Identity=58%"; Hit description =Isochorismatase hydrolase
  Pfam annotation: Domain name=Isochorismatase; Domain location=6-146; Score=72.3; E_value=1.6e-18; Accession=PF00857.11; Description =Isochorismatase family
MAVTLLDPNTALIIVDLQKGIAEYPFIHPIGGVVERSRALLDAFRERGMPVVLVNVTGFAPGRTERPRRSDVFPPGWADLLPELDQQPGDIGVTKRTWGAFASTDLEAQLKALGVTQVVITGVATGTGVESTARQAYEAGFNVTLA

SEQ ID NO: 11326 - protein, 146 aa, Zea mays; identical to SEQ ID NO: 11325
  Coding DNA Sequence Number=SeqID_6342
  Gene Ontology: Mol. function=isochorismatase activity; Biological process=metabolic process
  Homolog annotation: Hit_ID=A9H559; Match level="QueryCoverage=100%, HitCoverage=78%, E-value=3e-42, Identity=58%"; Hit description =Isochorismatase hydrolase
  Pfam annotation: Domain name=Isochorismatase; Domain location=6-146; Score=72.3; E_value=1.6e-18; Accession=PF00857.11; Description =Isochorismatase family

SEQ ID NO: 11327 - protein, 200 aa, Zea mays
  misc_feature (1)..(1): Xaa can be any naturally occurring amino acid
  Coding DNA Sequence Number=SeqID_6343
  Gene Ontology: Mol. function=hydrolase activity, acting on acid anhydrides, catalyzing transmembrane movement of substances; Cellular component=ATP-binding cassette (ABC) transporter complex; Biological process=polyamine transport
  Homolog annotation: Hit_ID=Q3KHG6; Match level="QueryCoverage=99%, HitCoverage=57%, E-value=9e-93, Identity=89%"; Hit description =Spermidine/putrescine ABC transporter ATP-binding subunit
  Pfam annotation: Domain name=ABC_tran; Domain location=15-196; Score =217.4; E_value=3.4e-62; Accession=PF00005.17; Description=ABC transporter
XVKAVDRVSIDIQDGEFFSMLGPSGSGKTTCLRLIAGFEQPSAGSIRIHGEEAAGLPPYQRDVNTVFQDYALFPHMNVRDNVAYGLKVKGVGKTERLNRAEEALGMVALGGYGDRKPVQLSGGQRQRVALARALVNRPRVLLLDEPLGALDLKLREQMQSELKKLQRQLGITFIFVTHDQTEALSMSDRVAVFNKGRIEQ

SEQ ID NO: 11328 - protein, 105 aa, Zea mays
  Coding DNA Sequence Number=SeqID_6344
KLISRRVMHLAQEQRPNLFFEKIQSLKVGCPYSNKSSGQWGLAKRKKGLPPFEIPTPKGKICPPKTWGVFIGKPPKTGEPKVVLARATLKPLWGKNKKSTTFFPL

SEQ ID NO: 11329 - protein, 114 aa, Zea mays
  misc_feature (108)..(108): Xaa can be any naturally occurring amino acid
  Coding DNA Sequence Number=SeqID_6346
KRKGVGGLQRRLPPVHPRPAPLCPWSMGRLPRAPPHSTVLWEVAFGRGPGCHARRVGAWWRVVFCCFWLDSWAIQQRKREQKMVVQGSKLIRKIASEAFGRAFGWCPXDRRISG

SEQ ID NO: 11330 - protein, 97 aa, Zea mays
  Coding DNA Sequence Number=SeqID_6348
TIYYLPHQNGPHSITIPSTAYSIPTLPNTYSYHYSPLAGNHPFELSLQGCYFPPVMTVTLLLILRHCYWGGLGRTRKGHWPRSSRRLRVARKGRSSV

SEQ ID NO: 11331 - protein, 109 aa, Zea mays
  misc_feature (32)..(32): Xaa can be any naturally occurring amino acid
  misc_feature (52)..(52): Xaa can be any naturally occurring amino acid
  misc_feature (73)..(73): Xaa can be any naturally occurring amino acid
  misc_feature (80)..(80): Xaa can be any naturally occurring amino acid
  misc_feature (104)..(105): Xaa can be any naturally occurring amino acid
  Coding DNA Sequence Number=SeqID_6350
TKTTHQNQWRHWNPRQPAAGKTTKMAVAAHEXNFSGKAKMNDYRELRTPSPXHGLSPPLPREPTLNLSPGPNXPYLYYFXRGLASGKPQGPPSPPRPPLKTKSXXLALK

SEQ ID NO: 11332 - protein, 256 aa, Zea mays
  misc_feature (1)..(26): Xaa can be any naturally occurring amino acid
  misc_feature (226)..(256): Xaa can be any naturally occurring amino acid
  Coding DNA Sequence Number=SeqID_6352
XXXXXXXXXXXXXXXXXXXXXXXXXXKGPEESRGDSRFVGDAARGSQAAPRPGAPAARSGHRRRRPGGPGRRGGVDEGAPRAGGGPLQQPAERRFLRQGGPQRSVLALLGAPVLRRPPGGGRIPRSTRTPKPIVRPPAFKTFWACAFRPQASLRPYEHMNRADREIPQGPPPSPHTSKTSLTIRYGPLGPPFPPAITLPFAPQCLCHHGMSLSKTSPRVLSPHPRXXXXXXXXXXXXXXXXXXXXXXXXXXXXXXX

SEQ ID NO: 11333 - protein, 118 aa, Zea mays
  Coding DNA Sequence Number=SeqID_6354
  Subcellular localization annotation: CTP_CleavageSite=67; ConfidenceScore=5.03e-01
FFFFLDRSLRLWLPRPRNVVDGASAPGQLHGRASRSVVPGAAAARHGVAVELNRTAARYPTRQDRTRWAMDGSWVGADLGCLDGSSSSAPLLPYTVTTPLPSDAMGLVRLCLALCGME

SEQ ID NO: 11334 - protein, 133 aa, Zea mays
  misc_feature (132)..(133): Xaa can be any naturally occurring amino acid
  Coding DNA Sequence Number=SeqID_6356
DVGGKIEKRRTRTSSQPLWKIRITCAFIDRNLMLEATKSKGPRRARHQAQIPDCSPITQSVQQTCAHFHFVGHEVLTTTKQAHLRRGVPILMVVTRRPQALSTTPMLLAVTPLPSPLTTPPVTSTYFMAAPXX

SEQ ID NO: 11335 - protein, 184 aa, Zea mays
  Coding DNA Sequence Number=SeqID_6358
  Gene Ontology: Mol. function=protein disulfide oxidoreductase activity; Cellular component=cytoplasm; Biological process=cell redox homeostasis
  Homolog annotation: Hit_ID=Q851R5; Match level="QueryCoverage=63%, HitCoverage=87%, E-value=3e-37, Identity=64%"; Hit description =Putative thioredoxin
  Pfam annotation: Domain name=Thioredoxin; Domain location=23-134; Score=112.9; E_value=9.3e-31; Accession=PF00085.10; Description =Thioredoxin
MGSFFSTLVTPPPPAADDPNCAVVAAHSKATYDEQWAAHKSSSKLMVIDFSASWCGPCRFIEPAFKELASRFTDAIFIKVDVDELAEVARTWKVEAMPTFVLVKDGKEVGRVTSGRCPRGRAEAGRVRQLAERADQRDPGDPAQDPVLHADPGAGGPGGGGVPLPRPQGQSFGDQPQPAHQPQP

SEQ ID NO: 11336 - protein, 162 aa, Zea mays
  misc_feature (81)..(81): Xaa can be any naturally occurring amino acid
  misc_feature (100)..(100): Xaa can be any naturally occurring amino acid
  misc_feature (104)..(104): Xaa can be any naturally occurring amino acid
  misc_feature (110)..(110): Xaa can be any naturally occurring amino acid
  misc_feature (116)..(117): Xaa can be any naturally occurring amino acid
  misc_feature (123)..(123): Xaa can be any naturally occurring amino acid
  misc_feature (132)..(132): Xaa can be any naturally occurring amino acid
  misc_feature (135)..(135): Xaa can be any naturally occurring amino acid
  misc_feature (137)..(162): Xaa can be any naturally occurring amino acid
  Coding DNA Sequence Number=SeqID_6359
  Subcellular localization annotation: CTP_CleavageSite=55; ConfidenceScore=5.16e-01
NLLLAHLLWNPLPVRFKRSPFQVLMPHHLMVSTGNREVASKVMVESQQNNLPRALAQSRKDTIGQGPIPGDRHLMWKTGLXILPWWSFRELEQQKKTIIXCPDXNRMSWXGFGNAXXKKLPEXLPIQLGFSXHFXTXXXXXXXXXXXXXXXXXXXXXXXXXX

SEQ ID NO: 11337 - protein, 80 aa, Zea mays
  Coding DNA Sequence Number=SeqID_6361
  Subcellular localization annotation: CTP_CleavageSite=66; ConfidenceScore=5.79e-01
PGGGSWLTRTTNPPGRRSGTSRLPSPSLQQPSCGGCFLVVWVTLPGSPFTTGGAGASLVFWLIPSSCSITTSGGVTSFLH

SEQ ID NO: 11338 - protein, 94 aa, Zea mays
  misc_feature (2)..(2): Xaa can be any naturally occurring amino acid
  Coding DNA Sequence Number=SeqID_6362
  Subcellular localization annotation: CTP_CleavageSite=80; ConfidenceScore=5.53e-01
LXRSSLPPDPNSDKLVHSTQYAPYGFRQHFRGPQQHRSSCAPASGSSSSQNNPNPPSRSGIIAPPLDYRELEISPRNPTRTSRPSGRRQYLLPS

SEQ ID NO: 11339 - protein, 114 aa, Zea mays
  Coding DNA Sequence Number=SeqID_6364
  Subcellular localization annotation: CTP_CleavageSite=89; ConfidenceScore=5.57e-01
LPRSSLPPDPNSDKLVHSTQYAPYGFRQHFRGPQQHRSSCAPASGSSSSQNNPNPPSRSGLHLLLLLLALLLPMLLLALPESFPVLPVYCFKYINLAKWIAMWWAKLNSVGEDG

SEQ ID NO: 11340 - protein, 152 aa, Zea mays
  misc_feature (67)..(67): Xaa can be any naturally occurring amino acid
  misc_feature (76)..(76): Xaa can be any naturally occurring amino acid
  misc_feature (103)..(103): Xaa can be any naturally occurring amino acid
  misc_feature (112)..(112): Xaa can be any naturally occurring amino acid
  misc_feature (132)..(132): Xaa can be any naturally occurring amino acid
  Coding DNA Sequence Number=SeqID_6366
  Homolog annotation: Hit_ID=A9PBY9; Match level="QueryCoverage=94%, HitCoverage=85%, E-value=8e-32, Identity=49%"; Hit description =Putative uncharacterized protein
MENGVALRKWFDRGDAGRTGYIPAAQLQGVIAAGNLNFPISAEQQMIRMYDFNRNVSMKFEEFLALXKFLEKVENXFSALDRGRGFLSLEEAYQAVIKLGFSXDSPAFYTVXESFDETRKGMIQLIKTISLXIFGQPARNRLNSLLYKWPGR

SEQ ID NO: 11341 - protein, 152 aa, Zea mays; identical to SEQ ID NO: 11340
  misc_feature (67)..(67): Xaa can be any naturally occurring amino acid
  misc_feature (76)..(76): Xaa can be any naturally occurring amino acid
  misc_feature (103)..(103): Xaa can be any naturally occurring amino acid
  misc_feature (112)..(112): Xaa can be any naturally occurring amino acid
  misc_feature (132)..(132): Xaa can be any naturally occurring amino acid
  Coding DNA Sequence Number=SeqID_6367
  Homolog annotation: Hit_ID=A9PBY9; Match level="QueryCoverage=94%, HitCoverage=85%, E-value=8e-32, Identity=49%"; Hit description =Putative uncharacterized protein

SEQ ID NO: 11342 - protein, 101 aa, Zea mays
  Coding DNA Sequence Number=SeqID_6368
  Gene Ontology: Mol. function=structural constituent of ribosome; Cellular component=ribonucleoprotein complex; Biological process =translation
  Homolog annotation: Hit_ID=A2X331; Match level="QueryCoverage=85%, HitCoverage=66%, E-value=4e-35, Identity=84%"; Hit description =Putative uncharacterized protein
  Pfam annotation: Domain name=Ribosomal_S8; Domain location=6-100; Score=-9.8; E_value=5.7e-06; Accession=PF00410.9; Description =Ribosomal protein S8
MGRRILNDALRTMVNADRRGNASALLRPISGVMVSFLNIMKYRGYIKKFEVIDENRVGKIRVELDGRLKDCKALTYRQDLKAKEIDPLCHGGPAIIRYLYQ

SEQ ID NO: 11343 - protein, 80 aa, Zea mays
  misc_feature (36)..(36): Xaa can be any naturally occurring amino acid
  Coding DNA Sequence Number=SeqID_6369
  Gene Ontology: Cellular component=integral to peroxisomal membrane; Biological process=peroxisome organization and biogenesis
  Homolog annotation: Hit_ID=Q69M23; Match level="QueryCoverage=96%, HitCoverage=20%, E-value=2e-16, Identity=56%"; Hit description =Peroxisomal biogenesis factor 3-like
VKRICDTTTLSLAMHHLSDKITIQLDISKLTAKLRXGKVDSSALTPKEKYETWKEIKIMSFRKTVSPMWGATSAYLWPLK

SEQ ID NO: 11344 - protein, 128 aa, Zea mays
  misc_feature (36)..(36): Xaa can be any naturally occurring amino acid
  misc_feature (88)..(88): Xaa can be any naturally occurring amino acid
  Coding DNA Sequence Number=SeqID_6370
  Gene Ontology: Cellular component=integral to peroxisomal membrane; Biological process=peroxisome organization and biogenesis
  Homolog annotation: Hit_ID=Q69M23; Match level="QueryCoverage=100%, HitCoverage=38%, E-value=2e-32, Identity=52%"; Hit description =Peroxisomal biogenesis factor 3-like
VKRICDTTTLSLAMHHLSDKITSQLDISKLTDKLQXGKVDSTALTPKEKYETWKEIKIMSFRKIVSPMWAMTLLSLYVRVHVTILGRXDAFNVNGHKTFVAMDDYLVTDKITAFIVQTVHAATEVPKD

SEQ ID NO: 11345 - protein, 124 aa, Zea mays
  misc_feature (73)..(73): Xaa can be any naturally occurring amino acid
  misc_feature (83)..(83): Xaa can be any naturally occurring amino acid
  misc_feature (86)..(86): Xaa can be any naturally occurring amino acid
  Coding DNA Sequence Number=SeqID_6371
  Gene Ontology: Mol. function=transporter activity; Cellular component= integral to membrane; Biological process=transport
  Homolog annotation: Hit_ID=A2Z412; Match level="QueryCoverage=93%, HitCoverage=30%, E-value=3e-15, Identity=39%"; Hit description =Putative uncharacterized protein
REQIFSVITFAYYGIVLLTSELSNGNRICAKEDVESVHSTNASLYKNVFISSFAEIPGSFPHCMIVDRFHRKXVLNGQLHTSXVLXHPLWFSLLDILTLFELGKLLLMIWHTVSMVSIYILIHQ

SEQ ID NO: 11346 - protein, 80 aa, Zea mays
  misc_feature (36)..(36): Xaa can be any naturally occurring amino acid
  Coding DNA Sequence Number=SeqID_6372
  Gene Ontology: Cellular component=integral to peroxisomal membrane; Biological process=peroxisome organization and biogenesis
  Homolog annotation: Hit_ID=Q69M23; Match level="QueryCoverage=98%, HitCoverage=21%, E-value=9e-20, Identity=64%"; Hit description =Peroxisomal biogenesis factor 3-like
GKKNSHTTTRSLAMHHLSDKITIQLDISKLTAKLRXGKVDSSALTPKEKYETWKEIKIMSFRKTVSPMWAMTLLSLYVRV

SEQ ID NO: 11347 - protein, 111 aa, Zea mays
  misc_feature (36)..(36): Xaa can be any naturally occurring amino acid
  misc_feature (61)..(61): Xaa can be any naturally occurring amino acid
  misc_feature (66)..(66): Xaa can be any naturally occurring amino acid
  misc_feature (69)..(69): Xaa can be any naturally occurring amino acid
  misc_feature (72)..(72): Xaa can be any naturally occurring amino acid
  Coding DNA Sequence Number=SeqID_6373
  Gene Ontology: Mol. function=nucleotide binding; Cellular component =microtubule
  Homolog annotation: Hit_ID=Q9SDX4; Match level="QueryCoverage=85%, HitCoverage=9%, E-value=6e-15, Identity=58%"; Hit description =Dynamin homolog
ERERESLLPPPPLNNVKRIVLEADGYQPYLISPEKXLRSLIKGVLEMPKGAITDSVFEEVXRVLLXIVXNAXANATPRDLGKDTLPFQAGELQFALLMLWPSKGRQKKGGW

SEQ ID NO: 11348 - protein, 85 aa, Zea mays
  Coding DNA Sequence Number=SeqID_6374
  Homolog annotation: Hit_ID=Q69V58; Match level="QueryCoverage=61%, HitCoverage=24%, E-value=7e-17, Identity=82%"; Hit description =Putative uncharacterized protein P0556B08.17
  Subcellular localization annotation: CTP_CleavageSite=49; ConfidenceScore=5.13e-01
MQAWFSSGSGPSSSSAASSSQPSLLAEWNSYAAARSAEDAGDGFGIDIEAAVRSANDRVAGTFGVVSKGVKGFPGRGDHNGNMTA

SEQ ID NO: 11349 - protein, 127 aa, Zea mays
  Coding DNA Sequence Number=SeqID_6375
GLHRQLTGGLPLRKTRTRRSPGTPQSPPCCQHHLLSTEYSGDNQKSCSAGLWRHHMADWRRRVYTDEELPRHHTLSKLGNTTEAIPMVRRSPLEYSRRQARDAGVLNLVPNSAARGSQSERPPVSPL

SEQ ID NO: 11350 - protein, 262 aa, Zea mays
  misc_feature (1)..(29): Xaa can be any naturally occurring amino acid
  misc_feature (31)..(31): Xaa can be any naturally occurring amino acid
  misc_feature (34)..(37): Xaa can be any naturally occurring amino acid
  misc_feature (39)..(42): Xaa can be any naturally occurring amino acid
  misc_feature (47)..(47): Xaa can be any naturally occurring amino acid
  misc_feature (245)..(262): Xaa can be any naturally occurring amino acid
  Coding DNA Sequence Number=SeqID_6377
XXXXXXXXXXXXXXXXXXXXXXXXXXXXXQXNLXXXXTXXXXSIFFXFLSVATRRNHHSRSRRDSRVSTRGSESDHTTDTTTRYKPSPPTKDTRSDQNATATRHQQRNLPSTSTTEYHSIFFFFLSVATRRNHHSRSRRDSRVSTRGSESDHTTDTTTRYKPSDKASDTQADPADVHPFSQASDAQADPADVHSKPQASHTPDAQADPTDVHPFPKASDAQTDPTDVDHFPKASDNQADPTDVDXXXXXXXXXXXXXXXXXX

SEQ ID NO: 11351 - protein, 66 aa, Zea mays
  Coding DNA Sequence Number=SeqID_6378
  Homolog annotation: Hit_ID=A7QWJ1; Match level="QueryCoverage=89%, HitCoverage=39%, E-value=5e-09, Identity=50%"; Hit description =Chromosome chr10 scaffold_204, whole genome shotgun sequence
MSSQLIEEHRSGAEVHVGHELCERKSREFMVELGLPDGLLPLPRLDEVGYNRSTGFVWLLSSLLAV

SEQ ID NO: 11352 - protein, 95 aa, Zea mays
  misc_feature (89)..(95): Xaa can be any naturally occurring amino acid
  Coding DNA Sequence Number=SeqID_6379
DRVSLKNMRNESKRRKEIKSGSELLRGFVQPTPASEGCLRHTDFFPHRHQTAQNDIVIDKQKQRKQWRKHEGERTVGHRELATAAIPAXXXXXXX

SEQ ID NO: 11353 - protein, 193 aa, Zea mays
  misc_feature (193)..(193): Xaa can be any naturally occurring amino acid
  Coding DNA Sequence Number=SeqID_6381
  Gene Ontology: Mol. function=hydrolase activity, hydrolyzing O -glycosyl compounds; Cellular component=extracellular region; Biological process=carbohydrate metabolic process
  Homolog annotation: Hit_ID=Q0JJD4; Match level="QueryCoverage=99%, HitCoverage=43%, E-value=8e-83, Identity=79%"; Hit description =Mannan endo-1,4-beta-mannosidase 2 precursor
MAACNGLFVYHILGLASLLAVFYFSLLGEVDFRFPGLLPSPGASRSHDASLPFVERRGAQLFLEGRPFYINGWNSYWLMDQAVEPASRHRVSDMFRAATGMGLTVCRTWAFNDGAYNALQLSPGHFDERVFKALDMVVVEARRHGVRLILSLANNLEAYGGKTQYVRWAWDEGVGLTASNDSFFFDPAIRDYX

SEQ ID NO: 11354 - protein, 126 aa, Zea mays
  misc_feature (72)..(83): Xaa can be any naturally occurring amino acid
  misc_feature (90)..(91): Xaa can be any naturally occurring amino acid
  misc_feature (101)..(102): Xaa can be any naturally occurring amino acid
  misc_feature (105)..(118): Xaa can be any naturally occurring amino acid
  misc_feature (124)..(126): Xaa can be any naturally occurring amino acid
  Coding DNA Sequence Number=SeqID_6382
EKLGTYIPLADSPHRRRVEPALLHQAPLTKVTELLFTPPTPPLPPVSSPGRLRRQRRSRQRGASDAGAPASXXXXXXXXXXXXMARWKVXXIMIRGKQCTXXSLXXXXXXXXXXXXXXGRNLSXXX

SEQ ID NO: 11355 - protein, 33 aa, Zea mays
  misc_feature (19)..(19): Xaa can be any naturally occurring amino acid
  Coding DNA Sequence Number=SeqID_6384
  Gene Ontology: Mol. function=kinase activity
  Homolog annotation: Hit_ID=A3BZ77; Match level="QueryCoverage=100%, HitCoverage=9%, E-value=7e-11, Identity=90%"; Hit description =Putative uncharacterized protein
FIDFEYGSYSYRGYDIANXHFNEYAGFDCDYNL

SEQ ID NO: 11356 - protein, 190 aa, Zea mays
  misc_feature (40)..(40): Xaa can be any naturally occurring amino acid
  misc_feature (76)..(76): Xaa can be any naturally occurring amino acid
  misc_feature (87)..(88): Xaa can be any naturally occurring amino acid
  misc_feature (93)..(93): Xaa can be any naturally occurring amino acid
  misc_feature (95)..(95): Xaa can be any naturally occurring amino acid
  misc_feature (110)..(111): Xaa can be any naturally occurring amino acid
  misc_feature (114)..(114): Xaa can be any naturally occurring amino acid
  misc_feature (116)..(116): Xaa can be any naturally occurring amino acid
  misc_feature (128)..(128): Xaa can be any naturally occurring amino acid
  misc_feature (141)..(141): Xaa can be any naturally occurring amino acid
  misc_feature (153)..(153): Xaa can be any naturally occurring amino acid
  misc_feature (155)..(155): Xaa can be any naturally occurring amino acid
  misc_feature (157)..(158): Xaa can be any naturally occurring amino acid
  misc_feature (161)..(161): Xaa can be any naturally occurring amino acid
  misc_feature (165)..(165): Xaa can be any naturally occurring amino acid
  misc_feature (171)..(172): Xaa can be any naturally occurring amino acid
  misc_feature (177)..(179): Xaa can be any naturally occurring amino acid
  misc_feature (182)..(182): Xaa can be any naturally occurring amino acid
  misc_feature (184)..(184): Xaa can be any naturally occurring amino acid
  misc_feature (187)..(188): Xaa can be any naturally occurring amino acid
  misc_feature (190)..(190): Xaa can be any naturally occurring amino acid
  Coding DNA Sequence Number=SeqID_6385
TLWRTPPPDFMWRLSCGCIDFLRPRCTLGGKGANGPVRSXANLRIKNSPIGRNPWKKTKPKRVVLGKYFSPGKILXFPKGGFRGGKXXQRGPXGXPPPPFPFWGEKTPPXXFSXPXGPKIFFFPPPPXKKKTPRGGFFSPXKKKKPPPPRGGXPXPXXKKXGGVXKNFLFXXIFSFXXXKKXIXFFXXPX

SEQ ID NO: 11357 - protein, 69 aa, Zea mays
  Coding DNA Sequence Number=SeqID_6387
  Gene Ontology: Cellular component=integral to membrane; Biological process=response to stress
  Homolog annotation: Hit_ID=A2YAW9; Match level="QueryCoverage=100%, HitCoverage=35%, E-value=9e-30, Identity=86%"; Hit description =Putative uncharacterized protein
  Pfam annotation: Domain name=TB2_DP1_HVA22; Domain location=7-69; Score=54.6; E_value=3.4e-13; Accession=PF03134.9; Description=TB2DP1, HVA22 family
MGSGSFLKVLAKNFDVLAGPVISHAYPLYASVRAIETKNPVDDQQWLTYWVLYSFVTLFELTLAPIIEW

SEQ ID NO: 11358 - protein, 116 aa, Zea mays
  misc_feature (19)..(21): Xaa can be any naturally occurring amino acid
  misc_feature (23)..(23): Xaa can be any naturally occurring amino acid
  misc_feature (25)..(27): Xaa can be any naturally occurring amino acid
  misc_feature (30)..(31): Xaa can be any naturally occurring amino acid
  misc_feature (33)..(33): Xaa can be any naturally occurring amino acid
  misc_feature (35)..(35): Xaa can be any naturally occurring amino acid
  misc_feature (48)..(48): Xaa can be any naturally occurring amino acid
  misc_feature (52)..(52): Xaa can be any naturally occurring amino acid
  misc_feature (61)..(61): Xaa can be any naturally occurring amino acid
  misc_feature (64)..(65): Xaa can be any naturally occurring amino acid
  misc_feature (74)..(74): Xaa can be any naturally occurring amino acid
  misc_feature (76)..(76): Xaa can be any naturally occurring amino acid
  misc_feature (78)..(78): Xaa can be any naturally occurring amino acid
  misc_feature (88)..(88): Xaa can be any naturally occurring amino acid
  misc_feature (90)..(90): Xaa can be any naturally occurring amino acid
  misc_feature (94)..(94): Xaa can be any naturally occurring amino acid
  misc_feature (97)..(97): Xaa can be any naturally occurring amino acid
  misc_feature (99)..(99): Xaa can be any naturally occurring amino acid
  misc_feature (105)..(106): Xaa can be any naturally occurring amino acid
  misc_feature (108)..(109): Xaa can be any naturally occurring amino acid
  Coding DNA Sequence Number=SeqID_6388
  Gene Ontology: Mol. function=calcium ion binding
  Homolog annotation: Hit_ID=Q6Z8S1; Match level="QueryCoverage=85%, HitCoverage=56%, E-value=5e-22, Identity=58%"; Hit description =Putative Calcineurin B subunit
VASCSCTSAGAGTVQIGSXXXMXTXXXIEXXQXHXNHAFSKQEIVSLXHRFXQLDRNGGGXGSXXELMSVRECXGXPXSQRLLRMLDXLXFKEXVAXLXAFTPRXXLXXKIAYMAI

SEQ ID NO: 11359 - protein, 221 aa, Zea mays
  misc_feature (120)..(121): Xaa can be any naturally occurring amino acid
  misc_feature (132)..(132): Xaa can be any naturally occurring amino acid
  Coding DNA Sequence Number=SeqID_6389
  Gene Ontology: Mol. function=receptor activity; Cellular component =membrane; Biological process=intracellular protein transport
  Homolog annotation: Hit_ID=Q6EQ07; Match level="QueryCoverage=100%, HitCoverage=100%, E-value=1e-101, Identity=89%"; Hit description =Putative golgi SNAP receptor complex member 1; Golgi SNARE 28 kDa
  Pfam annotation: Domain name=V-SNARE; Domain location=46-199; Score =101.3; E_value=3e-27; Accession=PF05008.5; Description=Vesicle transport v-SNARE protein
MEASSWDAVRKQARRLEAQLDDQMIAYRKLVSTKSDGSENDIESDIERSLKQLQQVNSQMQTWVSSGGSEVLSHTLTRHMEILQDLTQEFYRLRSSLRAKQQHTSLLDLRDFDRAKFDVXXPSDSADQVLLXEQAATRRTDNRMPQMDNVISQAQATLGSLMTQRSTFGGITTKISNVSSRLPTINHVLASIRRKKSMDTIILSLVASVCAFLIFIYWLSK

SEQ ID NO: 11360 - protein, 236 aa, Zea mays
  misc_feature (236)..(236): Xaa can be any naturally occurring amino acid
  Coding DNA Sequence Number=SeqID_6390
  Gene Ontology: Mol. function=P-P-bond-hydrolysis-driven protein transmembrane transporter activity; Cellular component=membrane; Biological process=protein secretion
  Homolog annotation: Hit_ID=A7P222; Match level="QueryCoverage=99%, HitCoverage=49%, E-value=1e-121, Identity=93%"; Hit description =Chromosome chr19 scaffold_4, whole genome shotgun sequence
MAGGFRVLHLVRPFLGFLPEVQSADRRIPFREKLIYTVISLFIFLVCSQLPLYGIHSTTGADPFYWLRAILASNRGTVMELGITPIVTSGMVMQLLVGSKIIEVDNSVREDRALLNGAQKLLGILIAIGEAVAYVLSGMYGSVSQLGTGNAILIILQLFFAGIIVICLDELLQKGYGLGSGISLFIATNICENIIWKAFSPTTINSGRGAEFEGAVIGLFHLLITRTDKVRALREX

SEQ ID NO: 11361 - protein, 240 aa, Zea mays
  misc_feature (86)..(86): Xaa can be any naturally occurring amino acid
  misc_feature (114)..(114): Xaa can be any naturally occurring amino acid
  misc_feature (153)..(153): Xaa can be any naturally occurring amino acid
  misc_feature (184)..(185): Xaa can be any naturally occurring amino acid
  misc_feature (195)..(196): Xaa can be any naturally occurring amino acid
  misc_feature (199)..(201): Xaa can be any naturally occurring amino acid
  Coding DNA Sequence Number=SeqID_6391
  Gene Ontology: Mol. function=aspartic-type endopeptidase activity; Cellular component=chromatin; Biological process=chromatin assembly or disassembly
  Homolog annotation: Hit_ID=Q8SA91; Match level="QueryCoverage=78%, HitCoverage=8%, E-value=3e-38, Identity=49%"; Hit description =Putative gag-pol polyprotein
  Pfam annotation: Domain name=Chromo; Domain location=142-197; Score =12.3; E_value=0.017; Accession=PF00385.14; Description='chromo' (CHRromatin Organisation MOdifier)
MAHVLGLALRSSTGTVVMGIIYPVSAARSRELLHQHLVRAQDRMKRQADKKCSERTFAVGDWVYLRLQPYVQASVMPRAHHKLSFXFFGPYQILARVGQVAYRLSLPPTSRIHXVVYVSQKLARGFKGLDPLPLPVALPEFSVLTQVIHYQRXPAHTAGSGGQALVAWSGPSPELATWEDREAXXQCFPFAPAWXXAGXXXVGSVSDAKVLDKQQEDIVTEGRGRRIRRKNPRVCGPEWM

SEQ ID NO: 11362 - protein, 169 aa, Zea mays
  Coding DNA Sequence Number=SeqID_6392
  Subcellular localization annotation: CTP_CleavageSite=50; ConfidenceScore=5.61e-01
SLCILRVHALTSMSPSTATSTTGLTAYVRLQWQPSGCRIPRKVCSCPSPRAAPVRSRHNTSFTVFLAQDKGCQDSCFSKIYPGALHIQPKIDSPKALKILVSSALKILLWDILSAICLAFTSSIKSVLTSGLEERNCVQSASLGLIEVCCISLELEFYLVVSATRCFNF

SEQ ID NO: 11363 - protein, 185 aa, Zea mays
  misc_feature (1)..(57): Xaa can be any naturally occurring amino acid
  Coding DNA Sequence Number=SeqID_6393
XXXXXXXXXXXXXXXXXXXXXXXXXXXXXXXXXXXXXXXXXXXXXXXXXXXXXXXXXKVCSCPSPRAAPVRSRHNTSFTVFLAQDKGCQDSCFSKIYPGALHIQPKIDSPKALKILVSSALKILLWDILSAICLAFTSSIKSVLTSGLEERNCVQSASLGLIEVCCISLELEFYLVVSATRCFNF

SEQ ID NO: 11364 - protein, 111 aa, Zea mays
  Coding DNA Sequence Number=SeqID_6394
VGKRWLWSSCQCDNFSLLDSAFSLLLSWTPVELYNFRGKHLPQTLHANNEFSLFVIGHGTCFFDIRLLYASIFSWLIRKSFSSCTSSSWTQTSAMSVSMRVGTPTPAASSC

SEQ ID NO: 11365 - protein, 88 aa, Zea mays
  misc_feature (42)..(45): Xaa can be any naturally occurring amino acid
  misc_feature (47)..(51): Xaa can be any naturally occurring amino acid
  misc_feature (60)..(60): Xaa can be any naturally occurring amino acid
  misc_feature (66)..(66): Xaa can be any naturally occurring amino acid
  misc_feature (84)..(85): Xaa can be any naturally occurring amino acid
  misc_feature (88)..(88): Xaa can be any naturally occurring amino acid
  Coding DNA Sequence Number=SeqID_6396
VSGLHCTWQVRWPTIFPSGRGRHNLWQRGYASARPLLLKEVXXXXEXXXXXECEEGAEGXGGRTRXVLLPLRHRRLHSLRRLRXXRAX

SEQ ID NO: 11366 - protein, 82 aa, Zea mays
  Coding DNA Sequence Number=SeqID_6398
FSIVYTFEFFISLQCIRKNITLHSSRSDRVIVTCFFFGLIWVGSFFTQLPISLINIYGPLHLNGPTCCFQGLLMTSDISTWA

SEQ ID NO: 11367 - protein, 121 aa, Zea mays
  misc_feature (65)..(65): Xaa can be any naturally occurring amino acid
  misc_feature (96)..(96): Xaa can be any naturally occurring amino acid
  misc_feature (101)..(101): Xaa can be any naturally occurring amino acid
  Coding DNA Sequence Number=SeqID_6399
  Gene Ontology: Mol. function=oxidoreductase activity; Cellular component=extracellular region; Biological process=hydrogen peroxide catabolic process
  Homolog annotation: Hit_ID=A2YG98; Match level="QueryCoverage=70%, HitCoverage=26%, E-value=7e-14, Identity=49%"; Hit description =Putative uncharacterized protein
MVRRTVLAALLVVAAALAGGARAQLKEGFYDYSCPQAEKIVKDYVKAHIPHAPDVASTLLRTHFXDCFRQGACDASVAASNANGAGNEGGERKRAXPNLKXRGFRALIRKALASKKGISPG

SEQ ID NO: 11368 - protein, 168 aa, Zea mays
  misc_feature (125)..(168): Xaa can be any naturally occurring amino acid
  Coding DNA Sequence Number=SeqID_6400
  Subcellular localization annotation: CTP_CleavageSite=16; ConfidenceScore=5.01e-01
VPPSLTRTLHNRVTTRATPPPPEPTTPPDLPRSPPHYLPVRSVSLGGHLYIRLRRAESNGNSHRPKGSMYRPPPASLLPPPSPSPSSPPAHLPPPSSPLRAPGRCRHLPCSAPATPREDVNTNHXXXXXXXXXXXXXXXXXXXXXXXXXXXXXXXXXXXXXXXXXXXX

SEQ ID NO: 11369 - protein, 157 aa, Zea mays
  Coding DNA Sequence Number=SeqID_6402
  Gene Ontology: Mol. function=ATPase activity, coupled to transmembrane movement of substances; Cellular component=integral to membrane; Biological process=transport
  Homolog annotation: Hit_ID=Q8GU79; Match level="QueryCoverage=100%, HitCoverage=63%, E-value=2e-68, Identity=68%"; Hit description=MDR -like ABC transporter
  Pfam annotation: Domain name=ABC_tran; Domain location=1-126; Score =33.3; E_value=1.4e-09; Accession=PF00005.17; Description=ABC transporter
NISYGSESPSETEIIQAAMEANIHEFISGLPEGYGTVVGDKGSQLSGGLKQRIAIARTILKRPAILLLDEATSALDGESERVVMSSLGTKVWKDKDEQASTITSITVAHRLSTVINADTIVVMEKGKVVELGNHQELISAEDGVYSRLFHLQSNMKE

SEQ ID NO: 11370 - protein, 49 aa, Zea mays
  Coding DNA Sequence Number=SeqID_6403
  Gene Ontology: Mol. function=lipid binding
  Homolog annotation: Hit_ID=A3BB33; Match level="QueryCoverage=97%, HitCoverage=13%, E-value=8e-13, Identity=68%"; Hit description =Putative uncharacterized protein
RVINAFEDHIKAAVEKAVPENIIEGAGKLDSFLQGLPRTISLDDVAAFN

SEQ ID NO: 11371 - protein, 49 aa, Zea mays; identical to SEQ ID NO: 11370
  Coding DNA Sequence Number=SeqID_6404
  Gene Ontology: Mol. function=lipid binding
  Homolog annotation: Hit_ID=A3BB33; Match level="QueryCoverage=97%, HitCoverage=13%, E-value=8e-13, Identity=68%"; Hit description =Putative uncharacterized protein

SEQ ID NO: 11372 - protein, 175 aa, Zea mays
  misc_feature (42)..(43): Xaa can be any naturally occurring amino acid
  misc_feature (80)..(80): Xaa can be any naturally occurring amino acid
  misc_feature (104)..(104): Xaa can be any naturally occurring amino acid
  Coding DNA Sequence Number=SeqID_6405
  Gene Ontology: Mol. function=structural constituent of ribosome; Cellular component=ribonucleoprotein complex; Biological process =translation
  Homolog annotation: Hit_ID=A2Q4V6; Match level="QueryCoverage=61%, HitCoverage=86%, E-value=3e-23, Identity=59%"; Hit description =Ribosomal protein S10, eukaryotic and archaeal form
  Pfam annotation: Domain name=Ribosomal_S10; Domain location=26-121; Score=23.9; E_value=7.5e-07; Accession=PF00338.12; Description =Ribosomal protein S10pS20e
MAAAAVYGGFKGKLGVEDAPELQLNRIRITLSSKNVKTLEKXXANLVKGAKDKHLRVKGTCSGSPTKVLQITTRKSPGVXTNTWDRVGVPHPQRGDDLIRSPDXVEQIPSPTLNPGLKVRGPFPTCKERNSPKGLQIFFFGAPGGPKKKFGVFFKKKIFPPNNLGEGGGRIRAAT

SEQ ID NO: 11373 - protein, 175 aa, Zea mays; identical to SEQ ID NO: 11372
  misc_feature (42)..(43): Xaa can be any naturally occurring amino acid
  misc_feature (80)..(80): Xaa can be any naturally occurring amino acid
  misc_feature (104)..(104): Xaa can be any naturally occurring amino acid
  Coding DNA Sequence Number=SeqID_6406
  Gene Ontology: Mol. function=structural constituent of ribosome; Cellular component=ribonucleoprotein complex; Biological process =translation
  Homolog annotation: Hit_ID=A2Q4V6; Match level="QueryCoverage=61%, HitCoverage=86%, E-value=3e-23, Identity=59%"; Hit description =Ribosomal protein S10, eukaryotic and archaeal form
  Pfam annotation: Domain name=Ribosomal_S10; Domain location=26-121; Score=23.9; E_value=7.5e-07; Accession=PF00338.12; Description =Ribosomal protein S10pS20e

SEQ ID NO: 11374 - protein, 50 aa, Zea mays
  misc_feature (1)..(1): Xaa can be any naturally occurring amino acid
  Coding DNA Sequence Number=SeqID_6407
XRSRLNGSYSDHRSNNELDGTVRRWREDKRQFCAQFLTGPMSSGCKMLSS

SEQ ID NO: 11375 - protein, 55 aa, Zea mays
  Coding DNA Sequence Number=SeqID_6409
TTRTSICGIEAQTVKGDVCCYLCRRKPSDASWRPWTSPTAHACCPASLTNPIVYA

SEQ ID NO: 11376 - protein, 372 aa, Zea mays
  Coding DNA Sequence Number=SeqID_562
  Homolog annotation: Hit_ID=A7QUQ8; Match level="QueryCoverage=33%, HitCoverage=29%, E-value=2e-17, Identity=41%"; Hit description =Chromosome chr1 scaffold_180, whole genome shotgun sequence
YVPPHGRGQQQQEEEEEEEEAVAAMVPTTRNLLLHHDVDGKSSRGRPCYPYHPAGQYYVGIAAQLEASAASAAWQQDHQSKPSRSPRLLGMADDDDDDDDEQPDAAAGPGTSSAASPGGVGAGNGRGGDWLQLGLAAAAASASFSGDNSSMDPDPPGPTELELFGYDKRNACRMRRPPLFPLPLRSYHPPYGYGRYRPAAAAAAASRSMPSAPFMPPSRCSSSDAIIRVISPPRRRTTEAPGMWLTLQAAPNQSREPVLPQIAKSYLRIKDSNMKVEVVMKYLAEKLGVARSRSRSHQQVELTCRGQVLPPLLLVRDAWETIWCSTAAAAAQREGVEEETPADHLTARRRSSAATDHVMTLCYSTSRNSNAS

SEQ ID NO: 11377 - protein, 386 aa, Zea mays
  Coding DNA Sequence Number=SeqID_563
  Gene Ontology: Mol. function=hydrolase activity
  Homolog annotation: Hit_ID=Q69L12; Match level="QueryCoverage=93%, HitCoverage=93%, E-value=1e-130, Identity=66%"; Hit description =VirR/VirH-like protein
  Pfam annotation: Domain name=UPF0066; Domain location=103-234; Score =132.2; E_value=1.5e-36; Accession=PF01980.7; Description =Uncharacterised protein family UPF0066
MAPPRSLAGAAIAATAAAIILSCLFYRRKCARLAARVRELEASLAVTAEKAAAERRGRVRAQQSLRALSQLEPGSDEARPTKAAASASYPLVPIGTVESCFSTRNGTPRQPLVVTLARATLVLDPARVPAAALEGLASYSHCWILYVFHLNTDLDKLWKDPARSKLKAKVRVPRLKGGKMGVLATRSPHRPNPIGLSVAKVEAVNGHTLLLSGVDLVDGTPVLDIKPYLPYSDSVKGAAVPSWLEVDGALAVESVHFSEHFISALSTCWMHVQMSLYASADEFQDLIKQALSWDIRSISQRNRPHQVSVEADANGHCGEDTDDDHHHRDTGRYGVVYHLHLEGIDVSYRIDQGSNIFVEDATLLPDAVQKRHGYLAWRDKLGSSVL

SEQ ID NO: 11378 - protein, 124 aa, Zea mays
  Coding DNA Sequence Number=SeqID_564
IFHVETDSCLYLATIWLPSPSTRRRLDEYRGSPFFCLVYVETTGSEALALAWILFMTALAQCPHVATGLYNSSITYIYKCVLYCYEMEDDIHEPSGMTLKRNSGLSRTSTHHIRSRRLRRRGRG

SEQ ID NO: 11379 - protein, 129 aa, Zea mays
  Coding DNA Sequence Number=SeqID_566
  Pfam annotation: Domain name=Conotoxin; Domain location=20-114; Score= 4.6; E_value=0.071; Accession=PF02950.8; Description=Conotoxin
  Pfam annotation: Domain name=GRP; Domain location=18-110; Score=76.6; E_value=8.3e-20; Accession=PF07172.2; Description=Glycine rich protein family
  Pfam module annotation: Pfam domain module=Conotoxin::GRP; Domain location=20-114::18-110
ILITLDRSLQKARRHKNMASKRLLVLVALLLAAVFLAVSAAANDDQAQPRKDDGGENKADVQDYRGGGGGWRGGGGYPGRGYPGGGGYPGGGRGGYCRWGCCNRGYYGGCRCCSRRRRGPGAHVPAMYI

SEQ ID NO: 11380 - protein, 235 aa, Zea mays
  misc_feature (1)..(1): Xaa can be any naturally occurring amino acid
  Coding DNA Sequence Number=SeqID_568
  Subcellular localization annotation: CTP_CleavageSite=48; ConfidenceScore=5.74e-01
XPISSSSLGVSLTRAVPCSSTGRPPLLATPFSASLVLAPPHGRPSLPSASPAGRPPSSFLWSPMVVLSAPSVPAPISRSAPLQLSSACHLPDSSPSHGRRPLPQLILPAAMELALARLLQRAWPPRRSCSSTPASLVPAPSHLPHVLCPAAMGALASALSISATSRALVSRVLDSSTTLPQARALSSSLSSPPTTAARQPHPWSWSSNNHGTPPCRALDVLDEIPQRAPPRSVQP

SEQ ID NO: 11381 - protein, 139 aa, Zea mays
  Coding DNA Sequence Number=SeqID_570
  Subcellular localization annotation: CTP_CleavageSite=31; ConfidenceScore=5.23e-01
GARSLLSGLHAHRVQLPPPAVSAARPSLELRSASNSGARPSSLILLYNFDGGTICSVVILKEWLGIHRVAAAEISKGLPIFGIGVGHSTYDKASVITLMLAICLVGYSYSQNHKSAWFEAISTKPNKGFRLSSSDSPSC

SEQ ID NO: 11382 - protein, 120 aa, Zea mays
  Coding DNA Sequence Number=SeqID_572
  Gene Ontology: Mol. function=ubiquinol-cytochrome-c reductase activity; Cellular component=mitochondrial respiratory chain; Biological process=mitochondrial electron transport, ubiquinol to cytochrome c
  Homolog annotation: Hit_ID=UPI00015B5F24; Match level="QueryCoverage =56%, HitCoverage=56%, E-value=1e-12, Identity=45%"; Hit description =PREDICTED: similar to ubiquinol-cytochrome C reductase complex 14kD subunit
  Pfam annotation: Domain name=UCR_14kD; Domain location=10-113; Score =108.2; E_value=2.5e-29; Accession=PF02271.6; Description=Ubiquinol -cytochrome C reductase complex 14kD subunit
MRIIRALFSAAKAAETAEITSWDRFLFKANGYNKLGLYSDDLLSELDDTVVEALKRIPEETINQRIFRANRAALLTMNKTILPEDQWTKIEDDKPYLFPHVLQIQKEIEEKKTWDEKNPL

SEQ ID NO: 11383 - protein, 108 aa, Zea mays
  misc_feature (51)..(51): Xaa can be any naturally occurring amino acid
  Coding DNA Sequence Number=SeqID_573
  Subcellular localization annotation: CTP_CleavageSite=27; ConfidenceScore=5.05e-01
PTTIGGWCPHQQSVVMVRPYSPRSDPLCARRNCIYRIPGCSLPLRGRRASXGSIGVCPTGLERAFAGPFSAFDECIWVTSMVVCCEQRPHNVIGLHANVQHVPQPEHG

SEQ ID NO: 11384 - protein, 61 aa, Zea mays
  Coding DNA Sequence Number=SeqID_575
  Gene Ontology: Mol. function=7S RNA binding; Cellular component =signal recognition particle, endoplasmic reticulum targeting; Biological process=SRP-dependent cotranslational protein targeting to membrane
  Homolog annotation: Hit_ID=A2YCL3; Match level="QueryCoverage=80%, HitCoverage=46%, E-value=4e-20, Identity=87%"; Hit description =Putative uncharacterized protein
MATSNTARMEDGGGDLRSTIKKWNIIYPVYLNSKKTVAEGRRIAAAKACPDSTCIEIADCC

SEQ ID NO: 11385 - protein, 127 aa, Zea mays
  misc_feature (43)..(43): Xaa can be any naturally occurring amino acid
  Coding DNA Sequence Number=SeqID_576
  Homolog annotation: Hit_ID=A5B6W8; Match level="QueryCoverage=37%, HitCoverage=16%, E-value=3e-09, Identity=62%"; Hit description =Putative uncharacterized protein
GFAESGDARRRWDAKTIRRHIRDRRRYLYSKSLEASHWVLLEXERRIRASLEEGKPIPTELRNEEHDLRKQIDLGAWSVGGCSDVFLANLQRFFSSKHSDQFMATENRHYHLYLICFAFPSVFLSSC

SEQ ID NO: 11386 - protein, 140 aa, Zea mays
  Coding DNA Sequence Number=SeqID_577
  Subcellular localization annotation: CTP_CleavageSite=45; ConfidenceScore=5.06e-01
FWCTFRYTPYFLRPPLHLLIYRLHQLQIVASHRAAGRVPLAVSPRAVSRRRPEHRRCAASTPSWPPGPPSPNRRGTRRPEQPSSRAGAGADGDRRIGALSRRAPRAHGRGRPASLPGADLRSPKPEGEAVSCEADCLQAN

SEQ ID NO: 11387 - protein, 131 aa, Zea mays
  misc_feature (47)..(47): Xaa can be any naturally occurring amino acid
  misc_feature (74)..(74): Xaa can be any naturally occurring amino acid
  misc_feature (88)..(88): Xaa can be any naturally occurring amino acid
  misc_feature (117)..(117): Xaa can be any naturally occurring amino acid
  Coding DNA Sequence Number=SeqID_6410
SGLLKLHRVCTWRRILELFYLVSLICRDMPVRSSLIGLLLYEVDAIXKDRPSGPTSSRGLRPWGHRTWPPPPMXRSSKERRPPPPNAXLSDNSSARLGSPRPGPCNFGFPLFWQIQXVFPYNYSAGWGFRI

SEQ ID NO: 11388 - protein, 146 aa, Zea mays
  misc_feature (30)..(31): Xaa can be any naturally occurring amino acid
  misc_feature (34)..(34): Xaa can be any naturally occurring amino acid
  misc_feature (91)..(91): Xaa can be any naturally occurring amino acid
  Coding DNA Sequence Number=SeqID_6412
RRGAAARLSHNLGLGRAFGPCGAPLPPADXXGCXLDQRLGFLRMLVIYCGKIGLEAGGRANHSTSFPSRHKKIWPAARIYWPTVPILLSLXSIFFLSAAQNFNRIEILVPGTLRVLELVNPSFAPPSPGSTNPHRLCYLGCVLLVL

SEQ ID NO: 11389 - protein, 206 aa, Zea mays
  Coding DNA Sequence Number=SeqID_6414
  Gene Ontology: Mol. function=protein serine/threonine kinase activity; Cellular component=nuclear speck; Biological process =protein amino acid phosphorylation
  Homolog annotation: Hit_ID=A2YNB9; Match level="QueryCoverage=94%, HitCoverage=26%, E-value=1e-104, Identity=93%"; Hit description =Putative uncharacterized protein
  Pfam annotation: Domain name=Pkinase; Domain location=1-206; Score =182.7; E_value=9.3e-52; Accession=PF00069.15; Description=Protein kinase domain
  Pfam annotation: Domain name=Pkinase_Tyr; Domain location=1-204; Score=-12.9; E_value=1.3e-11; Accession=PF07714.7; Description =Protein tyrosine kinase
  Pfam module annotation: Pfam domain module=Pkinase::Pkinase_Tyr; Domain location=1-206::1-204
VGQGTYSSVFRARDLETGKIVALKKVRFDNFEPESVRFMAREIQILRRLDHPNVMKLEGLITSRLSCSLYLVFEYMEHDLAGLCSSPDIKFTEAQLKCYMNQLLSGLEHCHSRHVVHRDIKGANLLVNNEGVLKIADFGLANFFDPSKNHPLTSRVVTLWYRPPELLLGSTHYDAAVDLWSVGCVFPEMYRGKPVFMFCLPRYHPY

SEQ ID NO: 11390 - protein, 199 aa, Zea mays
  Coding DNA Sequence Number=SeqID_6415
  Gene Ontology: Biological process=intracellular signaling cascade
  Homolog annotation: Hit_ID=Q5NA51; Match level="QueryCoverage=96%, HitCoverage=41%, E-value=2e-47, Identity=54%"; Hit description=Leaf senescence related protein-like
  Subcellular localization annotation: CTP_CleavageSite=23; ConfidenceScore=5.52e-01
MVSPGGPSRVAVWGGVAGPGSPRVSSAATAFAALRRGWRWAHSGAPTLERAARTFLLASAALVLACALYLYVLRYVGRGGRAFAAAGFVGGSGLGLGGEACDVFDGAWVPDDTGRHPLYNSCQCPFAERGFDCLANGRNDTGYLKWRWKPRRCEVPQFAARTALERLRGKRVVFVGDSMSRTQWESFICMLMAGVDDPR

SEQ ID NO: 11391 - protein, 102 aa, Zea mays
  misc_feature (80)..(102): Xaa can be any naturally occurring amino acid
  Coding DNA Sequence Number=SeqID_6416
GEVNLLSSGVYTLWCTYCSIVPFPCGNLVWWVCDLFGSLHFVYPSYKSCYSLTFFLGLFENFVSGLPSSCFFDTVRVRYXXXXXXXXXXXXXXXXXXXXXXX

SEQ ID NO: 11392 - protein, 196 aa, Zea mays
  misc_feature (110)..(110): Xaa can be any naturally occurring amino acid
  misc_feature (142)..(142): Xaa can be any naturally occurring amino acid
  Coding DNA Sequence Number=SeqID_6418
  Gene Ontology: Mol. function=translation elongation factor activity; Cellular component=cytoplasm; Biological process=translational elongation
  Homolog annotation: Hit_ID=P13905; Match level="QueryCoverage=100%, HitCoverage=42%, E-value=1e-103, Identity=97%"; Hit description =Elongation factor 1-alpha
  Pfam annotation: Domain name=GTP_EFTU; Domain location=5-196; Score =245.4; E_value=1.2e-70; Accession=PF00009.17; Description=Elongation factor Tu GTP binding domain
  Pfam annotation: Domain name=MMR_HSR1; Domain location=8-158; Score= -7.5; E_value=0.0052; Accession=PF01926.13; Description=GTPase of unknown function
  Pfam module annotation: Pfam domain module=GTP_EFTU::MMR_HSR1; Domain location=5-196::8-158
MGKEKFHINIVVIGHVDSGKSTTTGHLIYKLGGIDKRVIERFEKEAAEMNKRSFKYAWVLDKLKAERERGITIDIALWKFETTKYYCTVIDAPGHRDFIKNMITGTSQAXDCAVLIIDSTTGGFEAGISKDGQTREHALLAXFTLGVKQMICCCNKMDATTPKYSKARYDEIIKGVSFYLEKKVGYNPDKIPFVPI

SEQ ID NO: 11393 - protein, 138 aa, Zea mays
  Coding DNA Sequence Number=SeqID_6419
KETFLNCGLLARAKGIEKKKRQRKEEKEARRRQLGRTVAASALQRWLSCGAPRVNIIPAGRPANLNIWSDHKVHGQSFANDGSACFSDSTITIKQEDSFREDGDSSTMQMVKDPPGVASFFCIMVRTGGRWVNINLPN

SEQ ID NO: 11394 - protein, 159 aa, Zea mays
  Coding DNA Sequence Number=SeqID_6421
  Subcellular localization annotation: CTP_CleavageSite=63; ConfidenceScore=5.22e-01
SYSSPACVVLFVPVSSPHCGACGSALVGRVFYPRLVRTRTEGAPFLWIWPPGRARRGGIPLPRSSGSRRYPGRALCPEWTPLFPGTPPGLMRQLEAPFRGFPFRVPPCGKQEGSPVPSSPTRGAFFLERWPMGSGLVEDPPSGDDPRRRAARAPHLRRG

SEQ ID NO: 11395 - protein, 151 aa, Zea mays
  Coding DNA Sequence Number=SeqID_6423
  Subcellular localization annotation: CTP_CleavageSite=47; ConfidenceScore=5.37e-01
CNVTLANVPYRTTHSMYRFLISWHAHTQRARTKLPPPLQSTTDATTRTSTTSEARGRRGTNLCWSLGAYASLGLRGGRGNEVAVINKRVGGFPGPGGLGCLLEDPATPTRQRQSASGRWPVGDWGGAAALLVSGDRGPRSAARTARGGWRR

SEQ ID NO: 11396 - protein, 108 aa, Zea mays
  Coding DNA Sequence Number=SeqID_6425
  Subcellular localization annotation: CTP_CleavageSite=56; ConfidenceScore=5.56e-01
ITAPISSSDNATGVTISSGKSLSELSSAFCSLGASVPINLLSFISRSFTTLLWSVRDGNSKEARRIFEHHSRSWHVYATVSEGRRRGGTVGRWRQGTVDSNWSVEVSS

SEQ ID NO: 11397 - protein, 196 aa, Zea mays
  misc_feature (101)..(101): Xaa can be any naturally occurring amino acid
  misc_feature (112)..(112): Xaa can be any naturally occurring amino acid
  misc_feature (147)..(147): Xaa can be any naturally occurring amino acid
  Coding DNA Sequence Number=SeqID_6426
  Gene Ontology: Mol. function=phenylalanine ammonia-lyase activity; Cellular component=cytoplasm; Biological process=phenylpropanoid metabolic process
  Homolog annotation: Hit_ID=A2IBN5; Match level="QueryCoverage=84%, HitCoverage=23%, E-value=3e-49, Identity=66%"; Hit description =Phenylalanine ammonia-lyase
  Pfam annotation: Domain name=PAL; Domain location=1-195; Score= -184.2; E_value=6e-07; Accession=PF00221.9; Description=Phenylalanine and histidine ammonia-lyase
HTLPSEVSRAAMLVRINTLLQGYSGIRFEILEAITKLINTGVSPCLPLRGTITASGDLVPLSYIAGLITGRPNAQAVTVDGRKVDAAEAFKGGGIGGGFFXLNPKGGLGIVXGTSGGSALRPMVCFNPNGFRVLVKGLVRVFWEGMXGKPEKGPLSPKVRHPPGAHRGLCPFGNNSGKGGPFLKTPPGGRTPWTPF

SEQ ID NO: 11398 - protein, 174 aa, Zea mays
  misc_feature (1)..(6): Xaa can be any naturally occurring amino acid
  misc_feature (8)..(9): Xaa can be any naturally occurring amino acid
  misc_feature (12)..(15): Xaa can be any naturally occurring amino acid
  misc_feature (19)..(19): Xaa can be any naturally occurring amino acid
  misc_feature (21)..(22): Xaa can be any naturally occurring amino acid
  misc_feature (25)..(26): Xaa can be any naturally occurring amino acid
  misc_feature (29)..(34): Xaa can be any naturally occurring amino acid
  misc_feature (36)..(36): Xaa can be any naturally occurring amino acid
  misc_feature (40)..(41): Xaa can be any naturally occurring amino acid
  misc_feature (44)..(45): Xaa can be any naturally occurring amino acid
  misc_feature (47)..(51): Xaa can be any naturally occurring amino acid
  misc_feature (53)..(55): Xaa can be any naturally occurring amino acid
  misc_feature (60)..(61): Xaa can be any naturally occurring amino acid
  misc_feature (72)..(73): Xaa can be any naturally occurring amino acid
  misc_feature (75)..(77): Xaa can be any naturally occurring amino acid
  misc_feature (83)..(83): Xaa can be any naturally occurring amino acid
  misc_feature (85)..(87): Xaa can be any naturally occurring amino acid
  misc_feature (90)..(95): Xaa can be any naturally occurring amino acid
  misc_feature (98)..(98): Xaa can be any naturally occurring amino acid
  misc_feature (100)..(106): Xaa can be any naturally occurring amino acid
  misc_feature (108)..(112): Xaa can be any naturally occurring amino acid
  misc_feature (116)..(117): Xaa can be any naturally occurring amino acid
  misc_feature (120)..(122): Xaa can be any naturally occurring amino acid
  misc_feature (128)..(128): Xaa can be any naturally occurring amino acid
  misc_feature (133)..(134): Xaa can be any naturally occurring amino acid
  misc_feature (136)..(136): Xaa can be any naturally occurring amino acid
  misc_feature (147)..(154): Xaa can be any naturally occurring amino acid
  misc_feature (156)..(161): Xaa can be any naturally occurring amino acid
  misc_feature (164)..(169): Xaa can be any naturally occurring amino acid
  Coding DNA Sequence Number=SeqID_6427
XXXXXXHXXYIXXXXFSLXWXXMIXXQGXXXXXXAXHLVXXQNXXLXXXXXLXXXQVFPXXHCLCFLACQFXXPXXXCVDQGXLXXXSHXXXXXXFQXFXXXXXXXHXXXXXIFQXXFGXXXQFLWVXKVPAXXVXDVVISAHVPTXXXXXXXXCXXXXXXNSXXXXXXPLPFR

SEQ ID NO: 11399 - protein, 85 aa, Zea mays
  Coding DNA Sequence Number=SeqID_6429
TGHCPCTPDSPVNYSAALLSFPEGAKFSLESSGAPDTVRWCTGHCLVHTGQSGVPDQGTLQLPLALFVEPFSWSFYWLIVNLWYL

SEQ ID NO: 11400 - protein, 90 aa, Zea mays
  Coding DNA Sequence Number=SeqID_6430
  Subcellular localization annotation: CTP_CleavageSite=54; ConfidenceScore=5.06e-01
LEGTDPFNIRSIDATARSEHSLFSANLHSIGSKLTLKRANSPKMLISFGRSTMQAFLYMNPYDATGTTGPDLNLCHGVEMLRVRGTDDQL

SEQ ID NO: 11401 - protein, 144 aa, Zea mays
  misc_feature (58)..(58): Xaa can be any naturally occurring amino acid
  misc_feature (84)..(84): Xaa can be any naturally occurring amino acid
  Coding DNA Sequence Number=SeqID_6432
  Gene Ontology: Mol. function=catalytic activity; Cellular component =extracellular region; Biological process=metabolic process
  Homolog annotation: Hit_ID=A2Z659; Match level="QueryCoverage=69%, HitCoverage=13%, E-value=2e-26, Identity=62%"; Hit description =Putative uncharacterized protein
VVLSAPRLSTFTDAPPIGNARLGAMVWGCVESERLQLNHDTLWTGAPGNYTNPPAPAXLSKVRSLVDNGKHPEAHLLLMILSGXDQTQAFHPLGEFGRAFGGASGPQFPRGVRFSPGTGPGQITGGVITPPGKIFPPPPYKRLG

SEQ ID NO: 11402 - protein, 102 aa, Zea mays
  Coding DNA Sequence Number=SeqID_6433
PPEQSIYLSPATVVVWLHPNERERESRRKTYKKEKEPEQGQSSAQLSKRLPTPTGHNGMAWRPGARPPLSPPLFCSPPLSLSLLPRALVRLGSAVVSWSSGV

SEQ ID NO: 11403 - protein, 191 aa, Zea mays
  Coding DNA Sequence Number=SeqID_6435
AQDSRGRFRTTPSSPRGNRWAVAALDVWDEANPDQVQLDPCRSQLLSWHLAKKWGLLRNCRTKWKGSLKTGCGVLPIWMIDKGHTFQPWSTTGTLGALGHEILPPPRGATCLRLHLEQLWPLEEKPFSMWSPRASITPSHIYPPLQWLPEPTALPSPHQHPHPPAHRTPGRSELTPKIAKNKDMGYGTMGR

SEQ ID NO: 11404 - protein, 105 aa, Zea mays
  misc_feature (38)..(39): Xaa can be any naturally occurring amino acid
  misc_feature (42)..(42): Xaa can be any naturally occurring amino acid
  misc_feature (54)..(54): Xaa can be any naturally occurring amino acid
  misc_feature (60)..(60): Xaa can be any naturally occurring amino acid
  misc_feature (86)..(86): Xaa can be any naturally occurring amino acid
  misc_feature (100)..(101): Xaa can be any naturally occurring amino acid
  Coding DNA Sequence Number=SeqID_6437
QATKFKPRRSVGNPDSRELAQANRDTENSFMAQKRIFXXPVXSAIETMFSYQEXKILVHXNPVSNCIPPPPIYRQILGYVTNGPFXKTSLEKKGIEAVAXXPFGA

SEQ ID NO: 11405 - protein, 174 aa, Zea mays
  Coding DNA Sequence Number=SeqID_6439
KSIEVDINMYTKYHKNRVVDLPPLASREGCRRSPRIGKVGVVAGGEMPVCATSGLAPSRSQPRACGSTAACAPLRSIAVALRERTPAHALDARCHHARLRWPQLRHSLKEPPPSCEVKVTFADSTAVLNATVDSSRFCHFFKHLEAEVHEVDAELESAAGQGLGEPHRRSERGR

SEQ ID NO: 11406 - protein, 104 aa, Zea mays
  Coding DNA Sequence Number=SeqID_6441
  Subcellular localization annotation: CTP_CleavageSite=79; ConfidenceScore=5.19e-01
TWNYYHINNQIKTSNPTSNHKFTKLTSGLYSCAAVCDRRSSALRAWLWLTGWAHGSAASAARGCSPSSPGWRSAPGGLSTAYRWKCQQGNKSRPKSKGMALTGV

SEQ ID NO: 11407 - protein, 107 aa, Zea mays
  misc_feature (16)..(17): Xaa can be any naturally occurring amino acid
  misc_feature (21)..(22): Xaa can be any naturally occurring amino acid
  misc_feature (27)..(28): Xaa can be any naturally occurring amino acid
  Coding DNA Sequence Number=SeqID_6442
  Gene Ontology: Mol. function=binding
  Homolog annotation: Hit_ID=Q69NX2; Match level="QueryCoverage=87%, HitCoverage=7%, E-value=3e-24, Identity=57%"; Hit description =Putative fanconi anemia, complementation group D2
MVTLLTSGCFVTLPTXXYLLXXLHNKXXNLNPSIKPFLSTSKAKYTTTHCHKSTQDFLDKIQPLFLVLRKHLDGAVSMIKDELESCLDDWSSHSSSAGNPNIPYVIT

SEQ ID NO: 11408 - protein, 196 aa, Zea mays
  misc_feature (1)..(8): Xaa can be any naturally occurring amino acid
  misc_feature (10)..(11): Xaa can be any naturally occurring amino acid
  misc_feature (14)..(16): Xaa can be any naturally occurring amino acid
  misc_feature (19)..(22): Xaa can be any naturally occurring amino acid
  misc_feature (24)..(30): Xaa can be any naturally occurring amino acid
  misc_feature (32)..(34): Xaa can be any naturally occurring amino acid
  misc_feature (38)..(41): Xaa can be any naturally occurring amino acid
  misc_feature (44)..(46): Xaa can be any naturally occurring amino acid
  misc_feature (48)..(53): Xaa can be any naturally occurring amino acid
  misc_feature (56)..(57): Xaa can be any naturally occurring amino acid
  misc_feature (59)..(62): Xaa can be any naturally occurring amino acid
  misc_feature (65)..(66): Xaa can be any naturally occurring amino acid
  misc_feature (68)..(73): Xaa can be any naturally occurring amino acid
  misc_feature (77)..(79): Xaa can be any naturally occurring amino acid
  misc_feature (81)..(86): Xaa can be any naturally occurring amino acid
  misc_feature (88)..(88): Xaa can be any naturally occurring amino acid
  misc_feature (90)..(98): Xaa can be any naturally occurring amino acid
  misc_feature (102)..(108): Xaa can be any naturally occurring amino acid
  misc_feature (110)..(129): Xaa can be any naturally occurring amino acid
  misc_feature (131)..(137): Xaa can be any naturally occurring amino acid
  misc_feature (145)..(145): Xaa can be any naturally occurring amino acid
  misc_feature (150)..(150): Xaa can be any naturally occurring amino acid
  misc_feature (181)..(182): Xaa can be any naturally occurring amino acid
  misc_feature (191)..(194): Xaa can be any naturally occurring amino acid
  Coding DNA Sequence Number=SeqID_6443
XXXXXXXXSXXEIXXXRGXXXXGXXXXXXXGXXXERKXXXXGGXXXEXXXXXXAIXXDXXXXRTXXGXXXXXXRGEXXXKXXXXXXGXVXXXXXXXXXTKKXXXXXXXGXXXXXXXXXXXXXXXXXXXXGXXXXXXXHALSLSRXLGVSXRHGLPFPSLARRDYLVVESWFWSCRCGSLSXXRALARTSSXXXXLS

SEQ ID NO: 11409 - protein, 201 aa, Zea mays
  misc_feature (26)..(26): Xaa can be any naturally occurring amino acid
  misc_feature (36)..(36): Xaa can be any naturally occurring amino acid
  misc_feature (40)..(40): Xaa can be any naturally occurring amino acid
  misc_feature (43)..(43): Xaa can be any naturally occurring amino acid
  misc_feature (46)..(48): Xaa can be any naturally occurring amino acid
  misc_feature (50)..(51): Xaa can be any naturally occurring amino acid
  misc_feature (54)..(54): Xaa can be any naturally occurring amino acid
  misc_feature (56)..(57): Xaa can be any naturally occurring amino acid
  misc_feature (59)..(62): Xaa can be any naturally occurring amino acid
  misc_feature (64)..(64): Xaa can be any naturally occurring amino acid
  misc_feature (66)..(67): Xaa can be any naturally occurring amino acid
  misc_feature (70)..(71): Xaa can be any naturally occurring amino acid
  misc_feature (73)..(75): Xaa can be any naturally occurring amino acid
  misc_feature (77)..(88): Xaa can be any naturally occurring amino acid
  misc_feature (90)..(92): Xaa can be any naturally occurring amino acid
  misc_feature (96)..(97): Xaa can be any naturally occurring amino acid
  misc_feature (100)..(101): Xaa can be any naturally occurring amino acid
  misc_feature (103)..(103): Xaa can be any naturally occurring amino acid
  misc_feature (106)..(106): Xaa can be any naturally occurring amino acid
  misc_feature (111)..(118): Xaa can be any naturally occurring amino acid
  misc_feature (120)..(127): Xaa can be any naturally occurring amino acid
  misc_feature (130)..(130): Xaa can be any naturally occurring amino acid
  misc_feature (132)..(132): Xaa can be any naturally occurring amino acid
  misc_feature (134)..(137): Xaa can be any naturally occurring amino acid
  misc_feature (139)..(139): Xaa can be any naturally occurring amino acid
  misc_feature (144)..(147): Xaa can be any naturally occurring amino acid
  misc_feature (151)..(151): Xaa can be any naturally occurring amino acid
  misc_feature (153)..(153): Xaa can be any naturally occurring amino acid
  misc_feature (156)..(156): Xaa can be any naturally occurring amino acid
  misc_feature (158)..(158): Xaa can be any naturally occurring amino acid
  misc_feature (171)..(171): Xaa can be any naturally occurring amino acid
  misc_feature (175)..(175): Xaa can be any naturally occurring amino acid
  misc_feature (186)..(186): Xaa can be any naturally occurring amino acid
  misc_feature (188)..(188): Xaa can be any naturally occurring amino acid
  misc_feature (190)..(190): Xaa can be any naturally occurring amino acid
  misc_feature (192)..(192): Xaa can be any naturally occurring amino acid
  misc_feature (196)..(197): Xaa can be any naturally occurring amino acid
  misc_feature (200)..(201): Xaa can be any naturally occurring amino acid
  Coding DNA Sequence Number=SeqID_6445
PPPPPHRGELPLDRAEARRLARRAKXFVLLGDGKEXYHRXPSXISXXXQXXSFXGXXVXXXXPXFXXTIXXIXXXFXXXXXXXXXXXXFXXXVSFXXNFXXVXFFXCFFSXXXXXXXXVXXXXXXXXTVXIXIXXXXFXQCVNXXXXILRXVXNSXRXSLFLILTCFCLHXFLEXMDDGIEIKEHXEXVXEXFHKXXFYXX

SEQ ID NO: 11410 - protein, 201 aa, Zea mays; identical to SEQ ID NO: 11409
  misc_feature (26)..(26): Xaa can be any naturally occurring amino acid
  misc_feature (36)..(36): Xaa can be any naturally occurring amino acid
  misc_feature (40)..(40): Xaa can be any naturally occurring amino acid
  misc_feature (43)..(43): Xaa can be any naturally occurring amino acid
  misc_feature (46)..(48): Xaa can be any naturally occurring amino acid
  misc_feature (50)..(51): Xaa can be any naturally occurring amino acid
  misc_feature (54)..(54): Xaa can be any naturally occurring amino acid
  misc_feature (56)..(57): Xaa can be any naturally occurring amino acid
  misc_feature (59)..(62): Xaa can be any naturally occurring amino acid
  misc_feature (64)..(64): Xaa can be any naturally occurring amino acid
  misc_feature (66)..(67): Xaa can be any naturally occurring amino acid
  misc_feature (70)..(71): Xaa can be any naturally occurring amino acid
  misc_feature (73)..(75): Xaa can be any naturally occurring amino acid
  misc_feature (77)..(88): Xaa can be any naturally occurring amino acid
  misc_feature (90)..(92): Xaa can be any naturally occurring amino acid
  misc_feature (96)..(97): Xaa can be any naturally occurring amino acid
  misc_feature (100)..(101): Xaa can be any naturally occurring amino acid
  misc_feature (103)..(103): Xaa can be any naturally occurring amino acid
  misc_feature (106)..(106): Xaa can be any naturally occurring amino acid
  misc_feature (111)..(118): Xaa can be any naturally occurring amino acid
  misc_feature (120)..(127): Xaa can be any naturally occurring amino acid
  misc_feature (130)..(130): Xaa can be any naturally occurring amino acid
  misc_feature (132)..(132): Xaa can be any naturally occurring amino acid
  misc_feature (134)..(137): Xaa can be any naturally occurring amino acid
  misc_feature (139)..(139): Xaa can be any naturally occurring amino acid
  misc_feature (144)..(147): Xaa can be any naturally occurring amino acid
  misc_feature (151)..(151): Xaa can be any naturally occurring amino acid
  misc_feature (153)..(153): Xaa can be any naturally occurring amino acid
  misc_feature (156)..(156): Xaa can be any naturally occurring amino acid
  misc_feature (158)..(158): Xaa can be any naturally occurring amino acid
  misc_feature (171)..(171): Xaa can be any naturally occurring amino acid
  misc_feature (175)..(175): Xaa can be any naturally occurring amino acid
  misc_feature (186)..(186): Xaa can be any naturally occurring amino acid
  misc_feature (188)..(188): Xaa can be any naturally occurring amino acid
  misc_feature (190)..(190): Xaa can be any naturally occurring amino acid
  misc_feature (192)..(192): Xaa can be any naturally occurring amino acid
  misc_feature (196)..(197): Xaa can be any naturally occurring amino acid
  misc_feature (200)..(201): Xaa can be any naturally occurring amino acid
  Coding DNA Sequence Number=SeqID_6446

SEQ ID NO: 11411 - protein, 153 aa, Zea mays
  Coding DNA Sequence Number=SeqID_6447
  Gene Ontology: Mol. function=serine-type endopeptidase inhibitor activity; Biological process=defense response
  Homolog annotation: Hit_ID=Q75HM8; Match level="QueryCoverage=49%, HitCoverage=11%, E-value=2e-15, Identity=61%"; Hit description =Putative serine protease inhibitor
WFLGTRALAHRHRACGHCSLPFSSVAATAEASTTRDQLAAAPAGADGLHALAEQVVQLVLADGSGASSPRVAFADGVFVDSSLKLKPAFEEVPVGKYRADTQSVDFQKSGHINQNLSRKCEALVVSGLAEYGDEIDGIVPADIMKIQPILQWS

SEQ ID NO: 11412 - protein, 153 aa, Zea mays; identical to SEQ ID NO: 11411
  Coding DNA Sequence Number=SeqID_6448
  Gene Ontology: Mol. function=serine-type endopeptidase inhibitor activity; Biological process=defense response
  Homolog annotation: Hit_ID=Q75HM8; Match level="QueryCoverage=49%, HitCoverage=11%, E-value=2e-15, Identity=61%"; Hit description =Putative serine protease inhibitor

SEQ ID NO: 11413 - protein, 198 aa, Zea mays
  misc_feature (112)..(112): Xaa can be any naturally occurring amino acid
  misc_feature (152)..(152): Xaa can be any naturally occurring amino acid
  misc_feature (173)..(173): Xaa can be any naturally occurring amino acid
  Coding DNA Sequence Number=SeqID_6449
  Gene Ontology: Mol. function=structural constituent of ribosome; Cellular component=chloroplast thylakoid membrane; Biological process=translation
  Homolog annotation: Hit_ID=Q9LY66; Match level="QueryCoverage=100%, HitCoverage=56%, E-value=2e-44, Identity=59%"; Hit description=50S ribosomal protein L1, chloroplast precursor
  Pfam annotation: Domain name=Ribosomal_L1; Domain location=123-198; Score=-114.5; E_value=0.05; Accession=PF00687.11; Description =Ribosomal protein L1pL10e family
  Subcellular localization annotation: CTP_CleavageSite=60; ConfidenceScore=5.43e-01
MAVCATHSSLMIAYAASKDLTIPSLFSSANPRPNKLSVALYPPLVLLAGRRASNPSFPVVVSAVAAEADVDTEDAEQNEATSTTATAVLDPPKPKKGKAALLLKRDRTRSKXRFLEIQKLRETKREYDVKTAISLLKQTANTKVCGKSVEAXHFRLNFDPKDNDQQLRATVSXLPKGTGQTVKVAVLAQGEKVDESKN

SEQ ID NO: 11414 - protein, 198 aa, Zea mays; identical to SEQ ID NO: 11413
  misc_feature (112)..(112): Xaa can be any naturally occurring amino acid
  misc_feature (152)..(152): Xaa can be any naturally occurring amino acid
  misc_feature (173)..(173): Xaa can be any naturally occurring amino acid
  Coding DNA Sequence Number=SeqID_6450
  Gene Ontology: Mol. function=structural constituent of ribosome; Cellular component=chloroplast thylakoid membrane; Biological process=translation
  Homolog annotation: Hit_ID=Q9LY66; Match level="QueryCoverage=100%, HitCoverage=56%, E-value=2e-44, Identity=59%"; Hit description=50S ribosomal protein L1, chloroplast precursor
  Pfam annotation: Domain name=Ribosomal_L1; Domain location=123-198; Score=-114.5; E_value=0.05; Accession=PF00687.11; Description =Ribosomal protein L1pL10e family
  Subcellular localization annotation: CTP_CleavageSite=60; ConfidenceScore=5.43e-01

SEQ ID NO: 11415 - protein, 179 aa, Zea mays
  Coding DNA Sequence Number=SeqID_6451
  Subcellular localization annotation: CTP_CleavageSite=25; ConfidenceScore=5.46e-01
SRGPSSTLLSQPTPLSNGSACSILVTSYGKCSPRRTAGRRSGGGGGGGGWRHATHRDLLPAPLKARVSAAPLAPVAAAEAAASWQKHRARSRAAPRLRPPSSWPGAPNGRPVTFSGPKTIRLDGFDSFRSGVWAPSLSSFEPFLLPTGGPPGGGDSPPLKEMRRTHPPPPPSCIKGIYP

SEQ ID NO: 11416 - protein, 221 aa, Zea mays
  misc_feature (64)..(64): Xaa can be any naturally occurring amino acid
  misc_feature (108)..(108): Xaa can be any naturally occurring amino acid
  misc_feature (141)..(142): Xaa can be any naturally occurring amino acid
  misc_feature (162)..(163): Xaa can be any naturally occurring amino acid
  Coding DNA Sequence Number=SeqID_6453
  Gene Ontology: Mol. function=protein binding; Cellular component =nucleus
  Homolog annotation: Hit_ID=Q2QNJ0; Match level="QueryCoverage=59%, HitCoverage=65%, E-value=7e-63, Identity=88%"; Hit description =Expressed protein
  Pfam annotation: Domain name=DUF538; Domain location=2-161; Score =133.5; E_value=6.1e-37; Accession=PF04398.3; Description=Protein of unknown function, DUF538
MTLTIPDEVRAKAEVYVGDAAGQEKTRLLLQETGLPSGLLPLRDIIECGYVEETGFVWLRQRRXVDHYFAKAGRHVTYGAEVSAVADKGRLKKITGVKAKEMLLWVTXHEICVDDPPTGKLHCKAIGGLSRSFPVEAFEAXXPAPPGAGGVVPRDAEEEEEXXDDADKNPEEEAAADKDGDAPAAAPAAEEAESKAEKKADKEVSSADPAVVHAEALAAKN

SEQ ID NO: 11417 - protein, 116 aa, Zea mays
  misc_feature (17)..(17): Xaa can be any naturally occurring amino acid
  misc_feature (56)..(56): Xaa can be any naturally occurring amino acid
  misc_feature (66)..(67): Xaa can be any naturally occurring amino acid
  misc_feature (102)..(103): Xaa can be any naturally occurring amino acid
  Coding DNA Sequence Number=SeqID_6454
  Homolog annotation: Hit_ID=Q2R3H9; Match level="QueryCoverage=85%, HitCoverage=22%, E-value=3e-23, Identity=60%"; Hit description =Fructose-2,6-bisphosphatase, putative
MGSAHSSVSTAGGEDEXDDEDPHAAALSSWGAPAPTPAFRSSPVRMPPGSASKVLXQEPEVLPCLXXDSPVLAKPSAAGTPRLLAGPGIKVWDPCHVLLPPXXAFPAGRQVDAAGH

SEQ ID NO: 11418 - protein, 126 aa, Zea mays
  Coding DNA Sequence Number=SeqID_6455
AAWTRAAGLHLAAASAVEVDADGWRLPGRGRPAAGLGLSWTRAAGRLVRASMRGVLELWTCSGGTAAGRPCAGIPPVRWDGWWPGAVVRLASWSLGVWAWCPGLEAWTDAGLLVGGGRRLDSWWRR

SEQ ID NO: 11419 - protein, 84 aa, Zea mays
  Coding DNA Sequence Number=SeqID_6457
  Subcellular localization annotation: CTP_CleavageSite=48; ConfidenceScore=5.55e-01
GPRVRAPILDPSTLAVPHSRVCSVLTPLHSRSEARQRGRGSTSNRIKRATSLAPRRRPAILPGLGFCGAGYEPVGGWTENNMSE

SEQ ID NO: 11420 - protein, 165 aa, Zea mays
  misc_feature (153)..(153): Xaa can be any naturally occurring amino acid
  misc_feature (159)..(164): Xaa can be any naturally occurring amino acid
  Coding DNA Sequence Number=SeqID_5882
  Gene Ontology: Mol. function=tetracycline:hydrogen antiporter activity; Cellular component=integral to membrane; Biological process=response to antibiotic
  Homolog annotation: Hit_ID=A9HWX9; Match level="QueryCoverage=84%, HitCoverage=29%, E-value=1e-22, Identity=43%"; Hit description =Probable methylenomycin A resistance protein
  Pfam annotation: Domain name=DUF1328; Domain location=1-40; Score= -14.6; E_value=0.1; Accession=PF07043.3; Description=Protein of unknown function (DUF1328)
YTLTFAALLLVAGALADRYGAKTIYLAGLGVFTLASLLCGIAPGGDLLIAARMLQGLGAALFMPSSLSLLTHAYEDEQVRNRMLAAWSAIVAVAGAAGPLLGGVLIHQFGWRGIFLINLPLGLAGLWLARRRIQAAPRRPRALNPLSHVLGVXALSALXXXXXXA

SEQ ID NO: 11421 - protein, 212 aa, Zea mays
  misc_feature (212)..(212): Xaa can be any naturally occurring amino acid
  Coding DNA Sequence Number=SeqID_5883
  Gene Ontology: Cellular component=integral to membrane; Biological process=hemolysis by symbiont of host red blood cells
  Homolog annotation: Hit_ID=Q4K8V5; Match level="QueryCoverage=99%, HitCoverage=36%, E-value=2e-64, Identity=63%"; Hit description =Activation/secretion protein, TPS family, putative
  Pfam annotation: Domain name=POTRA_2; Domain location=58-133; Score =70.4; E_value=6.1e-18; Accession=PF08479.1; Description=POTRA domain, ShlB-type
ADGPLPGQEALRLQQQQQRDLQQLQLEQRQRQIQRGSFAVPPTTPALPADTAQDQRCWPLSGTRVAGVTLFNKAELNTRIEPYVAPCMGVAQINRLLAEITRLYVEAGYIASRPYLISTPAAGHPLDIHVEEGYVEAIELADQSLPVSLRGAFPGMLGEPLNLRDLEQGLDQLNRLRSVDLTADIAPGSTPGASRIILRSRSSASRWALGLX

SEQ ID NO: 11422 - protein, 298 aa, Zea mays
  misc_feature (248)..(248): Xaa can be any naturally occurring amino acid
  misc_feature (263)..(263): Xaa can be any naturally occurring amino acid
  misc_feature (267)..(267): Xaa can be any naturally occurring amino acid
  misc_feature (271)..(273): Xaa can be any naturally occurring amino acid
  misc_feature (278)..(279): Xaa can be any naturally occurring amino acid
  misc_feature (281)..(281): Xaa can be any naturally occurring amino acid
  misc_feature (286)..(286): Xaa can be any naturally occurring amino acid
  misc_feature (288)..(288): Xaa can be any naturally occurring amino acid
  misc_feature (290)..(298): Xaa can be any naturally occurring amino acid
  Coding DNA Sequence Number=SeqID_5884
  Gene Ontology: Mol. function=transporter activity; Cellular component= periplasmic space; Biological process=transport
  Homolog annotation: Hit_ID=A9IUM0; Match level="QueryCoverage=96%, HitCoverage=57%, E-value=1e-121, Identity=75%"; Hit description=ABC -transport protein, solute-binding component
  Pfam annotation: Domain name=SBP_bac_5; Domain location=1-291; Score =104.7; E_value=2.8e-28; Accession=PF00496.12; Description=Bacterial extracellular solute-binding proteins, family 5
APDASTVVLHLSEPDASLLSQLSDRAGMMISPASFDKDPGGKPVCSGPYQFKERVQNDRIVLEKFPKYWDAANYHFDRVVFTPIPDNTVRLNNLRAGDLDIIERVAPSDAKAVKDDANLRLAPVTGLGFQSISVNLGNGARANNPLAKDKRVRQALDLAIDRDVLNQVIGEGQYQPAYQPFPPASFAYNKSFEHAGRDPKKAQALLKEAGFDRVKFEITFGNNTTMQQVFELVQAMGAEAGFDITLRXVEFASLQSSLARGDXEVGXSGWXXXVDPSXXIXQYLSXKXNXXXXXXXXX

SEQ ID NO: 11423 - protein, 134 aa, Zea mays
  Coding DNA Sequence Number=SeqID_5885
  Gene Ontology: Mol. function=transmembrane receptor activity; Cellular component=intrinsic to membrane; Biological process=innate immune response
  Homolog annotation: Hit_ID=A1WCI7; Match level="QueryCoverage=99%, HitCoverage=38%, E-value=2e-55, Identity=70%"; Hit description =Putative uncharacterized protein precursor
  Pfam annotation: Domain name=DUF323; Domain location=1-131; Score= -22.2; E_value=1.3e-06; Accession=PF03781.6; Description=Domain of unknown function (DUF323)
GRYQNGDDPAALPDVANTFDADAAPLWPKWQAFAAARRDGHAFTAPVASYAPNAFGLYDMHGNAWEWVSDWYGEDYYAHSPQDDPQGPASGNVKVRRGGSWHTWALYVRSAYRNWNTVETRYPLVGFRLLREVD

SEQ ID NO: 11424 - protein, 134 aa, Zea mays; identical to SEQ ID NO: 11423
  Coding DNA Sequence Number=SeqID_5886
  Gene Ontology: Mol. function=transmembrane receptor activity; Cellular component=intrinsic to membrane; Biological process=innate immune response
  Homolog annotation: Hit_ID=A1WCI7; Match level="QueryCoverage=99%, HitCoverage=38%, E-value=2e-55, Identity=70%"; Hit description =Putative uncharacterized protein precursor
  Pfam annotation: Domain name=DUF323; Domain location=1-131; Score= -22.2; E_value=1.3e-06; Accession=PF03781.6; Description=Domain of unknown function (DUF323)

SEQ ID NO: 11425 - protein, 290 aa, Zea mays
  misc_feature (12)..(13): Xaa can be any naturally occurring amino acid
  misc_feature (249)..(249): Xaa can be any naturally occurring amino acid
  misc_feature (255)..(255): Xaa can be any naturally occurring amino acid
  misc_feature (261)..(262): Xaa can be any naturally occurring amino acid
  misc_feature (266)..(267): Xaa can be any naturally occurring amino acid
  misc_feature (269)..(276): Xaa can be any naturally occurring amino acid
  misc_feature (281)..(289): Xaa can be any naturally occurring amino acid
  Coding DNA Sequence Number=SeqID_5887
  Homolog annotation: Hit_ID=Q4KIE9; Match level="QueryCoverage=95%, HitCoverage=38%, E-value=2e-83, Identity=62%"; Hit description =Putative uncharacterized protein
  Pfam annotation: Domain name=DUF1631; Domain location=2-290; Score= -336.5; E_value=8.1e-05; Accession=PF07793.2; Description=Protein of unknown function (DUF1631)
GIFFEAMRDLRXXRKNFERGFMEQLYEAFANLGNVERGELQLIPVVSYAAVPGVSGDELEKAVALEAMLGKVLRRDGLALGQLTARLSALLDKHMDDRDNPLGPAMLCAFFLQAGRSLGVEIRVKLIILKLFEKYVLSDADLLYGEANQLLIATGVLPELKAVPSRRAVAPADLPEDTPPITGRPADDSGQEVFAALQELLSAVRGSVAPTLEASAEMQPISTRDLLRLLSHLQQYVPEPEVEDDFDLXNQLEQXLTRVSXXSGKXXVXXXXXXXXINLIXXXXXXXXXD

SEQ ID NO: 11426 - protein, 171 aa, Zea mays
  misc_feature (1)..(6): Xaa can be any naturally occurring amino acid
  misc_feature (8)..(15): Xaa can be any naturally occurring amino acid
  Coding DNA Sequence Number=SeqID_5888
  Gene Ontology: Mol. function=oxidoreductase activity; Cellular component=cytoplasm; Biological process=metabolic process
  Homolog annotation: Hit_ID=Q4KFL4; Match level="QueryCoverage=91%, HitCoverage=62%, E-value=2e-73, Identity=86%"; Hit description =Oxidoreductase, short chain dehydrogenase/reductase family
  Pfam annotation: Domain name=adh_short; Domain location=7-99; Score= -59.1; E_value=0.096; Accession=PF00106.15; Description=short chain dehydrogenase
XXXXXXFXXXXXXXXNAGVLAVGPLEDFSLEDFDRTLAINVRSVFVATQEAARHMGEGGRIINIGSTNADRMPFAGGGPYAMSKSALVGLTKGLARDLGPRGITINNVQPGPVDTDMNPASGDFAESLIGFMAVGRYGHVEEIASFVAYLVGPEAGYITGASLTIDGGFGA

SEQ ID NO: 11427 - protein, 111 aa, Zea mays
  misc_feature (1)..(1): Xaa can be any naturally occurring amino acid
  Coding DNA Sequence Number=SeqID_5889
  Gene Ontology: Mol. function=transcription factor activity; Biological process=regulation of transcription, DNA-dependent
  Homolog annotation: Hit_ID=A9IIK4; Match level="QueryCoverage=99%, HitCoverage=35%, E-value=3e-45, Identity=80%"; Hit description =Transcriptional regulator, LysR-family
XLLFSERLRYLEDLLPASRVVLRSTSVVAQYHAALQGQSLAILPCFIAAQDPRLKPVLEKEVEITRSFWMYCHEDLRKLKRVTVLWEFIRKSVLKNADLLAGKRGTMKYLP

SEQ ID NO: 11428 - protein, 165 aa, Zea mays
  Coding DNA Sequence Number=SeqID_5890
  Gene Ontology: Mol. function=succinyl-diaminopimelate desuccinylase activity; Cellular component=intracellular; Biological process =lysine biosynthetic process
  Homolog annotation: Hit_ID=Q1LMY3; Match level="QueryCoverage=100%, HitCoverage=36%, E-value=7e-69, Identity=72%"; Hit description =Acetylornithine deacetylase or succinyl-diaminopimelate desuccinylase
  Pfam annotation: Domain name=Peptidase_M20; Domain location=18-165; Score=19.7; E_value=9.1e-05; Accession=PF01546.18; Description =Peptidase family M20M25M40
YNVLARHEPRAAGGRAVLFNGHLDVVPTGPHELWDPAPFDGELRDGWLYGRGAGDMKAGIICALAAFKALQDLGVQPAGAVGFNGVLEEENTGNGTLATVSALQSAIAAAKLSAFDAVVIPEPTHERMMSAQLGVFWMYVDIVGRPAHAAYMTTGVNPVETGLRI

SEQ ID NO: 11429 - protein, 157 aa, Zea mays
  Coding DNA Sequence Number=SeqID_5891
  Gene Ontology: Mol. function=acetyl-CoA carboxylase activity; Cellular component=acetyl-CoA carboxylase complex; Biological process=fatty acid biosynthetic process
  Homolog annotation: Hit_ID=Q7WLK8; Match level="QueryCoverage=100%, HitCoverage=48%, E-value=1e-83, Identity=96%"; Hit description =Acetyl-coenzyme A carboxylase carboxyl transferase subunit alpha
  Pfam annotation: Domain name=ACCA; Domain location=4-148; Score =306.5; E_value=5e-89; Accession=PF03255.4; Description=Acetyl co -enzyme A carboxylase carboxyltransferase alpha subunit
MRNTFLEFEQPLAELENKIEQLRYVQADSAVDISDEIGRLQQKSQSLAKEIYAKLTPWQTALVARHPQRPYTLDYVREIFTDFHELHGDRMYADDQSIVGGLARFNGSPCMVIGHQKGRDTKERAARNFGMPRPEGYRKALRLMRLAEKFGIPVFTF

SEQ ID NO: 11430 - protein, 124 aa, Zea mays
  misc_feature (110)..(112): Xaa can be any naturally occurring amino acid
  Coding DNA Sequence Number=SeqID_5892
  Gene Ontology: Mol. function=nucleoside-triphosphatase activity
  Homolog annotation: Hit_ID=Q1LP11; Match level="QueryCoverage=33%, HitCoverage=16%, E-value=1e-08, Identity=70%"; Hit description=ABC transporter-related protein
  Subcellular localization annotation: CTP_CleavageSite=87; ConfidenceScore=5.03e-01
MGWCCCRNCSSRRRCSATRATGTCRWAWPSSRWWRCCPTGWPACRRNGAGAAPATPRTRRPHRPHRPPPNRCPCRSKESPMPDPLLTADAVTRRFGGLTAVNGVSLALQXXXVHAVIGTNGAGK

SEQ ID NO: 11431 - protein, 124 aa, Zea mays; identical to SEQ ID NO: 11430
  misc_feature (110)..(112): Xaa can be any naturally occurring amino acid
  Coding DNA Sequence Number=SeqID_5893
  Gene Ontology: Mol. function=nucleoside-triphosphatase activity
  Homolog annotation: Hit_ID=Q1LP11; Match level="QueryCoverage=33%, HitCoverage=16%, E-value=1e-08, Identity=70%"; Hit description=ABC transporter-related protein
  Subcellular localization annotation: CTP_CleavageSite=87; ConfidenceScore=5.03e-01

SEQ ID NO: 11432 - protein, 160 aa, Zea mays
  misc_feature (136)..(137): Xaa can be any naturally occurring amino acid
  misc_feature (145)..(153): Xaa can be any naturally occurring amino acid
  misc_feature (157)..(158): Xaa can be any naturally occurring amino acid
  misc_feature (160)..(160): Xaa can be any naturally occurring amino acid
  Coding DNA Sequence Number=SeqID_5894
  Gene Ontology: Mol. function=transcription factor activity; Cellular component=membrane; Biological process=regulation of transcription, DNA-dependent
  Homolog annotation: Hit_ID=A9ATB9; Match level="QueryCoverage=99%, HitCoverage=50%, E-value=2e-47, Identity=62%"; Hit description =Transcriptional regulator, LysR family
  Pfam annotation: Domain name=HTH_1; Domain location=3-62; Score=70.6; E_value=5.1e-18; Accession=PF00126.17; Description=Bacterial regulatory helix-turn-helix protein, lysR family
MELRQLRYFVRVVEAGSIGRAAMSLGMVTSALSQQISRLEGELATRLLQRSASGVVPTDAGLAFFRQAQLALRHADDAVHAAQQARLAGHVSVGLSSTTASILGAPFVQAMNQRYPDIRLHLVEALSGHLADMLNXXQLDLAVVXXXXXXXXXSVMXXLX

SEQ ID NO: 11433 - protein, 267 aa, Zea mays
  misc_feature (10)..(14): Xaa can be any naturally occurring amino acid
  misc_feature (18)..(19): Xaa can be any naturally occurring amino acid
  misc_feature (21)..(23): Xaa can be any naturally occurring amino acid
  misc_feature (27)..(28): Xaa can be any naturally occurring amino acid
  misc_feature (32)..(33): Xaa can be any naturally occurring amino acid
  misc_feature (39)..(39): Xaa can be any naturally occurring amino acid
  misc_feature (267)..(267): Xaa can be any naturally occurring amino acid
  Coding DNA Sequence Number=SeqID_5895
  Gene Ontology: Mol. function=nucleic acid binding; Biological process= DNA modification
  Homolog annotation: Hit_ID=A1U0S0; Match level="QueryCoverage=90%, HitCoverage=38%, E-value=2e-34, Identity=34%"; Hit description =Putative uncharacterized protein
ERLLRLVTEXXXXXWIIXXEXXXGSGXXARRXXFGMGVXIALKKRGTFMEYLLDQHPGEVFATTSRPGWHESGAFVLPGRTIGSANVRYQASNKAQVLFSRRGELALWQSEVAAKCAGNPVLTLAIGCSLAGPLLSLVGVLGGGVHLVGDSSSGKSLAQLIGSSVWGDPGVFAASWDMTKGGLEIEASSRNDTILPLDEIKRADPKRVQEMAYSLANGQGKGTMTREREGRAKLSWRLLTLSSGERSLSEHAAISGNAAHAGAELRX

SEQ ID NO: 11434 - protein, 143 aa, Zea mays
  Coding DNA Sequence Number=SeqID_5896
  Gene Ontology: Mol. function=transcription factor activity; Biological process=regulation of transcription, DNA-dependent
  Homolog annotation: Hit_ID=Q98HN8; Match level="QueryCoverage=95%, HitCoverage=43%, E-value=2e-43, Identity=63%"; Hit description =Transcriptional regulator
  Pfam annotation: Domain name=LysR_substrate; Domain location=1-137; Score=-23.3; E_value=0.1; Accession=PF03466.10; Description=LysR substrate binding domain
GTFRLLLCAAPDYLARHGAPQRPRDLERHRAVRFRYPNAGTLQAWPLALASGEAEPRLTAAFTCNNMEALLGATIQGFGIGCMPDFLARDALAAGTLRTVLDAQVRGAGRFQALWPSNRNLSPKVRVFVDFLGERLFRDGDRA

SEQ ID NO: 11435 - protein, 280 aa, Zea mays
  misc_feature (6)..(8): Xaa can be any naturally occurring amino acid
  misc_feature (14)..(14): Xaa can be any naturally occurring amino acid
  misc_feature (22)..(22): Xaa can be any naturally occurring amino acid
  misc_feature (36)..(37): Xaa can be any naturally occurring amino acid
  misc_feature (52)..(52): Xaa can be any naturally occurring amino acid
  Coding DNA Sequence Number=SeqID_5897
  Gene Ontology: Mol. function=transferase activity, transferring phosphorus-containing groups; Cellular component=integral to membrane; Biological process=two-component signal transduction system (phosphorelay)
  Homolog annotation: Hit_ID=Q6QGZ8; Match level="QueryCoverage=100%, HitCoverage=64%, E-value=1e-137, Identity=86%"; Hit description =Sensor protein
  Pfam annotation: Domain name=HAMP; Domain location=144-213; Score =51.9; E_value=2.3e-12; Accession=PF00672.15; Description=HAMP domain
  Pfam annotation: Domain name=HisKA; Domain location=217-276; Score =44.5; E_value=3.9e-10; Accession=PF00512.15; Description=His Kinase A (phosphoacceptor) domain
  Pfam module annotation: Pfam domain module=HAMP::HisKA; Domain location=144-213::217-276
LFFPQXXXSRTLWXVFIVVLFXKALTLVYLLMNEDXXVDRQYSHGVALTLRXYWAADPENREKIAKAATLVRVAGAGVPEGEQHWPYSEIYQRQMQAELGEDTEVRLRMHVSPALWVRAPSLGEDWLKVPLYPHPLRGQKIWNVLGWFLAIGLLSTASAWIFVRQLNQPLKRLVFAARQLGQGRSVRLPISDTPSEMTEVYSAFNQMAEDVEQAGRERELMLAGVSHDLRTPLTRLRLSLELMGNHTDLTDDMVRDIEDMDAILDQFLAFIRDGRDEVVE

SEQ ID NO: 11436 - protein, 173 aa, Zea mays
  Coding DNA Sequence Number=SeqID_5898
  Gene Ontology: Mol. function=transporter activity; Cellular component= integral to membrane; Biological process=transport
  Homolog annotation: Hit_ID=A1FH91; Match level="QueryCoverage=87%, HitCoverage=34%, E-value=3e-64, Identity=85%"; Hit description=Major facilitator superfamily MFS_1
  Subcellular localization annotation: CTP_CleavageSite=40; ConfidenceScore=5.12e-01
LLSNRSPIGLPKPIPIIASTFPLPSVLRRNILPEPDTMPSASRAPSGLPEHNQQTVLQQWLAILSVAVGAFALVTSEFLPVGVLNDVAADLGISAGHAGLMVTLPGIMAALAAPLLSVGIGAMDRRYLLIGLTLIMIIANMVVAYASDFSLLLFGRVLLGISIGGFWATAIAL

SEQ ID NO: 11437 - protein, 163 aa, Zea mays
  misc_feature (1)..(1): Xaa can be any naturally occurring amino acid
  Coding DNA Sequence Number=SeqID_5899
  Gene Ontology: Mol. function=transporter activity; Cellular component= 1-2nm peptidoglycan-based cell wall; Biological process=transport
  Homolog annotation: Hit_ID=Q3KHN8; Match level="QueryCoverage=99%, HitCoverage=44%, E-value=2e-78, Identity=91%"; Hit description=Amino acid ABC transporter, permease protein, 3-TM region, His/Glu/Gln/Arg/o pine
XTVWLAIVGVAPLFISRFTRKAVYGLSFLVVYPIVAYFLLHGGIFGMTNVATSQWGGLMLTLVIATVGIAGALPLGIVLALGRRSNMPAIRVVCVTFIEFWRGVPLITVLFMSSVMLPLFLPEGMGIDKLLRALIGVILFQSAYVAEVVRGGLQAIPKGQYEA

SEQ ID NO: 11438 - protein, 62 aa, Zea mays
  misc_feature (56)..(57): Xaa can be any naturally occurring amino acid
  misc_feature (61)..(61): Xaa can be any naturally occurring amino acid
  Coding DNA Sequence Number=SeqID_5900
  Gene Ontology: Mol. function=transferase activity, transferring phosphorus-containing groups; Cellular component=membrane; Biological process=regulation of transcription, DNA-dependent
  Homolog annotation: Hit_ID=A1TRF7; Match level="QueryCoverage=87%, HitCoverage=9%, E-value=1e-10, Identity=60%"; Hit description =Putative GAF sensor protein
MNAPTQSHPPVTLANCDSEPIHVPGAIQPLGALLAFDAAGVLRYASENAPQVLGMXXALGXC

SEQ ID NO: 11439 - protein, 62 aa, Zea mays; identical to SEQ ID NO: 11438
  misc_feature (56)..(57): Xaa can be any naturally occurring amino acid
  misc_feature (61)..(61): Xaa can be any naturally occurring amino acid
  Coding DNA Sequence Number=SeqID_5901
  Gene Ontology: Mol. function=transferase activity, transferring phosphorus-containing groups; Cellular component=membrane; Biological process=regulation of transcription, DNA-dependent
  Homolog annotation: Hit_ID=A1TRF7; Match level="QueryCoverage=87%, HitCoverage=9%, E-value=1e-10, Identity=60%"; Hit description =Putative GAF sensor protein

SEQ ID NO: 11440 - protein, 71 aa, Zea mays
  Coding DNA Sequence Number=SeqID_5902
  Gene Ontology: Mol. function=DNA binding; Biological process=DNA recombination
  Homolog annotation: Hit_ID=A6V4M3; Match level="QueryCoverage=97%, HitCoverage=37%, E-value=4e-17, Identity=63%"; Hit description=Phage integrase family protein
DTYVEDDTYAQVWKAADEPLQDAMDLAYLAGQRPADTLRFLETDMRDGFLHVRQGKTAQKLRIEITGELAQ

SEQ ID NO: 11441 - protein, 71 aa, Zea mays; identical to SEQ ID NO: 11440
  Coding DNA Sequence Number=SeqID_5903
  Gene Ontology: Mol. function=DNA binding; Biological process=DNA recombination
  Homolog annotation: Hit_ID=A6V4M3; Match level="QueryCoverage=97%, HitCoverage=37%, E-value=4e-17, Identity=63%"; Hit description=Phage integrase family protein

SEQ ID NO: 11442 - protein, 102 aa, Zea mays
  misc_feature (1)..(5): Xaa can be any naturally occurring amino acid
  misc_feature (8)..(11): Xaa can be any naturally occurring amino acid
  misc_feature (13)..(14): Xaa can be any naturally occurring amino acid
  misc_feature (18)..(19): Xaa can be any naturally occurring amino acid
  misc_feature (99)..(102): Xaa can be any naturally occurring amino acid
  Coding DNA Sequence Number=SeqID_5904
  Subcellular localization annotation: CTP_CleavageSite=44; ConfidenceScore=5.10e-01
XXXXXQGXXXXIXXGRGXXVQRPALGLSFQAPARGQRQVFDVPRVEQRRRGRGVGRGGQARVPHGGIGGVQRQFGVLGQPRQQAQDPGHHQVARGKGRXXXX

SEQ ID NO: 11443 - protein, 237 aa, Zea mays
  misc_feature (229)..(229): Xaa can be any naturally occurring amino acid
  Coding DNA Sequence Number=SeqID_5906
  Gene Ontology: Mol. function=acetate-CoA ligase activity; Cellular component=cytoplasm; Biological process=metabolic process
  Homolog annotation: Hit_ID=Q3K6Q3; Match level="QueryCoverage=100%, HitCoverage=36%, E-value=1e-124, Identity=91%"; Hit description =Acetyl-coenzyme A synthetase
TWWQTETGGIMLSPLVSAQRIKPGCATQPMFGVVPVLLDEQGKEISGAGSGVLAIKSSWPGQIRSVYGDPQRMIDTYFKPYPGYYFTGDGARRDEDGDYWITGRIDDVINVSGHRIGTAEVESALVLHDQVAEAAVVGYPHDVKGQGIYAFVTPMNGVEPDEALKKHLLDLVSKEIGSFAKPELIQWAPALPKTRSGKIMRRILRKIACNELDSLGDTSTLADPSVVDXLIDKRLNR

SEQ ID NO: 11444 - protein, 203 aa, Zea mays
  misc_feature (203)..(203): Xaa can be any naturally occurring amino acid
  Coding DNA Sequence Number=SeqID_5907
  Gene Ontology: Mol. function=catalytic activity; Cellular component =intracellular; Biological process=cellular metabolic process
  Homolog annotation: Hit_ID=Q4IZ70; Match level="QueryCoverage=96%, HitCoverage=54%, E-value=3e-74, Identity=71%"; Hit description=NAD -dependent epimerase/dehydratase
  Pfam annotation: Domain name=Epimerase; Domain location=17-198; Score= 9.4; E_value=7.4e-08; Accession=PF01370.11; Description=NAD dependent epimerasedehydratase family
  Pfam annotation: Domain name=NAD_binding_4; Domain location=19-201; Score=-103.6; E_value=0.047; Accession=PF07993.2; Description=Male sterility protein
  Pfam annotation: Domain name=adh_short; Domain location=15-181; Score= -46.4; E_value=0.014; Accession=PF00106.15; Description=short chain dehydrogenase
  Pfam module annotation: Pfam domain module=Epimerase::NAD_binding _4::adh_short; Domain location=17-198::19-201::15-181
MTGSPLPSPTFWRDKRVLLTGHTGFKGGWLALWLHRLGARVTGISLPAETTPALHQAARIDSLIDGRHCDIRDAAALRQQVLEARPEIVLHLAAQALVRPSYAEPVDTFATNVMGTAHLLDALRSAPDAKVAVMVTTDKVYRNNEWPYPYREHDTLGGHDPYSASKAASELVIASYRDAFLKQQGLAVASARAGNVIGGGDWX

SEQ ID NO: 11445 - protein, 143 aa, Zea mays
  misc_feature (1)..(17): Xaa can be any naturally occurring amino acid
  misc_feature (19)..(31): Xaa can be any naturally occurring amino acid
  misc_feature (33)..(50): Xaa can be any naturally occurring amino acid
  misc_feature (52)..(107): Xaa can be any naturally occurring amino acid
  misc_feature (109)..(109): Xaa can be any naturally occurring amino acid
  misc_feature (116)..(117): Xaa can be any naturally occurring amino acid
  misc_feature (124)..(125): Xaa can be any naturally occurring amino acid
  Coding DNA Sequence Number=SeqID_5908
XXXXXXXXXXXXXXXXXGXXXXXXXXXXXXXGXXXXXXXXXXXXXXXXXXVXXXXXXXXXXXXXXXXXXXXXXXXXXXXXXXXXXXXXXXXXXXXXXXXXXXXXXXXQXRSANIGXXQSSMPGXXSTFPLNRKFCAVIVSDLL

SEQ ID NO: 11446 - protein, 62 aa, Zea mays
  Coding DNA Sequence Number=SeqID_5910
  Gene Ontology: Mol. function=cation transmembrane transporter activity; Cellular component=membrane; Biological process=cation transport
  Homolog annotation: Hit_ID=Q221Q5; Match level="QueryCoverage=72%, HitCoverage=14%, E-value=3e-14, Identity=75%"; Hit description =Cation diffusion facilitator family transporter
AHLEIDAGLTVEEGHKIAVQARQRVMQRHRVLNVMTHVDPWRPPDAPKQGAEGRAIIEPGRP

SEQ ID NO: 11447 - protein, 62 aa, Zea mays; identical to SEQ ID NO: 11446
  Coding DNA Sequence Number=SeqID_5911
  Gene Ontology: Mol. function=cation transmembrane transporter activity; Cellular component=membrane; Biological process=cation transport
  Homolog annotation: Hit_ID=Q221Q5; Match level="QueryCoverage=72%, HitCoverage=14%, E-value=3e-14, Identity=75%"; Hit description =Cation diffusion facilitator family transporter

SEQ ID NO: 11448 - protein, 147 aa, Zea mays
  Coding DNA Sequence Number=SeqID_5912
  Gene Ontology: Mol. function=transcription factor activity; Biological process=regulation of transcription, DNA-dependent
  Homolog annotation: Hit_ID=Q4K3B8; Match level="QueryCoverage=93%, HitCoverage=46%, E-value=3e-34, Identity=55%"; Hit description =Transcriptional regulator, LysR family
  Pfam annotation: Domain name=HTH_1; Domain location=13-72; Score =73.4; E_value=7.6e-19; Accession=PF00126.17; Description=Bacterial regulatory helix-turn-helix protein, lysR family
  Pfam annotation: Domain name=HTH_8; Domain location=10-49; Score =10.7; E_value=0.033; Accession=PF02954.9; Description=Bacterial regulatory protein, Fis family
  Pfam module annotation: Pfam domain module=HTH_1::HTH_8; Domain location=13-72::10-49
MDYIRLRGLMDRFQEMQIFLAVAEEQGFAAAARRLKISPPSVTRAIAAMEARIGTQLLSRTTRSLHLSEAGQRYLDDCRRILAELVEAEEAAAGSFSIPWGHLTVTAPVLFGELFVAPILGEYLDQFAQVSINALLVDRVVNMTDEG

SEQ ID NO: 11449 - protein, 104 aa, Zea mays
  misc_feature (104)..(104): Xaa can be any naturally occurring amino acid
  Coding DNA Sequence Number=SeqID_5913
  Gene Ontology: Mol. function=nucleoside-triphosphatase activity; Biological process=response to DNA damage stimulus
  Homolog annotation: Hit_ID=A9IU50; Match level="QueryCoverage=99%, HitCoverage=22%, E-value=3e-28, Identity=62%"; Hit description=DNA repair protein
MAKTRTVYVCAECGGTTPKWQGKCPHCNAWNTLEETVESAAPAAAASHRYAPLASSSPVRSLSEIEARETPRTPTGLEEFDRVLGGGLVAGAVVLIGGDPGIGX

SEQ ID NO: 11450 - protein, 104 aa, Zea mays; identical to SEQ ID NO: 11449
  misc_feature (104)..(104): Xaa can be any naturally occurring amino acid
  Coding DNA Sequence Number=SeqID_5914
  Gene Ontology: Mol. function=nucleoside-triphosphatase activity; Biological process=response to DNA damage stimulus
  Homolog annotation: Hit_ID=A9IU50; Match level="QueryCoverage=99%, HitCoverage=22%, E-value=3e-28, Identity=62%"; Hit description=DNA repair protein

SEQ ID NO: 11451 - protein, 126 aa, Zea mays
  misc_feature (111)..(111): Xaa can be any naturally occurring amino acid
  misc_feature (120)..(121): Xaa can be any naturally occurring amino acid
  misc_feature (123)..(124): Xaa can be any naturally occurring amino acid
  misc_feature (126)..(126): Xaa can be any naturally occurring amino acid
  Coding DNA Sequence Number=SeqID_5915
  Gene Ontology: Mol. function=hydrolase activity; Cellular component =integral to membrane
  Homolog annotation: Hit_ID=Q2KWT0; Match level="QueryCoverage=99%, HitCoverage=32%, E-value=9e-38, Identity=62%"; Hit description =Putative membrane-associated phosphoesterase
AVNELTPDVIAITGDVVDGSVEQLAAQASPLGQLRAPFGVYLVTGNHEYYSGAAPWVAEFRRMGLRVLMNEHAVIHPAGLPVVVAGVTDYSAGAFDPRQRSNPAAALAGAXADALPKILXXHXXRX

SEQ ID NO: 11452 - protein, 60 aa, Zea mays
  Coding DNA Sequence Number=SeqID_5916
KAAALIQTKRRCMHNSRKKTKDICGERAQVYNPVYNLSNITVDLLVSIYIVLSKTKDNQI

SEQ ID NO: 11453 - protein, 110 aa, Zea mays
  misc_feature (1)..(2): Xaa can be any naturally occurring amino acid
  misc_feature (8)..(9): Xaa can be any naturally occurring amino acid
  misc_feature (12)..(16): Xaa can be any naturally occurring amino acid
  misc_feature (18)..(19): Xaa can be any naturally occurring amino acid
  misc_feature (22)..(24): Xaa can be any naturally occurring amino acid
  misc_feature (31)..(32): Xaa can be any naturally occurring amino acid
  misc_feature (47)..(47): Xaa can be any naturally occurring amino acid
  Coding DNA Sequence Number=SeqID_5918
  Gene Ontology: Mol. function=ATPase activity, coupled to transmembrane movement of ions, phosphorylative mechanism; Cellular component=integral to membrane; Biological process=phospholipid transport
  Homolog annotation: Hit_ID=A2YE62; Match level="QueryCoverage=98%, HitCoverage=9%, E-value=1e-34, Identity=72%"; Hit description =Putative uncharacterized protein
XXLRQGMXXICXXXXXGXXVAXXXKKVAKEXXLSQIANGSQRVKLEXDPDAAFALVIDGKALAFALEDDMKQMFLNLAIECASVICCRGSPKQKALVTWPVKEGLAQTSI

SEQ ID NO: 11454 - protein, 230 aa, Zea mays
  Coding DNA Sequence Number=SeqID_5919
LSSLLNTPGGEFEVPSPNSAAPPPFSPPRPIFPMGVPPWKPIIQFFCALLRGKDPPCLFFLGFSKKGVNTPFFFLPGPGCPRGPGVPRGSLFSPGREGPFRGEPRGSRARGFPWKGPFLEGPVPGPANDRRGCEEVWPVCSGGRKAGSPVGEDGACARGLGGVGGALGRGRGGRSRCPRAWRRGLGRDAWEPSTSAILHPQNPSGGGGGVWGGVAADSRRQVIATLRDGN

SEQ ID NO: 11455 - protein, 208 aa, Zea mays
  misc_feature (56)..(56): Xaa can be any naturally occurring amino acid
  misc_feature (72)..(72): Xaa can be any naturally occurring amino acid
  misc_feature (77)..(77): Xaa can be any naturally occurring amino acid
  misc_feature (79)..(79): Xaa can be any naturally occurring amino acid
  misc_feature (81)..(81): Xaa can be any naturally occurring amino acid
  misc_feature (84)..(85): Xaa can be any naturally occurring amino acid
  misc_feature (87)..(87): Xaa can be any naturally occurring amino acid
  misc_feature (90)..(90): Xaa can be any naturally occurring amino acid
  misc_feature (93)..(93): Xaa can be any naturally occurring amino acid
  misc_feature (96)..(99): Xaa can be any naturally occurring amino acid
  misc_feature (104)..(107): Xaa can be any naturally occurring amino acid
  misc_feature (109)..(109): Xaa can be any naturally occurring amino acid
  misc_feature (113)..(119): Xaa can be any naturally occurring amino acid
  misc_feature (121)..(121): Xaa can be any naturally occurring amino acid
  misc_feature (123)..(208): Xaa can be any naturally occurring amino acid
  Coding DNA Sequence Number=SeqID_5921
GEEVERWSWQESRVSCSFDFRCLLVFALLVGGARGGLLGCKFDVGGWGTHGHSVPXVEGSGDYDKPVCVIIXRRQRXFXGXELXXCXYHXAVXIMXXXXIKQIXXXXGXLLVXXXXXXXWXLXXXXXXXXXXXXXXXXXXXXXXXXXXXXXXXXXXXXXXXXXXXXXXXXXXXXXXXXXXXXXXXXXXXXXXXXXXXXXXXXXXXXXX

SEQ ID NO: 11456 - protein, 193 aa, Zea mays
  misc_feature (15)..(15): Xaa can be any naturally occurring amino acid
  misc_feature (46)..(46): Xaa can be any naturally occurring amino acid
  misc_feature (162)..(193): Xaa can be any naturally occurring amino acid
  Coding DNA Sequence Number=SeqID_5923
SGKRREMAGVVEGRXAAPKHDDFTPHPVKDQLPGGLLLASPALPRXLKAVPSSGFPHYLAMLWDPLGIISNCTLGPQMGGKQCGHKAGGLSQTLLVSLPGITTPLWQKFLGNSVAPPGIPRGHKPLWSGPPISDHPGGGEVWAMDPIPLFKFLPNPGGEKRXXXXXXXXXXXXXXXXXXXXXXXXXXXXXXXX

SEQ ID NO: 11457 - protein, 85 aa, Zea mays
  Coding DNA Sequence Number=SeqID_5925
NTSHPTLIRVMGSHSIRADVSAPGVEDVEPGTPLPGEDGTATTNTSSGSRRWPPTDVLHVISGMWKAPAEMFSSSGLVCSGCRSP

SEQ ID NO: 11458 - protein, 97 aa, Zea mays
  Coding DNA Sequence Number=SeqID_5927
  Subcellular localization annotation: CTP_CleavageSite=85; ConfidenceScore=5.76e-01
PSIIPSSTIPCSIIPCSPFLFPFPVLSLVPTAVPIPRLLSRAHCRSHSSSSLARPLPIPFLFLSPLPFSFTLFSILMVLLPWPIKMAKKGHFIGIEL

SEQ ID NO: 11459 - protein, 70 aa, Zea mays
  Coding DNA Sequence Number=SeqID_5929
SLGGQLSSMAKLGEPLLILKNGVKMYFDMRTCCGSNRSSDHSCRRPQSAAGCGIKGNLQHEYSGNDCLQL

SEQ ID NO: 11460 - protein, 70 aa, Zea mays
  Coding DNA Sequence Number=SeqID_5930
SWRQSFPLYSCCKLPLIPQPAADWGRLHEWSELLLLPQQVLISKYIFTPFFNISRGSPNFAMEESCPPRD

SEQ ID NO: 11461 - protein, 141 aa, Zea mays
  Coding DNA Sequence Number=SeqID_5932
  Subcellular localization annotation: CTP_CleavageSite=58; ConfidenceScore=5.48e-01
SAPNNICYFMFQWCITKGIQIVTNSSSQSHRFKAVNRVPGTPTQTRYPTYERVVPHCSRSSRSDKPNPRWVVALFTTWLEDGEMQMKEGLWMRLEVVTTGQHRCEPSCGIASISVDSQTQIRSSTESRALHTLWRCPCWCW

SEQ ID NO: 11462 - protein, 70 aa, Zea mays
  Coding DNA Sequence Number=SeqID_5934
PVISTISRNQRKKGGRTLVVLVKNSDIDLQIIRKGIEQTISLRIRRMREVIHVVDDAMLKVFVAGQDAEI

SEQ ID NO: 11463 - protein, 71 aa, Zea mays
  Coding DNA Sequence Number=SeqID_5936
  Gene Ontology: Mol. function=calmodulin binding; Cellular component =plasma membrane; Biological process=glycogen metabolic process
  Homolog annotation: Hit_ID=Q3UV76; Match level="QueryCoverage=100%, HitCoverage=32%, E-value=2e-31, Identity=90%"; Hit description=Adult male bone cDNA, RIKEN full-length enriched library, clone:9830131O20 product:...
  Homolog annotation: Hit description=phosphorylase kinase beta, full insert sequence
DLDKLVKEAFHEFQKDETRLKQIEKQDGMTSFYNTPPLGQRGTCSYLTKVVMNSLLEGEVKPTNEDSCLVS

SEQ ID NO: 11464 - protein, 66 aa, Zea mays
  Coding DNA Sequence Number=SeqID_5937
KDHIEYVTCILSLQEFLLNPFSKILTTCQDHLFRTYSDQLWLPVHKPRPPQQEHHMSLSRHIRKHE

SEQ ID NO: 11465 - protein, 99 aa, Zea mays
  Coding DNA Sequence Number=SeqID_5939
  Subcellular localization annotation: CTP_CleavageSite=47; ConfidenceScore=5.05e-01
QSGAYRPTPDKLPDAQCPSLPSGTPTPPLSHGWGTVMSSNRTITPPIAMHIQPRHHRHGRKVEGEKPDGSWPPLAAACVGSDARARSMRRRRTGWRCEI

SEQ ID NO: 11466 - protein, 144 aa, Zea mays
  Coding DNA Sequence Number=SeqID_5941
  Subcellular localization annotation: CTP_CleavageSite=35; ConfidenceScore=5.45e-01
ETYPPSSPSSSPPPSLPSPSPSDNCLTHLPPLTCVCRIPPRIPPLPTWSGYRWPSQAPLLGPWRRVHQPRLCHPHAWQVLRLHRQVKPEEKAEEEPEFPLEVISNAGGVSILMDETIAFSYDNDTKSSIRGRYATLSSDLQDCY

SEQ ID NO: 11467 - protein, 67 aa, Zea mays
  misc_feature (16)..(16): Xaa can be any naturally occurring amino acid
  Coding DNA Sequence Number=SeqID_5943
DLCPRLQALLRLTPTXRQPPPAEIRSRPELEERSLAEPELYTAVPSVHFRAMYALGQGRAVARRAFW

SEQ ID NO: 11468 - protein, 303 aa, Zea mays
  Coding DNA Sequence Number=SeqID_5945
  Gene Ontology: Mol. function=transferase activity; Cellular component= mitochondrion; Biological process=metabolic process
  Homolog annotation: Hit_ID=A2YNP1; Match level="QueryCoverage=97%, HitCoverage=57%, E-value=1e-109, Identity=32%"; Hit description =Putative uncharacterized protein
  Pfam annotation: Domain name=PPR; Domain location=11-45; Score=33.6; E_value=7.1e-07; Accession=PF01535.11; Description=PPR repeat
  Pfam annotation: Domain name=PPR; Domain location=116-150; Score =42.3; E_value=1.7e-09; Accession=PF01535.11; Description=PPR repeat
  Pfam annotation: Domain name=PPR; Domain location=151-185; Score =19.8; E_value=0.0099; Accession=PF01535.11; Description=PPR repeat
  Pfam annotation: Domain name=PPR; Domain location=187-221; Score =36.3; E_value=1.1e-07; Accession=PF01535.11; Description=PPR repeat
  Pfam annotation: Domain name=PPR; Domain location=222-256; Score =41.2; E_value=3.7e-09; Accession=PF01535.11; Description=PPR repeat
  Pfam annotation: Domain name=PPR; Domain location=257-291; Score =33.6; E_value=6.9e-07; Accession=PF01535.11; Description=PPR repeat
  Pfam annotation: Domain name=PPR; Domain location=46-80; Score=33.2; E_value=9.2e-07; Accession=PF01535.11; Description=PPR repeat
  Pfam annotation: Domain name=PPR; Domain location=81-115; Score=28.4; E_value=2.7e-05; Accession=PF01535.11; Description=PPR repeat
  Pfam module annotation: Pfam domain module=PPR::PPR::PPR::PPR::PPR::PP R::PPR::PPR; Domain location=11-45::116-150::151-185::187-221::222 -256::257-291::46-80::81-115
VRPCGQVPDVHSYSILVDGLCKQGDLFEGYHMLQAMASNGICPNRVSYSSLLHGLCKAGQVALALKIFKNLQDHGFEHDQITYSIILHGCCQHLDLKAISDLWFDMIHHDISPDVYNYTSLIYALCRHRNLQDALGVFELMLENGLSPNIVTCTILVDSFSKEGLVGEAFLFLDRMHQSLGIVPNLCMYRVMINGLCKTNKYSGVWNVFADMIKRGYVPDVVLYSIIIEGFVKALKLQEALRLYHKMLDEGVKPNIFTYSSLINGLCNDDRLPEAMGLIRDMIGEDLLLDNVLYTSKKKKKKK

SEQ ID NO: 11469 - protein, 169 aa, Zea mays
  misc_feature (24)..(24): Xaa can be any naturally occurring amino acid
  Coding DNA Sequence Number=SeqID_5946
PRTLDRTSQRLASSNRPTSPFALXEPQGELKSERHCCGNTKLGPRQAADCRQLPHSKQRLSSSAEIRPENPSNRRQASPVLRRHGLEPSIQTPTGGKTFPTRRPRVRATRPSRNQHEQLPRGSVRVPPSGGTPRARTRGNGEARRCGTPASREETLGGADGWGGARREP

SEQ ID NO: 11470 - protein, 75 aa, Zea mays
  Coding DNA Sequence Number=SeqID_5948
RVLAENGDGECLPVLILVYSSGNEFSPFISPEGKFLPYSHLLTEEFSVVNRDWVPLPSLNMSMSQAGTVQKRPRS

SEQ ID NO: 11471 - protein, 69 aa, Zea mays
  Coding DNA Sequence Number=SeqID_5950
YHDHCDVYILQIEELSHKMVHSKLLSEEGWEILGSQRIVTCFHQIDSFLCICVGRIFMGCLLVESANKC

SEQ ID NO: 11472 - protein, 81 aa, Zea mays
  Coding DNA Sequence Number=SeqID_5952
LAQDTGLSIKHSKKEIFGSWNRWAQHSSPTNNLEFSIPCSGLHPSPTQLTKMDTAMIPSPRRNLKNLLAELHPSHSSHCFQ

SEQ ID NO: 11473 - protein, 48 aa, Zea mays
  Coding DNA Sequence Number=SeqID_5954
NHLYIHSFDQSRMLLSNIYELSSRYLSIFRNYCCRMQNIAVDVMQHVV

SEQ ID NO: 11474 - protein, 114 aa, Zea mays
  Coding DNA Sequence Number=SeqID_5956
ICADPIDWGAARASGTSPRVLTLTTAALCILLGWRSVHPNLSRFMSGSFCCLCKRTDENLGGEKFSLFNGLSYIDMDVCRGLNCTVHITHDTVTVNLVREIRIDACFSKKKKKN

SEQ ID NO: 11475 - protein, 119 aa, Zea mays
  misc_feature (70)..(70): Xaa can be any naturally occurring amino acid
  misc_feature (80)..(80): Xaa can be any naturally occurring amino acid
  Coding DNA Sequence Number=SeqID_5958
  Gene Ontology: Mol. function=transposase activity; Cellular component= membrane; Biological process=transposition, DNA-mediated
  Homolog annotation: Hit_ID=A2XA16; Match level="QueryCoverage=86%, HitCoverage=17%, E-value=9e-33, Identity=65%"; Hit description =Putative uncharacterized protein
LRFEKDEYYLIDSGYPNRKGYPAPYNGQKYHISKWHHGRQLVGAKEVFNYTHLSQRNVIERSFGVLKMKXRILLSLPSFXLWKQSKIIVACMALHNFIRDSVIHDHDFDHFVSRTKVGD

SEQ ID NO: 11476 - protein, 119 aa, Zea mays; identical to SEQ ID NO: 11475
  misc_feature (70)..(70): Xaa can be any naturally occurring amino acid
  misc_feature (80)..(80): Xaa can be any naturally occurring amino acid
  Coding DNA Sequence Number=SeqID_5959
  Gene Ontology: Mol. function=transposase activity; Cellular component= membrane; Biological process=transposition, DNA-mediated
  Homolog annotation: Hit_ID=A2XA16; Match level="QueryCoverage=86%, HitCoverage=17%, E-value=9e-33, Identity=65%"; Hit description =Putative uncharacterized protein

SEQ ID NO: 11477 - protein, 144 aa, Zea mays
  misc_feature (1)..(68): Xaa can be any naturally occurring amino acid
  Coding DNA Sequence Number=SeqID_5960
XXXXXXXXXXXXXXXXXXXXXXXXXXXXXXXXXXXXXXXXXXXXXXXXXXXXXXXXXXXXXXXXXXXXRPGTCVPSSLVSSPLPRFRRFRTRDRTSPRAMPPVVPRSGRIVRRTAMIGAATAAYLLFTADYGPEILDPVRTVLL

SEQ ID NO: 11478 - protein, 46 aa, Zea mays
  Coding DNA Sequence Number=SeqID_5962
YPKSKPARDLNELSYFSKTNYMHIIYVMIDKHVICMLMIGELCLCI

SEQ ID NO: 11479 - protein, 82 aa, Zea mays
  Coding DNA Sequence Number=SeqID_5964
CAARSDPARAVSLVSLYARSLAPCIDHGSGGLPIPGGCALQEKSRDPEARLQDELLPDPVRNLCCLSLFLIEIMYLQLFELN

SEQ ID NO: 11480 - protein, 185 aa, Zea mays
  misc_feature (1)..(15): Xaa can be any naturally occurring amino acid
  misc_feature (17)..(21): Xaa can be any naturally occurring amino acid
  misc_feature (25)..(28): Xaa can be any naturally occurring amino acid
  misc_feature (45)..(47): Xaa can be any naturally occurring amino acid
  misc_feature (55)..(56): Xaa can be any naturally occurring amino acid
  misc_feature (59)..(62): Xaa can be any naturally occurring amino acid
  misc_feature (64)..(76): Xaa can be any naturally occurring amino acid
  misc_feature (78)..(86): Xaa can be any naturally occurring amino acid
  misc_feature (89)..(96): Xaa can be any naturally occurring amino acid
  misc_feature (99)..(101): Xaa can be any naturally occurring amino acid
  misc_feature (106)..(109): Xaa can be any naturally occurring amino acid
  misc_feature (111)..(113): Xaa can be any naturally occurring amino acid
  Coding DNA Sequence Number=SeqID_5966
XXXXXXXXXXXXXXXSXXXXXCIPXXXXGEVASFKAATAARFSSXXXDDALNFRXXRCXXXXAXXXXXXXXXXXXXIXXXXXXXXXVLXXXXXXXXNQXXXRGVTXXXXFXXXAHGLDTNLIVSIFLKQRHPIADIVPHPPLSSNPNLILADWCVIPRLLYPLVSIHALRAPPSAAAAAAPVFLF

SEQ ID NO: 11481 - protein, 119 aa, Zea mays
  Coding DNA Sequence Number=SeqID_5967
  Homolog annotation: Hit_ID=A2Z1R0; Match level="QueryCoverage=89%, HitCoverage=25%, E-value=1e-17, Identity=46%"; Hit description =Putative uncharacterized protein
APPPNSILFMFTLLRSCRNLQGIEIEDIDQSFEADWEFLNALWTHDMCSDLQTVHMLCINWLPNEISFMKLMLSKATLLRTLYVDRHPADFDDPIIDMLTCKRASAQARVLFGGLEQQW

SEQ ID NO: 11482 - protein, 283 aa, Zea mays
  Coding DNA Sequence Number=SeqID_5968
  Gene Ontology: Mol. function=catalytic activity; Cellular component =cytosol; Biological process=metabolic process
  Homolog annotation: Hit_ID=Q8LHP3; Match level="QueryCoverage=87%, HitCoverage=94%, E-value=1e-101, Identity=73%"; Hit description =Ripening-related protein-like
  Pfam annotation: Domain name=Hydrolase; Domain location=29-231; Score= 30.6; E_value=5.6e-06; Accession=PF00702.16; Description=haloacid dehalogenase-like hydrolase
MDCCCSAPAPFVCLLVLAILLLKENKNASGLARADMDDTLYPLSLGINLACRKNIQEYMLKKLRIEESQVPRMCLDLYREYGTTMAGLKVLGYDFDYDDFHACVHGTLPYEKVKPDPVLRQLLLSLPQRKIIFTNSDKANAARVLEKLGLQDCFQGIVCFETLNPPPPTETEKNSGGSAGTILCKPSLASMEAVIEIAKLDAERTVFFDDSARNIAAGKAAGFRTVIVGSSALVPGADVALESIHNIKEALPELWEVAAAAAAGDRVDAVLRSTTAVETTVIA

SEQ ID NO: 11483 - protein, 85 aa, Zea mays
  misc_feature (79)..(79): Xaa can be any naturally occurring amino acid
  Coding DNA Sequence Number=SeqID_5969
  Homolog annotation: Hit_ID=A3AMG6; Match level="QueryCoverage=71%, HitCoverage=21%, E-value=4e-26, Identity=93%"; Hit description =Putative uncharacterized protein
RGVLDSFTSFFSVLQHFSVYISGKYPSFDYISVTPPYLEVNYSTLLGQLARSPLVGKDCFILVEYPLKTDMAESCGNLXKVATEV

SEQ ID NO: 11484 - protein, 213 aa, Zea mays
  misc_feature (145)..(145): Xaa can be any naturally occurring amino acid
  misc_feature (201)..(213): Xaa can be any naturally occurring amino acid
  Coding DNA Sequence Number=SeqID_5970
GDSSDSQARNPLIPSRLLSRDRGGRDREGERARPVLATPRRWRPPLCQPPPSVCLFPDYEPRTLLRLSTYPFEPPLAVFPLQPPRHHQAPRRRRRGSAGVSWSATGSTQTTSRKMQRVILRGSTSNYSETYSLMLLAPANLGGFXKWGCFPLFIFLQGGKKERPRAKAIREKGNKIWKKRIDFPQRWKGPRENPKRSQGVXXXXXXXXXXXXX

SEQ ID NO: 11485 - protein, 213 aa, Zea mays; identical to SEQ ID NO: 11484
  misc_feature (145)..(145): Xaa can be any naturally occurring amino acid
  misc_feature (201)..(213): Xaa can be any naturally occurring amino acid
  Coding DNA Sequence Number=SeqID_5971

SEQ ID NO: 11486 - protein, 105 aa, Zea mays
  Coding DNA Sequence Number=SeqID_5972
  Subcellular localization annotation: CTP_CleavageSite=42; ConfidenceScore=5.07e-01
AWSRPRYQWGVKKTVTTRYAGGSRSLASWGHRGPTLRLCSVRQEEARTLVPGWLWPFMGQTVCYHGQFIRYGRTVWTRRTLLRWVGSRQQCYTKRRPQRRRHMNS

SEQ ID NO: 11487 - protein, 341 aa, Zea mays
  misc_feature (296)..(297): Xaa can be any naturally occurring amino acid
  misc_feature (336)..(336): Xaa can be any naturally occurring amino acid
  misc_feature (341)..(341): Xaa can be any naturally occurring amino acid
  Coding DNA Sequence Number=SeqID_5974
  Homolog annotation: Hit_ID=Q7XC46; Match level="QueryCoverage=99%, HitCoverage=44%, E-value=1e-166, Identity=87%"; Hit description=BZIP, putative, expressed
  Pfam annotation: Domain name=DUF632; Domain location=1-215; Score =197.5; E_value=3.3e-56; Accession=PF04782.3; Description=Protein of unknown function (DUF632)
ARESVKIEHEKKLSTLQSLEYKGRDSAKLDKTKASINKLQSLIVVTSQAATTTSSAIVRVRDNELAPQLVQLCFALLGMWRSMNHFHEIQNEIVQQVRGLVDSSMAESTSDLHRLATRDLEAAVAAWHSNFDRLIKYQRDYIRSLYGWLKLTLCQVDSSVPQEAHASMISRELTSFCDEWKQALDRLPDAVASEAIKSFVNVVHVIYAKQAEEMKIKKRAETYSKELEKKANSLRSIEKKYYQSYSMVGLGLPGSGRDGIDSHAAYDARDPLAEKKTEIAQCRRKVEDEMTRHAKXXEVTRSTTLNNIQTGLPGIFQAIAGFSGTVVEALDVVCRXAGSVX

SEQ ID NO: 11488 - protein, 188 aa, Zea mays
  misc_feature (1)..(1): Xaa can be any naturally occurring amino acid
  misc_feature (9)..(10): Xaa can be any naturally occurring amino acid
  misc_feature (96)..(97): Xaa can be any naturally occurring amino acid
  misc_feature (112)..(112): Xaa can be any naturally occurring amino acid
  Coding DNA Sequence Number=SeqID_5975
  Gene Ontology: Mol. function=protein binding; Cellular component =integral to membrane; Biological process=vesicle-mediated transport
  Homolog annotation: Hit_ID=A7PID6; Match level="QueryCoverage=98%, HitCoverage=58%, E-value=2e-39, Identity=52%"; Hit description =Chromosome chr13 scaffold_17, whole genome shotgun sequence
XDLIAHQHXXVLILSERLHSVTAQFDRLRSLRFQEAINRVMPRKKIKRKPDIKPTEPSKSNLVLKSDVSKVEDREVSTAPLRVQEQLLDDETRALXXELTNLLDTVQETETXMIEMSALNHLMSTHVLQQAQQIQYLYDQAVEATNNVERGNKELSQAIQRNSSSRTFLLLFFFVLTFSILFLDWYNN

SEQ ID NO: 11489 - protein, 63 aa, Zea mays
  Coding DNA Sequence Number=SeqID_5976
SVSWIPRNQQLIDMMTLENTILSPSDGSTGAYYNREICALCLQQRDCLPKLIKWKLDSFVQLS

SEQ ID NO: 11490 - protein, 125 aa, Zea mays
  Coding DNA Sequence Number=SeqID_5978
SEDAAEDRQLRLTPPGSKQREIDQKKGRAEGKRKIVRGEASPAVAAPEREKKQPRQRNLERKKQRESRSGKERKGERGQRKQHAKEKVDQKSNLQPPVASRSRPATRRSRNFAATTETSSPRRIS

SEQ ID NO: 11491 - protein, 90 aa, Zea mays
  Coding DNA Sequence Number=SeqID_5980
IVQPRNTTKRRPQQAAQLSAIAGASEQIPLISAVSKAVLATGDLPPNSESCLYFDRAPNPATCCLPACWPLPPLAQSAPYLPGRPLEVAP

SEQ ID NO: 11492 - protein, 83 aa, Zea mays
  Coding DNA Sequence Number=SeqID_5982
  Subcellular localization annotation: CTP_CleavageSite=69; ConfidenceScore=5.32e-01
GVVISGGATGATTPEDSHRELLPTQVSLVVPPRCTQSIRQSRAFLNSTRGYGSQTVLSYRGVRTRRLPRQSQGKRPAACLLYY

SEQ ID NO: 11493 - protein, 63 aa, Zea mays
  Coding DNA Sequence Number=SeqID_5984
  Gene Ontology: Mol. function=zinc ion binding; Cellular component =intracellular
  Homolog annotation: Hit_ID=Q4SE33; Match level="QueryCoverage=58%, HitCoverage=62%, E-value=3e-13, Identity=81%"; Hit description =Chromosome 3 SCAF14626, whole genome shotgun sequence
PFKFHCFQCPFTCNEKTHLFNHMKYNLCKDSISLMAKLGRDTGPAKATTTTTTHSPPHSLTHY

SEQ ID NO: 11494 - protein, 63 aa, Zea mays; identical to SEQ ID NO: 11493
  Coding DNA Sequence Number=SeqID_5985
  Gene Ontology: Mol. function=zinc ion binding; Cellular component =intracellular
  Homolog annotation: Hit_ID=Q4SE33; Match level="QueryCoverage=58%, HitCoverage=62%, E-value=3e-13, Identity=81%"; Hit description =Chromosome 3 SCAF14626, whole genome shotgun sequence

SEQ ID NO: 11495 - protein, 157 aa, Zea mays
  misc_feature (72)..(72): Xaa can be any naturally occurring amino acid
  misc_feature (87)..(87): Xaa can be any naturally occurring amino acid
  misc_feature (157)..(157): Xaa can be any naturally occurring amino acid
  Coding DNA Sequence Number=SeqID_5986
  Subcellular localization annotation: CTP_CleavageSite=54; ConfidenceScore=5.14e-01
RSSSIKGDACAAVCTAQPVARRCVEVEPRRNGNLHLSSRPPAPRRRRRPPPAPRLAGVAEQPLCTGRARQWXRRRGLHPAPAPAAAXSPPHHSKPPKHHHGKPPKCPPCTLRTCLDARPYRRKCHIWPGEALGITTTGGPTLGPVPAKPRALTAQGX

SEQ ID NO: 11496 - protein, 155 aa, Zea mays
  misc_feature (50)..(50): Xaa can be any naturally occurring amino acid
  Coding DNA Sequence Number=SeqID_5988
  Gene Ontology: Mol. function=metal ion binding
  Homolog annotation: Hit_ID=A7NXY7; Match level="QueryCoverage=73%, HitCoverage=27%, E-value=3e-40, Identity=73%"; Hit description =Chromosome chr6 scaffold_3, whole genome shotgun sequence
YPEICDTMVRQAAMAVKCMLLLYYKNCRGRNYRRQGQMLTLVEYLLLLYXRALLPTSVWYRFFLNKEYGSLFSSLATGLYLTFKLTSVVEKVQSFLAAVKALSRKDVHYGSYATAEQVSLHERSSGVAPEHGQADSSVPLGYCRLRASSSALLHT

SEQ ID NO: 11497 - protein, 114 aa, Zea mays
  misc_feature (83)..(84): Xaa can be any naturally occurring amino acid
  misc_feature (94)..(94): Xaa can be any naturally occurring amino acid
  Coding DNA Sequence Number=SeqID_5989
  Gene Ontology: Mol. function=heat shock protein binding; Cellular component=cytoplasm; Biological process=protein folding
  Homolog annotation: Hit_ID=Q5VRK6; Match level="QueryCoverage=60%, HitCoverage=15%, E-value=2e-29, Identity=92%"; Hit description =Putative GFA2
  Pfam annotation: Domain name=DnaJ_C; Domain location=1-76; Score =53.9; E_value=5.5e-13; Accession=PF01556.9; Description=DnaJ C terminal region
RCCRAILGGTVQVPTLSGDVVLKVKPGTQPGQKVVLRGKGIKTRNSPYYGDQYVHFNVNIPMNLTSRQRELIEEFAKEEQGEXXKDAKAAGASXPILGANPHSNSALADLYTVR

SEQ ID NO: 11498 - protein, 79 aa, Zea mays
  Coding DNA Sequence Number=SeqID_5990
  Subcellular localization annotation: CTP_CleavageSite=19; ConfidenceScore=5.16e-01
TSIAIGRVLSGASGKFRLHAGAAAKLFYFSKAKQSKPNQSKAKQAPSTPTQYEKKHHTHTGLGRRQSTQRRRSASAMHV

SEQ ID NO: 11499 - protein, 104 aa, Zea mays
  Coding DNA Sequence Number=SeqID_5992
  Subcellular localization annotation: CTP_CleavageSite=77; ConfidenceScore=5.64e-01
FPAPSSTDSSLCSSLFWAPSSAPSAHCIADRLTLKPMLASSFSMAPFLAHNSEPSSLFSVVPIGCSTKCPGEHCVVDSAMVVPYVLATRCTASSCARLLSKQQQ

SEQ ID NO: 11500 - protein, 126 aa, Zea mays
  Coding DNA Sequence Number=SeqID_579
  Subcellular localization annotation: CTP_CleavageSite=67; ConfidenceScore=5.64e-01
FASTRPHLARLVHRLRPRWSMGTCPASISLARPSSSLAPALSARNPAAVRNFLHRSSMSRLADVRPSASTAGDSPAHQEELATFSGGYLEPGVLEFLTGAVPAAAGCASPWPDHHATVLRSILEHL

SEQ ID NO: 11501 - protein, 139 aa, Zea mays
  Coding DNA Sequence Number=SeqID_581
PRGQFNDYYVFIELKEHADYLKTEMEDKQKRLEAVKKSLISVEAKDGDINKRIDRAFSKARSRSPSSAPYRRPRESPRRHRCRGISEALLLQRPRQLVVAPPPWLSATLPLRSWAGLPLPLWPCTAFLSSLNYFSIRMF

SEQ ID NO: 11502 - protein, 161 aa, Zea mays
  Coding DNA Sequence Number=SeqID_582
  Subcellular localization annotation: CTP_CleavageSite=53; ConfidenceScore=5.68e-01
PRHRASFGAQPTLLPPPRDSTGGRLLVSTSRRRTSCSRTRPPPSRAVDGCDHRVMVKMSEFGAGRDLRSAVDWPSSIGGSFLGCVLGRRRRRYPSLDAFASLAAPTKTTIDSLRSLSGTPKDEDLWRGRPIPRCRPTLEPTCNPARHNGPRAITAQYELKL

SEQ ID NO: 11503 - protein, 107 aa, Zea mays
  Coding DNA Sequence Number=SeqID_584
LANTILIVYILSFLRNSKKRKVINPSYKIEKVFGLIHTPYSTIHGRILLSVSLWIQDGVRTLICSPTCVMSNLHNVPRPVSVQGMSSLMVFLMSIIGGRTFLLVPIS

SEQ ID NO: 11504 - protein, 86 aa, Zea mays
  misc_feature (55)..(55): Xaa can be any naturally occurring amino acid
  Coding DNA Sequence Number=SeqID_586
  Homolog annotation: Hit_ID=A2X9G2; Match level="QueryCoverage=80%, HitCoverage=78%, E-value=7e-15, Identity=56%"; Hit description =Putative uncharacterized protein
MQRNNSFGTSWADQWDYGGDPSPRAPRDGGKAGGGVGEKTKAAAVTGMRKVKEGXTSQGFQWIKDKCQRKNGGGNKKQQGSEVPGY

SEQ ID NO: 11505 - protein, 174 aa, Zea mays
  Coding DNA Sequence Number=SeqID_587
HGDIMIHEACPSSGTEKEKKKNMMKRRCLIPASTQTDAEELLLFLHTMILRLGCRRSMRSMGSSHLPLRQLLHLLPGGRSAMGWRRGRGRATQAAKGQRSFFLECAAESRAAPPVRPANPRCRSRKPGTPPVQPRQARHGAEAMAAFSLRSCLPIRPTIPGSIILVFDARLARV

SEQ ID NO: 11506 - protein, 103 aa, Zea mays
  misc_feature (1)..(22): Xaa can be any naturally occurring amino acid
  Coding DNA Sequence Number=SeqID_589
  Subcellular localization annotation: CTP_CleavageSite=90; ConfidenceScore=5.29e-01
XXXXXXXXXXXXXXXXXXXXXXKKSSLFAAACCGCNPAAAAASTVFFSLWIAAAAVQTAATVSACSQPNTPKGVSVCALQVVVVGLEGSRRSHRWETCAKGRN

SEQ ID NO: 11507 - protein, 138 aa, Zea mays
  misc_feature (1)..(2): Xaa can be any naturally occurring amino acid
  Coding DNA Sequence Number=SeqID_591
  Subcellular localization annotation: CTP_CleavageSite=46; ConfidenceScore=5.37e-01
XXSTSAPSRSTPCSPTRRSLSLDVISQPIPPMAASPPSPSLPVWCPADALSHGRPPPLAASQQPHLLCPPSPARPSTMDTASPGTRPLHAIALLPAASPISTGALIFSHPAWPASSPFSTGTLINHVMWRIRDGLITR

SEQ ID NO: 11508 - protein, 159 aa, Zea mays
  Coding DNA Sequence Number=SeqID_593
FNTREVCLETSNLTSVGVWILEETTLYWILEKTMYCVLETTLYCTSCRGRRRWRTVNRGQRWRRRATNPRRWRWWRALSPHVPLATASGKDDDGAAAERMAAVWTIVAAEGVVARIRLCPFQTGEGCPASGGHEGFHGYPSASGEDWTGVFVFQMDQKV

SEQ ID NO: 11509 - protein, 392 aa, Zea mays
  Coding DNA Sequence Number=SeqID_595
  Gene Ontology: Mol. function=transferase activity, transferring hexosyl groups; Cellular component=integral to membrane; Biological process=carbohydrate biosynthetic process
  Homolog annotation: Hit_ID=Q10MP3; Match level="QueryCoverage=92%, HitCoverage=97%, E-value=1e-151, Identity=73%"; Hit description =Glycosyl transferase family 8 protein, putative, expressed
  Pfam annotation: Domain name=Glyco_transf_8; Domain location=88-345; Score=304.1; E_value=2.7e-88; Accession=PF01501.10; Description =Glycosyl transferase family 8
  Subcellular localization annotation: CTP_CleavageSite=34; ConfidenceScore=5.35e-01
MLWVARLSGLLSAAMVVVVLSPSLQSFPPAEAIRSSQFDGSVRFPGQIAGGARGVAFRRAPPFRNAADCGAGADNGTGANVCYPWLVHIAITLDNEYLRGSVAAVHSVVQHARCPESVFFHFLVSDPGLGDLVRAVFPQLRFKVYYLDPGRVRGLISTSVRQALEQPLNYARNYLAELLEPCVRRAIYLDSDLVVVDDVAKLWRTDLGGRTVGAPEYCHANFTKYFTGRFWSDQRFAGTFAGRRPCYFNTGVMVVDLERWRQAGYTQRIERWMEVQKSAAGRIYELGSLPPFLLVFAGHVAPIEHRWNQHGLGGDNVLGSCRDLHPGPVSLLHWSGSGKPWARLGAGRPCPLDALWAPFDLYGPRPRRRRRGGPTCFFIRKKQTICSPSFFS

SEQ ID NO: 11510 - protein, 50 aa, Zea mays
  Coding DNA Sequence Number=SeqID_5994
GYTYTPACHVHTSVHERKEEQSLPQDPDDKGREDPRSGRRRRHGEQPRAP

SEQ ID NO: 11511 - protein, 42 aa, Zea mays
  Coding DNA Sequence Number=SeqID_5996
  Gene Ontology: Mol. function=DNA binding; Cellular component =chromosome; Biological process=nucleosome assembly
  Homolog annotation: Hit_ID=A2Y5G1; Match level="QueryCoverage=100%, HitCoverage=35%, E-value=2e-15, Identity=100%"; Hit description =Histone H2B
YNKKPTITSREIQTSVRLVLPGELAKHAVSEGTKAVTKFTSS

SEQ ID NO: 11512 - protein, 58 aa, Zea mays
  Coding DNA Sequence Number=SeqID_5997
TSPSMSRYPYTKNKLYRLLSLAIYSSLKNIRREEENLLVPGQLRSLSTWISLNLGLAH

SEQ ID NO: 11513 - protein, 149 aa, Zea mays
  misc_feature (67)..(67): Xaa can be any naturally occurring amino acid
  misc_feature (96)..(96): Xaa can be any naturally occurring amino acid
  Coding DNA Sequence Number=SeqID_5999
  Gene Ontology: Mol. function=hydroxymandelonitrile lyase activity; Cellular component=extracellular region; Biological process =proteolysis
  Homolog annotation: Hit_ID=P52708; Match level="QueryCoverage=85%, HitCoverage=33%, E-value=2e-37, Identity=61%"; Hit description=P-(S)- hydroxymandelonitrile lyase precursor (EC 4.1.2.11) (Hydroxynitrile lyase) (HNL) ...
  Homolog annotation: Hit description=[Contains: P-(S)-hydroxymandelonit rile lyase chain A; P-(S)-hydroxymandelonitrile lyase chain B]
  Pfam annotation: Domain name=Peptidase_S10; Domain location=1-138; Score=-196.5; E_value=0.0011; Accession=PF00450.12; Description =Serine carboxypeptidase
SHDPSRLTKPIYIHVHIYPVLSCSMPIYDNWTTYDPIVSMLPIYKELIGAGLKIWVFSGDTDTAVPXSATRRSLAALGLPVKTSWYPWYIVPTEGXGGWSMEYDEGLNLVTVRGAGHEVPLHRPPEQALFVFQQFLLGEPMPAEVIARG

SEQ ID NO: 11514 - protein, 185 aa, Zea mays
  misc_feature (2)..(7): Xaa can be any naturally occurring amino acid
  Coding DNA Sequence Number=SeqID_6000
  Gene Ontology: Mol. function=nucleic acid binding; Cellular component= nucleus
  Homolog annotation: Hit_ID=A7QCI1; Match level="QueryCoverage=96%, HitCoverage=49%, E-value=1e-19, Identity=35%"; Hit description =Chromosome chr12 scaffold_78, whole genome shotgun sequence
GXXXXXXRYIPRLEQELEDLHAQMKLAGEHQGQNAGKHVASISHNTNSMPARKEPCGSIRNKTVSDLLSETVEGSKRLEDESSAIEDDSASESLSFTESEDLSDIFETESEEQEEDNKDRPLYLDRLDKFPSGKNDNEPDDFEEHLRRIASLSDKTDSPSKELKVSELDEIDKIFLRASSLLKKR

SEQ ID NO: 11515 - protein, 80 aa, Zea mays
  Coding DNA Sequence Number=SeqID_6001
RSSLWSSMTRVCRWGRHQEDQRGALSQAEEEPPPCHQKQRSRRPVTQKNRADTEKMGLFAIVRASRRFTRRFSTCPGAAR

SEQ ID NO: 11516 - protein, 148 aa, Zea mays
  misc_feature (1)..(40): Xaa can be any naturally occurring amino acid
  Coding DNA Sequence Number=SeqID_6003
XXXXXXXXXXXXXXXXXXXXXXXXXXXXXXXXXXXXXXXXTMRIGCMHSIENKLINDICKASFKGVKDPLLDTYTREEVIRLLRYTFPNYARYALEGYISFEFSPQYVCCISEFCSIRNELILNVCVSYITGPEGRYGATPRPGGKIC

SEQ ID NO: 11517 - protein, 63 aa, Zea mays
  Coding DNA Sequence Number=SeqID_6005
LCLFIIIQNFKMGLSGGYASHSYYVVSLIFPSDYSSCCCCVSHSSSLFSNQLPPHCWVLKVRK

SEQ ID NO: 11518 - protein, 101 aa, Zea mays
  Coding DNA Sequence Number=SeqID_6007
  Gene Ontology: Mol. function=structural molecule activity; Cellular component=protein complex; Biological process=microtubule-based movement
  Homolog annotation: Hit_ID=Q2WBI5; Match level="QueryCoverage=92%, HitCoverage=80%, E-value=5e-31, Identity=70%"; Hit description=Alpha tubulin
  Subcellular localization annotation: CTP_CleavageSite=61; ConfidenceScore=5.39e-01
GFKCGINYQAPPVVPGPALPKVQRPVCMISNSPSVVEVFSRINSKFALMSPKRAFVHWYVGEAMKQGEFSKPRKDLPPLEKDYEEVPPKAASDAAPQEKKS

SEQ ID NO: 11519 - protein, 90 aa, Zea mays
  misc_feature (26)..(26): Xaa can be any naturally occurring amino acid
  misc_feature (52)..(52): Xaa can be any naturally occurring amino acid
  misc_feature (63)..(63): Xaa can be any naturally occurring amino acid
  misc_feature (80)..(81): Xaa can be any naturally occurring amino acid
  Coding DNA Sequence Number=SeqID_6008
  Gene Ontology: Mol. function=translation initiation factor activity; Cellular component=nucleolus; Biological process=translational initiation
  Homolog annotation: Hit_ID=P80639; Match level="QueryCoverage=100%, HitCoverage=56%, E-value=3e-36, Identity=85%"; Hit description =Eukaryotic translation initiation factor 5A
  Pfam annotation: Domain name=eIF-5a; Domain location=16-85; Score =96.1; E_value=1.1e-25; Accession=PF01287.10; Description=Eukaryotic initiation factor 5A hypusine, DNA-binding OB fold
KLEDIVPSSPNCDIPHVNRTEDQLIXISKDGFVSLLTSDGNPKDDFRLPTDXTLVAQIKEGFXNGKDLFVAVQSAMGEEXXCALKDVGPK

SEQ ID NO: 11520 - protein, 67 aa, Zea mays
  Coding DNA Sequence Number=SeqID_6009
CLFHVKTETQCDKQHYYKGLGTRKRIIGRNMNFPEIKYNSEIYFIFKTISSFPFYLIHTALELSHEI

SEQ ID NO: 11521 - protein, 206 aa, Zea mays
  misc_feature (21)..(21): Xaa can be any naturally occurring amino acid
  misc_feature (139)..(139): Xaa can be any naturally occurring amino acid
  misc_feature (141)..(141): Xaa can be any naturally occurring amino acid
  misc_feature (163)..(163): Xaa can be any naturally occurring amino acid
  misc_feature (200)..(200): Xaa can be any naturally occurring amino acid
  Coding DNA Sequence Number=SeqID_6010
  Subcellular localization annotation: CTP_CleavageSite=43; ConfidenceScore=5.25e-01
LIIPLCLPPSAVLSSRDYRRXRVAETTLGGERFASPFSSPSPSSSTLPSQRRLCHPHPLPPSRRRVCRPPPLPLRCLRRPASPAALISTVLRSSDVPIDEVVGEAVQEVPGEVATVTAHAARGLADGHQRPSKHGRHHXRXPCPVSRLLVQCAALGSPYLLHXGHGKDAVIKVTPHRGRRSLSDSTFCKYRSGAQNISNXEISNFL

SEQ ID NO: 11522 - protein, 145 aa, Zea mays
  Coding DNA Sequence Number=SeqID_6012
  Subcellular localization annotation: CTP_CleavageSite=66; ConfidenceScore=5.60e-01
LARTQLGAIPSPCHAARFLPARPDHRSPSAWSSSPWPLPSACSDPSARSFSPSRAPPSHRARPASRALAASSSLVVVCFSPYHGCRVLSPAMELPARALLTIANRGSLQLGLCSMPSAPSLLLALWLSPPRAPSPWRASVPWIPP

SEQ ID NO: 11523 - protein, 68 aa, Zea mays
  Coding DNA Sequence Number=SeqID_6014
TDYATREEVVCSPIILVDFQIEAPENSQVSLHMLKGRKDLETFENSLVNIFTLSDFQIEAPENSQVSP

SEQ ID NO: 11524 - protein, 125 aa, Zea mays
  misc_feature (47)..(47): Xaa can be any naturally occurring amino acid
  Coding DNA Sequence Number=SeqID_6015
  Gene Ontology: Mol. function=hydrolase activity, acting on acid anhydrides, catalyzing transmembrane movement of substances; Cellular component=integral to membrane; Biological process=calcium ion transport
  Homolog annotation: Hit_ID=Q2QMX9; Match level="QueryCoverage=94%, HitCoverage=11%, E-value=2e-38, Identity=68%"; Hit description =Calcium-transporting ATPase 1, plasma membrane-type (EC 3.6.3.8) (Ca(2+)-ATPase isoform 1)
  Pfam annotation: Domain name=Cation_ATPase_N; Domain location=4-74; Score=5.8; E_value=0.00099; Accession=PF00690.16; Description=Cation transporterATPase, N-terminus
GIAEKLAAFKTYGLSTPDDSIQRRQHIYGVHRFTESEVRRLWVFVWXALQDAALIILAVCAFVSLDVGIVVEGWPKGAHDGLGIVASILLDVFVAATSDYRQSLQFKDLAKEKKRIHVPARAGAP

SEQ ID NO: 11525 - protein, 124 aa, Zea mays
  misc_feature (16)..(16): Xaa can be any naturally occurring amino acid
  Coding DNA Sequence Number=SeqID_6016
  Gene Ontology: Mol. function=nucleic acid binding; Cellular component= chromatin; Biological process=DNA integration
  Homolog annotation: Hit_ID=Q2QSG2; Match level="QueryCoverage=59%, HitCoverage=4%, E-value=2e-13, Identity=56%"; Hit description =Retrotransposon protein, putative, Ty1-copia subclass
RVFGCDYYPITSVTAXHKLSHRSTRYLFLGYSSDHKGYCCLDLLTHCILISRQVVFYKVVFPRAGSSPTDLNSLLEFDLVSPPPRSPLIAPLPVPRVAQMPSLPSLLASMPAPYLARFVDPTLV

SEQ ID NO: 11526 - protein, 74 aa, Zea mays
  Coding DNA Sequence Number=SeqID_6017
VPVQPLRRRRRLPDRLRGGPLLRLRHHVTHCPVSRPQPTTPVAVISSCRAVPCLPHKRPARPRHGRSTIEIPAG

SEQ ID NO: 11527 - protein, 91 aa, Zea mays
  misc_feature (84)..(84): Xaa can be any naturally occurring amino acid
  Coding DNA Sequence Number=SeqID_6019
  Gene Ontology: Mol. function=phosphoric monoester hydrolase activity; Biological process=metabolic process
  Homolog annotation: Hit_ID=Q06C47; Match level="QueryCoverage=97%, HitCoverage=32%, E-value=8e-29, Identity=71%"; Hit description=Acid phosphatase
  Pfam annotation: Domain name=Put_Phosphatase; Domain location=4-92; Score=-83.9; E_value=0.0004; Accession=PF06888.3; Description =Putative Phosphatase
MAGIVVVFDFDKTIIDVHSDNWVVDSLGLTDLFERLLPTTPCNTLMDTMMEELHARVTTLAEVTEVLMTAPIDPRVHAAVRTAXALGCDCA

SEQ ID NO: 11528 - protein, 139 aa, Zea mays
  misc_feature (63)..(63): Xaa can be any naturally occurring amino acid
  misc_feature (89)..(89): Xaa can be any naturally occurring amino acid
  Coding DNA Sequence Number=SeqID_6020
  Homolog annotation: Hit_ID=A7PTY2; Match level="QueryCoverage=75%, HitCoverage=35%, E-value=4e-16, Identity=46%"; Hit description =Chromosome chr7 scaffold_31, whole genome shotgun sequence
LNILLVVVETLAVESAAGETAAAQAPQRKKETLHELLSRHNSMDSKVQDKETSLKEAAAEGVXKQQVVEEITRLSPELEANHAAELASXGPSGYKPSGISEKGKFGDLVKAIAGVSVSSNSKEARGREKKAARGEPLLL

SEQ ID NO: 11529 - protein, 145 aa, Zea mays
  Coding DNA Sequence Number=SeqID_6021
  Subcellular localization annotation: CTP_CleavageSite=76; ConfidenceScore=5.73e-01
IPVAATQKFLPPHQSPSIAACPSRPTVIAVPAVRPSQPAPNVVPTRAPKQAGPQPRALLRQTSSPTARPACFIRPAANSRPQPCALLEPCSKPPAPCYNVVASEWRSVRTRKGLITNQGTKACLSIAGSYAKTFAALAGVQSFIM

SEQ ID NO: 11530 - protein, 217 aa, Zea mays
  misc_feature (217)..(217): Xaa can be any naturally occurring amino acid
  Coding DNA Sequence Number=SeqID_6023
TTPRREERRGRASASGGSEAEGGEESGGCRAARAGAEALTSHHPLPSSVCPPLAATAAACSRPFPLLTLPRPRVVLPFVAAAFVPVLAGSPRSSISAPGRGVRRRIWARDGAPDGRWRGWRSGWAPARSRFSSSCQWLCFHLSVPTMDTNTAEGVVRGWADSSTGRVKDGDKLSLKDLLFFLHIPRTGGRTYFHWNARGSYGKLRVRPKPSVGGQLX

SEQ ID NO: 11531 - protein, 67 aa, Zea mays
  misc_feature (6)..(7): Xaa can be any naturally occurring amino acid
  misc_feature (12)..(19): Xaa can be any naturally occurring amino acid
  misc_feature (26)..(27): Xaa can be any naturally occurring amino acid
  misc_feature (29)..(29): Xaa can be any naturally occurring amino acid
  misc_feature (31)..(32): Xaa can be any naturally occurring amino acid
  Coding DNA Sequence Number=SeqID_6025
  Gene Ontology: Mol. function=identical protein binding; Biological process=negative regulation of catalytic activity
  Homolog annotation: Hit_ID=A2WVY4; Match level="QueryCoverage=100%, HitCoverage=8%, E-value=1e-12, Identity=56%"; Hit description =Putative uncharacterized protein
VKIDVXXSVLVXXXXXXXXTFQVNLXXLXRXXGDYTFWSLTWYNGPKTVRIPIAVRMTVYDFYADVA

SEQ ID NO: 11532 - protein, 72 aa, Zea mays
  Coding DNA Sequence Number=SeqID_6026
RDACSRSSWPRTSPLPCPPRFQVHKQVIYRFSYLDFVDEATAVAVVVVVAAAVAAGNWFLCKGRFLTCPGAR

SEQ ID NO: 11533 - protein, 182 aa, Zea mays
  misc_feature (163)..(165): Xaa can be any naturally occurring amino acid
  Coding DNA Sequence Number=SeqID_6028
  Subcellular localization annotation: CTP_CleavageSite=54; ConfidenceScore=5.05e-01
LPKMSAPTHRVGVRIEEIKITSSRASTVKSIHASRCTARARAAPTTSSAISLAAAATRGGGEAGGDAAAGCDSSTAEAWRSGAAAQEKPTRREPPISARSERMPARSDGDRGAAGCGERRARRRPVGVGGGESLWAGLRSGCRKQAMSSRWRPSSDRSSRTPXXXRAIRPRTRGRTRGRTRG

SEQ ID NO: 11534 - protein, 110 aa, Zea mays
  Coding DNA Sequence Number=SeqID_6029
  Homolog annotation: Hit_ID=A2ZCT0; Match level="QueryCoverage=90%, HitCoverage=8%, E-value=2e-10, Identity=38%"; Hit description =Putative uncharacterized protein
TRSFQRQQVIKCIDLAQRCKEVEPIRRPSVCDILAALGKMEGMDCSGQQVDEEVSCLEDMLGIEPLDLHFLVDPNKQTISCSVRLTNDTNDYFAFSVETTNPKQYLPGRP

SEQ ID NO: 11535 - protein, 110 aa, Zea mays; identical to SEQ ID NO: 11534
  Coding DNA Sequence Number=SeqID_6030
  Homolog annotation: Hit_ID=A2ZCT0; Match level="QueryCoverage=90%, HitCoverage=8%, E-value=2e-10, Identity=38%"; Hit description =Putative uncharacterized protein

SEQ ID NO: 11536 - protein, 137 aa, Zea mays
  misc_feature (76)..(76): Xaa can be any naturally occurring amino acid
  misc_feature (87)..(87): Xaa can be any naturally occurring amino acid
  misc_feature (99)..(99): Xaa can be any naturally occurring amino acid
  misc_feature (107)..(107): Xaa can be any naturally occurring amino acid
  misc_feature (109)..(110): Xaa can be any naturally occurring amino acid
  misc_feature (113)..(113): Xaa can be any naturally occurring amino acid
  misc_feature (116)..(118): Xaa can be any naturally occurring amino acid
  Coding DNA Sequence Number=SeqID_6031
SSVFDIEEQKCWKIGNSSNSCIPLLHTTMFYILSHLEPGFITPYATDWLVLYTAKTKSHHEHVCLVYPPTPMKVVXSKGTLMPTIAXDRTAKLLDPRNXLDPPSVEXSXXVAXLTXXXAYMLPPAHTWSGDLSEHGN

SEQ ID NO: 11537 - protein, 205 aa, Zea mays
  misc_feature (66)..(66): Xaa can be any naturally occurring amino acid
  misc_feature (197)..(197): Xaa can be any naturally occurring amino acid
  misc_feature (202)..(202): Xaa can be any naturally occurring amino acid
  misc_feature (205)..(205): Xaa can be any naturally occurring amino acid
  Coding DNA Sequence Number=SeqID_6033
  Subcellular localization annotation: CTP_CleavageSite=65; ConfidenceScore=5.38e-01
HDAIPVFPRRVAVAMGKKRKLEPKSAAGFTPVKASPTTRSATAKAAGPIRGPRPRRGYDGEAAARXQAGEGCRGNRGGRCGAQEGSGKVEKGKKKGESGPGLRSRALAGIPFPQGPASAKLCTRPLPSPHGGRCLTTIPARGGRRPTPGSGGRIFPTRASGWGTPQTGHPSPEALRAQYGGDRGISQGPSPEPKHGXSGRGXRVX

SEQ ID NO: 11538 - protein, 86 aa, Zea mays
  misc_feature (59)..(59): Xaa can be any naturally occurring amino acid
  Coding DNA Sequence Number=SeqID_6035
NYSGFPFCSKNNSILANGSSLVGYLMIGTLSYPTLFDERSCWLSVLSSHYQIDSYQRGXPTDCRSLGGIFAWAQKEPDLFKPTNEL

SEQ ID NO: 11539 - protein, 86 aa, Zea mays
  misc_feature (11)..(13): Xaa can be any naturally occurring amino acid
  misc_feature (40)..(40): Xaa can be any naturally occurring amino acid
  misc_feature (61)..(61): Xaa can be any naturally occurring amino acid
  misc_feature (64)..(65): Xaa can be any naturally occurring amino acid
  misc_feature (76)..(76): Xaa can be any naturally occurring amino acid
  misc_feature (78)..(78): Xaa can be any naturally occurring amino acid
  Coding DNA Sequence Number=SeqID_6037
  Gene Ontology: Mol. function=hydrolase activity, acting on ester bonds; Biological process=lipid metabolic process
  Homolog annotation: Hit_ID=A2ZW14; Match level="QueryCoverage=95%, HitCoverage=21%, E-value=9e-23, Identity=59%"; Hit description =Putative uncharacterized protein
AILIPNNFPIXXXPTYLSGYRSGNRADYDEHGCLRWFNDXSQRHNRALRGEVDRLRAQHPXVKXXYADYYGAAMEXVXDPHRWILF

SEQ ID NO: 11540 - protein, 256 aa, Zea mays
  misc_feature (141)..(141): Xaa can be any naturally occurring amino acid
  Coding DNA Sequence Number=SeqID_6038
  Gene Ontology: Mol. function=calcium ion binding; Cellular component =oxygen evolving complex; Biological process=photosynthesis
  Homolog annotation: Hit_ID=Q6ATY3; Match level="QueryCoverage=95%, HitCoverage=94%, E-value=9e-85, Identity=67%"; Hit description =Putative uncharacterized protein OSJNBa0035J16.10
PGVFIFKGGAEFPKNILIEKPRRPLCRCGASRRGFTVHTVIAIASVSDSASDPTAAAEATSPSPPPSLPTQTPSSKPGPPALGGIANTRSWSQYYGSGFSIRVPPSFDDILEPDDYNARMTYYGDKAKPRAYAARFASPDXGRDELISVVIKPSNQLKITFLEAKDITDLGNLKEASKIFVPAGAKIFSARTIKVKEEEDIRTYYFYEFSLDKQHVALMATVNSGKTYIAGATAPEMKWGDDGVKLRSAAVSLSIS

SEQ ID NO: 11541 - protein, 52 aa, Zea mays
  Coding DNA Sequence Number=SeqID_6039
  Subcellular localization annotation: CTP_CleavageSite=19; ConfidenceScore=5.03e-01
TCLICTLAFFPPPLFSPSSGMAISSFACVHGIVVQSKLRVSGNGSGAPHCAG

SEQ ID NO: 11542 - protein, 42 aa, Zea mays
  Coding DNA Sequence Number=SeqID_6041
LGLASGELGPCESSIRSVGPQVPATAASSPNLYSAINLYEFP

SEQ ID NO: 11543 - protein, 83 aa, Zea mays
  misc_feature (58)..(61): Xaa can be any naturally occurring amino acid
  misc_feature (65)..(66): Xaa can be any naturally occurring amino acid
  misc_feature (69)..(70): Xaa can be any naturally occurring amino acid
  Coding DNA Sequence Number=SeqID_6042
  Gene Ontology: Mol. function=hydrogen ion transmembrane transporter activity; Cellular component=integral to membrane; Biological process=proton transport
  Homolog annotation: Hit_ID=Q7F1V0; Match level="QueryCoverage=80%, HitCoverage=14%, E-value=8e-26, Identity=79%"; Hit description =Putative heme binding protein cemA
ITSCAFCRYHSESGWHTLVEVILEHYGFEADEAAVTFFVCLVPVALDVYIKFWVYKYXXXXSPSXXNVXXEIKRHRNCSFSKF

SEQ ID NO: 11544 - protein, 82 aa, Zea mays
  misc_feature (36)..(36): Xaa can be any naturally occurring amino acid
  Coding DNA Sequence Number=SeqID_6043
  Gene Ontology: Mol. function=metal ion binding
  Homolog annotation: Hit_ID=Q6Z748; Match level="QueryCoverage=36%, HitCoverage=16%, E-value=1e-08, Identity=90%"; Hit description=RING zinc finger protein-like
DVSYPTCHPRFLTTCFGLCYSFCSLTIVFLAFDVFXAVFCVVVSCFIGIALCCCLPCVVAILYALAGQLGASDADLKISRRI

SEQ ID NO: 11545 - protein, 85 aa, Zea mays
  Coding DNA Sequence Number=SeqID_6044
RGPTLHHVSCVVFLGRDTSLSHILVSNLLPEGKEADLVIRGDVVLNREKCIRKNLKRQVGTTIPRLNIEGKRKHILDSNHSIYTP

SEQ ID NO: 11546 - protein, 150 aa, Zea mays
  misc_feature (14)..(14): Xaa can be any naturally occurring amino acid
  misc_feature (28)..(28): Xaa can be any naturally occurring amino acid
  misc_feature (30)..(30): Xaa can be any naturally occurring amino acid
  misc_feature (32)..(32): Xaa can be any naturally occurring amino acid
  misc_feature (37)..(37): Xaa can be any naturally occurring amino acid
  misc_feature (39)..(41): Xaa can be any naturally occurring amino acid
  misc_feature (43)..(43): Xaa can be any naturally occurring amino acid
  misc_feature (47)..(51): Xaa can be any naturally occurring amino acid
  misc_feature (55)..(55): Xaa can be any naturally occurring amino acid
  misc_feature (63)..(65): Xaa can be any naturally occurring amino acid
  misc_feature (69)..(69): Xaa can be any naturally occurring amino acid
  misc_feature (71)..(72): Xaa can be any naturally occurring amino acid
  misc_feature (74)..(78): Xaa can be any naturally occurring amino acid
  misc_feature (80)..(82): Xaa can be any naturally occurring amino acid
  misc_feature (84)..(84): Xaa can be any naturally occurring amino acid
  misc_feature (86)..(87): Xaa can be any naturally occurring amino acid
  misc_feature (91)..(92): Xaa can be any naturally occurring amino acid
  misc_feature (94)..(94): Xaa can be any naturally occurring amino acid
  misc_feature (96)..(96): Xaa can be any naturally occurring amino acid
  misc_feature (101)..(102): Xaa can be any naturally occurring amino acid
  misc_feature (104)..(105): Xaa can be any naturally occurring amino acid
  misc_feature (108)..(108): Xaa can be any naturally occurring amino acid
  misc_feature (111)..(111): Xaa can be any naturally occurring amino acid
  misc_feature (126)..(127): Xaa can be any naturally occurring amino acid
  misc_feature (131)..(133): Xaa can be any naturally occurring amino acid
  misc_feature (135)..(139): Xaa can be any naturally occurring amino acid
  misc_feature (142)..(142): Xaa can be any naturally occurring amino acid
  misc_feature (146)..(146): Xaa can be any naturally occurring amino acid
  misc_feature (150)..(150): Xaa can be any naturally occurring amino acid
  Coding DNA Sequence Number=SeqID_6046
GRIGLECLGFNIGXNILLNGLRLPLLLXDXRXPVLSXGXXXLXCRTXXXXXRLDXRLTLIHHXXXMAIXHXXHXXXXXSXXXIXGXXVREXXSXIXTHYRXXPXXTIXQPXCVRGTISRTALNLIXXKRTXXXDXXXXXECXNGSXGGGX

SEQ ID NO: 11547 - protein, 55 aa, Zea mays
  Coding DNA Sequence Number=SeqID_6047
LNCQQSDQPTGKKTGSVSLPIALLQTKLSHAFRTHEVMLHDLRSTLTARTNSLYQ

SEQ ID NO: 11548 - protein, 103 aa, Zea mays
  Coding DNA Sequence Number=SeqID_6049
  Gene Ontology: Mol. function=protein binding; Cellular component=RCAF complex; Biological process=female meiosis chromosome segregation
  Homolog annotation: Hit_ID=Q6CP00; Match level="QueryCoverage=79%, HitCoverage=71%, E-value=7e-36, Identity=93%"; Hit description =Similarities with sp|P02309 Saccharomyces cerevisiae YNL030w HHF2 histone H4
  Pfam annotation: Domain name=Histone; Domain location=25-94; Score =64.8; E_value=2.9e-16; Accession=PF00125.14; Description=Core histone H2AH2BH3H4
  Pfam annotation: Domain name=TAF; Domain location=28-92; Score=-9.0; E_value=0.044; Accession=PF02969.8; Description=TATA box binding protein associated factor (TAF)
  Pfam module annotation: Pfam domain module=Histone::TAF; Domain location=25-94::28-92
MSGRGKGGKGLGKGGAKRHRKILRDNIQGITKPAIRRPARRGGVKRISGLIYEETRTVLKSFLEGVIRDAVTYTEHAKRKTVTSLDVVYALKRQGRTLYGFGG

SEQ ID NO: 11549 - protein, 76 aa, Zea mays
  Coding DNA Sequence Number=SeqID_6050
  Gene Ontology: Mol. function=metal ion binding; Cellular component =glycosylphosphatidylinositol-N-acetylglucosaminyltransferase (GPI -GnT) complex; Biological process=protein amino acid C-linked glycosylation via ...
  Gene Ontology: Biological process=2'-alpha-mannosyl-L-tryptophan
  Homolog annotation: Hit_ID=UPI0000F2B614; Match level="QueryCoverage =98%, HitCoverage=28%, E-value=1e-17, Identity=57%"; Hit description =PREDICTED: similar to Dolichyl-phosphate mannosyltransferase polypeptide 2, regulatory subunit
  Pfam annotation: Domain name=DPM2; Domain location=1-77; Score=108.5; E_value=2e-29; Accession=PF07297.2; Description=Dolichol phosphate -mannose biosynthesi
MTISDRIVGFGLLVVTLAVFTYYTIWVIGTPFIEPHHFIHQYFLPREYAISIPLSALVVALSCVFSFISWVMIKSR

SEQ ID NO: 11550 - protein, 76 aa, Zea mays; identical to SEQ ID NO: 11549
  Coding DNA Sequence Number=SeqID_6051
  Gene Ontology: Mol. function=metal ion binding; Cellular component =glycosylphosphatidylinositol-N-acetylglucosaminyltransferase (GPI -GnT) complex; Biological process=protein amino acid C-linked glycosylation via ...
  Gene Ontology: Biological process=2'-alpha-mannosyl-L-tryptophan
  Homolog annotation: Hit_ID=UPI0000F2B614; Match level="QueryCoverage =98%, HitCoverage=28%, E-value=1e-17, Identity=57%"; Hit description =PREDICTED: similar to Dolichyl-phosphate mannosyltransferase polypeptide 2, regulatory subunit
  Pfam annotation: Domain name=DPM2; Domain location=1-77; Score=108.5; E_value=2e-29; Accession=PF07297.2; Description=Dolichol phosphate -mannose biosynthesi

SEQ ID NO: 11551 - protein, 202 aa, Zea mays
  misc_feature (52)..(52): Xaa can be any naturally occurring amino acid
  misc_feature (108)..(108): Xaa can be any naturally occurring amino acid
  misc_feature (120)..(120): Xaa can be any naturally occurring amino acid
  Coding DNA Sequence Number=SeqID_6052
  Homolog annotation: Hit_ID=Q6P8A9; Match level="QueryCoverage=69%, HitCoverage=48%, E-value=7e-13, Identity=30%"; Hit description =Putative uncharacterized protein MGC75804
  Subcellular localization annotation: CTP_CleavageSite=51; ConfidenceScore=5.32e-01
MGRVKHQNSRRNYYQNKNGNNFNSNSSNNMIQIGQHGFFVTFTSTKESFVRXMEIYNLLNRFADQLFGAEFTEEKQLDTTDLNDLDSALENETMKLNASKKNIRRFRXIKSGTSNTSLFXTHNIITLRLSINLIESIFQTSIDSKEQHSRYIERLLPIAFVCKAYDDDLRKLIIKKEFLDQILSVINANDNQTDNIIWFDVQ

SEQ ID NO: 11552 - protein, 202 aa, Zea mays; identical to SEQ ID NO: 11551
  misc_feature (52)..(52): Xaa can be any naturally occurring amino acid
  misc_feature (108)..(108): Xaa can be any naturally occurring amino acid
  misc_feature (120)..(120): Xaa can be any naturally occurring amino acid
  Coding DNA Sequence Number=SeqID_6053
  Homolog annotation: Hit_ID=Q6P8A9; Match level="QueryCoverage=69%, HitCoverage=48%, E-value=7e-13, Identity=30%"; Hit description =Putative uncharacterized protein MGC75804
  Subcellular localization annotation: CTP_CleavageSite=51; ConfidenceScore=5.32e-01

SEQ ID NO: 11553 - protein, 187 aa, Zea mays
  misc_feature (137)..(187): Xaa can be any naturally occurring amino acid
  Coding DNA Sequence Number=SeqID_6054
  Subcellular localization annotation: CTP_CleavageSite=40; ConfidenceScore=5.54e-01
RAPLVAACPARSLLRLRSRRLPSSSSIRPARQRAGVGSVRCMGSATGFPPIPPLRSGEGGGAGHRLKWAPAVPLGANYEHWAHRHGTKPGGGRGPPKEAKWIDWLNPRTLWPRWLREGKKEGQKKKENNNGGPWKRXXXXXXXXXXXXXXXXXXXXXXXXXXXXXXXXXXXXXXXXXXXXXXXXXXX

SEQ ID NO: 11554 - protein, 96 aa, Zea mays
  misc_feature (36)..(37): Xaa can be any naturally occurring amino acid
  Coding DNA Sequence Number=SeqID_6056
TSHDRIAASFMHLILRYLFLTFNEFLLINFYPLNHXXDPQPLALLSSSAPRIHAVRFNKFFQTLCECLTTVYTSSPSLSLSFSFLCVASARVLSVL

SEQ ID NO: 11555 - protein, 274 aa, Zea mays
  Coding DNA Sequence Number=SeqID_6058
  Subcellular localization annotation: CTP_CleavageSite=43; ConfidenceScore=5.00e-01
ISTPTPTPTPTTTTTTTTTTTPFNMADISSHPVEPNLPHLEPPARSDFADYVDYVAAYLVFVYYSSAFSSDQPAFFKRVRSKRRNCYTTFRKFKVRELHDKFRDVVQNSPPMKADYKQPGSYDEMFQPCPILNNEEVTVSMPVPTNEDAPPPLRLAEARPKTTVPISSVALGGQLEGDDNVEICFSKLDKNTMFHECAGFGIKAKSMSARWKIDYWLRTGHPIYFDLVLHELSQQSGRPLCDPDGNPYVATLDQVAAKKRAWLDLKAAYQEVGR

SEQ ID NO: 11556 - protein, 98 aa, Zea mays
  Coding DNA Sequence Number=SeqID_6060
  Subcellular localization annotation: CTP_CleavageSite=29; ConfidenceScore=5.35e-01
LWRSCGGGPPPASRRHLRSELKASNLRPRSQAPSATPRQIPTLAALLLLLQSLSRYRLTLKKQEKNVRPLGTSEKKTLKAQAYASQKTIDSLEVDGKK

SEQ ID NO: 11557 - protein, 74 aa, Zea mays
  Coding DNA Sequence Number=SeqID_6062
  Subcellular localization annotation: CTP_CleavageSite=20; ConfidenceScore=5.16e-01
FFFFFFFFFFFFFFFFFFLSRTTEENTSFRHRTALPWPWISGSCHWRPCFHCRSLSPHWRSLIYYLSVSGAVLL

SEQ ID NO: 11558 - protein, 56 aa, Zea mays
  Coding DNA Sequence Number=SeqID_6064
AMSILTMPLPSVDQPRAGRDVLKETLRTSLRITDQYVRRQDSHSLISCHRSPATRT

SEQ ID NO: 11559 - protein, 56 aa, Zea mays; identical to SEQ ID NO: 11558
  Coding DNA Sequence Number=SeqID_6065

SEQ ID NO: 11560 - protein, 80 aa, Zea mays
  Coding DNA Sequence Number=SeqID_6066
EDQTLISRNGSVIISIMWQKYRASCIWYIVIYHPTQCFKDPGFLSKDKQVHPHKRKITKQPLLCCENTVSTLHQKYFHPT

SEQ ID NO: 11561 - protein, 43 aa, Zea mays
  Coding DNA Sequence Number=SeqID_6068
GTVPPPYYILSNGNRRRSRIYKKKKKMNRGNRRLLDILDHHPQ

SEQ ID NO: 11562 - protein, 87 aa, Zea mays
  misc_feature (45)..(46): Xaa can be any naturally occurring amino acid
  misc_feature (53)..(54): Xaa can be any naturally occurring amino acid
  misc_feature (63)..(65): Xaa can be any naturally occurring amino acid
  misc_feature (67)..(67): Xaa can be any naturally occurring amino acid
  misc_feature (72)..(73): Xaa can be any naturally occurring amino acid
  Coding DNA Sequence Number=SeqID_6070
HRLSQISAPSTVLSPCIARSRLHRRLLHLLPRHIDPMPSSCLHGXXSHHECEXXFAIEASVFXXXKXSLALXXMEEAEASSSSTTSG

SEQ ID NO: 11563 - protein, 87 aa, Zea mays
  Coding DNA Sequence Number=SeqID_6072
NTCMPRNKPCKAIEETLYTYIQLYMHMINLLQFILQTMVMPSHSHPPGRTHRGHLLVLLAAIFVLVFDVATPKVRPHRPPPVYRWPP

SEQ ID NO: 11564 - protein, 128 aa, Zea mays
  Coding DNA Sequence Number=SeqID_6074
  Subcellular localization annotation: CTP_CleavageSite=47; ConfidenceScore=5.25e-01
ESMILSKLAINFFIDRLFPLLANFIQLTYTVTVALASSKSVLMHRTRVHARRAKQRAFGALGSYSPCSRSTVEVQKAIWLDLRVIGLRSALPSPPPWKPKPRDGEEDTGADTTTRLAQGRSGRHRRIS

SEQ ID NO: 11565 - protein, 170 aa, Zea mays
  misc_feature (67)..(67): Xaa can be any naturally occurring amino acid
  Coding DNA Sequence Number=SeqID_6076
  Homolog annotation: Hit_ID=Q8LBS7; Match level="QueryCoverage=41%, HitCoverage=72%, E-value=4e-09, Identity=46%"; Hit description =Putative nitrilase-associated protein
  Subcellular localization annotation: CTP_CleavageSite=32; ConfidenceScore=5.11e-01
GSNRSSPDPAAGCPPSPCRCLSFLFSINKINRGGNAGGGQSSLGYLFGNGEPPKPTVGPTASAPPVXKPFSAKTYSAKQVSSGVSNPTNNFPRGYGQNPGNFLTGRPSNKVHPAPGGGFSLGYLFGGNLWPCWCAPQSYPPLPSAGYVLIVNNRWCPFMCGPRAMLCGQG

SEQ ID NO: 11566 - protein, 170 aa, Zea mays; identical to SEQ ID NO: 11565
  misc_feature (67)..(67): Xaa can be any naturally occurring amino acid
  Coding DNA Sequence Number=SeqID_6077
  Homolog annotation: Hit_ID=Q8LBS7; Match level="QueryCoverage=41%, HitCoverage=72%, E-value=4e-09, Identity=46%"; Hit description =Putative nitrilase-associated protein
  Subcellular localization annotation: CTP_CleavageSite=32; ConfidenceScore=5.11e-01

SEQ ID NO: 11567 - protein, 122 aa, Zea mays
  Coding DNA Sequence Number=SeqID_6078
  Subcellular localization annotation: CTP_CleavageSite=59; ConfidenceScore=5.18e-01
IVRFSDSLLLLFVGNEITVSKPKKKKKPLLSPLLSVQISSGHLTLCKVSKSRQDREQVSVMLVSCLPRSAFALNPSRRLGSTTSSCCNGGASFFLPPRMGLAGSFSLVPQFGSFPRLSQIWI

SEQ ID NO: 11568 - protein, 271 aa, Zea mays
  Coding DNA Sequence Number=SeqID_6080
  Gene Ontology: Mol. function=structural molecule activity; Cellular component=protein storage vacuole; Biological process=lipid transport
  Homolog annotation: Hit_ID=Q337D8; Match level="QueryCoverage=86%, HitCoverage=99%, E-value=8e-79, Identity=63%"; Hit description=MSP domain containing protein, expressed
  Pfam annotation: Domain name=Motile_Sperm; Domain location=6-113; Score=130.5; E_value=4.8e-36; Accession=PF00635.16; Description=MSP (Major sperm protein) domain
MASCDLLDVDPLELQFPFVLDKQIPCPLRLANRTDRTVAFKVKTTNPRKYCVRPNNGIVPPRSLCTVVVTMQAQTVVPPDLQCKDKFMVQSVVISDSLSAKDITSQMFAKEGGNVLQEVKLKVAYVMPPEPPSEIAEEHDGLDRVLVPMQRIVDNGKSTSELSSGSVSLRSAEEFGSPVGRIVKSEEFLKAAGPAMETKTYAGPGEQSHQLSAIITKLTEEKNSALEQNRKLQVELELVRCEARKQQSAFSLVLLIAFGLLGIVLGYIVKK

SEQ ID NO: 11569 - protein, 58 aa, Zea mays
  Coding DNA Sequence Number=SeqID_6081
IGLLGSTPRLDVYGLPHPATTTSLAKRLASNVLLLKFVIITLRFVQLFILIMDRMRLK

SEQ ID NO: 11570 - protein, 55 aa, Zea mays
  misc_feature (22)..(22): Xaa can be any naturally occurring amino acid
  misc_feature (26)..(26): Xaa can be any naturally occurring amino acid
  Coding DNA Sequence Number=SeqID_6083
  Gene Ontology: Mol. function=glutathione transferase activity
  Homolog annotation: Hit_ID=P12653; Match level="QueryCoverage=63%, HitCoverage=16%, E-value=3e-11, Identity=91%"; Hit description =Glutathione S-transferase 1
LRLYTGNYSWSLTRKTRILDVXYTLXLFATPYASVLDAYPHVKAWWSGLMERPSV

SEQ ID NO: 11571 - protein, 73 aa, Zea mays
  Coding DNA Sequence Number=SeqID_6084
GTDGVASVAWARPPVPQIRYGNRYILPVLPHTHTPPIKITLSDPSYTPVGMDLLHTHIHVGMSHPYPQKINLF

SEQ ID NO: 11572 - protein, 123 aa, Zea mays
  misc_feature (1)..(5): Xaa can be any naturally occurring amino acid
  Coding DNA Sequence Number=SeqID_6086
XXXXXYVIGFYPPALCRRRRADSLAITDRKALCSPCLPPSAPPFSLRAYAPLLLYVIRVHCLSSRREAAHYRQRAGAQDGGCAGNYSNLNPELINRIHHTDSVSVVFNPHHVFEKVNFTASGL

SEQ ID NO: 11573 - protein, 117 aa, Zea mays
  Coding DNA Sequence Number=SeqID_6088
LIERCTGKTKGAEQERGEKLATAAALLAALGLEACINTSLAPIWFQNHTSLKVVKILEVCKRLGSQNRRNFGSEHKSELKKLELKIIKKIRRKKRIYSLLFSAEPKGIESKPWVGRQ

SEQ ID NO: 11574 - protein, 150 aa, Zea mays
  Coding DNA Sequence Number=SeqID_6090
  Subcellular localization annotation: CTP_CleavageSite=72; ConfidenceScore=5.49e-01
CFFFFFFFFFFFFFFFFFFGGQGLGFFLFRDPTAPSFCTKDGQGLSLPLGKPAHGKTGAFCSVGKRAPPKPRGARENPRPTKFFLPIDLFCRWEKLPDPSTAGRTKTLYITAGIPCRAWGLYGNTRPGGFLLRGAGPLPGLLPKPTGPRS

SEQ ID NO: 11575 - protein, 79 aa, Zea mays
  Coding DNA Sequence Number=SeqID_6092
SSCSFVMVSGLSSVLDESGFRFKRVPLIRVPYLLHTWTFQTSGPYEASFVLYLNHMDFRRMKGIESLRVLTGLNLSQFS

SEQ ID NO: 11576 - protein, 127 aa, Zea mays
  misc_feature (43)..(43): Xaa can be any naturally occurring amino acid
  misc_feature (45)..(45): Xaa can be any naturally occurring amino acid
  misc_feature (50)..(55): Xaa can be any naturally occurring amino acid
  misc_feature (65)..(66): Xaa can be any naturally occurring amino acid
  Coding DNA Sequence Number=SeqID_6094
  Homolog annotation: Hit_ID=O24582; Match level="QueryCoverage=94%, HitCoverage=84%, E-value=9e-54, Identity=87%"; Hit description=Novel protein
CKCKCSSDNMDPFVILTCRTQEQKSSVANGAGSEPEWNETFVXTXSDDTXXXXXXIMDSDLTNDXXEATIPLEAVFQEGSLPPAVHPVVKEEKYCGEVKLALTFTPAAETRHRPDDNEEGPPYSSWS

SEQ ID NO: 11577 - protein, 64 aa, Zea mays
  Coding DNA Sequence Number=SeqID_6095
VILKALITKLDVIFWRRSWSQKKPVGQDGDEHSQRLKGGKVYAPAYHPAWAKLANNTVGGITIT

SEQ ID NO: 11578 - protein, 82 aa, Zea mays
  Coding DNA Sequence Number=SeqID_6097
  Gene Ontology: Mol. function=nucleoside-triphosphatase activity
  Homolog annotation: Hit_ID=Q10MA7; Match level="QueryCoverage=58%, HitCoverage=14%, E-value=8e-10, Identity=64%"; Hit description=ABC transporter family protein, expressed
EARRRKKEPKEKGPPKFPKVVQGSRVIGDPPKNPAKVINNGWAAGRLTPPIAGKENFVFSSKRVLRQRSSFVFPFLTLENGK

SEQ ID NO: 11579 - protein, 122 aa, Zea mays
  misc_feature (22)..(22): Xaa can be any naturally occurring amino acid
  misc_feature (27)..(27): Xaa can be any naturally occurring amino acid
  Coding DNA Sequence Number=SeqID_6098
  Gene Ontology: Mol. function=aspartic-type endopeptidase activity; Cellular component=chromatin; Biological process=chromatin assembly or disassembly
  Homolog annotation: Hit_ID=Q7XHA9; Match level="QueryCoverage=65%, HitCoverage=24%, E-value=2e-08, Identity=34%"; Hit description =Retrotransposon protein, putative, LINE subclass
PHPAHYPHCDREEEIINHMLVXCVFAXEVWFILLQKQTLSPQQDESSFDEWWVKAESRMDGSYKKRLDSLIIVGTWTIWNHQNRVFFMVLLTWLEHCCLQVRNIVTGVLRRLREAPSLPLSL

SEQ ID NO: 11580 - protein, 122 aa, Zea mays; identical to SEQ ID NO: 11579
  misc_feature (22)..(22): Xaa can be any naturally occurring amino acid
  misc_feature (27)..(27): Xaa can be any naturally occurring amino acid
  Coding DNA Sequence Number=SeqID_6099
  Gene Ontology: Mol. function=aspartic-type endopeptidase activity; Cellular component=chromatin; Biological process=chromatin assembly or disassembly
  Homolog annotation: Hit_ID=Q7XHA9; Match level="QueryCoverage=65%, HitCoverage=24%, E-value=2e-08, Identity=34%"; Hit description =Retrotransposon protein, putative, LINE subclass

SEQ ID NO: 11581 - protein, 55 aa, Zea mays
  Coding DNA Sequence Number=SeqID_6100
HLRYLSMGKHTHPHPTPPSCFIYLVMSLESPFVLAQQSIEKMAFAHQTVVFVCEM

SEQ ID NO: 11582 - protein, 121 aa, Zea mays
  Coding DNA Sequence Number=SeqID_6102
HRLRLAPRRLADRSDGPALPSVSVDGAEGRFTDRIFRRSCWSAYRRRSSALVACHLPGVEHGLQRERRREPMGPQSLGAAFRSACFFFAPVGGLDHRLTGDGDLLRILLLPRTVLLRVAVI

SEQ ID NO: 11583 - protein, 70 aa, Zea mays
  Coding DNA Sequence Number=SeqID_6104
GQEDGRYGGLRGGTDYDPDDADEGAQLPEAGRRRAPPPSRSSAPHPAVGPAIARPRRERQHESSYPASAP

SEQ ID NO: 11584 - protein, 72 aa, Zea mays
  Coding DNA Sequence Number=SeqID_6106
RDSEIVQMPETVILYCSDTCLYTRGYRVSQGVCPLGKDCQGFDHMNNIFCNKSYSSCIFVWTMLCHRCQADL

SEQ ID NO: 11585 - protein, 121 aa, Zea mays
  Coding DNA Sequence Number=SeqID_6108
YPPRRSLHHHRHRAPSDRRRPRPQPPPPPSVASSVAPPLIIEAKGLSAAREQEGELRWRRILPPLVAHARWIPLSPSLPPLCILARREELLEQGDEEGRRPMARRSNPWARRHTSIRWMGF

SEQ ID NO: 11586 - protein, 121 aa, Zea mays; identical to SEQ ID NO: 11585
  Coding DNA Sequence Number=SeqID_6109

SEQ ID NO: 11587 - protein, 94 aa, Zea mays
  Coding DNA Sequence Number=SeqID_6110
KVNLGYISQDQHFKIKHIEWVPYNDILHLEKLSHNIFAIQKIEKENDLLEQNINTWCTGICEIVIFEDVVLKASLKNVAQRTLAGRPRQYATIR

SEQ ID NO: 11588 - protein, 108 aa, Zea mays
  misc_feature (3)..(4): Xaa can be any naturally occurring amino acid
  Coding DNA Sequence Number=SeqID_6112
RDXXPFLIFFFPLFFFLRIFLIPIIYVPRDLGRYTHPMLNISILLYLHYQTPIIRPFQRFGLKKENPTSKYFLLISFIKTRKDLRPSPHSAGRLHASYHDMCHEYGSN

SEQ ID NO: 11589 - protein, 204 aa, Zea mays
  misc_feature (88)..(88): Xaa can be any naturally occurring amino acid
  misc_feature (96)..(96): Xaa can be any naturally occurring amino acid
  misc_feature (105)..(105): Xaa can be any naturally occurring amino acid
  misc_feature (187)..(187): Xaa can be any naturally occurring amino acid
  Coding DNA Sequence Number=SeqID_6114
  Gene Ontology: Mol. function=hydrolase activity, acting on acid anhydrides, catalyzing transmembrane movement of substances; Cellular component=proton-transporting ATP synthase complex, coupling factor F(o); Biological ...
  Gene Ontology: Cellular component=process=proton transport
  Homolog annotation: Hit_ID=Q8HQ02; Match level="QueryCoverage=91%, HitCoverage=85%, E-value=5e-49, Identity=54%"; Hit description=ATP synthase subunit 6
  Pfam annotation: Domain name=ATP-synt_A; Domain location=1-200; Score= 130.1; E_value=6.3e-36; Accession=PF00119.11; Description=ATP synthase A chain
IIILFSLYFIFLSLYCYPSRSKILFIILLKEIGIQLRIALKSYKDSTKIMFTRIFLFVFFSNFIGLVPNSFTSTRPIAINLFISLPLXIGFFIYGXKKYTNKMFXHLVPNGTPIPLISFIVLIELISTSIRPFTLRIRLMANIVSGHLLLTLIGNTIRLKRPFIVIILSMIQLLLSSLEIGVSIIQXYVFCILLTLYSDDSGLL

SEQ ID NO: 11590 - protein, 204 aa, Zea mays; identical to SEQ ID NO: 11589
  misc_feature (88)..(88): Xaa can be any naturally occurring amino acid
  misc_feature (96)..(96): Xaa can be any naturally occurring amino acid
  misc_feature (105)..(105): Xaa can be any naturally occurring amino acid
  misc_feature (187)..(187): Xaa can be any naturally occurring amino acid
  Coding DNA Sequence Number=SeqID_6115
  Gene Ontology: Mol. function=hydrolase activity, acting on acid anhydrides, catalyzing transmembrane movement of substances; Cellular component=proton-transporting ATP synthase complex, coupling factor F(o); Biological ...
  Gene Ontology: Cellular component=process=proton transport
  Homolog annotation: Hit_ID=Q8HQ02; Match level="QueryCoverage=91%, HitCoverage=85%, E-value=5e-49, Identity=54%"; Hit description=ATP synthase subunit 6
  Pfam annotation: Domain name=ATP-synt_A; Domain location=1-200; Score= 130.1; E_value=6.3e-36; Accession=PF00119.11; Description=ATP synthase A chain

SEQ ID NO: 11591 - protein, 97 aa, Zea mays
  Coding DNA Sequence Number=SeqID_6116
  Gene Ontology: Mol. function=binding; Cellular component=integral to membrane; Biological process=transport
  Homolog annotation: Hit_ID=UPI00005145B5; Match level="QueryCoverage =100%, HitCoverage=27%, E-value=5e-25, Identity=60%"; Hit description= PREDICTED: similar to CG9090-PA isoform 1
  Pfam annotation: Domain name=Mito_carr; Domain location=2-80; Score =36.2; E_value=1.1e-07; Accession=PF00153.17; Description =Mitochondrial carrier protein
VTFAAGYIAGVFCAIVSHPADTVVSVLNKDKSSTAMDVAKKLGWKGMWGGLVPRIIMIGTLTAAQWFIYDAVKVWLRMPRPPPPDMPESMKKRLGLA

SEQ ID NO: 11592 - protein, 97 aa, Zea mays; identical to SEQ ID NO: 11591
  Coding DNA Sequence Number=SeqID_6117
  Gene Ontology: Mol. function=binding; Cellular component=integral to membrane; Biological process=transport
  Homolog annotation: Hit_ID=UPI00005145B5; Match level="QueryCoverage =100%, HitCoverage=27%, E-value=5e-25, Identity=60%"; Hit description= PREDICTED: similar to CG9090-PA isoform 1
  Pfam annotation: Domain name=Mito_carr; Domain location=2-80; Score =36.2; E_value=1.1e-07; Accession=PF00153.17; Description =Mitochondrial carrier protein

SEQ ID NO: 11593 - protein, 71 aa, Zea mays
  Coding DNA Sequence Number=SeqID_6118
YDSCTETVKQGLRIIIVHRQVRDLDVAVALDEVVEGRDASEHDGLAGGAALGPAEGHDADQLLPHEAVVHR

SEQ ID NO: 11594 - protein, 335 aa, Zea mays
  Coding DNA Sequence Number=SeqID_6120
  Gene Ontology: Mol. function=protein serine/threonine kinase activity; Cellular component=mitochondrion; Biological process =protein amino acid phosphorylation
  Homolog annotation: Hit_ID=Q9LWW3; Match level="QueryCoverage=92%, HitCoverage=88%, E-value=5e-69, Identity=42%"; Hit description=Salt -inducible protein-like
  Pfam annotation: Domain name=PPR; Domain location=208-242; Score =38.2; E_value=2.9e-08; Accession=PF01535.11; Description=PPR repeat
  Pfam annotation: Domain name=PPR; Domain location=243-277; Score =38.4; E_value=2.5e-08; Accession=PF01535.11; Description=PPR repeat
  Pfam annotation: Domain name=PPR; Domain location=278-312; Score =38.2; E_value=3e-08; Accession=PF01535.11; Description=PPR repeat
  Pfam module annotation: Pfam domain module=PPR::PPR::PPR; Domain location=208-242::243-277::278-312
  Subcellular localization annotation: CTP_CleavageSite=74; ConfidenceScore=5.66e-01
GTRPQVPGSDAGSTHRWSPGARAFSTAPATRTTVPLAHLAALPASLPESGYTVTPPVQPWPRRLTARSLSRLLLGAATPELAVLALRHALFHAAHPLPPSLPVFAAALSRLSHADAGAAARHLPPVLSLLRASRLPAFSDRPFLPLLRALRPLPSLRLFLSLPSFNSRPSTRSFNALLHSLVSARRRRLAAALFRAAPTKLYITPNLVSCNILLKGLVGIGDLDSALKVLDEMTGWGIVPDVVTYTTVLTAYCAKGDLEGAQQLFDDIIASGRRPDATMYTVLIDGYCHRRKLQDAARIMDEMGAAGVQPNEDTYSVVNLGWSKEGKGGKIPILM

SEQ ID NO: 11595 - protein, 57 aa, Zea mays
  Coding DNA Sequence Number=SeqID_6121
YLICGLCVPFDIKFIFCGGGITTVACPWVPQASSGRCTIGWTRRTPTSTNSKIDCIM

SEQ ID NO: 11596 - protein, 57 aa, Zea mays; identical to SEQ ID NO: 11595
  Coding DNA Sequence Number=SeqID_6122

SEQ ID NO: 11597 - protein, 298 aa, Zea mays
  misc_feature (1)..(65): Xaa can be any naturally occurring amino acid
  misc_feature (283)..(298): Xaa can be any naturally occurring amino acid
  Coding DNA Sequence Number=SeqID_6124
  Homolog annotation: Hit_ID=A2X1J5; Match level="QueryCoverage=48%, HitCoverage=34%, E-value=2e-07, Identity=30%"; Hit description =Putative uncharacterized protein
XXXXXXXXXXXXXXXXXXXXXXXXXXXXXXXXXXXXXXXXXXXXXXXXXXXXXXXXXXXXXXXXXGSEDEAGALQRVAGQAKAQVQPDARPPNPNATAVAAVAKPAWGEETEQDVEKEWVKTSSADAANRRTRSHDPMQQAMKRSYSNTGDTNEESRRIRPKRNRSNSLRNQGGTTAEGAANAGRAGRDFPDGLRTEFTDHPPLGTNNLTFSDLVSKGLFDDEPSVAAAAEHFTSTSCQADWDKRGSGMSYPYSSQNQMEMSRVKAELIDEPVALETDMTNLXXXXXXXXXXXXXXXX

SEQ ID NO: 11598 - protein, 62 aa, Zea mays
  Coding DNA Sequence Number=SeqID_6126
FSSPNHKNHLHSCIYITKKSHLHSGATQGPWSSLLLPLYLPEETELLACEPEVTPTSEVTLC

SEQ ID NO: 11599 - protein, 80 aa, Zea mays
  Coding DNA Sequence Number=SeqID_6128
  Pfam annotation: Domain name=zf-CCHC; Domain location=6-23; Score =7.9; E_value=0.098; Accession=PF00098.13; Description=Zinc knuckle
FLYLLFACFDCVVIKHKKRDCNENIPHLSLSLDFWCLIKATIWTNIVLYYTRYNSAVCKVELDLDKMINPLSKTLEAIKV

SEQ ID NO: 11600 - protein, 103 aa, Zea mays
  Coding DNA Sequence Number=SeqID_6130
AVVSNSIHLHIVLIRFIHGAFENQLMPIMGVRSKRSPVTVLALCGLFALFALKACLESMRLSSHAGLDVSISFMSCGRGLLSRKEAAKLTVLSREEPANRWRP

SEQ ID NO: 11601 - protein, 253 aa, Zea mays
  misc_feature (1)..(1): Xaa can be any naturally occurring amino acid
  misc_feature (222)..(223): Xaa can be any naturally occurring amino acid
  Coding DNA Sequence Number=SeqID_6132
  Gene Ontology: Mol. function=molecular_function; Cellular component =cellular_component; Biological process=multicellular organismal development
  Homolog annotation: Hit_ID=Q6Z8B1; Match level="QueryCoverage=99%, HitCoverage=72%, E-value=1e-111, Identity=77%"; Hit description =Putative pollen specific protein
  Pfam annotation: Domain name=Abhydrolase_1; Domain location=6-213; Score=-14.2; E_value=0.075; Accession=PF00561.10; Description =alphabeta hydrolase fold
  Pfam annotation: Domain name=Ndr; Domain location=1-222; Score=264.6; E_value=2.1e-76; Accession=PF03096.5; Description=Ndr family
  Pfam module annotation: Pfam domain module=Abhydrolase_1::Ndr; Domain location=6-213::1-222
XHELGAAPILPSTPVASPDDLADQIADILDFFGLDSVMCLGVTAGAYILTLFATKYRERVLGLILVSPLCKAPSWSEWFYNKVMSNLLYYYGMCNVVKDILLQRYFGKGVRGGSAEPESDIVQACRSFLDQRQCVNVWRFIQTINERKDLTENLKQLQCRTLIFVGENSQFHAEAVHMTAKLDRRYSALVEVQACGSVVTEEQPHAMLIPMEYFLMGYGLYXXSQINCSPRSPLNPFCISPELLSPESMGVKL

SEQ ID NO: 11602 - protein, 124 aa, Zea mays
  Coding DNA Sequence Number=SeqID_6133
RNRGQSLHEIMDQEDDRNNMQRHRGRYPARVGMKRTITLASSRVLLPCFLPSIHAPPSLPFLQCFGQDGEEHDYGLPRGPTEARRHGERGLSRSCRGGDVGRGGEAAAPVVVPVVQDRGGEKEA

SEQ ID NO: 11603 - protein, 131 aa, Zea mays
  Coding DNA Sequence Number=SeqID_6135
  Subcellular localization annotation: CTP_CleavageSite=29; ConfidenceScore=5.76e-01
GGEGIPHFPLPSRTTLSSSLFTPPLLPSRQGRVSPSPRSRAPLLLPHPWRWLPFSTTSVPRLLGARCPLLALGSRHPVPLLLFHGDQTELPPWMPLRWIFSWCPDLSSAMCSPPRYPTSLGPVRAQASGCA

SEQ ID NO: 11604 - protein, 62 aa, Zea mays
  Coding DNA Sequence Number=SeqID_6137
TVLRNFLERKLVHRNLHVKLNAGHESTVPIKWSELDFFVRRSDCAMHMFIVFFIDVIMIHVH

SEQ ID NO: 11605 - protein, 62 aa, Zea mays; identical to SEQ ID NO: 11604
  Coding DNA Sequence Number=SeqID_6138

SEQ ID NO: 11606 - protein, 83 aa, Zea mays
  Coding DNA Sequence Number=SeqID_6140
  Subcellular localization annotation: CTP_CleavageSite=71; ConfidenceScore=5.32e-01
NYNLHLSCSLSFIPCISGQSTMCMPDIASSPLSRISSSSLPAPSKCKTSHNHQPSAPVHAFKIHFTCVELTCFSLRTRTSRLL

SEQ ID NO: 11607 - protein, 52 aa, Zea mays
  Coding DNA Sequence Number=SeqID_6142
ALIIAILVNETTGFLRVLHPMQKHFVNSHICRHCEQHPLSSSTILALRGEDP

SEQ ID NO: 11608 - protein, 37 aa, Zea mays
  Coding DNA Sequence Number=SeqID_6144
KLEHQTSTKTNSRAWLIQLTLGILTLQHPGHKAESRV

SEQ ID NO: 11609 - protein, 87 aa, Zea mays
  Coding DNA Sequence Number=SeqID_6146
AWSRPRYAGHQESIHLSVENHSQLPSSMALLKISIKSTLVGFHRHMAADDTPCYGRATSWQPGSGEPSGLRPSERHLYTEGVWRNVC

SEQ ID NO: 11610 - protein, 215 aa, Zea mays
  misc_feature (1)..(55): Xaa can be any naturally occurring amino acid
  misc_feature (65)..(65): Xaa can be any naturally occurring amino acid
  misc_feature (77)..(77): Xaa can be any naturally occurring amino acid
  misc_feature (81)..(81): Xaa can be any naturally occurring amino acid
  misc_feature (83)..(87): Xaa can be any naturally occurring amino acid
  misc_feature (89)..(90): Xaa can be any naturally occurring amino acid
  misc_feature (96)..(96): Xaa can be any naturally occurring amino acid
  misc_feature (101)..(101): Xaa can be any naturally occurring amino acid
  misc_feature (103)..(103): Xaa can be any naturally occurring amino acid
  misc_feature (107)..(107): Xaa can be any naturally occurring amino acid
  misc_feature (111)..(113): Xaa can be any naturally occurring amino acid
  misc_feature (115)..(115): Xaa can be any naturally occurring amino acid
  misc_feature (118)..(123): Xaa can be any naturally occurring amino acid
  misc_feature (127)..(129): Xaa can be any naturally occurring amino acid
  misc_feature (133)..(133): Xaa can be any naturally occurring amino acid
  misc_feature (138)..(138): Xaa can be any naturally occurring amino acid
  misc_feature (141)..(141): Xaa can be any naturally occurring amino acid
  misc_feature (146)..(146): Xaa can be any naturally occurring amino acid
  misc_feature (149)..(151): Xaa can be any naturally occurring amino acid
  misc_feature (155)..(155): Xaa can be any naturally occurring amino acid
  misc_feature (158)..(159): Xaa can be any naturally occurring amino acid
  misc_feature (166)..(167): Xaa can be any naturally occurring amino acid
  misc_feature (169)..(169): Xaa can be any naturally occurring amino acid
  misc_feature (171)..(171): Xaa can be any naturally occurring amino acid
  misc_feature (173)..(173): Xaa can be any naturally occurring amino acid
  misc_feature (175)..(175): Xaa can be any naturally occurring amino acid
  misc_feature (182)..(183): Xaa can be any naturally occurring amino acid
  misc_feature (187)..(187): Xaa can be any naturally occurring amino acid
  misc_feature (191)..(191): Xaa can be any naturally occurring amino acid
  misc_feature (202)..(207): Xaa can be any naturally occurring amino acid
  misc_feature (211)..(213): Xaa can be any naturally occurring amino acid
  Coding DNA Sequence Number=SeqID_6148
XXXXXXXXXXXXXXXXXXXXXXXXXXXXXXXXXXXXXXXXXXXXXXXXXXXXXXXFYHSTYNNLXHQNMEVCPRGTXSNGXAXXXXXAXXKRHLTXLLAFXAXYKRXMNSXXXTXMAXXXXXXSHYXXXTFFXKPPFXSLXPPFSXMGXXXLATXNRXXPTPWSAXXGXIXPXLXEKGPYHXXLWRXSLDXPRLLNFFSPMXXXXXXYFKXXXNL

SEQ ID NO: 11611 - protein, 160 aa, Zea mays
  Coding DNA Sequence Number=SeqID_6150
VETISPDQLLKSLVPPPISLGGPPPQGGLPGNQGDFLPPQHNHSSTKGFCLDAPAWAFAMTSLIRNPTFLHVMGDLSLFATARRSHVPKNCTKRSADRGHKRSKSGATALVKQRLLAPAALRWRAALPPGPGGVDDPPDAGGERERERERHARRVTGRCA

SEQ ID NO: 11612 - protein, 178 aa, Zea mays
  misc_feature (144)..(144): Xaa can be any naturally occurring amino acid
  misc_feature (149)..(149): Xaa can be any naturally occurring amino acid
  Coding DNA Sequence Number=SeqID_6151
  Subcellular localization annotation: CTP_CleavageSite=90; ConfidenceScore=5.68e-01
FFFFFFFICPGFSSSLHQPLQQLMSSGETMFDVRVLSAHGVPSAVSLACLLPTAAGRRRRGRRRAPTRPAPASAPEYPRPSSARHPQQTRALAGGPVDGDRGGEADHGRAAQPCVRPAALLRALLAPDDGQRPAADGPAGDDAXLAGRXRCCVSFDDGTNSQVQVNIRIQRTIFFLIE

SEQ ID NO: 11613 - protein, 128 aa, Zea mays
  misc_feature (44)..(44): Xaa can be any naturally occurring amino acid
  misc_feature (59)..(59): Xaa can be any naturally occurring amino acid
  Coding DNA Sequence Number=SeqID_6152
  Gene Ontology: Mol. function=protein serine/threonine kinase activity; Cellular component=integral to membrane; Biological process=protein amino acid phosphorylation
  Homolog annotation: Hit_ID=A3B5Z7; Match level="QueryCoverage=88%, HitCoverage=10%, E-value=3e-42, Identity=77%"; Hit description =Putative uncharacterized protein
TKPIKKSNIFVIRDIKRRKRRLALAEEPWKLTAFQPVDFGEASXVRGLADENLIGKGGXGARVTYTSRSSGEAAGTVAVKRIWAGGSLDKKLEREFASEVDILGHIRHNNIVKLLCCLSRADHQKFFD

SEQ ID NO: 11614 - protein, 163 aa, Zea mays
  misc_feature (86)..(86): Xaa can be any naturally occurring amino acid
  misc_feature (147)..(147): Xaa can be any naturally occurring amino acid
  misc_feature (157)..(157): Xaa can be any naturally occurring amino acid
  Coding DNA Sequence Number=SeqID_6153
  Subcellular localization annotation: CTP_CleavageSite=65; ConfidenceScore=5.29e-01
RERLTNSPPPPWLGNPDTLSSPPLQNPDLGRVQSLVHLGLSTLLSTPVQASNLTPLLQRAGDGLAAMHKRAPLPPRVADLPRAARXRGGVAPVMGRWPAPVGGPGGGKAKGLTSFRNWGRRGEVPLGSLGKGPRKHGEKTGKATPLXEFNLRGKGPXGESVLH

SEQ ID NO: 11615 - protein, 132 aa, Zea mays
  misc_feature (44)..(44): Xaa can be any naturally occurring amino acid
  Coding DNA Sequence Number=SeqID_596
  Gene Ontology: Mol. function=actin binding
  Homolog annotation: Hit_ID=A3AFD1; Match level="QueryCoverage=80%, HitCoverage=29%, E-value=1e-25, Identity=56%"; Hit description =Putative uncharacterized protein
MSRQSETADELAAVKADLDAARASVAIVLREVEAMETRAVLEWXREGTKDVLARILLLNETVLSSAVAAIRAEEERSVFFQEATLQFFDSDRNLEVARRQMEVMEGMEAELLAKSVEVEYLRAELKQAEMRF

SEQ ID NO: 11616 - protein, 282 aa, Zea mays
  misc_feature (244)..(244): Xaa can be any naturally occurring amino acid
  Coding DNA Sequence Number=SeqID_597
QKEARGPTLYTVSSVVLMGRETGFLHLLAPLLLTGGKGADLVIRGNVVLNTLSTRSTSTLLWIRSAPNLHQVGRLDVPFMGDHPVEQVHGAWARLQPGTGGELDRLFPRKDSVFYPCRSTSMAQPCIRPRTCGLWGMVTRYGTTTRTCGARMRGCRWHCAIRRRRSSRASAEKRALRVAALACPTGRRQRFHATGPSVGVDWCLDGAAPEACGSQARTYTYCTHVPEVCVSMCEGRSCCVRDPXCTLPRKRIAAHGFFFTRSKLRIKRKGALVVVTLRKRKK

SEQ ID NO: 11617 - protein, 345 aa, Zea mays
  Coding DNA Sequence Number=SeqID_599
  Gene Ontology: Mol. function=mismatched DNA binding; Cellular component=synaptonemal complex; Biological process=mismatch repair
  Homolog annotation: Hit_ID=Q6DTM5; Match level="QueryCoverage=95%, HitCoverage=41%, E-value=1e-142, Identity=75%"; Hit description=MSH4
  Pfam annotation: Domain name=MutS_III; Domain location=173-323; Score= -36.8; E_value=1.6e-05; Accession=PF05192.9; Description=MutS domain III
MEGDATGADGGGGGGSGERSSFVIGLIENRAKEVGVAAFDLRSASLHLSQYIETSCSYHNTKTLLHFYDPMVVIVPPNKTAADGMVGVSELIDKHYPANKKVTMARGCFDDTKGAVIVRSLSARDPSALGLDTYCKQYYLCLAAATATIKWIESEKGVFITNHSLSVTFNGSFDHMSIDSTSVQTLEIIDPLHTELWGTSNKKKSLFQMLKTTKTTGGSRLLRANLLQPLKDIQTINARLDCLDELMSNEELFFGLTQGLRKFPKESDKVLCHFCFKPKKVTDEVLKPANGRKSQMLISDIIVLKTALDAIPFLSKVLKGAKSFLLHNIYQTVCENPKYANMRKR

SEQ ID NO: 11618 - protein, 127 aa, Zea mays
  Coding DNA Sequence Number=SeqID_600
VAPRAMAPNKEMRRENREVTATVDSILHRRFDLSIGSWGGHRGYLCLVEEGLDKKVLWWHDNCSPELGGCGGFAPHRDRPFHRRLHLTTSSPRFLSVLLETSLSNNLVKVVPTVLNAQEVSWQHGGL

SEQ ID NO: 11619 - protein, 93 aa, Zea mays
  misc_feature (24)..(24): Xaa can be any naturally occurring amino acid
  misc_feature (29)..(29): Xaa can be any naturally occurring amino acid
  misc_feature (47)..(47): Xaa can be any naturally occurring amino acid
  misc_feature (93)..(93): Xaa can be any naturally occurring amino acid
  Coding DNA Sequence Number=SeqID_602
  Homolog annotation: Hit_ID=Q7XBD4; Match level="QueryCoverage=83%, HitCoverage=7%, E-value=1e-15, Identity=52%"; Hit description =Cinful1 polyprotein
IILFLFDEFELLHVLTFRQKWLNXWMKQXFYVEKHLDKREDINGIIXRPIISRFGINRPTVVEYDESQSCLVASNVVCSYICSRDLVQEHITX

SEQ ID NO: 11620 - protein, 93 aa, Zea mays; identical to SEQ ID NO: 11619
  misc_feature (24)..(24): Xaa can be any naturally occurring amino acid
  misc_feature (29)..(29): Xaa can be any naturally occurring amino acid
  misc_feature (47)..(47): Xaa can be any naturally occurring amino acid
  misc_feature (93)..(93): Xaa can be any naturally occurring amino acid
  Coding DNA Sequence Number=SeqID_603
  Homolog annotation: Hit_ID=Q7XBD4; Match level="QueryCoverage=83%, HitCoverage=7%, E-value=1e-15, Identity=52%"; Hit description =Cinful1 polyprotein

SEQ ID NO: 11621 - protein, 151 aa, Zea mays
  Coding DNA Sequence Number=SeqID_604
VPAMGHCRKSLVAPVSVHAAHMASHGAVATQIGCSRSSQGGKNREATAGDNKCFTKGSEDGATVVAEAWSFYSWRHRASCVDEDGRVLRRCSEGTADPLHTMGCGHRSTSTGQEQVPQNEAHGGCCDVFVRGLGRRLSVNFWLLDRCLHMM

SEQ ID NO: 11622 - protein, 159 aa, Zea mays
  Coding DNA Sequence Number=SeqID_606
NVFTSFLGLVIVSHLSPRGLRTLHNTGLDRSQNLYKALSQLLTVIWASPNHITINNYWYYTTNHLQLSFIHDKEAARQTELMQRVGARTLQIKGNQCWLGRWWRRGRCRTRWSRRWVVGAAMETRAPRIEWRIRNMMMLCELTRNVDSLNPRVVGLQFG

SEQ ID NO: 11623 - protein, 79 aa, Zea mays
  Coding DNA Sequence Number=SeqID_608
YGDYLRFLGQAWKTPLIRLLVRIKNGEKGREQPSPVHRSANGHDVLILLAMSPSLILEYSSCGCDIVWLNLCLYYLLGL

SEQ ID NO: 11624 - protein, 106 aa, Zea mays
  Coding DNA Sequence Number=SeqID_610
  Subcellular localization annotation: CTP_CleavageSite=87; ConfidenceScore=5.67e-01
LWPPLLARSTPSDRLSSSSLPPPRLSADHFISFSSPSCSLRVVLLHVHVLLPSAPFAVAYRVSRSGPPAAAACPLLHQTPACNTLLESNMRWEREKKEDALGSPAP

SEQ ID NO: 11625 - protein, 227 aa, Zea mays
  Coding DNA Sequence Number=SeqID_612
HNPKTDHLIRRLHLSLCPSHRHSLSVVWRISLTEKAMLHHLIQRRQPPPQPKHGPTNRHDREGHDTVAHPHHLLGCQDLLCGRHRLLCGLLLHPDLVRQSSAHPCLGLLERQGGIHLNFEKGRLAAPRWLVVCVGDQQLRDPRGGAKGCSGRDLTSSTPSRSVATQQWMPTEMVTAAIDACLWDHLLAKPNLFTDKNFNPSVASFQRQCSASSTGTSTSFFRLGCSR

SEQ ID NO: 11626 - protein, 54 aa, Zea mays
  Coding DNA Sequence Number=SeqID_6154
  Homolog annotation: Hit_ID=A2YX51; Match level="QueryCoverage=57%, HitCoverage=3%, E-value=6e-08, Identity=87%"; Hit description =Putative uncharacterized protein
AVGQISFQPQFLQQNNIQFNTSLLPPQNQQTEQLNWMLFCCRNWGWKLICPTAT

SEQ ID NO: 11627 - protein, 98 aa, Zea mays
  misc_feature (26)..(26): Xaa can be any naturally occurring amino acid
  misc_feature (78)..(78): Xaa can be any naturally occurring amino acid
  Coding DNA Sequence Number=SeqID_6155
  Gene Ontology: Mol. function=nutrient reservoir activity
  Homolog annotation: Hit_ID=P04704; Match level="QueryCoverage=65%, HitCoverage=26%, E-value=1e-12, Identity=64%"; Hit description=Zein -alpha ZG99 precursor
MGSRGRHRKRNSVPTRGAKIFCLLMXLGVSARAWYRDHFPANASQAPIGSLLPPDLSPGVASGWENPILQPYRIQQAXSRGGILPLSPLVLQQSSALL

SEQ ID NO: 11628 - protein, 98 aa, Zea mays; identical to SEQ ID NO: 11627
  misc_feature (26)..(26): Xaa can be any naturally occurring amino acid
  misc_feature (78)..(78): Xaa can be any naturally occurring amino acid
  Coding DNA Sequence Number=SeqID_6156
  Gene Ontology: Mol. function=nutrient reservoir activity
  Homolog annotation: Hit_ID=P04704; Match level="QueryCoverage=65%, HitCoverage=26%, E-value=1e-12, Identity=64%"; Hit description=Zein -alpha ZG99 precursor

SEQ ID NO: 11629 - protein, 144 aa, Zea mays
  misc_feature (12)..(12): Xaa can be any naturally occurring amino acid
  misc_feature (77)..(77): Xaa can be any naturally occurring amino acid
  Coding DNA Sequence Number=SeqID_6157
  Gene Ontology: Mol. function=nutrient reservoir activity
  Homolog annotation: Hit_ID=Q41884; Match level="QueryCoverage=95%, HitCoverage=57%, E-value=4e-45, Identity=71%"; Hit description=Zein
MGCVTRTIFPQXSQAPIGSLLPPYLPSMGGSGWENPALQPYRLQQGIGGRNIPLSPLVQQSAGLSLGQALGQTIKAXQEVEQLGLPGINQGALANLSPYYQQQQFLPFNQLSTLNPGGYLREQLLPFSQVGGGYSHQQQLLPFN

SEQ ID NO: 11630 - protein, 86 aa, Zea mays
  Coding DNA Sequence Number=SeqID_6158
SNHHHSLQSISDLIYLLFHWVMGSLIITWVIPMSLCKNRMHLCAPISLSEQFFLLLSHGMLFSQGLSYHRGSNIINLIGLRLLCDH

SEQ ID NO: 11631 - protein, 228 aa, Zea mays
  misc_feature (115)..(115): Xaa can be any naturally occurring amino acid
  misc_feature (119)..(120): Xaa can be any naturally occurring amino acid
  misc_feature (123)..(125): Xaa can be any naturally occurring amino acid
  misc_feature (138)..(138): Xaa can be any naturally occurring amino acid
  misc_feature (149)..(149): Xaa can be any naturally occurring amino acid
  misc_feature (162)..(162): Xaa can be any naturally occurring amino acid
  misc_feature (165)..(165): Xaa can be any naturally occurring amino acid
  misc_feature (168)..(168): Xaa can be any naturally occurring amino acid
  misc_feature (176)..(177): Xaa can be any naturally occurring amino acid
  misc_feature (186)..(186): Xaa can be any naturally occurring amino acid
  Coding DNA Sequence Number=SeqID_6160
  Gene Ontology: Mol. function=hydrolase activity, hydrolyzing O -glycosyl compounds; Cellular component=extracellular region; Biological process=cell wall organization and biogenesis
  Homolog annotation: Hit_ID=A3BSR2; Match level="QueryCoverage=65%, HitCoverage=30%, E-value=3e-40, Identity=59%"; Hit description =Putative uncharacterized protein
  Pfam annotation: Domain name=Glyco_hydro_9; Domain location=40-211; Score=-192.2; E_value=2.9e-05; Accession=PF00759.9; Description =Glycosyl hydrolase family 9
MAVKVWVFAVALMMCAGVRLGADDDGGSRLISRCRLSSPNYRGALAKAILFFEGQRSGRLPANQRVRWRGDSALTDGQPENVNLTGGYYDAGDNVKFGFPMAFSVTLLSWSAVEXRDEXXAAXXXRHPRPATRGAPNXFPVAKAGPTTXHNQGADGPRPPPXPPXPHXHGTPRGTXXRAPRISPRXRARRARFPFFSSPAPGWTPFISTTLWRCLWTTQPQPTVMLCN

SEQ ID NO: 11632 - protein, 57 aa, Zea mays
  Coding DNA Sequence Number=SeqID_6161
  Subcellular localization annotation: CTP_CleavageSite=40; ConfidenceScore=5.07e-01
TDDSQLNLAYPAMPIRIFQCKFFVFVRSLVICIFNMLPVTARMVNECGNFYTTFEFL

SEQ ID NO: 11633 - protein, 56 aa, Zea mays
  Coding DNA Sequence Number=SeqID_6163
FTQPTKRTNSHNDKKTNYQAKLKTMFDQKTNLQQDSFQSTIKTPIINRYIVVVMFF

SEQ ID NO: 11634 - protein, 37 aa, Zea mays
  Coding DNA Sequence Number=SeqID_6165
GVDYYIQSYSTFDIHPMVALIISNLQPARLALVRTGF

SEQ ID NO: 11635 - protein, 91 aa, Zea mays
  Coding DNA Sequence Number=SeqID_6167
TCPRLIIISATATSPSSSTCFATYHLRYPHSHHHRVIPHIIFVSHNVCGSMPWLLILCVCFLLFVIGYYVMSCDHLDTVSFTLLGGSSDST

SEQ ID NO: 11636 - protein, 121 aa, Zea mays
  Coding DNA Sequence Number=SeqID_6169
  Gene Ontology: Mol. function=chaperone activator activity; Cellular component=cytoplasm
  Homolog annotation: Hit_ID=A2X0Q1; Match level="QueryCoverage=76%, HitCoverage=41%, E-value=1e-35, Identity=76%"; Hit description =Putative uncharacterized protein
PFIFLLSISVVLYCDDSTSEYKPLVALQAFQGIVRNKKRVGYNYELSLRFSGEWLIKEENKKIKGHLDIPEFSFGKIDDLEVQVRVGDDKGLASDDRTRICKDLKSFLAPIQEKMRMFEEE

SEQ ID NO: 11637 - protein, 191 aa, Zea mays
  misc_feature (5)..(9): Xaa can be any naturally occurring amino acid
  misc_feature (11)..(16): Xaa can be any naturally occurring amino acid
  misc_feature (28)..(29): Xaa can be any naturally occurring amino acid
  misc_feature (178)..(180): Xaa can be any naturally occurring amino acid
  Coding DNA Sequence Number=SeqID_5594
  Gene Ontology: Mol. function=catalytic activity; Cellular component =intracellular; Biological process=metabolic process
  Homolog annotation: Hit_ID=A9HVR7; Match level="QueryCoverage=91%, HitCoverage=24%, E-value=3e-59, Identity=68%"; Hit description=Acyl -CoA synthetase
TVAGXXXXXLXXXXXXGLAVIEHAVCRXXDEAVAAWRRIGAPVALKACSAQLPHKSEHGLVALGLNDEAALRAAFAHQAQTLGKLNVRDGAWLVARMQRGLHECALGARVDPVLGPVVMIGSGGKYVEALRDVAVLMPPFDAAQVIEKLRGLRIGTLLQGVRGDPPADVEALARQAVXXXDYALAAGPRLA

SEQ ID NO: 11638 - protein, 191 aa, Zea mays; identical to SEQ ID NO: 11637
  misc_feature (5)..(9): Xaa can be any naturally occurring amino acid
  misc_feature (11)..(16): Xaa can be any naturally occurring amino acid
  misc_feature (28)..(29): Xaa can be any naturally occurring amino acid
  misc_feature (178)..(180): Xaa can be any naturally occurring amino acid
  Coding DNA Sequence Number=SeqID_5595
  Gene Ontology: Mol. function=catalytic activity; Cellular component =intracellular; Biological process=metabolic process
  Homolog annotation: Hit_ID=A9HVR7; Match level="QueryCoverage=91%, HitCoverage=24%, E-value=3e-59, Identity=68%"; Hit description=Acyl -CoA synthetase

SEQ ID NO: 11639 - protein, 93 aa, Zea mays
  Coding DNA Sequence Number=SeqID_5596
  Gene Ontology: Mol. function=two-component response regulator activity; Cellular component=membrane; Biological process=two -component signal transduction system (phosphorelay)
  Homolog annotation: Hit_ID=Q3K7N0; Match level="QueryCoverage=98%, HitCoverage=13%, E-value=2e-42, Identity=95%"; Hit description =Diguanylate cyclase/phosphodiesterase precursor
  Pfam annotation: Domain name=GGDEF; Domain location=2-85; Score= -44.9; E_value=0.0013; Accession=PF00990.12; Description=GGDEF domain
GALARLGGDQFALVQADIEQPYEAAELAQSILDDLEAEFALDHEQIRLRATIGITLFPEDGDSTEKLLQKAEQTMTLAKSRSRNRYQFYIASG

SEQ ID NO: 11640 - protein, 278 aa, Zea mays
  misc_feature (43)..(43): Xaa can be any naturally occurring amino acid
  misc_feature (47)..(47): Xaa can be any naturally occurring amino acid
  Coding DNA Sequence Number=SeqID_5597
  Gene Ontology: Cellular component=integral to membrane; Biological process=transport
  Homolog annotation: Hit_ID=Q4KHZ8; Match level="QueryCoverage=89%, HitCoverage=34%, E-value=1e-116, Identity=86%"; Hit description =Fusaric acid resistance protein, putative
PPCAAAKRPKPRAGSGGDGVPDRVVCAESLAIWVGICTAGATXNRNXRAYGFVLAGYTAAMVGLPALAHPDGAFMAAVWRVLEISLGIVCSTLVSAAILPQTASAAMRNALYQRFGVFALFVTDGLRGRSEREGFERSNVRFIAEAVGLEGLRSITVFEDPHMRRRNGRLTRLNSEFMSITTRFNALHQLLERLRSQEADHVVAAIKPGLQDLAELLDGFSGRALTSPDAARLANQLNTYKEGLPAKVRSLRTSFQESQPSDAEQLDFHTAYELLYRF

SEQ ID NO: 11641 - protein, 218 aa, Zea mays
  misc_feature (1)..(3): Xaa can be any naturally occurring amino acid
  misc_feature (5)..(5): Xaa can be any naturally occurring amino acid
  misc_feature (218)..(218): Xaa can be any naturally occurring amino acid
  Coding DNA Sequence Number=SeqID_5598
XXXAXPASTPAPAPAPAEFQIDPPPPPAAPPSVAPPPPAAPPPKPRSDCDCVSPYREYQAAETAETRALFSAAAAGDEAAFTAALAKVKQPGDYALEGVPLLHALLRPAGERGKHVYWDMPADEAARLRQAYQAALPARSRMLAALLATRPALDDITYESRRPSLQLALLYGTPEILDMLLAAGARPDQRGDENKTPLEFLLNRDFEFAVRMTYLPRX

SEQ ID NO: 11642 - protein, 64 aa, Zea mays
  misc_feature (1)..(2): Xaa can be any naturally occurring amino acid
  Coding DNA Sequence Number=SeqID_5600
  Gene Ontology: Mol. function=hydrolase activity
  Homolog annotation: Hit_ID=A5V3H7; Match level="QueryCoverage=96%, HitCoverage=9%, E-value=5e-16, Identity=66%"; Hit description=5 -oxoprolinase
XXLNAAVGPKMARYLERFLQRVRELDIGHEPHTIHSNGGLMSIATVRQYPVRTCLSGPAAGVVG

SEQ ID NO: 11643 - protein, 64 aa, Zea mays; identical to SEQ ID NO: 11642
  misc_feature (1)..(2): Xaa can be any naturally occurring amino acid
  Coding DNA Sequence Number=SeqID_5601
  Gene Ontology: Mol. function=hydrolase activity
  Homolog annotation: Hit_ID=A5V3H7; Match level="QueryCoverage=96%, HitCoverage=9%, E-value=5e-16, Identity=66%"; Hit description=5 -oxoprolinase

SEQ ID NO: 11644 - protein, 239 aa, Zea mays
  misc_feature (20)..(20): Xaa can be any naturally occurring amino acid
  Coding DNA Sequence Number=SeqID_5602
  Gene Ontology: Mol. function=protein binding; Cellular component =outer membrane-bounded periplasmic space; Biological process=cell wall organization and biogenesis
  Homolog annotation: Hit_ID=A5W6W1; Match level="QueryCoverage=93%, HitCoverage=94%, E-value=1e-59, Identity=53%"; Hit description=Pili assembly chaperone precursor
  Pfam annotation: Domain name=Pili_assembly_C; Domain location=153 -236; Score=9.0; E_value=0.0034; Accession=PF02753.7; Description =Gram-negative pili assembly chaperone
  Pfam annotation: Domain name=Pili_assembly_N; Domain location=31-148; Score=146.0; E_value=1e-40; Accession=PF00345.11; Description=Gram -negative pili assembly chaperone
  Pfam module annotation: Pfam domain module=Pili_assembly_C::Pili _assembly_N; Domain location=153-236::31-148
MPAHIIRFGLPGPCAALIAXLLSVAPCAQSAVKIEGTRLIYFGQDKEASLNVINQQSRQVVVQSWITREDEDATRAVPFAVVQPLVQLDAGQHHVLRVLYAGEGLPGDRESLFWLNVMEIPLKPESPNSVQFAVRQRLKLFYRPPGLAGGSAQAVRQLAWSSSDGHSIAVTNQSAFHLSLVNLQTNTAGKTHALDDYLLLKPGERKVLDTQAPINAGTQIHFTEITDIGLQARHSAALK

SEQ ID NO: 11645 - protein, 163 aa, Zea mays
  Coding DNA Sequence Number=SeqID_5603
  Gene Ontology: Mol. function=nucleoside binding; Cellular component =integral to membrane; Biological process=sporulation
  Homolog annotation: Hit_ID=Q7VU08; Match level="QueryCoverage=100%, HitCoverage=39%, E-value=2e-70, Identity=85%"; Hit description =Putative uncharacterized protein
  Pfam annotation: Domain name=Gate; Domain location=31-146; Score =60.6; E_value=5.4e-15; Accession=PF07670.4; Description=Nucleoside recognition
LYRWLAIGDPDVFRAMVASLFDMARVSVEVMVLLFGTLTLWLGFLRIAEGAGLVERLARLLGPLFARLMPEVPRNHPAIGLITLNFAANGLGLDNAATPIGLRAMRELQSLNPRPDTASNAQILFLVLNASSLTLLPVTLFMFRAQQGAPDPTLVFLPILLAT

SEQ ID NO: 11646 - protein, 104 aa, Zea mays
  Coding DNA Sequence Number=SeqID_5604
  Gene Ontology: Mol. function=electron carrier activity; Cellular component=integral to membrane; Biological process=cytochrome complex assembly
  Homolog annotation: Hit_ID=A0GGY7; Match level="QueryCoverage=99%, HitCoverage=14%, E-value=3e-22, Identity=53%"; Hit description =Redoxin
PGASFLIGVATGLLWAPCAGPILGLVLTGAALQGASIGTTLLLLAYAAGAATSLALALLVGGKVFGFMKRSLGAGEWLRRGLGALMLAGVAAIALGLDTGILAR

SEQ ID NO: 11647 - protein, 104 aa, Zea mays; identical to SEQ ID NO: 11646
  Coding DNA Sequence Number=SeqID_5605
  Gene Ontology: Mol. function=electron carrier activity; Cellular component=integral to membrane; Biological process=cytochrome complex assembly
  Homolog annotation: Hit_ID=A0GGY7; Match level="QueryCoverage=99%, HitCoverage=14%, E-value=3e-22, Identity=53%"; Hit description =Redoxin

SEQ ID NO: 11648 - protein, 245 aa, Zea mays
  Coding DNA Sequence Number=SeqID_5606
  Gene Ontology: Mol. function=peptidase activity
  Homolog annotation: Hit_ID=Q3KIX1; Match level="QueryCoverage=100%, HitCoverage=22%, E-value=1e-132, Identity=89%"; Hit description =Transglutaminase-like
WYLRDNHCRLVPGDSPLGYRLPLASQPWVTAADYPFVHPTDPNQDLPDLPTPSQLQSHGESAASKDRIPKIDESADWLTRTALCAEAREGRLYLFMPPLERVEDYLELVAAIEATAEELHCPVLLEGYEPPSDPRLSNFRVTPDPGVIEVNVQPSATWDELVERTEFLYEEARQTRLTTEKFMIDGRHTGTGGGNHFVLGGATPKDSPFLRRPDLLRSLISYWHNHPSLSYLFSGLFIGPTSQAP

SEQ ID NO: 11649 - protein, 182 aa, Zea mays
  Coding DNA Sequence Number=SeqID_5607
  Gene Ontology: Mol. function=peptidase activity; Cellular component =cytoplasm; Biological process=proteolysis
  Homolog annotation: Hit_ID=Q48HE4; Match level="QueryCoverage=100%, HitCoverage=26%, E-value=3e-95, Identity=97%"; Hit description =Peptidase, U32 family
  Pfam annotation: Domain name=Peptidase_U32; Domain location=1-181; Score=222.2; E_value=1.2e-63; Accession=PF01136.9; Description =Peptidase family U32
ALIVQDLGVMELDIPPIELHASTQTDIRTLGRAKFLDQAGFSQLVLARELNLQEIRAIADETDAAIEFFIHGALCVAFSGQCNISHAQNGRSANRGDCSQACRLPYTLKDDQGRVVAFEKHLLSMKDNNQSANLRALVDAGVRSFKIEGRYKDMGYVKNITAYYRQRLDEILEDRPDLARAS

SEQ ID NO: 11650 - protein, 172 aa, Zea mays
  misc_feature (172)..(172): Xaa can be any naturally occurring amino acid
  Coding DNA Sequence Number=SeqID_5608
  Gene Ontology: Mol. function=transcription factor activity; Biological process=regulation of transcription, DNA-dependent
  Homolog annotation: Hit_ID=Q2KXL4; Match level="QueryCoverage=62%, HitCoverage=47%, E-value=3e-24, Identity=55%"; Hit description =Probable RNA polymerase sigma factor
  Pfam annotation: Domain name=Sigma70_r2; Domain location=115-172; Score=12.5; E_value=0.023; Accession=PF04542.4; Description=Sigma-70 region 2
  Subcellular localization annotation: CTP_CleavageSite=43; ConfidenceScore=5.66e-01
MSIDWAVSYITSATAAARRIPGSGWRSSTWTGARAAWRRCSFTAKAGRQPLSRTGLPRTAPRPEPDASPRGAQPRRDSRLPMAVSRYYNREWLSFICPRGRAAMPPTTQDRIESLYVDHHSWLHGWLRRQLGNSFEAADLAHDVFVRLLRRPAVADTREPRAFLSTIARGLX

SEQ ID NO: 11651 - protein, 172 aa, Zea mays; identical to SEQ ID NO: 11650
  misc_feature (172)..(172): Xaa can be any naturally occurring amino acid
  Coding DNA Sequence Number=SeqID_5609
  Gene Ontology: Mol. function=transcription factor activity; Biological process=regulation of transcription, DNA-dependent
  Homolog annotation: Hit_ID=Q2KXL4; Match level="QueryCoverage=62%, HitCoverage=47%, E-value=3e-24, Identity=55%"; Hit description =Probable RNA polymerase sigma factor
  Pfam annotation: Domain name=Sigma70_r2; Domain location=115-172; Score=12.5; E_value=0.023; Accession=PF04542.4; Description=Sigma-70 region 2
  Subcellular localization annotation: CTP_CleavageSite=43; ConfidenceScore=5.66e-01

SEQ ID NO: 11652 - protein, 50 aa, Zea mays
  Coding DNA Sequence Number=SeqID_5610
  Gene Ontology: Mol. function=transporter activity; Cellular component= integral to membrane; Biological process=transport
  Homolog annotation: Hit_ID=A8GIQ7; Match level="QueryCoverage=98%, HitCoverage=11%, E-value=6e-18, Identity=81%"; Hit description=Major facilitator superfamily MFS_1
GLMGMLPTYASWGVWAPVALVALRFIQGVALGGEWAGAVLLSMEHGKPDQ

SEQ ID NO: 11653 - protein, 50 aa, Zea mays; identical to SEQ ID NO: 11652
  Coding DNA Sequence Number=SeqID_5611
  Gene Ontology: Mol. function=transporter activity; Cellular component= integral to membrane; Biological process=transport
  Homolog annotation: Hit_ID=A8GIQ7; Match level="QueryCoverage=98%, HitCoverage=11%, E-value=6e-18, Identity=81%"; Hit description=Major facilitator superfamily MFS_1

SEQ ID NO: 11654 - protein, 143 aa, Zea mays
  misc_feature (6)..(6): Xaa can be any naturally occurring amino acid
  misc_feature (9)..(10): Xaa can be any naturally occurring amino acid
  Coding DNA Sequence Number=SeqID_5612
  Gene Ontology: Mol. function=ATP-dependent DNA helicase activity; Biological process=DNA repair
  Homolog annotation: Hit_ID=Q4KIQ5; Match level="QueryCoverage=98%, HitCoverage=11%, E-value=2e-64, Identity=83%"; Hit description =Exodeoxyribonuclease V, beta subunit
RIPRGXPNXXLLNGMFKGFIDLTFEHEGRYYVADYKSNWLGPDDSAYTQQAMELSILDHRYDLQYVLYLLALHRQLKARLPDYDYDRHVGGALYLFLRGTHSASQGAYFTRPPRELIEGLDLLFQGKPLPPKAEPAWEQGELL

SEQ ID NO: 11655 - protein, 97 aa, Zea mays
  Coding DNA Sequence Number=SeqID_5613
TQISSVIFPGTPTIELAVNLEFKLSTTTNCRTSDSQFENIYRYVHAVEVGTYYKCTPGRRNSYVSCWHVAFQGFQAHSETNSSRLTCASRRNARLSR

SEQ ID NO: 11656 - protein, 223 aa, Zea mays
  Coding DNA Sequence Number=SeqID_5615
  Gene Ontology: Mol. function=1-pyrroline-5-carboxylate dehydrogenase activity; Biological process=glutamate biosynthetic process
  Homolog annotation: Hit_ID=Q3KJ60; Match level="QueryCoverage=100%, HitCoverage=16%, E-value=1e-116, Identity=95%"; Hit description =Delta-1-pyrroline-5-carboxylate dehydrogenase / L-proline dehydrogenase
TSIDRTPHWLIKQAIFNYLEKLEGGATLAELNGLASKDAEEAGEVQTDHAHQCFLEFAESILPQSVLRASITAAYRRPEPEVVPMLIEQARLPAAMAEATNKLASSIAEKLRNQKSAGGRAGIVQGLLQEFSLSSQEGVALMCLAEALLRIPDKGTRDALIRDKISTGNWHPHLGNSPSLFVNAATWGLLLTGKLVATHNEAGLTSSLSRIIGKSGEPMIRKG

SEQ ID NO: 11657 - protein, 276 aa, Zea mays
  misc_feature (226)..(226): Xaa can be any naturally occurring amino acid
  misc_feature (242)..(242): Xaa can be any naturally occurring amino acid
  misc_feature (254)..(261): Xaa can be any naturally occurring amino acid
  misc_feature (263)..(263): Xaa can be any naturally occurring amino acid
  misc_feature (266)..(273): Xaa can be any naturally occurring amino acid
  Coding DNA Sequence Number=SeqID_5616
  Gene Ontology: Mol. function=transferase activity, transferring nitrogenous groups; Cellular component=intracellular; Biological process=regulation of transcription, DNA-dependent
  Homolog annotation: Hit_ID=Q4K3T2; Match level="QueryCoverage=96%, HitCoverage=55%, E-value=1e-135, Identity=89%"; Hit description =Transcriptional regulator, GntR family/aminotransferase, classes I and II family protein
  Pfam annotation: Domain name=Aminotran_1_2; Domain location=1-264; Score=-100.8; E_value=0.03; Accession=PF00155.11; Description =Aminotransferase class I and II
SPSFHGAMQTLKGLGMKALEIPTDPLSGISLEALELALEQWPIKVIQLTPNCNNPLGYIMPESRKRALLTLAQRFDVAIIEDDVYGELAYSYPRPRTIKSFDEDGRVVLCSSFSKTLAPGLRIGWVAPGRYLERVLHMKYISTGATATQPQIAIAEFLKNGHFEPHLRRMRTQYQRNRDLMLDWVSRYFPAGTRASRPQGSFMLWVELPEGFDTLKLNRLLVDEGXQIAVGSIFSASGKYRXNCLRMNYAAKPXXXXXXXXRXVGXXXXXXXXLSP

SEQ ID NO: 11658 - protein, 119 aa, Zea mays
  Coding DNA Sequence Number=SeqID_5617
  Gene Ontology: Mol. function=inorganic phosphate transmembrane transporter activity; Cellular component=plasma membrane; Biological process=phosphate transport
  Homolog annotation: Hit_ID=Q48HD9; Match level="QueryCoverage=100%, HitCoverage=45%, E-value=1e-51, Identity=84%"; Hit description =Phosphate import ATP-binding protein pstB 1
  Pfam annotation: Domain name=ABC_tran; Domain location=1-119; Score= -39.6; E_value=0.0013; Accession=PF00005.17; Description=ABC transporter
LLRVFNRIYSMYPKQEARGEVLLNGENILAPGYSMNRLRSHVGMVFQKPVPFPMSIYDNIAYAVRHHEKLSRREMDDRVEQALRGGALWDEVKDKLKQSAQSLSGGQQQRLCIARTIAL

SEQ ID NO: 11659 - protein, 108 aa, Zea mays
  misc_feature (1)..(28): Xaa can be any naturally occurring amino acid
  Coding DNA Sequence Number=SeqID_5618
XXXXXXXXXXXXXXXXXXXXXXXXXXXXDIDCGCAGPDQAQPLRPILLLRNGALVAVALLASVLPIARDLGFFDGFVTVAASAVALLIYAAADGLLANSPLLLKLIGR

SEQ ID NO: 11660 - protein, 125 aa, Zea mays
  Coding DNA Sequence Number=SeqID_5620
  Gene Ontology: Mol. function=sequence-specific DNA binding; Cellular component=intracellular; Biological process=regulation of transcription, DNA-dependent
  Homolog annotation: Hit_ID=Q4KBU1; Match level="QueryCoverage=86%, HitCoverage=35%, E-value=1e-39, Identity=70%"; Hit description =Transcriptional regulator, AraC family
MNSSSSLVDWLLDSLELNTSLFHVGRYCGGWHASTHGLASASFHLVVQGQCWMHIDGDPTPYPLNNGDAVFLLRDLAYRLSSDGTAAGAQECPRKPMVPLDSQANDGVGLVCGFFHFQSGLSAMI

SEQ ID NO: 11661 - protein, 192 aa, Zea mays
  misc_feature (180)..(180): Xaa can be any naturally occurring amino acid
  misc_feature (186)..(191): Xaa can be any naturally occurring amino acid
  Coding DNA Sequence Number=SeqID_5621
  Homolog annotation: Hit_ID=Q7W229; Match level="QueryCoverage=89%, HitCoverage=54%, E-value=9e-52, Identity=61%"; Hit description =Putative exported protein
EANPAAIPLRPGFLDRIEQRGGRLISNVEDATEQLRRLLSEQNVQALTASLQNATDITQSLKEASRDLAPTLAKLGPLVESLGSTSRQADRAAREVADLAQQARQSLARLNAPDGALAMATRSLSDIAYAASRLDNETLPAITGMAASVTEAARGATYTLRRVDNTPQSLLFGPAPAAPXPGEAGXXXXXXC

SEQ ID NO: 11662 - protein, 230 aa, Zea mays
  Coding DNA Sequence Number=SeqID_5622
  Gene Ontology: Mol. function=binding; Cellular component=outer membrane; Biological process=proteolysis
  Homolog annotation: Hit_ID=B0J5Y7; Match level="QueryCoverage=86%, HitCoverage=19%, E-value=2e-36, Identity=44%"; Hit description=Outer membrane autotransporter barrel domain precursor
TIHNSLQGTQGFVKTGPGSLILTGDSSGLSGPILIADGALEIDGKLNGPVDIGREVVLAGVGQLGTTTLYPTAVISPGNDGSPIGTLTINGNLTFGADTVYRVHADPASSASDRIHVTGVAVLDGTVAHVGPAGNYAPRTTYNILTADGGIQGRFTGASSAYAFLTPTLSYDAKNAFMTLTRNDVPIGSIGGTGNETSVGGALDQEDPASGNGSASSGNGSAAGSTTAGN

SEQ ID NO: 11663 - protein, 237 aa, Zea mays
  misc_feature (7)..(8): Xaa can be any naturally occurring amino acid
  misc_feature (17)..(18): Xaa can be any naturally occurring amino acid
  misc_feature (28)..(28): Xaa can be any naturally occurring amino acid
  misc_feature (237)..(237): Xaa can be any naturally occurring amino acid
  Coding DNA Sequence Number=SeqID_5623
  Gene Ontology: Mol. function=calcium ion binding; Cellular component =extracellular region; Biological process=pathogenesis
  Homolog annotation: Hit_ID=A5WE85; Match level="QueryCoverage=99%, HitCoverage=99%, E-value=2e-38, Identity=42%"; Hit description =Putative uncharacterized protein
  Subcellular localization annotation: CTP_CleavageSite=66; ConfidenceScore=5.17e-01
TLADAAXXVGLSSNTFXXIVDTTAQTQXTVISNFVGDVGTKQGTFASGTTTDDAAPVLNGTFTGTLATGEVVRIYDGSTLLGNATVTGNNWTFSSDTGLVDGTTHNFHAVVADSAGNEGTSSANFTLTIDTTPPTQVATIVTYTDNVGLNQGNYASGTTSDDITPVLNGTLSAALGATDMVRIYDGSTLLGNATVTGTTWTFAGISGLLDASTHTYTAKVTDVAGNEGTVSNAFTLX

SEQ ID NO: 11664 - protein, 108 aa, Zea mays
  Coding DNA Sequence Number=SeqID_5624
  Gene Ontology: Mol. function=oxidoreductase activity, acting on single donors with incorporation of molecular oxygen, incorporation of two atoms of oxygen
  Homolog annotation: Hit_ID=Q3KKD3; Match level="QueryCoverage=100%, HitCoverage=100%, E-value=2e-49, Identity=82%"; Hit description =Putative uncharacterized protein
  Pfam annotation: Domain name=DOPA_dioxygen; Domain location=7-108; Score=209.9; E_value=6.2e-60; Accession=PF08883.1; Description=Dopa 4,5-dioxygenase family
MQRIKGYHAHIYFDANTIDQARKLCEDAAQMFPLRMGRVHERPVGPHPDWSCQLAFEPEYIGIVLPWLALNRNGLVVFLHPTTGDDLKDHTDHAIWMGAMRTLDLSIF

SEQ ID NO: 11665 - protein, 195 aa, Zea mays
  misc_feature (195)..(195): Xaa can be any naturally occurring amino acid
  Coding DNA Sequence Number=SeqID_5625
  Gene Ontology: Mol. function=diaminopimelate decarboxylase activity; Cellular component=chloroplast; Biological process=lysine biosynthetic process via diaminopimelate
  Homolog annotation: Hit_ID=O05321; Match level="QueryCoverage=99%, HitCoverage=46%, E-value=7e-97, Identity=92%"; Hit description =Diaminopimelate decarboxylase
  Pfam annotation: Domain name=Orn_Arg_deC_N; Domain location=33-195; Score=115.1; E_value=2.1e-31; Accession=PF02784.7; Description =Pyridoxal-dependent decarboxylase, pyridoxal binding domain
MDAFNYRDGELFAEGVALSAIAERFGTPTYVYSRAHIEAQYRSFADALEGTPSLVCYAVKANSNLGVLNVLARLGAGFDIVSRGELERVLAAGGKADKIVFSGVGKSREDMRRALEVGVHCFNVESTDELERLQVVAAEMGVRAPISLRVNPDVDAGTHPYISTGLKENKFGIAIADAEDVYIRAAQLPNLEVLX

SEQ ID NO: 11666 - protein, 63 aa, Zea mays
  Coding DNA Sequence Number=SeqID_5626
  Gene Ontology: Mol. function=nucleotide binding; Cellular component =intracellular; Biological process=cellular process
  Homolog annotation: Hit_ID=Q88MY4; Match level="QueryCoverage=100%, HitCoverage=20%, E-value=1e-26, Identity=93%"; Hit description=GTP -binding protein era homolog
  Pfam annotation: Domain name=MMR_HSR1; Domain location=12-60; Score =17.5; E_value=2.7e-05; Accession=PF01926.13; Description=GTPase of unknown function
MAMTDSTATRCGYVAIVGRPNVGKSTLLNHILGQKLAITSRKPQTTRHNMLGIKTEGAVQAVY

SEQ ID NO: 11667 - protein, 63 aa, Zea mays; identical to SEQ ID NO: 11666
  Coding DNA Sequence Number=SeqID_5627
  Gene Ontology: Mol. function=nucleotide binding; Cellular component =intracellular; Biological process=cellular process
  Homolog annotation: Hit_ID=Q88MY4; Match level="QueryCoverage=100%, HitCoverage=20%, E-value=1e-26, Identity=93%"; Hit description=GTP -binding protein era homolog
  Pfam annotation: Domain name=MMR_HSR1; Domain location=12-60; Score =17.5; E_value=2.7e-05; Accession=PF01926.13; Description=GTPase of unknown function

SEQ ID NO: 11668 - protein, 51 aa, Zea mays
  Coding DNA Sequence Number=SeqID_5628
  Homolog annotation: Hit_ID=Q3KC32; Match level="QueryCoverage=72%, HitCoverage=48%, E-value=1e-09, Identity=81%"; Hit description =Putative uncharacterized protein
MPLNQRHCLFGSSVMKREQVREQHAGGHISATHVIQNPADTGEWIVFFKKS

SEQ ID NO: 11669 - protein, 51 aa, Zea mays; identical to SEQ ID NO: 11668
  Coding DNA Sequence Number=SeqID_5629
  Homolog annotation: Hit_ID=Q3KC32; Match level="QueryCoverage=72%, HitCoverage=48%, E-value=1e-09, Identity=81%"; Hit description =Putative uncharacterized protein

SEQ ID NO: 11670 - protein, 200 aa, Zea mays
  misc_feature (22)..(22): Xaa can be any naturally occurring amino acid
  misc_feature (200)..(200): Xaa can be any naturally occurring amino acid
  Coding DNA Sequence Number=SeqID_5630
  Gene Ontology: Cellular component=integral to membrane
  Homolog annotation: Hit_ID=Q398C0; Match level="QueryCoverage=85%, HitCoverage=54%, E-value=8e-30, Identity=42%"; Hit description =Putative FecR
  Pfam annotation: Domain name=FecR; Domain location=58-148; Score =50.7; E_value=5e-12; Accession=PF04773.4; Description=FecR protein
GSSWRRRRASCRPRRRAAPASXRPARRAFLGGAVAACGAWLAFKPPLGLWPAVDELTADVRSGTGEQRRVALAGDASVQLNTQTRINLSRSGPAQQIDLLAGEVELLTSGQLVSLTAGAGRVSATSGCVNVRYTDGLVRVTCLEGSARVALRKDSIELTAAQQVVLGAGGASGPQRVDPDQVTAWRRGVLEFNNVPLAQX

SEQ ID NO: 11671 - protein, 243 aa, Zea mays
  misc_feature (215)..(215): Xaa can be any naturally occurring amino acid
  misc_feature (218)..(221): Xaa can be any naturally occurring amino acid
  misc_feature (224)..(227): Xaa can be any naturally occurring amino acid
  misc_feature (232)..(234): Xaa can be any naturally occurring amino acid
  misc_feature (236)..(236): Xaa can be any naturally occurring amino acid
  misc_feature (242)..(243): Xaa can be any naturally occurring amino acid
  Coding DNA Sequence Number=SeqID_5631
  Gene Ontology: Mol. function=transporter activity; Cellular component= outer membrane-bounded periplasmic space; Biological process=transport
  Homolog annotation: Hit_ID=A1FDK1; Match level="QueryCoverage=99%, HitCoverage=70%, E-value=1e-114, Identity=85%"; Hit description =Extracellular solute-binding protein, family 1 precursor
  Pfam annotation: Domain name=SBP_bac_1; Domain location=5-219; Score =1.7; E_value=0.0083; Accession=PF01547.15; Description=Bacterial extracellular solute-binding protein
MFKPLALAAAVLTAFSLNAFAAKTELTVYTALEAEQLKTYKQAFEKANPDIDIKWVRDSTGIITAKLLAEKARPQADVVWGLAASSLAILDQQGMLQNYAPKDLGKIGANYRDAANPPAWVGMDVWAATICFNTVEAEKQGLSKPVSWQDLTKPEYKGKIVMPNPASSGTGFLDVSAWLQTFGEKQGWQYMDDLHQNIGQYVHSGSKPCKLAASXEFXXXXSFXXXXVQLKXXXAXLDIILXX

SEQ ID NO: 11672 - protein, 308 aa, Zea mays
  misc_feature (2)..(2): Xaa can be any naturally occurring amino acid
  misc_feature (4)..(5): Xaa can be any naturally occurring amino acid
  misc_feature (7)..(14): Xaa can be any naturally occurring amino acid
  misc_feature (17)..(20): Xaa can be any naturally occurring amino acid
  misc_feature (23)..(25): Xaa can be any naturally occurring amino acid
  misc_feature (30)..(31): Xaa can be any naturally occurring amino acid
  misc_feature (38)..(38): Xaa can be any naturally occurring amino acid
  misc_feature (45)..(46): Xaa can be any naturally occurring amino acid
  misc_feature (308)..(308): Xaa can be any naturally occurring amino acid
  Coding DNA Sequence Number=SeqID_5632
  Gene Ontology: Mol. function=transferase activity; Biological process= biosynthetic process
  Homolog annotation: Hit_ID=Q4KJC6; Match level="QueryCoverage=95%, HitCoverage=78%, E-value=1e-124, Identity=76%"; Hit description =Lipopolysaccharide core biosynthesis protein RfaG
  Pfam annotation: Domain name=Glycos_transf_1; Domain location=160 -306; Score=80.8; E_value=4.5e-21; Accession=PF00534.10; Description =Glycosyl transferases group 1
EXEXXQXXXXXXXXTLXXXXDVXXXLRSAXXPVKALVXHRRNEKXXAWIQADLAKRPVDRVVGFNKMPGLDLYFAADGVFEDKAQTLRNPMYRWFGRYKHFAEYERAVFDKHAKTQIMVLSEHQQQLFTQYYGTQAERFHLLPPGIARDRRAPPNAAEVRAEFRREFGLAEDDLLLVQIGSGFKTKGVDRSLKAVAALPSNLKKRTRLFVIGQDDPKVFQLQSAALGLGDQVQFFKGRSDIPRFLLGADLLIHPAYNEAAGMVLIEAVVAGLPVLVSKVCGYAFYIDKAQNGRVLDEPFEQAQLNQYX

SEQ ID NO: 11673 - protein, 99 aa, Zea mays
  Coding DNA Sequence Number=SeqID_5633
  Gene Ontology: Mol. function=hydrolase activity; Biological process =metabolic process
  Homolog annotation: Hit_ID=Q3M5J4; Match level="QueryCoverage=97%, HitCoverage=19%, E-value=2e-41, Identity=79%"; Hit description =Amidohydrolase 2
SFYFGSESDDRTVAAAFNDKVNPLGVKINAIWSSDIGHWDVPDLTAPLAESWDLVEQGVISAQDFKALVFGNPYRFYTEANPAFFQGTAIERKLAAPAR

SEQ ID NO: 11674 - protein, 103 aa, Zea mays
  Coding DNA Sequence Number=SeqID_5634
NDRLHSGSQRGGQPWILPVRRTRLVRPGGTVCLINAINGPACRTLPGQEKQGKNRPTLGNRAGQARQKAMFADLKHLSHHAAWRRQLEMLLESAGEGIYGIDL

SEQ ID NO: 11675 - protein, 266 aa, Zea mays
  misc_feature (230)..(231): Xaa can be any naturally occurring amino acid
  misc_feature (243)..(247): Xaa can be any naturally occurring amino acid
  misc_feature (253)..(255): Xaa can be any naturally occurring amino acid
  misc_feature (260)..(266): Xaa can be any naturally occurring amino acid
  Coding DNA Sequence Number=SeqID_5636
  Gene Ontology: Mol. function=transferase activity, transferring phosphorus-containing groups; Cellular component=cytoplasm; Biological process=phosphoenolpyruvate-dependent sugar phosphotransferase system
  Homolog annotation: Hit_ID=Q3KI70; Match level="QueryCoverage=97%, HitCoverage=27%, E-value=1e-113, Identity=83%"; Hit description =Phosphoenolpyruvate--protein phosphotransferase
  Pfam annotation: Domain name=PEP-utilizers_C; Domain location=20-264; Score=284.7; E_value=1.8e-82; Accession=PF02896.8; Description=PEP -utilising enzyme, TIM barrel domain
ADAATLQRATVERDTREQRLQAAAAQRHEPALTRDGHAVEVFANIGESAGVASAVEQGAEGIGLLRTELIFMAHKQAPDEATQEAEYRRVLDGLGGRPLVVRTLDVGGDKPLPYWPIAKEENPFLGVRGIRLTLQRPQIMEAQLRALLRSADNRPLRIMFPMVGSVDEWRQARDMTERLRLEIPVADLQLGIMIEVPSAALLAPVLAKEVDFFSVGTNDLTQYTLAIDRXXPTLSAQADGLHXXXXXLIDITXXXAHAHXXXXXXX

SEQ ID NO: 11676 - protein, 159 aa, Zea mays
  misc_feature (159)..(159): Xaa can be any naturally occurring amino acid
  Coding DNA Sequence Number=SeqID_5637
  Gene Ontology: Cellular component=integral to membrane; Biological process=protein secretion
  Homolog annotation: Hit_ID=Q48HV2; Match level="QueryCoverage=80%, HitCoverage=53%, E-value=3e-39, Identity=63%"; Hit description =General secretion pathway protein GspK, putative
MKRQRGVALLLVLWVLALLSLLLGGLAGWVQLESRQALWHRQHTQALLAAEAGVALAMQALADPLQRKQWIADGREMPLVFDDAQLHVSLHSERGKLYLNSAETADFARLALACGATQAQASRLARDLEVRRNAGLAPFRVVEEVRQLPGMTQALYSRX

SEQ ID NO: 11677 - protein, 224 aa, Zea mays
  misc_feature (224)..(224): Xaa can be any naturally occurring amino acid
  Coding DNA Sequence Number=SeqID_5638
  Gene Ontology: Mol. function=siderophore-iron transmembrane transporter activity; Cellular component=cell outer membrane; Biological process=siderophore transport
  Homolog annotation: Hit_ID=B0KIR4; Match level="QueryCoverage=45%, HitCoverage=12%, E-value=5e-42, Identity=78%"; Hit description=TonB -dependent siderophore receptor precursor
  Pfam annotation: Domain name=Plug; Domain location=116-218; Score =86.6; E_value=7.7e-23; Accession=PF07715.5; Description=TonB -dependent Receptor Plug Domain
  Pfam annotation: Domain name=STN; Domain location=27-78; Score=22.1; E_value=0.002; Accession=PF07660.4; Description=Secretin and TonB N terminus short domain
  Pfam module annotation: Pfam domain module=Plug::STN; Domain location= 116-218::27-78
IQARQAYDIPPGPLGKAIASFALASGLSLAFEPAWTDGLHSPGVSGELSRAEAARRLLAGSGLEMVARADGSYTLRKTVSDATTLPAITVTGASGYAGANPYLVGGATTATKTATPLMETTQSISVVTQERMAAQGAQTVTDALSYTAGVHANVAGDNPTDNTLMVRGFQQLTTNAFTDGLRNNNTGYFAPEPYGMDRIEVLKGPSSVMYGQGSPGGIINIVSX

SEQ ID NO: 11678 - protein, 224 aa, Zea mays; identical to SEQ ID NO: 11677
  misc_feature (224)..(224): Xaa can be any naturally occurring amino acid
  Coding DNA Sequence Number=SeqID_5639
  Gene Ontology: Mol. function=siderophore-iron transmembrane transporter activity; Cellular component=cell outer membrane; Biological process=siderophore transport
  Homolog annotation: Hit_ID=B0KIR4; Match level="QueryCoverage=45%, HitCoverage=12%, E-value=5e-42, Identity=78%"; Hit description=TonB -dependent siderophore receptor precursor
  Pfam annotation: Domain name=Plug; Domain location=116-218; Score =86.6; E_value=7.7e-23; Accession=PF07715.5; Description=TonB -dependent Receptor Plug Domain
  Pfam annotation: Domain name=STN; Domain location=27-78; Score=22.1; E_value=0.002; Accession=PF07660.4; Description=Secretin and TonB N terminus short domain
  Pfam module annotation: Pfam domain module=Plug::STN; Domain location= 116-218::27-78

SEQ ID NO: 11679 - protein, 94 aa, Zea mays
  Coding DNA Sequence Number=SeqID_5640
  Gene Ontology: Mol. function=transporter activity; Cellular component= integral to membrane; Biological process=transport
  Homolog annotation: Hit_ID=Q0K040; Match level="QueryCoverage=100%, HitCoverage=21%, E-value=7e-40, Identity=80%"; Hit description=MFS transporter, MHS family
MAKQNETAVRKVVAASLIGATIEWYDFFLYGVVAGIVFNKLYFPTGDPLVSTMLAYTTFAVGFITRPLGGLVFGHFGDRIGRKSMLVMTLMIMG

SEQ ID NO: 11680 - protein, 50 aa, Zea mays
  Coding DNA Sequence Number=SeqID_5641
  Homolog annotation: Hit_ID=A9IDC5; Match level="QueryCoverage=66%, HitCoverage=11%, E-value=6e-08, Identity=72%"; Hit description =Probable solute-binding protein
IGLAATLAPAAHADTLQDIKARGKFICGTMGTAEPFSFQDPKTRAIVGYE

SEQ ID NO: 11681 - protein, 51 aa, Zea mays
  misc_feature (1)..(1): Xaa can be any naturally occurring amino acid
  Coding DNA Sequence Number=SeqID_5642
XFVADDGAGLGILEAERLGRAHGAADELAARLDVLQRVRVGGGRQGCGQAD

SEQ ID NO: 11682 - protein, 246 aa, Zea mays
  Coding DNA Sequence Number=SeqID_5643
  Homolog annotation: Hit_ID=A7HS19; Match level="QueryCoverage=97%, HitCoverage=98%, E-value=2e-45, Identity=42%"; Hit description =Abortive infection protein precursor
  Pfam annotation: Domain name=Abi; Domain location=147-245; Score =36.2; E_value=1.2e-07; Accession=PF02517.7; Description=CAAX amino terminal protease family
HRVIADAFTVLIHYGIYLLPGLILFGLWFGLTPKTLPGVRIVILLLAFVLMRDAMTPLGIWSLSREVQIQFTANPFVLAALGGLSLGLIALLARLAPELWQLTVLFKGNRAVGLAVGLVAGSLIGLPLRLYQGIEPAAIPAYWTWLMGMLVLAYCANALEEVLFRGFLQGYLEQHVRPLRAALLSGLAFAACHSFLALSVTQLGWPVLAFTLIEGVACGLVRMRYGVVAATATHGTAILLIAVPMV

SEQ ID NO: 11683 - protein, 246 aa, Zea mays; identical to SEQ ID NO: 11682
  Coding DNA Sequence Number=SeqID_5644
  Homolog annotation: Hit_ID=A7HS19; Match level="QueryCoverage=97%, HitCoverage=98%, E-value=2e-45, Identity=42%"; Hit description =Abortive infection protein precursor
  Pfam annotation: Domain name=Abi; Domain location=147-245; Score =36.2; E_value=1.2e-07; Accession=PF02517.7; Description=CAAX amino terminal protease family

SEQ ID NO: 11684 - protein, 211 aa, Zea mays
  Coding DNA Sequence Number=SeqID_5645
  Gene Ontology: Mol. function=proline:sodium symporter activity; Cellular component=integral to membrane; Biological process=sodium ion transport
  Homolog annotation: Hit_ID=Q57023; Match level="QueryCoverage=100%, HitCoverage=42%, E-value=1e-103, Identity=91%"; Hit description =Proline permease
  Pfam annotation: Domain name=SSF; Domain location=35-211; Score= -36.7; E_value=1.5e-07; Accession=PF00474.8; Description =Sodium:solute symporter family
MSVSNPTLITFVIYIAAMVLIGFMAYRSTNNLSDYILGGRSLGSVVTALSAGASDMSGWLLMGLPGAIYMSGLSESWIAIGLIVGAYLNWLFVAGRLRVQTEHNGDALTLPDYFSSRFEDKSGLLRIISAVVILVFFTIYCASGIVAGARLFESTFGMSYETALWAGAAATIAYTFVGGFLAVSWTDTVQATLMIFALLLTPIIVLLATGG

SEQ ID NO: 11685 - protein, 183 aa, Zea mays
  misc_feature (183)..(183): Xaa can be any naturally occurring amino acid
  Coding DNA Sequence Number=SeqID_5646
  Gene Ontology: Mol. function=protein-N(PI)-phosphohistidine-sugar phosphotransferase activity; Cellular component=integral to membrane; Biological process=phosphoenolpyruvate-dependent sugar phosphotransferase system
  Homolog annotation: Hit_ID=A4VI86; Match level="QueryCoverage=99%, HitCoverage=31%, E-value=2e-51, Identity=62%"; Hit description =Phosphotransferase system, fructose-specific IIBC component
  Pfam annotation: Domain name=PTS_EIIC; Domain location=12-180; Score=- 62.1; E_value=0.025; Accession=PF02378.9; Description=Phosphotransfera se system, EIIC
KPEKTGVYKHLLTGVSFMLPMVVAGGLLIALSFVFGIHAFEEKGTLAAALKTVGDQAFMLMVPLLAGYIAYSIADRPGLAPGMIGGLLASTLGAGFIGGIFAGFLAGYCVKFISRAIRLPQSLEALKPILIIPLLASLFTGLAMIYLVGPPVAKMLTGLTDFLSTMGTTNAVLLGILLGGMMX

SEQ ID NO: 11686 - protein, 227 aa, Zea mays
  misc_feature (227)..(227): Xaa can be any naturally occurring amino acid
  Coding DNA Sequence Number=SeqID_5647
  Gene Ontology: Mol. function=oxidoreductase activity; Cellular component=integral to membrane; Biological process=electron transport
  Homolog annotation: Hit_ID=A1FPQ7; Match level="QueryCoverage=94%, HitCoverage=29%, E-value=4e-73, Identity=62%"; Hit description =Aldehyde oxidase and xanthine dehydrogenase, molybdopterin binding
  Pfam annotation: Domain name=Ald_Xan_dh_C; Domain location=5-119; Score=72.2; E_value=1.8e-18; Accession=PF01315.12; Description =Aldehyde oxidase and xanthine dehydrogenase, ab hammerhead domain
LLKVTGQARYAGEFPEDGLLHGSVVSSNIAKGRVIRIDASKALALPGVVMVLDHLNRPKLASYDDSYADADAADGSPFRPLYNDRVLYSGQPLALVIADNLELARHAGSLVEIEYTAEPSETDLLALQDQAHPSPQTPPKPRGNFQAEWTGAATSLDLHYSTPIEHHNPMEPHASTVLYQPDGTLHIHDKTQGPQNCQAYVQKVFGLDKSQVRIFAAFVGGAFGSGX

SEQ ID NO: 11687 - protein, 163 aa, Zea mays
  misc_feature (1)..(1): Xaa can be any naturally occurring amino acid
  Coding DNA Sequence Number=SeqID_5648
  Gene Ontology: Mol. function=hydrolase activity; Cellular component =integral to membrane
  Homolog annotation: Hit_ID=A0GFV8; Match level="QueryCoverage=98%, HitCoverage=50%, E-value=1e-69, Identity=77%"; Hit description =Dienelactone hydrolase
  Pfam annotation: Domain name=DLH; Domain location=1-160; Score=39.4; E_value=5.8e-10; Accession=PF01738.9; Description=Dienelactone hydrolase family
XEEEEAHHLMDGLDFGDAVSQDIKGAVQYLQADSKKVGVTGYCMGGALTLLALNAIPELAAGVVWYGFPPLEYLDASKIKAPLIGHWGTQDAFFNIDTVAELESKLHAAGVDATFHRYLARHAFANETAIGDGRIADTQYDAAWSQLAWDRTLTFFGKTLWQA

SEQ ID NO: 11688 - protein, 209 aa, Zea mays
  Coding DNA Sequence Number=SeqID_5649
  Gene Ontology: Mol. function=transcription factor activity; Cellular component=intracellular; Biological process=regulation of transcription, DNA-dependent
  Homolog annotation: Hit_ID=Q12B21; Match level="QueryCoverage=88%, HitCoverage=87%, E-value=1e-39, Identity=49%"; Hit description =Transcriptional regulator, MarR family
  Pfam annotation: Domain name=MarR; Domain location=92-159; Score =14.9; E_value=0.0017; Accession=PF01047.13; Description=MarR family
MSTQPILLRAQVIGLAFVLVNGLVLNHSRGMEELKMPIEKTDKPDDRADLLSLLGDVACTNNALRRAARRLGQLYDEALAPIGLKATQVGLLGEITRLSAVDEQAGPTLQEVAGRLAILMSALTHAMKPLVRDGIVELRPDALDKRTKRCVLTPKGEALFNEALVFWASANNRVEEVLGHDSAAQLRGMADHIASDAFLADYNSQSAQA

SEQ ID NO: 11689 - protein, 209 aa, Zea mays; identical to SEQ ID NO: 11688
  Coding DNA Sequence Number=SeqID_5650
  Gene Ontology: Mol. function=transcription factor activity; Cellular component=intracellular; Biological process=regulation of transcription, DNA-dependent
  Homolog annotation: Hit_ID=Q12B21; Match level="QueryCoverage=88%, HitCoverage=87%, E-value=1e-39, Identity=49%"; Hit description =Transcriptional regulator, MarR family
  Pfam annotation: Domain name=MarR; Domain location=92-159; Score =14.9; E_value=0.0017; Accession=PF01047.13; Description=MarR family

SEQ ID NO: 11690 - protein, 54 aa, Zea mays
  Coding DNA Sequence Number=SeqID_5651
  Homolog annotation: Hit_ID=A9IHF3; Match level="QueryCoverage=92%, HitCoverage=15%, E-value=9e-20, Identity=86%"; Hit description =Putative uncharacterized protein
MNKEPEFLAKGHDPADPSPWLALYLDRSTPLPDKVKKAWLTDSSCGSRQYLLPF

SEQ ID NO: 11691 - protein, 54 aa, Zea mays; identical to SEQ ID NO: 11690
  Coding DNA Sequence Number=SeqID_5652
  Homolog annotation: Hit_ID=A9IHF3; Match level="QueryCoverage=92%, HitCoverage=15%, E-value=9e-20, Identity=86%"; Hit description =Putative uncharacterized protein

SEQ ID NO: 11692 - protein, 191 aa, Zea mays
  Coding DNA Sequence Number=SeqID_5653
  Gene Ontology: Mol. function=gamma-glutamyltransferase activity; Cellular component=periplasmic space; Biological process=glutathione biosynthetic process
  Homolog annotation: Hit_ID=Q3KAA1; Match level="QueryCoverage=99%, HitCoverage=33%, E-value=6e-98, Identity=91%"; Hit description=Gamma- glutamyltransferase 1. Threonine peptidase. MEROPS family T03 precursor
  Pfam annotation: Domain name=G_glu_transpept; Domain location=1-185; Score=-141.7; E_value=1.6e-09; Accession=PF01019.11; Description =Gamma-glutamyltranspeptidase
GGNAVSVTYTLNDWFGAGVMASKTGVILNDEMDDFTSKIGVPNMYGLVQGEANAIAPGKTPLSSMSPTIVTKDGKAVMVVGTPGGSRIITATLLTILNVIDYKMNIQEAVDAPRFHQQWLPEATNIERFALSPDTQKILEGWGHKFAGPQDANHLAAILVGAPSLDGKPVGNNRFYGANDPRRNTGLSLGY

SEQ ID NO: 11693 - protein, 103 aa, Zea mays
  misc_feature (1)..(1): Xaa can be any naturally occurring amino acid
  Coding DNA Sequence Number=SeqID_5654
  Gene Ontology: Mol. function=single-stranded DNA binding; Biological process=DNA replication
  Homolog annotation: Hit_ID=Q4ZWA0; Match level="QueryCoverage=86%, HitCoverage=58%, E-value=3e-32, Identity=70%"; Hit description =Single-stranded DNA-binding protein
XRANVYFDNSIPDGKGGYEDRGGFWANVEWWHKDAEHYSQLFQKGMRVLVSGRAVMDRWKNDDGEFEALKIQASRVGMLPHRVTMVNLAPSQNQNSQQSNRPE

SEQ ID NO: 11694 - protein, 103 aa, Zea mays; identical to SEQ ID NO: 11693
  misc_feature (1)..(1): Xaa can be any naturally occurring amino acid
  Coding DNA Sequence Number=SeqID_5655
  Gene Ontology: Mol. function=single-stranded DNA binding; Biological process=DNA replication
  Homolog annotation: Hit_ID=Q4ZWA0; Match level="QueryCoverage=86%, HitCoverage=58%, E-value=3e-32, Identity=70%"; Hit description =Single-stranded DNA-binding protein

SEQ ID NO: 11695 - protein, 218 aa, Zea mays
  misc_feature (218)..(218): Xaa can be any naturally occurring amino acid
  Coding DNA Sequence Number=SeqID_5656
  Gene Ontology: Mol. function=carbon-carbon lyase activity; Cellular component=mitochondrion; Biological process=aromatic compound metabolic process
  Homolog annotation: Hit_ID=A9IQ56; Match level="QueryCoverage=73%, HitCoverage=61%, E-value=4e-73, Identity=83%"; Hit description =Putative Aldolase
  Pfam annotation: Domain name=HpcH_HpaI; Domain location=78-216; Score= 37.6; E_value=2.5e-10; Accession=PF03328.5; Description=HpcHHpaI aldolase family
  Subcellular localization annotation: CTP_CleavageSite=46; ConfidenceScore=5.66e-01
ASWWWATTPRRSRPSSNPKSPSGARRPRPPAPAWTSVRYQLPPARRAAPGVQYDGKPAAMTSPLPNRFRQRILARERLIGFWMCMSSHITAEVAGLADFDWLLLDGEHSPNTVPMFLQQLQALQGSASAAIGRPTWNDPVEIKRLLDIGFYNLLIPFIESEDDARRAVAATRYPPQGIRGVAGMQRSNRYGTVPDYLKTINDNICVLLQIESRPGIEX

SEQ ID NO: 11696 - protein, 130 aa, Zea mays
  Coding DNA Sequence Number=SeqID_5657
  Gene Ontology: Mol. function=nucleic acid binding; Cellular component= plasma membrane; Biological process=intracellular protein transport across a membrane
  Homolog annotation: Hit_ID=Q3K7T9; Match level="QueryCoverage=99%, HitCoverage=14%, E-value=9e-54, Identity=80%"; Hit description =Protein translocase subunit secA
  Pfam annotation: Domain name=SEC-C; Domain location=110-130; Score =47.7; E_value=4e-11; Accession=PF02810.6; Description=SEC-C motif
  Pfam annotation: Domain name=SecA_SW; Domain location=1-50; Score= -98.5; E_value=0.01; Accession=PF07516.3; Description=SecA Wing and Scaffold domain
  Pfam module annotation: Pfam domain module=SEC-C::SecA_SW; Domain location=110-130::1-50
MDHLRHGIHLRGYAQKNPKQEYKRESFTLFSELLDSIKRDSIRVLSHVQVRREDPIEEEARLRQEAEALAARMQFQHDEAPGLEAPEVLGEEVDVALAQAPVRNEQKLGRNELCWCGSGKKFKHCHGEIN

SEQ ID NO: 11697 - protein, 302 aa, Zea mays
  misc_feature (260)..(261): Xaa can be any naturally occurring amino acid
  misc_feature (267)..(267): Xaa can be any naturally occurring amino acid
  misc_feature (271)..(272): Xaa can be any naturally occurring amino acid
  misc_feature (276)..(276): Xaa can be any naturally occurring amino acid
  misc_feature (285)..(289): Xaa can be any naturally occurring amino acid
  misc_feature (296)..(297): Xaa can be any naturally occurring amino acid
  Coding DNA Sequence Number=SeqID_5658
  Gene Ontology: Mol. function=excinuclease ABC activity; Cellular component=excinuclease repair complex; Biological process=response to DNA damage stimulus
  Homolog annotation: Hit_ID=Q3KBH7; Match level="QueryCoverage=97%, HitCoverage=33%, E-value=1e-136, Identity=83%"; Hit description =Excinuclease ABC, A subunit
DIPRDALVVFTGVSGSGKSSLAFSTVYAEAQRRYFESVAPYARRLIDQVGVPDVDSIEGLPPAVALQQQRGTPSTRSSVGSVTTLSSLIRMLYSRAGSYPAGQPMLYAEDFSPNLPQGACPQCHGLGRVYEVTEALMVPDPSLTIRQRAVASWPLAWQGQNQRDILVTLGYDVDIPWRDLPKKQRDWILFTEETPTVPVYAGFTPAQTRDALKRKLEPSYQGTFTGARRYILHTFTHSQSALMKKRVSQFMQGSPCPLCXXKRLNKXALSXXFAGXDIGELSQMXXXXXAELLRPXXQSAAS

SEQ ID NO: 11698 - protein, 230 aa, Zea mays
  misc_feature (9)..(10): Xaa can be any naturally occurring amino acid
  misc_feature (18)..(18): Xaa can be any naturally occurring amino acid
  misc_feature (149)..(153): Xaa can be any naturally occurring amino acid
  misc_feature (219)..(220): Xaa can be any naturally occurring amino acid
  misc_feature (230)..(230): Xaa can be any naturally occurring amino acid
  Coding DNA Sequence Number=SeqID_5659
  Gene Ontology: Mol. function=oxidoreductase activity; Cellular component=integral to membrane; Biological process=electron transport
  Homolog annotation: Hit_ID=A9I7P7; Match level="QueryCoverage=99%, HitCoverage=57%, E-value=2e-97, Identity=78%"; Hit description =Putative uncharacterized protein
  Pfam annotation: Domain name=HI0933_like; Domain location=1-229; Score=17.7; E_value=2.1e-18; Accession=PF03486.5; Description=HI0933- like protein
AGGVQWRMXXQVAEVAHXEAGFELRTSQGAIRAAKLVVATGGMAIPQLGATDFGLKLARQFGLKVVEPRPALVPLTFDAAHWQPLAELSGVALEVNLATGQGKARGEFLEDLLFTHRGLSGPAILQISSFWKPGEPIVIDLAPGRDLAXXXXXAKSGNRQQLHTVLAGLWPKRLADRWLQLAEQGGKPGLAALRLADAPDKTLRALAQDIHQWTLVPSXXAGYKKAEVMX

SEQ ID NO: 11699 - protein, 288 aa, Zea mays
  misc_feature (266)..(267): Xaa can be any naturally occurring amino acid
  misc_feature (275)..(276): Xaa can be any naturally occurring amino acid
  misc_feature (279)..(281): Xaa can be any naturally occurring amino acid
  misc_feature (284)..(284): Xaa can be any naturally occurring amino acid
  misc_feature (286)..(288): Xaa can be any naturally occurring amino acid
  Coding DNA Sequence Number=SeqID_5660
  Gene Ontology: Biological process=response to stress
  Homolog annotation: Hit_ID=Q4KCZ4; Match level="QueryCoverage=98%, HitCoverage=38%, E-value=1e-144, Identity=89%"; Hit description=YcaO- like fatty acid binding protein
  Pfam annotation: Domain name=YcaO; Domain location=88-288; Score =33.3; E_value=5.4e-11; Accession=PF02624.7; Description=YcaO-like family
ENRYNQIFKIQVELPADISDKDRQGILRSIDRCTVKKVVQAGPEFVIEEVENLDADAQALLMPSAASDAGTYIAGKDLPLETTIANMSAILAGLGMKIEIASWRNIVPNVWSLHIRDAHSPMCFTNGKGATKEGALASALGEFIERLNCNFFYNDQFWGEDIANAAFVHYPDERWFKPGRKDELPPEILDAHCLHIYNRDGELRGSHLYDTNSGNEERGIVSLPFVRQSDGEVVYFPSNLIENLYLSNGMSAGNTLAEAQVQCLSXXFERAVKRXXIEXXXALXDXXX

SEQ ID NO: 11700 - protein, 118 aa, Zea mays
  misc_feature (118)..(118): Xaa can be any naturally occurring amino acid
  Coding DNA Sequence Number=SeqID_5661
  Gene Ontology: Mol. function=transporter activity; Cellular component= integral to membrane; Biological process=transport
  Homolog annotation: Hit_ID=Q3K823; Match level="QueryCoverage=99%, HitCoverage=34%, E-value=2e-56, Identity=90%"; Hit description =Substrate-binding region of ABC-type glycine betaine transport system precursor
TGWTSEIVNSQKLKAYGLTDTFVNFRTGSGAALDAEVASSIRRGKPVLFYYWSPTPLLGRFKLIKLEEPPFNAEAWKTLADANNPHPIGTRSMPAHLAIGVSASFKAQYPQLVTFFEX

SEQ ID NO: 11701 - protein, 188 aa, Zea mays
  misc_feature (1)..(1): Xaa can be any naturally occurring amino acid
  Coding DNA Sequence Number=SeqID_5662
  Gene Ontology: Mol. function=transporter activity; Cellular component= membrane; Biological process=transport
  Homolog annotation: Hit_ID=Q3KA22; Match level="QueryCoverage=99%, HitCoverage=38%, E-value=1e-83, Identity=83%"; Hit description=RND efflux system, outer membrane lipoprotein, NodT precursor
XQAARLTLAANVAKAYSDLGQAHIVRDLANDDLKRTRQMLDLGKRRLNSGIDSQYQYQQTESLEASSQSQLIDAEKQLQSAKIALAVLLGKGPDRGSELVRPNVLKPSAVAVPSVLPAELVGRRPDLIAARWRVEAASKNIDASKTRFYPNLNLSASAGAESLLGDAMFGSASRFFSIAPTISLPIFD

SEQ ID NO: 11702 - protein, 52 aa, Zea mays
  Coding DNA Sequence Number=SeqID_5663
  Gene Ontology: Mol. function=glycerophosphodiester phosphodiesterase activity; Biological process=glycerol metabolic process
  Homolog annotation: Hit_ID=A5NM26; Match level="QueryCoverage=84%, HitCoverage=9%, E-value=1e-13, Identity=75%"; Hit description =Glycerophosphoryl diester phosphodiesterase precursor
YSWTVAGDPRSFGAMLTPAGLAEVKTYADGIGPWKPQAMSLTAASAQTPGLP

SEQ ID NO: 11703 - protein, 52 aa, Zea mays; identical to SEQ ID NO: 11702
  Coding DNA Sequence Number=SeqID_5664
  Gene Ontology: Mol. function=glycerophosphodiester phosphodiesterase activity; Biological process=glycerol metabolic process
  Homolog annotation: Hit_ID=A5NM26; Match level="QueryCoverage=84%, HitCoverage=9%, E-value=1e-13, Identity=75%"; Hit description =Glycerophosphoryl diester phosphodiesterase precursor

SEQ ID NO: 11704 - protein, 261 aa, Zea mays
  misc_feature (234)..(236): Xaa can be any naturally occurring amino acid
  misc_feature (241)..(241): Xaa can be any naturally occurring amino acid
  misc_feature (252)..(252): Xaa can be any naturally occurring amino acid
  Coding DNA Sequence Number=SeqID_5665
  Gene Ontology: Mol. function=transferase activity, transferring phosphorus-containing groups; Cellular component=membrane; Biological process=regulation of transcription, DNA-dependent
  Homolog annotation: Hit_ID=Q8VRN8; Match level="QueryCoverage=94%, HitCoverage=33%, E-value=4e-66, Identity=51%"; Hit description =Sensor protein
  Pfam annotation: Domain name=PAS_2; Domain location=11-115; Score =105.5; E_value=1.6e-28; Accession=PF08446.1; Description=PAS fold
MSTVDTLIDDCANEPIHIPGSIQPHGLLLTLSEPALEVLQASSNLTVALGLGAESASGQALASVLGSKAAAQVSRALADLDADEEEVHQLTLDGYAYDILLHRHQGLLFLELERTMALEHRAVGQLARTLRRLQSAKTLESLYQTCVTEIRSLTGYDRVTLYRFEQEGHGKVIGEALSEGMQPYLGLCFPASDIPPQARELYRLNWIRVIPDAEYQPVPILPALRPDNGQPLDXXXAVLRXVSPVHCHYLKXEHFAAQGRL

SEQ ID NO: 11705 - protein, 142 aa, Zea mays
  misc_feature (142)..(142): Xaa can be any naturally occurring amino acid
  Coding DNA Sequence Number=SeqID_5666
  Gene Ontology: Mol. function=oxidoreductase activity; Cellular component=membrane; Biological process=electron transport
  Homolog annotation: Hit_ID=Q3K6H5; Match level="QueryCoverage=99%, HitCoverage=42%, E-value=4e-56, Identity=77%"; Hit description =Cytochrome bd ubiquinol oxidase, subunit II
  Pfam annotation: Domain name=Cyto_ox_2; Domain location=3-142; Score =23.8; E_value=1.8e-13; Accession=PF02322.6; Description=Cytochrome oxidase subunit II
MGIDLPLIWAVIIIFGIMMYVVMDGFDLGIGILFPFIPGKTDRDVMMNTVAPVWDGNETWLVLGGAALFGAFPLAYSVVLSALYLPLMLMLIGLIFRGVAFEFRFKAKDDKRHLWDKAFIGGSLAATFFQGVALGAFIDGIX

SEQ ID NO: 11706 - protein, 175 aa, Zea mays
  misc_feature (1)..(1): Xaa can be any naturally occurring amino acid
  Coding DNA Sequence Number=SeqID_5667
  Gene Ontology: Mol. function=transporter activity; Cellular component= outer membrane-bounded periplasmic space; Biological process=transport
  Homolog annotation: Hit_ID=Q882K0; Match level="QueryCoverage=98%, HitCoverage=61%, E-value=5e-75, Identity=78%"; Hit description=Amino acid ABC transporter, periplasmic amino acid-binding protein
  Pfam annotation: Domain name=SBP_bac_3; Domain location=1-160; Score=- 77.9; E_value=0.0079; Accession=PF00497.10; Description=Bacterial extracellular solute-binding proteins, family 3
XLIANMEWTAERGEILGFVPTPFYRIGGTAAVLKDSKITHWEDLKGQPVCTSQGSSYVKPLTELSAQIKGFKSSSESLLALRGNNCVAAVHDSTLINPLINDSAEWKDYRAISPELNPAPSVIWTRRGENDTQAKLDPIIKELHRSGWLIDAQTRNHITPASPALVELQKQFKGA

SEQ ID NO: 11707 - protein, 267 aa, Zea mays
  Coding DNA Sequence Number=SeqID_5668
  Gene Ontology: Mol. function=hydrolase activity; Cellular component =cell wall; Biological process=spore germination
  Homolog annotation: Hit_ID=Q8W6J4; Match level="QueryCoverage=26%, HitCoverage=3%, E-value=7e-16, Identity=60%"; Hit description =Putative uncharacterized protein orf33
MMPSDRTQWNSFLDQEVASSGLRQRATGNSSTARRTAEADDESGSVEKVGTAMADLLAGRFLAFAGKGVAGGYKGARDRLHARSDDALAERLINPEAAAKARDVLPGAPSSAPAQLAAPGTVTSSLGGAGPQVKPALLNHAASPRLQVRQDDEDQDAPQSVARPQPGGGSRLIETKGAPSGEAKPPASPEEVPGRNDLLPSSRADRASLPPAEALDLADHSAATSPDNDLPEPTQAQKDAGNYRKGHIKLQGLDISIENPRGSDRKG

SEQ ID NO: 11708 - protein, 267 aa, Zea mays; identical to SEQ ID NO: 11707
  Coding DNA Sequence Number=SeqID_5669
  Gene Ontology: Mol. function=hydrolase activity; Cellular component =cell wall; Biological process=spore germination
  Homolog annotation: Hit_ID=Q8W6J4; Match level="QueryCoverage=26%, HitCoverage=3%, E-value=7e-16, Identity=60%"; Hit description =Putative uncharacterized protein orf33

SEQ ID NO: 11709 - protein, 279 aa, Zea mays
  Coding DNA Sequence Number=SeqID_5670
  Gene Ontology: Mol. function=signal transducer activity; Cellular component=membrane; Biological process=signal transduction
  Homolog annotation: Hit_ID=Q500F6; Match level="QueryCoverage=100%, HitCoverage=55%, E-value=8e-98, Identity=63%"; Hit description =Chemotaxis sensory transducer
MPAQARFIEHYRKADRIMLALIWLMALFSLGLAFWHDTLLQALIIGGGTSVVLTLAYRVIGGTRLMRCALGVGLMIMAALHINQAEGVIESHFGIFALLAVLTFYRDWLPILVAAATIAVHHVVFHALQHQGFPVFVMEHHGGWSMIFVHAFYVVMETVALLYLAVHSQKEAVESQEMLEKMLAVTTQFSGEAAKGSPEKAHVSLATRFDHFLTQITGLIDGVARDSHGLGQLGQELAHASGTLEKGARHQLAEIAQMTDSMQRMEDAMGHIAVHVEQA

SEQ ID NO: 11710 - protein, 113 aa, Zea mays
  Coding DNA Sequence Number=SeqID_5671
  Gene Ontology: Mol. function=[glutamate-ammonia-ligase] adenylyltransferase activity; Cellular component=intracellular; Biological process=regulation of transcription, DNA-dependent
  Homolog annotation: Hit_ID=Q88QZ4; Match level="QueryCoverage=100%, HitCoverage=66%, E-value=2e-55, Identity=63%"; Hit description =Glutamate-ammonia-ligase adenylyltransferase
MRLRPYGSAGALVLSFNALEQYYQDQGRDWERYAMIKARVVAGDQVAGAQLLDMLRPFVYRRYLDFSAIEALRTMKQLIQQEVRRKGMAENIKLGSGGIREVEFIAQAFQLIH

SEQ ID NO: 11711 - protein, 139 aa, Zea mays
  misc_feature (10)..(10): Xaa can be any naturally occurring amino acid
  Coding DNA Sequence Number=SeqID_5672
  Homolog annotation: Hit_ID=Q4KIZ0; Match level="QueryCoverage=91%, HitCoverage=96%, E-value=6e-48, Identity=71%"; Hit description =Putative uncharacterized protein
  Subcellular localization annotation: CTP_CleavageSite=35; ConfidenceScore=5.07e-01
KAKPYLSAIXRQRKTFAWIACFAVLFNVFAMPMAGAMQRSNNALDQLLWGSFCSSNGTKLTAIALGKLEIPAPQQDDHSTMQHCWCCSGSAPLVALPGHTPSLFFARFDAVQDLPPPSLQSPTPRQQWPSLNPRASPTV

SEQ ID NO: 11712 - protein, 139 aa, Zea mays; identical to SEQ ID NO: 11711
  misc_feature (10)..(10): Xaa can be any naturally occurring amino acid
  Coding DNA Sequence Number=SeqID_5673
  Homolog annotation: Hit_ID=Q4KIZ0; Match level="QueryCoverage=91%, HitCoverage=96%, E-value=6e-48, Identity=71%"; Hit description =Putative uncharacterized protein
  Subcellular localization annotation: CTP_CleavageSite=35; ConfidenceScore=5.07e-01

SEQ ID NO: 11713 - protein, 185 aa, Zea mays
  misc_feature (1)..(7): Xaa can be any naturally occurring amino acid
  misc_feature (9)..(13): Xaa can be any naturally occurring amino acid
  misc_feature (17)..(17): Xaa can be any naturally occurring amino acid
  misc_feature (19)..(25): Xaa can be any naturally occurring amino acid
  misc_feature (30)..(30): Xaa can be any naturally occurring amino acid
  misc_feature (41)..(42): Xaa can be any naturally occurring amino acid
  Coding DNA Sequence Number=SeqID_5674
  Gene Ontology: Mol. function=transferase activity, transferring glycosyl groups; Cellular component=intracellular; Biological process=aromatic amino acid family biosynthetic process
  Homolog annotation: Hit_ID=Q4K502; Match level="QueryCoverage=92%, HitCoverage=49%, E-value=1e-70, Identity=80%"; Hit description =Anthranilate phosphoribosyltransferase
  Pfam annotation: Domain name=Glycos_transf_3; Domain location=13-166; Score=35.7; E_value=8.7e-11; Accession=PF00591.11; Description =Glycosyl transferase family, ab domain
XXXXXXXAXXXXXNMLXPXXXXXXXKHQVXGVFSQALCRPXXEVLQRLGSKHVLVVHSKDGLDEFSLAAPTFVAELKDDQVTEYWVEPEDLGMKSQSLHGLAVESPAASLELIRDALGRRKTENGQKAAEMIVLNAGAALYAADHAYSLKEGVALAHDALHTGLAREKLEELGAFTAVFKVENEG

SEQ ID NO: 11714 - protein, 193 aa, Zea mays
  misc_feature (166)..(167): Xaa can be any naturally occurring amino acid
  misc_feature (172)..(172): Xaa can be any naturally occurring amino acid
  misc_feature (176)..(179): Xaa can be any naturally occurring amino acid
  misc_feature (181)..(182): Xaa can be any naturally occurring amino acid
  misc_feature (184)..(188): Xaa can be any naturally occurring amino acid
  misc_feature (190)..(191): Xaa can be any naturally occurring amino acid
  Coding DNA Sequence Number=SeqID_5675
  Gene Ontology: Mol. function=transferase activity; Cellular component= cytoplasm; Biological process=glutamine metabolic process
  Homolog annotation: Hit_ID=Q3KFH2; Match level="QueryCoverage=100%, HitCoverage=80%, E-value=1e-84, Identity=78%"; Hit description =Glutamine amidotransferase class-I
MSLRVCILETDILRPGLIDQYQGYGQMFKRLFSKQPIAAEFVIYNVVQGEYPADEEVFDAYLVTGSKADSFGTDPWIQTLKTYLLDRHARGDKLIGICFGHQLLALLLGGKTERATKGWGMGIHDYKLNAKAPWMSPVVEELTLLISHQDQVTTLPENATVIASSXXCPFAXYHIXXXXLXXQXXXXXIXXYS

SEQ ID NO: 11715 - protein, 116 aa, Zea mays
  Coding DNA Sequence Number=SeqID_5676
  Gene Ontology: Mol. function=monooxygenase activity; Cellular component=intracellular
  Homolog annotation: Hit_ID=Q48HH9; Match level="QueryCoverage=98%, HitCoverage=25%, E-value=6e-47, Identity=79%"; Hit description =Monooxygenase, NtaA/SnaA/SoxA family
MSKRQLKLGAMVHGVGHGWGEWRHPQAQPNASVNFGFYKHQTQLAEGAKFDFVFIADSLHIHEKSSPHYLNRFEPLTILSALAALTSNIGLVATVTVSYTEPFQVARQLASLDHIS

SEQ ID NO: 11716 - protein, 122 aa, Zea mays
  misc_feature (99)..(99): Xaa can be any naturally occurring amino acid
  misc_feature (105)..(106): Xaa can be any naturally occurring amino acid
  Coding DNA Sequence Number=SeqID_5677
  Homolog annotation: Hit_ID=Q63KH1; Match level="QueryCoverage=77%, HitCoverage=69%, E-value=8e-18, Identity=46%"; Hit description =Putative uncharacterized protein
  Subcellular localization annotation: CTP_CleavageSite=35; ConfidenceScore=5.26e-01
MSTTVTPAGGGPTTQKASTSVFDDKLNISKSSKVIADYMRQSGKSAITKQELSQLASNASGKVPADVSAAAQYMERHPDVFTAIETHDVAGADNLSGVXNFDWAXXGGLNRPMSTPLTLSPR

SEQ ID NO: 11717 - protein, 122 aa, Zea mays; identical to SEQ ID NO: 11716
  misc_feature (99)..(99): Xaa can be any naturally occurring amino acid
  misc_feature (105)..(106): Xaa can be any naturally occurring amino acid
  Coding DNA Sequence Number=SeqID_5678
  Homolog annotation: Hit_ID=Q63KH1; Match level="QueryCoverage=77%, HitCoverage=69%, E-value=8e-18, Identity=46%"; Hit description =Putative uncharacterized protein
  Subcellular localization annotation: CTP_CleavageSite=35; ConfidenceScore=5.26e-01

SEQ ID NO: 11718 - protein, 219 aa, Zea mays
  misc_feature (219)..(219): Xaa can be any naturally occurring amino acid
  Coding DNA Sequence Number=SeqID_5679
  Gene Ontology: Mol. function=transporter activity; Cellular component= membrane; Biological process=transport
  Homolog annotation: Hit_ID=Q3KFL2; Match level="QueryCoverage=99%, HitCoverage=48%, E-value=1e-111, Identity=94%"; Hit description =Xanthine/uracil permease
  Pfam annotation: Domain name=Xan_ur_permease; Domain location=1-181; Score=-66.2; E_value=1.3e-05; Accession=PF00860.11; Description =Permease family
SGLAQAPWVQVVTPLHFGMPKFELAPILSMCLVVVIIFVESTGMFLALGKITGQEVTPKMLRRGLLCDAGASFFAGFFNTFTHSSFAQNIGLVQMTGVRCRSVTIMAGAFLIVLSLLPKAAFLVASIPPAVLGGAAIAMFGMVAATGIKILQEADIADRRNQLLVAVSIGMGLIPVVRPEFFAQLPLWMSPITHSGIAMATLSALSLNLLFNILGGAEX

SEQ ID NO: 11719 - protein, 100 aa, Zea mays
  Coding DNA Sequence Number=SeqID_5680
  Homolog annotation: Hit_ID=Q3KC30; Match level="QueryCoverage=100%, HitCoverage=100%, E-value=5e-46, Identity=85%"; Hit description =Putative uncharacterized protein
  Pfam annotation: Domain name=DUF1883; Domain location=1-98; Score =257.4; E_value=3e-74; Accession=PF08980.1; Description=Domain of unknown function (DUF1883)
MKFIHQREHLNEGDIVVIECSQTCNIRLMSDANFRSFKNGGRHTYHGGAFDKFPAKITAPSTGFWNITLDVVTRRAISVTKKPTLSHKIRIVRRTNSKLS

SEQ ID NO: 11720 - protein, 281 aa, Zea mays
  misc_feature (271)..(272): Xaa can be any naturally occurring amino acid
  misc_feature (275)..(277): Xaa can be any naturally occurring amino acid
  Coding DNA Sequence Number=SeqID_5681
  Gene Ontology: Mol. function=oxidoreductase activity; Cellular component=cytoplasm; Biological process=metabolic process
  Homolog annotation: Hit_ID=Q3KHX9; Match level="QueryCoverage=97%, HitCoverage=74%, E-value=1e-124, Identity=81%"; Hit description =NADH:flavin oxidoreductase/NADH oxidase
  Pfam annotation: Domain name=Oxidored_FMN; Domain location=1-264; Score=57.1; E_value=2.6e-15; Accession=PF00724.10; Description =NADH:flavin oxidoreductase  NADH oxid
AVHAEGGKIVPQLWHVGSVRRIGTEPDASVPAYGPTEKLKDGNVVVHGMTVQDIKDVIAAFAQAAKDAQSIGMDGVEIHGAHGYLVDQFFWEGTNQRTDEYGGSLANRSRFAIELIQAIRAAVGPDFPIILRFSQWKQQDYTARLVQTPEALGEFLKPLSDAGVDIFHCSTRRFWEPEFEGSELNLAGWTRKLTGKPTITVGSVGLDGEFLQFMVNTDKVAQPASLENLLERLNNDEFDLVAVGRALLVDPDWALKVREGREGDILPFSRXXLTXXXTAIF

SEQ ID NO: 11721 - protein, 47 aa, Zea mays
  Coding DNA Sequence Number=SeqID_5682
  Gene Ontology: Mol. function=oxidoreductase activity; Biological process=electron transport
  Homolog annotation: Hit_ID=Q3L917; Match level="QueryCoverage=100%, HitCoverage=9%, E-value=3e-15, Identity=87%"; Hit description =Cytochrome P450
FALHETVLALAIILQRYNLQSDPKYTLDIRETLSLKPFGFELSVQRR

SEQ ID NO: 11722 - protein, 47 aa, Zea mays; identical to SEQ ID NO: 11721
  Coding DNA Sequence Number=SeqID_5683
  Gene Ontology: Mol. function=oxidoreductase activity; Biological process=electron transport
  Homolog annotation: Hit_ID=Q3L917; Match level="QueryCoverage=100%, HitCoverage=9%, E-value=3e-15, Identity=87%"; Hit description =Cytochrome P450

SEQ ID NO: 11723 - protein, 98 aa, Zea mays
  Coding DNA Sequence Number=SeqID_5684
  Gene Ontology: Mol. function=4-hydroxythreonine-4-phosphate dehydrogenase activity; Cellular component=cytoplasm; Biological process=pyridoxine biosynthetic process
  Homolog annotation: Hit_ID=Q3V808; Match level="QueryCoverage=64%, HitCoverage=18%, E-value=4e-11, Identity=57%"; Hit description =Pyridoxal phosphate biosynthetic protein pdxA
MNPSRAGADLPAPALPLAITLGDPAGIGPEIVAKTLLLPGYAERCVAVGDPAVMARALAPLGAAERLRVVADVADAELRPDRVCLVPSSALPLPPPFG

SEQ ID NO: 11724 - protein, 98 aa, Zea mays; identical to SEQ ID NO: 11723
  Coding DNA Sequence Number=SeqID_5685
  Gene Ontology: Mol. function=4-hydroxythreonine-4-phosphate dehydrogenase activity; Cellular component=cytoplasm; Biological process=pyridoxine biosynthetic process
  Homolog annotation: Hit_ID=Q3V808; Match level="QueryCoverage=64%, HitCoverage=18%, E-value=4e-11, Identity=57%"; Hit description =Pyridoxal phosphate biosynthetic protein pdxA

SEQ ID NO: 11725 - protein, 143 aa, Zea mays
  misc_feature (1)..(1): Xaa can be any naturally occurring amino acid
  Coding DNA Sequence Number=SeqID_5686
  Gene Ontology: Mol. function=hydrolase activity; Cellular component =integral to membrane; Biological process=lipid metabolic process
  Homolog annotation: Hit_ID=A9IV01; Match level="QueryCoverage=95%, HitCoverage=34%, E-value=1e-52, Identity=75%"; Hit description =Putative uncharacterized protein
XWPARGGLPTTLEEVAERQKDIQYSSRTRMVTDQLRRVLKLRHGLQQLLERLPDKERAAPELAEIRRLAKTPATNIINLIYESKHRERFSKDYEFGTEAMREHWESGLADIRQTLAKPGILARPTQDSCFVAHDIHRNGKHTA

SEQ ID NO: 11726 - protein, 296 aa, Zea mays
  misc_feature (3)..(6): Xaa can be any naturally occurring amino acid
  misc_feature (8)..(10): Xaa can be any naturally occurring amino acid
  misc_feature (12)..(17): Xaa can be any naturally occurring amino acid
  misc_feature (21)..(23): Xaa can be any naturally occurring amino acid
  misc_feature (27)..(29): Xaa can be any naturally occurring amino acid
  misc_feature (41)..(41): Xaa can be any naturally occurring amino acid
  misc_feature (43)..(43): Xaa can be any naturally occurring amino acid
  Coding DNA Sequence Number=SeqID_5687
  Gene Ontology: Mol. function=oxidoreductase activity; Biological process=electron transport
  Homolog annotation: Hit_ID=Q3KGX7; Match level="QueryCoverage=94%, HitCoverage=51%, E-value=1e-141, Identity=90%"; Hit description=FAD dependent oxidoreductase
GGXXXXWXXXEXXXXXXDGQXXXVVVXXXEQILSKHVILAXGXSARDTFRMLHGRGVYMEAKPFSVGFRIEHPQSLIDAARLGKYAGHPKLGAADYKLVHHAKNGRSVYSFCMCPGGTVVAATSEPNRVVTNGMSQYSRNERNANSGIVVGITPEVDYPGGPLAGIELQERLESHAFILGGSNYEAPAQLVGDFIAGKPSTAIGTVEPSYKPGVAWGDLALALPDFAIEAIREALPAFEKQIKGYSLHDAVLTGIETRTSSPLRITRNESMQSLNVKGLFPAGEGAGYAGGILSAG

SEQ ID NO: 11727 - protein, 204 aa, Zea mays
  Coding DNA Sequence Number=SeqID_5688
  Gene Ontology: Mol. function=ATPase activity, coupled to transmembrane movement of substances; Cellular component=integral to membrane; Biological process=transport
  Homolog annotation: Hit_ID=Q82S99; Match level="QueryCoverage=98%, HitCoverage=33%, E-value=2e-72, Identity=68%"; Hit description=ABC transporter, fused permease and ATPase domains
  Pfam annotation: Domain name=ABC_tran; Domain location=1-169; Score =152.8; E_value=9.7e-43; Accession=PF00005.17; Description=ABC transporter
LLSLLLRLYDVQQGQVLVDGKDVRDVTQHSLHQQIGLIPQEPGLFHRSIRENIHYGRLDASMEEVAEAIHRAGASEFIDSMEHGYESLVGERGVKLSGGQRQRIAIARVLLKNAPILVMDEATSSLDSITERFIQDKLDEIMEDKTVLVVAHRLSTVAHLDRILVFDNGRVIEDGSHEQLLRQGGQYARLWSRQFSDALDEVAL

SEQ ID NO: 11728 - protein, 121 aa, Zea mays
  Coding DNA Sequence Number=SeqID_5689
  Homolog annotation: Hit_ID=Q3KC33; Match level="QueryCoverage=74%, HitCoverage=90%, E-value=3e-34, Identity=80%"; Hit description =Lipoprotein, putative precursor
WRFAIISPETPHDSVSASLQHPNDDSYMNKILALIAVLALTGGCTTTSDTVLKNGEQGLAIDCSGEANSWASCYEKADASCAGTGYRIVGTEGTPALKESDKTLGKDVGNYKTRSVTVVCK

SEQ ID NO: 11729 - protein, 146 aa, Zea mays
  Coding DNA Sequence Number=SeqID_5690
  Gene Ontology: Mol. function=DNA topoisomerase type I activity; Cellular component=chromosome; Biological process=DNA unwinding during replication
  Homolog annotation: Hit_ID=Q3KBW5; Match level="QueryCoverage=91%, HitCoverage=17%, E-value=5e-15, Identity=34%"; Hit description=DNA topoisomerase
  Pfam annotation: Domain name=zf-C4_Topoisom; Domain location=108-147; Score=25.3; E_value=0.00021; Accession=PF01396.10; Description =Topoisomerase DNA binding C4 zinc finger
AQVEFVKPKGKQKEEFIISTQAGRALIQALPAEIAKPDMTALWETAMREIEAGRSTIDRFEAMQRSWITKVIAEIRSKPLNIPYTGPAKAGAGKGGSSGPRVAPEPVGKACPQCGSQLMKRMGGNGPFIGCEGFRSGCKYTEQVAA

SEQ ID NO: 11730 - protein, 146 aa, Zea mays; identical to SEQ ID NO: 11729
  Coding DNA Sequence Number=SeqID_5691
  Gene Ontology: Mol. function=DNA topoisomerase type I activity; Cellular component=chromosome; Biological process=DNA unwinding during replication
  Homolog annotation: Hit_ID=Q3KBW5; Match level="QueryCoverage=91%, HitCoverage=17%, E-value=5e-15, Identity=34%"; Hit description=DNA topoisomerase
  Pfam annotation: Domain name=zf-C4_Topoisom; Domain location=108-147; Score=25.3; E_value=0.00021; Accession=PF01396.10; Description =Topoisomerase DNA binding C4 zinc finger

SEQ ID NO: 11731 - protein, 144 aa, Zea mays
  misc_feature (1)..(1): Xaa can be any naturally occurring amino acid
  Coding DNA Sequence Number=SeqID_5692
  Gene Ontology: Mol. function=electron carrier activity; Cellular component=membrane; Biological process=cell redox homeostasis
  Homolog annotation: Hit_ID=Q3K980; Match level="QueryCoverage=98%, HitCoverage=48%, E-value=8e-63, Identity=78%"; Hit description =Thiol:disulfide interchange protein DsbE, putative precursor
  Pfam annotation: Domain name=AhpC-TSA; Domain location=56-144; Score =5.8; E_value=0.00045; Accession=PF00578.11; Description=AhpCTSA family
  Pfam annotation: Domain name=Redoxin; Domain location=55-144; Score= -16.2; E_value=0.069; Accession=PF08534.1; Description=Redoxin
  Pfam module annotation: Pfam domain module=AhpC-TSA::Redoxin; Domain location=56-144::55-144
XRDGGFLAWPGVIALILGALIYGWRRPLLRKPLSAGVITGLAFWALTSLSLTLYEKGTHLPDITLRNANGETVQLADYKGGPLVINLWATWCPPCRREMPVLESAQRQRPDVTFLFVNQAESMQSVATYLATQGLNLDNVLFDA

SEQ ID NO: 11732 - protein, 62 aa, Zea mays
  misc_feature (62)..(62): Xaa can be any naturally occurring amino acid
  Coding DNA Sequence Number=SeqID_5693
AGEDHGFLHAVGFAQPGQGQRHAGIGIAVQFGRHRAGAGVQVGQQRVERGAAQVQAGLQRGX

SEQ ID NO: 11733 - protein, 62 aa, Zea mays
  misc_feature (1)..(1): Xaa can be any naturally occurring amino acid
  Coding DNA Sequence Number=SeqID_5694
  Homolog annotation: Hit_ID=Q7VS72; Match level="QueryCoverage=98%, HitCoverage=7%, E-value=9e-07, Identity=50%"; Hit description=Sensor protein
XTALEAGLNLGRAALDSLLADLDARARSMAAELNRNSDTGVTLALTRLREANGVQEAMVFTG

SEQ ID NO: 11734 - protein, 106 aa, Zea mays
  Coding DNA Sequence Number=SeqID_5695
  Gene Ontology: Mol. function=oxidoreductase activity; Biological process=metabolic process
  Homolog annotation: Hit_ID=Q1IDR5; Match level="QueryCoverage=100%, HitCoverage=42%, E-value=2e-24, Identity=54%"; Hit description =Putative oxidoreductase, short-chain alcohol dehydrogenase/reductase family
IIGTYHSAADEAQAVVAQVEALGGKAAMLQLDVSQSATFDAFTAQVGSVLKDVFGQAHFNFLINNAGIGAHASFAETTEAQFDQLVAIHFKGPFFLTQKLLPLISD

SEQ ID NO: 11735 - protein, 106 aa, Zea mays; identical to SEQ ID NO: 11734
  Coding DNA Sequence Number=SeqID_5696
  Gene Ontology: Mol. function=oxidoreductase activity; Biological process=metabolic process
  Homolog annotation: Hit_ID=Q1IDR5; Match level="QueryCoverage=100%, HitCoverage=42%, E-value=2e-24, Identity=54%"; Hit description =Putative oxidoreductase, short-chain alcohol dehydrogenase/reductase family

SEQ ID NO: 11736 - protein, 218 aa, Zea mays
  misc_feature (218)..(218): Xaa can be any naturally occurring amino acid
  Coding DNA Sequence Number=SeqID_5697
  Gene Ontology: Mol. function=hydrolase activity, hydrolyzing O -glycosyl compounds; Cellular component=cytoplasm; Biological process= carbohydrate metabolic process
  Homolog annotation: Hit_ID=Q3K9E7; Match level="QueryCoverage=99%, HitCoverage=64%, E-value=1e-114, Identity=94%"; Hit description =Glycoside hydrolase, family 3-like
  Pfam annotation: Domain name=Glyco_hydro_3; Domain location=57-218; Score=43.0; E_value=1.6e-11; Accession=PF00933.12; Description =Glycosyl hydrolase family 3 N terminal domain
MTQALQGSLMVDVAGTWLTAEDRHLLRQPEVGGLIIFARNIEHPRQVRELSAAIRAVRPDLLLAVDQEGGRVQRLRQGFVRLPAMRALADNPNAEQLAEQCGWIMATEVLAVGLDLSFAPVLDLDYQRSAVVGTRAFEGDPERAAVLAGAFIRGMNSAGMAATGKHFPGHGWAEADSHVAIPNDERSLEQIRANDLVPFARLSKQLAAVMPAHVIYPX

SEQ ID NO: 11737 - protein, 144 aa, Zea mays
  misc_feature (48)..(57): Xaa can be any naturally occurring amino acid
  misc_feature (59)..(66): Xaa can be any naturally occurring amino acid
  misc_feature (70)..(73): Xaa can be any naturally occurring amino acid
  misc_feature (75)..(75): Xaa can be any naturally occurring amino acid
  misc_feature (79)..(80): Xaa can be any naturally occurring amino acid
  misc_feature (87)..(88): Xaa can be any naturally occurring amino acid
  misc_feature (95)..(97): Xaa can be any naturally occurring amino acid
  misc_feature (100)..(100): Xaa can be any naturally occurring amino acid
  Coding DNA Sequence Number=SeqID_5698
SMHPLSLHIANRATNHMDYVSVDRLLARWSPAPSWTHPHSRHQYNADXXXXXXXXXXHXXXXXXXXSCAXXXXFXTSPXXMSNTANXXITQHYAXXXTIXITSLLPNGCGAAWTQDHQQLPIAPGRNPRAYLCLVALGCLGTHH

SEQ ID NO: 11738 - protein, 254 aa, Zea mays
  misc_feature (244)..(245): Xaa can be any naturally occurring amino acid
  Coding DNA Sequence Number=SeqID_5700
  Gene Ontology: Cellular component=integral to membrane
  Homolog annotation: Hit_ID=Q8XRR8; Match level="QueryCoverage=98%, HitCoverage=19%, E-value=1e-100, Identity=66%"; Hit description =Probable transmembrane protein
  Pfam annotation: Domain name=ImcF-related; Domain location=2-223; Score=89.2; E_value=1.3e-23; Accession=PF06761.2; Description=ImcF -related
THLSDQITRFWRGWLETNRGAMPRDQLIRSAERLISFYVSRAPDAGWPQIDTNLALVEKTRASLRAVMQGMPARERAYATLKARAATRFQTMTVARIVGENDAGVVAGSYAIPGTFTREAWEQYIQPAINEAAKKEVQTSDWVLGVNARDDLTLDGSPEQIQKSLATMYKMEYAQEWQKFLRGVTIKPFTSFEQSVGAMNRLGDPQTSPIAKLINTAYEQTSWDNPSLVNAGLQQAQSGVVGWXXRVILRQTGA

SEQ ID NO: 11739 - protein, 181 aa, Zea mays
  Coding DNA Sequence Number=SeqID_5701
  Gene Ontology: Mol. function=iron ion binding; Cellular component =integral to membrane; Biological process=response to stimulus
  Homolog annotation: Hit_ID=A6T3T9; Match level="QueryCoverage=96%, HitCoverage=53%, E-value=4e-45, Identity=55%"; Hit description=Fe2+ -dicitrate sensor, membrane component
  Pfam annotation: Domain name=FecR; Domain location=1-66; Score=15.7; E_value=5.7e-05; Accession=PF04773.4; Description=FecR protein
LYDADQRLVRLRAGEIAVHAVAETGAHARPFVVRTKQGDIQAQAARFCVREDGSACRVSVQEGGVTLRRGDASLALAAGEQAWLRDDDAPRIEPADPHAADWTRGVLHASAWRLDAFAAELGRYRPGVLRCDPAVAGLRISGAFQLQDTDAVLAALPSTLPVQVRYRSAYWVTIMPRAGQA

SEQ ID NO: 11740 - protein, 202 aa, Zea mays
  misc_feature (119)..(119): Xaa can be any naturally occurring amino acid
  misc_feature (126)..(127): Xaa can be any naturally occurring amino acid
  misc_feature (135)..(136): Xaa can be any naturally occurring amino acid
  misc_feature (142)..(146): Xaa can be any naturally occurring amino acid
  misc_feature (149)..(152): Xaa can be any naturally occurring amino acid
  misc_feature (155)..(158): Xaa can be any naturally occurring amino acid
  misc_feature (160)..(192): Xaa can be any naturally occurring amino acid
  misc_feature (194)..(202): Xaa can be any naturally occurring amino acid
  Coding DNA Sequence Number=SeqID_5702
  Gene Ontology: Mol. function=transporter activity; Cellular component= outer membrane-bounded periplasmic space; Biological process=transport
  Homolog annotation: Hit_ID=Q3K8Q2; Match level="QueryCoverage=44%, HitCoverage=33%, E-value=9e-27, Identity=64%"; Hit description =Extracellular solute-binding protein, family 3
RARSFDRAFFCPVIFEWENPAMELRPWTVLLALSLLPTVSLAAGKCDRLVITGSPDAPPYLWRDPRDPTHLIGATADMLQQVAKDLGVKIDLLYGGKRSVALDEVRSGRMDILADAPLXLDALDAXXYIHPGIGXXRLPGLXXXXXGPXXXXAQXXXXPXXXXXXXXXXXXXXXXXXXXXXXXXXXXXXXXXGXXXXXXXXX

SEQ ID NO: 11741 - protein, 90 aa, Zea mays
  misc_feature (90)..(90): Xaa can be any naturally occurring amino acid
  Coding DNA Sequence Number=SeqID_5703
  Gene Ontology: Mol. function=transporter activity; Cellular component= integral to membrane; Biological process=transport
  Homolog annotation: Hit_ID=A2WER7; Match level="QueryCoverage=93%, HitCoverage=20%, E-value=3e-34, Identity=79%"; Hit description=Major facilitator superfamily (MFS_1) transporter
SLKAGVSSMGIFRSLRSVNYRIWAAGALVSNIGTWMQRTAQDWLVLTQLTPHNASAVGIVMALQFGPQLLLLPWTGFAADHYDKRKLLIX

SEQ ID NO: 11742 - protein, 199 aa, Zea mays
  misc_feature (199)..(199): Xaa can be any naturally occurring amino acid
  Coding DNA Sequence Number=SeqID_5704
  Gene Ontology: Mol. function=hydrolase activity; Cellular component =cytoplasm; Biological process=metabolic process
  Homolog annotation: Hit_ID=Q3K6E9; Match level="QueryCoverage=99%, HitCoverage=64%, E-value=1e-107, Identity=92%"; Hit description =Histone deacetylase superfamily
  Pfam annotation: Domain name=Hist_deacetyl; Domain location=1-198; Score=6.6; E_value=1.5e-10; Accession=PF00850.10; Description =Histone deacetylase family
PEFPADHRFPMDKFRLLRDHLVESGLTRDSQLLRPELCPAEILALAHEPRYIERYMSGELSREDQRRLGLPWSEALARRTVRAVGGSLLAAEQALEHGLACHLAGGTHHAHYDYPAGFCIFNDLAVISHYLLASGRVNRVLIFDCDVHQGDGTARILHDTPDAITVSLHCEKNFPARKAESDWDIPLPMGMGDADYLKX

SEQ ID NO: 11743 - protein, 169 aa, Zea mays
  Coding DNA Sequence Number=SeqID_5705
  Gene Ontology: Mol. function=magnesium ion binding; Cellular component=integral to membrane; Biological process=transport
  Homolog annotation: Hit_ID=Q3KBM2; Match level="QueryCoverage=98%, HitCoverage=32%, E-value=1e-73, Identity=82%"; Hit description =Integral membrane protein TerC
  Pfam annotation: Domain name=CorC_HlyC; Domain location=91-170; Score= 75.8; E_value=1.4e-19; Accession=PF03471.7; Description=Transporter associated domain
EPLGFVHKKELLKEYLAGNEPNLEHLARRAVNLLESFSILNALEQMRQESTHIAFVINEFGDFIGVLSMTDILESIAGELPDASEVEGPDIVEEEGGFRVNGALNLNLIRQRTGFKAVATEDYQTLAGLVMSLLDRLPAVGDSLEHEGWRLTVAAVEERRVTQVLLAPL

SEQ ID NO: 11744 - protein, 150 aa, Zea mays
  misc_feature (2)..(4): Xaa can be any naturally occurring amino acid
  misc_feature (9)..(10): Xaa can be any naturally occurring amino acid
  misc_feature (15)..(18): Xaa can be any naturally occurring amino acid
  misc_feature (20)..(21): Xaa can be any naturally occurring amino acid
  misc_feature (33)..(34): Xaa can be any naturally occurring amino acid
  misc_feature (41)..(41): Xaa can be any naturally occurring amino acid
  misc_feature (150)..(150): Xaa can be any naturally occurring amino acid
  Coding DNA Sequence Number=SeqID_5706
  Homolog annotation: Hit_ID=Q7W896; Match level="QueryCoverage=87%, HitCoverage=31%, E-value=5e-44, Identity=65%"; Hit description =Putative exported protein
DXXXIPDGXXGKQMXXXXAXXTRSDTLEFVRDXXWQPGNFXAAQRPAVRAAIKQRLEEKKDIDLIIAMGTWAGQDMAGMGAPVPTIVASTSDAVGARITRSAQDSGLDNLHARVQPERYQRQVRLFHEIVPFKRLGLVYEDSPEGRTYSX

SEQ ID NO: 11745 - protein, 42 aa, Zea mays
  Coding DNA Sequence Number=SeqID_5707
  Gene Ontology: Mol. function=transporter activity; Cellular component= 1-2nm peptidoglycan-based cell wall; Biological process=transport
  Homolog annotation: Hit_ID=Q4KJM3; Match level="QueryCoverage=100%, HitCoverage=13%, E-value=6e-15, Identity=97%"; Hit description=Amino acid ABC transporter, permease protein
EVITTSFSPFEILFCVAGLYLLINLPLSKIASRLERRLAQSD

SEQ ID NO: 11746 - protein, 42 aa, Zea mays; identical to SEQ ID NO: 11745
  Coding DNA Sequence Number=SeqID_5708
  Gene Ontology: Mol. function=transporter activity; Cellular component= 1-2nm peptidoglycan-based cell wall; Biological process=transport
  Homolog annotation: Hit_ID=Q4KJM3; Match level="QueryCoverage=100%, HitCoverage=13%, E-value=6e-15, Identity=97%"; Hit description=Amino acid ABC transporter, permease protein

SEQ ID NO: 11747 - protein, 151 aa, Zea mays
  misc_feature (130)..(131): Xaa can be any naturally occurring amino acid
  misc_feature (134)..(136): Xaa can be any naturally occurring amino acid
  misc_feature (139)..(139): Xaa can be any naturally occurring amino acid
  misc_feature (143)..(145): Xaa can be any naturally occurring amino acid
  misc_feature (151)..(151): Xaa can be any naturally occurring amino acid
  Coding DNA Sequence Number=SeqID_5709
  Gene Ontology: Mol. function=transferase activity, transferring phosphorus-containing groups; Cellular component=membrane; Biological process=regulation of transcription, DNA-dependent
  Homolog annotation: Hit_ID=Q4KG72; Match level="QueryCoverage=98%, HitCoverage=36%, E-value=3e-49, Identity=69%"; Hit description =Sensor protein
MMPHAAQLSSVPDIQGPAPSVEQISRLGLEQAFSLFNQMSSQLTDSYSLLEARVSELKGELAVVSAQRMEELAEKERLANRLQNLLDLLPGGVIVIDDQGRVREANPAACDMLGLPLEGELWREVITRCXXPRXXXGHXISLXXXRRLSIX

SEQ ID NO: 11748 - protein, 65 aa, Zea mays
  Coding DNA Sequence Number=SeqID_5710
  Homolog annotation: Hit_ID=A1UZK5; Match level="QueryCoverage=98%, HitCoverage=10%, E-value=7e-14, Identity=56%"; Hit description =Putative uncharacterized protein
IDLAALRRAVGPVREFTLHLPVKGLRADSNTARLLESASADNFRLGCTPVINLFEQRADPIRVTH

SEQ ID NO: 11749 - protein, 65 aa, Zea mays; identical to SEQ ID NO: 11748
  Coding DNA Sequence Number=SeqID_5711
  Homolog annotation: Hit_ID=A1UZK5; Match level="QueryCoverage=98%, HitCoverage=10%, E-value=7e-14, Identity=56%"; Hit description =Putative uncharacterized protein

SEQ ID NO: 11750 - protein, 164 aa, Zea mays
  Coding DNA Sequence Number=SeqID_5712
  Gene Ontology: Mol. function=oxidoreductase activity
  Homolog annotation: Hit_ID=Q4KJA6; Match level="QueryCoverage=100%, HitCoverage=41%, E-value=3e-79, Identity=84%"; Hit description =Oxidoreductase, FAD-binding
LHMIIAKGPGLKPLYAHCLGGGTKPRITVTTHPAADGNWVWYLGGDIAEAEGVARTPEQQIATAQKELAQLLPWIDMSQTQWATLRVDRAEPLQSGLTRPDNAFLAEQDRLLVGWPTKLALAPDFADRVINALERDGIKPSVTETLPDLPKPAIAQPAWEQLLP

SEQ ID NO: 11751 - protein, 251 aa, Zea mays
  misc_feature (6)..(10): Xaa can be any naturally occurring amino acid
  misc_feature (16)..(18): Xaa can be any naturally occurring amino acid
  misc_feature (20)..(20): Xaa can be any naturally occurring amino acid
  misc_feature (28)..(29): Xaa can be any naturally occurring amino acid
  misc_feature (31)..(31): Xaa can be any naturally occurring amino acid
  misc_feature (251)..(251): Xaa can be any naturally occurring amino acid
  Coding DNA Sequence Number=SeqID_5713
  Gene Ontology: Mol. function=cation transmembrane transporter activity; Cellular component=membrane; Biological process=cation transport
  Homolog annotation: Hit_ID=Q3K896; Match level="QueryCoverage=95%, HitCoverage=50%, E-value=1e-121, Identity=92%"; Hit description =Divalent cation transporter
  Pfam annotation: Domain name=CBS; Domain location=97-213; Score=-1.4; E_value=0.056; Accession=PF00571.18; Description=CBS domain
  Pfam annotation: Domain name=MgtE_N; Domain location=25-153; Score =133.9; E_value=4.6e-37; Accession=PF03448.7; Description=MgtE intracellular domain
  Pfam module annotation: Pfam domain module=CBS::MgtE_N; Domain location=97-213::25-153
KLGEQXXXXXQRQRVXXXLXHRQEGANXXRXENLVHRQNLVELQRKLDDLHSADVAYILEALPLNDRLTLWQLVKADRDGDILLEVSDSVRETLIADMDDHELLAAAKDMDADELADLASELPRDVVHELMETLDAQQRERVRSALSYDEEQVGALMDFEMVTIREDVSLEVVLRYLRRLKELPGHTDKLFVVDYEGILKGVLPIKRLLVNDPDKKVADVMASDPVSFHPDEDAYDAAQAFERYDLISAPX

SEQ ID NO: 11752 - protein, 141 aa, Zea mays
  misc_feature (1)..(31): Xaa can be any naturally occurring amino acid
  misc_feature (34)..(63): Xaa can be any naturally occurring amino acid
  misc_feature (65)..(89): Xaa can be any naturally occurring amino acid
  misc_feature (91)..(99): Xaa can be any naturally occurring amino acid
  misc_feature (101)..(109): Xaa can be any naturally occurring amino acid
  misc_feature (122)..(124): Xaa can be any naturally occurring amino acid
  misc_feature (126)..(126): Xaa can be any naturally occurring amino acid
  Coding DNA Sequence Number=SeqID_5714
XXXXXXXXXXXXXXXXXXXXXXXXXXXXXXXVAXXXXXXXXXXXXXXXXXXXXXXXXXXXXXXPXXXXXXXXXXXXXXXXXXXXXXXXXHXXXXXXXXXEXXXXXXXXXGKKKHMHIPVKYXXXSXATMGLRTYAIAMSQG

SEQ ID NO: 11753 - protein, 141 aa, Zea mays; identical to SEQ ID NO: 11752
  misc_feature (1)..(31): Xaa can be any naturally occurring amino acid
  misc_feature (34)..(63): Xaa can be any naturally occurring amino acid
  misc_feature (65)..(89): Xaa can be any naturally occurring amino acid
  misc_feature (91)..(99): Xaa can be any naturally occurring amino acid
  misc_feature (101)..(109): Xaa can be any naturally occurring amino acid
  misc_feature (122)..(124): Xaa can be any naturally occurring amino acid
  misc_feature (126)..(126): Xaa can be any naturally occurring amino acid
  Coding DNA Sequence Number=SeqID_5715

SEQ ID NO: 11754 - protein, 91 aa, Zea mays
  misc_feature (79)..(83): Xaa can be any naturally occurring amino acid
  misc_feature (85)..(91): Xaa can be any naturally occurring amino acid
  Coding DNA Sequence Number=SeqID_5716
SPRLVWRWTKEAPAAGAPAAKGEASGGLGRALAGHGSAPCAGSGVRSLGVATHSVTLDGCAADRCSVFSAMRFSRASAXXXXXFXXXXXXX

SEQ ID NO: 11755 - protein, 135 aa, Zea mays
  Coding DNA Sequence Number=SeqID_5718
  Gene Ontology: Mol. function=6-pyruvoyltetrahydropterin synthase activity; Cellular component=mitochondrion; Biological process =tetrahydrobiopterin biosynthetic process
  Homolog annotation: Hit_ID=Q3K9P0; Match level="QueryCoverage=87%, HitCoverage=100%, E-value=2e-65, Identity=97%"; Hit description =Putative uncharacterized protein
  Pfam annotation: Domain name=PTPS; Domain location=15-135; Score =209.3; E_value=9.4e-60; Accession=PF01242.10; Description=6-pyruvoyl tetrahydropterin synthase
KLLNSPPARHLTELKNPVEIFKEFTFESAHRLPHVPEGHKCGRLHGHSFKVAIHLSGDLDPHTGWIRDFSEIKAIFKPLYERLDHNYLNDIPGLENPTSEVLAKWIWNELKPLLPELSAIRIHETCTSGCIYRGE

SEQ ID NO: 11756 - protein, 266 aa, Zea mays
  misc_feature (1)..(1): Xaa can be any naturally occurring amino acid
  Coding DNA Sequence Number=SeqID_5719
  Gene Ontology: Mol. function=3-carboxy-cis,cis-muconate cycloisomerase activity; Cellular component=cytoplasm; Biological process=protocatechuate catabolic process
  Homolog annotation: Hit_ID=Q4KH31; Match level="QueryCoverage=99%, HitCoverage=58%, E-value=1e-119, Identity=82%"; Hit description=3 -carboxy-cis,cis-muconate cycloisomerase
  Pfam annotation: Domain name=Lyase_1; Domain location=1-217; Score =153.7; E_value=4.9e-43; Accession=PF00206.10; Description=Lyase
XLGKLIASEDAGAERYVHLGATSQDVMDTGLVLQLRSAVELIEHDLARLGDILAAQAQRYGTTLLAGRTWLQHATPVTLGMKIAGWLGAVTRSRQRLSELKPRLLVLQFGGASGTLAALGEQAMPVAQALAAELQLGLPEQPWHTQRDRLVEFASVLGLIAGSLGKLGRDISLLMQTEAAEVFEPSAPGKGGSSTMPHKRNPVGAAVLISAATRVPGLVATMFSAMPQEHERSLGLWHAEWETLPEICRLVSGALHQALLVSEGLE

SEQ ID NO: 11757 - protein, 66 aa, Zea mays
  misc_feature (1)..(1): Xaa can be any naturally occurring amino acid
  Coding DNA Sequence Number=SeqID_5720
  Gene Ontology: Mol. function=transporter activity; Cellular component= cell outer membrane; Biological process=transport
  Homolog annotation: Hit_ID=A1WKM9; Match level="QueryCoverage=98%, HitCoverage=9%, E-value=9e-17, Identity=66%"; Hit description=TonB -dependent receptor
XYQYVGKRAADPQNHFDLGSYQLLNARLGVANGRAEYYVWGSNLLNRQYDLYGYFAPPSVAYGAPA

SEQ ID NO: 11758 - protein, 66 aa, Zea mays; identical to SEQ ID NO: 11757
  misc_feature (1)..(1): Xaa can be any naturally occurring amino acid
  Coding DNA Sequence Number=SeqID_5721
  Gene Ontology: Mol. function=transporter activity; Cellular component= cell outer membrane; Biological process=transport
  Homolog annotation: Hit_ID=A1WKM9; Match level="QueryCoverage=98%, HitCoverage=9%, E-value=9e-17, Identity=66%"; Hit description=TonB -dependent receptor

SEQ ID NO: 11759 - protein, 234 aa, Zea mays
  Coding DNA Sequence Number=SeqID_5722
  Gene Ontology: Mol. function=transporter activity; Cellular component= integral to membrane; Biological process=transport
  Homolog annotation: Hit_ID=Q4KI24; Match level="QueryCoverage=100%, HitCoverage=54%, E-value=1e-108, Identity=83%"; Hit description =Serine transporter SdaC
MTDVRTPAAENPAVDLTQTTVTQGWNKHDTTWMLGLYGTAIGAGTLFLPINAGVGGFWPLIVLALLAFPMTFFAHRGLTRFVLSGKSGDITDVVEEHFGIGAGKLITLLYFFAIFPILLVYSVALTNTLTSFMEHQLHMAPPPRAILSLVLILGLMAIVRCGQGVIVKAMSVLVYPFVAALLLLAVSLIPNWNGAFFASASEGMPLPAFFKTLWLAIPVMVFSFNHSPIISAFA

SEQ ID NO: 11760 - protein, 161 aa, Zea mays
  Coding DNA Sequence Number=SeqID_5723
  Gene Ontology: Mol. function=sequence-specific DNA binding; Cellular component=intracellular; Biological process=regulation of transcription, DNA-dependent
  Homolog annotation: Hit_ID=Q3KDE9; Match level="QueryCoverage=88%, HitCoverage=45%, E-value=8e-62, Identity=82%"; Hit description =Transcriptional regulator, AraC family
  Pfam annotation: Domain name=HTH_AraC; Domain location=111-155; Score= 27.7; E_value=4.2e-05; Accession=PF00165.13; Description=Bacterial regulatory helix-turn-helix proteins, araC family
  Pfam annotation: Domain name=HTH_AraC; Domain location=59-105; Score =41.9; E_value=2.2e-09; Accession=PF00165.13; Description=Bacterial regulatory helix-turn-helix proteins, araC family
  Pfam module annotation: Pfam domain module=HTH_AraC::HTH_AraC; Domain location=111-155::59-105
VPLLETMLRLVRLLETPKDIGMLAPLALRELYYRLLRGVHGRRLYELALGDSQTRRVTRAIDWLNNHYTQPLRIEELARVANLGSSTLHHRFKAVTAMSPLQYQKQLRLQEARRLMLVEGLDVASACYRVGYESPSQFSREYSRQFGCPPSRDTNRVCRPA

SEQ ID NO: 11761 - protein, 110 aa, Zea mays
  misc_feature (81)..(82): Xaa can be any naturally occurring amino acid
  misc_feature (95)..(96): Xaa can be any naturally occurring amino acid
  misc_feature (102)..(103): Xaa can be any naturally occurring amino acid
  misc_feature (106)..(108): Xaa can be any naturally occurring amino acid
  Coding DNA Sequence Number=SeqID_5724
  Gene Ontology: Mol. function=hydrolase activity, acting on ester bonds; Biological process=arginine catabolic process to glutamate
  Homolog annotation: Hit_ID=Q4K840; Match level="QueryCoverage=82%, HitCoverage=27%, E-value=7e-35, Identity=79%"; Hit description =Succinylglutamate desuccinylase
MLALGKLLELTLAGREPAQKIQLTVDGVQLRWLSEGALEVRPPEARDNGSDVLLSSGIHGNETAPIELADRLLQGIARGEXXPRTRILFLFGNPXXMRRGEXXLEXXXAP

SEQ ID NO: 11762 - protein, 238 aa, Zea mays
  misc_feature (217)..(219): Xaa can be any naturally occurring amino acid
  misc_feature (228)..(228): Xaa can be any naturally occurring amino acid
  misc_feature (230)..(231): Xaa can be any naturally occurring amino acid
  misc_feature (233)..(234): Xaa can be any naturally occurring amino acid
  misc_feature (236)..(236): Xaa can be any naturally occurring amino acid
  Coding DNA Sequence Number=SeqID_5725
  Gene Ontology: Cellular component=integral to membrane
  Homolog annotation: Hit_ID=Q3KGD0; Match level="QueryCoverage=98%, HitCoverage=80%, E-value=1e-107, Identity=80%"; Hit description =Carboxylate/Amino Acid/Amine Transporter
YFAVLVRVLLAGLVFIPLTRWRSVEPAFMRGMLLIGALQFGVTYVCLYLSFRVLTVPEVLLFTILTPLHVTLIEDALNRRFNPWALVAALVAVTGAAVIRFDQITPNFFVGFLLLQLANFTYAAGQVLYKHLVARHPSDLPHYRRFGYFYLGALAVALPAFLMFGKANFLPEAPLQWGVLVFLGLVSTALGMYWWNKGACMVNGGTLAVMNNLHVPXXXLLNLLIWNXHXXLXXLXPK

SEQ ID NO: 11763 - protein, 69 aa, Zea mays
  Coding DNA Sequence Number=SeqID_5726
NQCMQRYTVPKLGNRHKTRVIIQLPVIVVLPNLRVQQVLHLNPRRRAAAEQQSLNQSCNETVGALGRRD

SEQ ID NO: 11764 - protein, 152 aa, Zea mays
  misc_feature (1)..(14): Xaa can be any naturally occurring amino acid
  misc_feature (17)..(21): Xaa can be any naturally occurring amino acid
  misc_feature (23)..(32): Xaa can be any naturally occurring amino acid
  misc_feature (39)..(44): Xaa can be any naturally occurring amino acid
  misc_feature (46)..(46): Xaa can be any naturally occurring amino acid
  misc_feature (50)..(52): Xaa can be any naturally occurring amino acid
  misc_feature (54)..(59): Xaa can be any naturally occurring amino acid
  misc_feature (61)..(61): Xaa can be any naturally occurring amino acid
  misc_feature (68)..(69): Xaa can be any naturally occurring amino acid
  misc_feature (71)..(73): Xaa can be any naturally occurring amino acid
  Coding DNA Sequence Number=SeqID_5728
XXXXXXXXXXXXXXFFXXXXXRXXXXXXXXXXFHGYGFXXXXXXSXVIVXXXTXXXXXXDXSAQAPSXXRXXXPRRVMAPCPRLRPIARARPAAPVGSCHCHIPRPRGEGGRGGSLFCLLLSPTASGDPNRPGSASRLPTALVASVRAKVHA

SEQ ID NO: 11765 - protein, 60 aa, Zea mays
  Coding DNA Sequence Number=SeqID_5730
  Gene Ontology: Mol. function=iron-sulfur cluster binding; Cellular component=cellular_component; Biological process=metabolic process
  Homolog annotation: Hit_ID=A9HZZ2; Match level="QueryCoverage=100%, HitCoverage=11%, E-value=1e-27, Identity=98%"; Hit description =Putative uncharacterized protein
ATAFVSIMEGCSKYCSFCVVPYTRGEEVSRPFDDVLIEVADLADQGVKEVTLLGQNVNAY

SEQ ID NO: 11766 - protein, 60 aa, Zea mays; identical to SEQ ID NO: 11765
  Coding DNA Sequence Number=SeqID_5731
  Gene Ontology: Mol. function=iron-sulfur cluster binding; Cellular component=cellular_component; Biological process=metabolic process
  Homolog annotation: Hit_ID=A9HZZ2; Match level="QueryCoverage=100%, HitCoverage=11%, E-value=1e-27, Identity=98%"; Hit description =Putative uncharacterized protein

SEQ ID NO: 11767 - protein, 219 aa, Zea mays
  misc_feature (3)..(3): Xaa can be any naturally occurring amino acid
  misc_feature (7)..(8): Xaa can be any naturally occurring amino acid
  misc_feature (14)..(15): Xaa can be any naturally occurring amino acid
  misc_feature (19)..(19): Xaa can be any naturally occurring amino acid
  Coding DNA Sequence Number=SeqID_5732
  Gene Ontology: Mol. function=peptidase activity
  Homolog annotation: Hit_ID=Q4KFU3; Match level="QueryCoverage=99%, HitCoverage=99%, E-value=1e-95, Identity=76%"; Hit description =Putative uncharacterized protein
  Pfam annotation: Domain name=Transglut_core; Domain location=69-137; Score=9.6; E_value=0.0033; Accession=PF01841.9; Description =Transglutaminase-like superfamily
MNXYLNXXRFIDSXXPAVXEFAEKHRGSSAALSDQAVSLYYAVREAVRYNPYTFSRDPQTLSGSFALAAGESYCVPKATLLAACARHCGIPARIGLADVRNHLSTPRLIELLRSDVFAMHGYTELYLDGRWVKATPAFNQQLCELFDVPPLEFDGIHDSVFHAFNRKGQRSMEYVVDHGQFAEVPEEFFFAHIQKCYPHLFGEQMPILLGDVQSDLSRA

SEQ ID NO: 11768 - protein, 289 aa, Zea mays
  misc_feature (1)..(1): Xaa can be any naturally occurring amino acid
  misc_feature (4)..(6): Xaa can be any naturally occurring amino acid
  misc_feature (9)..(11): Xaa can be any naturally occurring amino acid
  Coding DNA Sequence Number=SeqID_5733
  Gene Ontology: Mol. function=ATPase activity, coupled to transmembrane movement of substances; Cellular component=integral to membrane; Biological process=transport
  Homolog annotation: Hit_ID=A6V9N5; Match level="QueryCoverage=99%, HitCoverage=49%, E-value=2e-81, Identity=57%"; Hit description=ABC transporter, permease/ATP-binding protein
  Pfam annotation: Domain name=ABC_tran; Domain location=190-289; Score= -23.7; E_value=6.6e-05; Accession=PF00005.17; Description=ABC transporter
  Subcellular localization annotation: CTP_CleavageSite=35; ConfidenceScore=5.26e-01
XSAXXXRRXXXAFQRSSADTSQRMLEFAQSQSVLRAFSGGGSSVFLQRAIEQQHATGARLILLSATSVLLNMWLVQVVFAALLIAAALWLDAYLGNALYVGSVIAVMVSLLLVSRFVDPLLEVAGYGETLRGAGMQLEAVREILAALPMKEPSAPQCPRDASVELCDVSFRHPGSPRDVLRGVNLRIEPGSMTALVGESGSGKTTLLRLVARFFEVSQGQVCIGGVDVRQMSGEQLNAQISQIFQDTYLFQGSVADNIRLGKPDASDAQVLKAARQAGVQEIIERLPMG

SEQ ID NO: 11769 - protein, 219 aa, Zea mays
  misc_feature (1)..(1): Xaa can be any naturally occurring amino acid
  misc_feature (207)..(207): Xaa can be any naturally occurring amino acid
  misc_feature (219)..(219): Xaa can be any naturally occurring amino acid
  Coding DNA Sequence Number=SeqID_5734
  Gene Ontology: Mol. function=phosphopantetheine binding; Cellular component=nucleus; Biological process=metabolic process
  Homolog annotation: Hit_ID=Q9L6D0; Match level="QueryCoverage=99%, HitCoverage=64%, E-value=1e-115, Identity=64%"; Hit description =Pyoverdine synthetase A
XASTRGTYLPIGTPTDNNRLYLLDGALELVPQGAVGELCVAGTGVGRGYVSDSVRTAQVFVPNPFGAAGERLYRTGDLARRRSDGVLEYVGRIDHQVKIRGYRIELGEIEARLHEQPEVRDAAVGVQEGVNGKHLVGYLVAADAQLNPGERLDRIKQRLRAELPEYMVPLHWLWLDRLPLNANGKLDRKALPALEIGQLHSQDYLAXRNELEQTLAGIX

SEQ ID NO: 11770 - protein, 102 aa, Zea mays
  Coding DNA Sequence Number=SeqID_5735
  Gene Ontology: Mol. function=nucleoside-triphosphatase activity; Cellular component=integral to membrane; Biological process=peptide transport
  Homolog annotation: Hit_ID=Q2KWU0; Match level="QueryCoverage=100%, HitCoverage=66%, E-value=1e-41, Identity=66%"; Hit description=ABC transporter, ATP-binding protein
  Pfam annotation: Domain name=ABC_tran; Domain location=13-102; Score=- 55.3; E_value=0.026; Accession=PF00005.17; Description=ABC transporter
EIVGGVSFEVAPGEMVGIVGESGSGKTQAARAIMGLTPPPLVVAGGSIRFEGVEVTQASPAALRKLRGARIGMVFQEPMTSLNPSMSIGRQLDEGLKLHRRD

SEQ ID NO: 11771 - protein, 102 aa, Zea mays; identical to SEQ ID NO: 11770
  Coding DNA Sequence Number=SeqID_5736
  Gene Ontology: Mol. function=nucleoside-triphosphatase activity; Cellular component=integral to membrane; Biological process=peptide transport
  Homolog annotation: Hit_ID=Q2KWU0; Match level="QueryCoverage=100%, HitCoverage=66%, E-value=1e-41, Identity=66%"; Hit description=ABC transporter, ATP-binding protein
  Pfam annotation: Domain name=ABC_tran; Domain location=13-102; Score=- 55.3; E_value=0.026; Accession=PF00005.17; Description=ABC transporter

SEQ ID NO: 11772 - protein, 72 aa, Zea mays
  Coding DNA Sequence Number=SeqID_5737
  Gene Ontology: Mol. function=double-stranded RNA binding; Cellular component=intracellular; Biological process=rRNA catabolic process
  Homolog annotation: Hit_ID=Q48EV3; Match level="QueryCoverage=100%, HitCoverage=31%, E-value=3e-31, Identity=90%"; Hit description =Ribonuclease 3
EIESLTLVDTNKDPKTRLQEFLQSRGCDLPRYEVVDIQGEPHCRVFFVECEITLLNEKSRGQGVSRRIAEQV

SEQ ID NO: 11773 - protein, 257 aa, Zea mays
  Coding DNA Sequence Number=SeqID_613
  Gene Ontology: Mol. function=calmodulin binding
  Homolog annotation: Hit_ID=Q6YU05; Match level="QueryCoverage=70%, HitCoverage=27%, E-value=6e-60, Identity=66%"; Hit description =Putative calmodulin-binding protein
  Subcellular localization annotation: CTP_CleavageSite=51; ConfidenceScore=5.15e-01
LNYICSADGTRNAYNANGNQSARYAANTQSIPANVGMQYDGSAVSPEIQFSGSSLQSQSSRGSNMLALGPPQQHQSFEFPVLGQPVQPTGLNPFEEWPQQQENRGGGVDDYLMEEIRMRSHEILENEEMQQMLRLLSMGGAGTSLAEDGFNFPPYMPAPSPNVSYEDDRTRAPGKAVVGWLKIKAARSSLRRDCTDQPAVVLLADAGLCVVHSSRLRVVCSYRCCLASSVSRILSTTRRRGMFPGQVELGIARVGQG

SEQ ID NO: 11774 - protein, 92 aa, Zea mays
  Coding DNA Sequence Number=SeqID_614
DSRYQLALEMTRVLAREIAGRDTQFTTLGSFAVACNDDEKSPLHRRSQHSIKPLYTIYPPIRTPGTAHRRLGGDNSYDRWQRRGWVHGGVRG

SEQ ID NO: 11775 - protein, 79 aa, Zea mays
  Coding DNA Sequence Number=SeqID_616
  Gene Ontology: Mol. function=cysteine-type peptidase activity; Biological process=ubiquitin-dependent protein catabolic process
  Homolog annotation: Hit_ID=Q9FPS3; Match level="QueryCoverage=79%, HitCoverage=11%, E-value=3e-20, Identity=71%"; Hit description =Ubiquitin carboxyl-terminal hydrolase 24
  Pfam annotation: Domain name=UCH; Domain location=1-76; Score=-77.2; E_value=0.026; Accession=PF00443.19; Description=Ubiquitin carboxyl -terminal hydrolase
PSVLVLSRDLLSSPSQEGRKYELVATITHHGRDPYRGHYTAHAKHGNGQWLRFDDDAVVPVGEKDVLHDQAYVLFYKRV

SEQ ID NO: 11776 - protein, 91 aa, Zea mays
  Coding DNA Sequence Number=SeqID_617
ASKLFIFHKTKLIELQPPCCILGTTSLEQILTPFGGHTIAKVSTQAHGLHFHDKLDRCPCVATETYRQHREHNSYQSSIKGLNDHELCRCL

SEQ ID NO: 11777 - protein, 150 aa, Zea mays
  Coding DNA Sequence Number=SeqID_619
  Subcellular localization annotation: CTP_CleavageSite=68; ConfidenceScore=5.83e-01
IVWIFSTAAVSKLLPPSPSPSRTLSPAPSRSSFSSSAAPLAPLPELAHGTQLRLQARSPSPWRRLPLSCSLVPAELAPCSLASQARRCSSRSLLGPRLFPRSSLCSPWPPRLLPGRRSYSSFSAVSSAPISNGARPKPPYARACSHVAPP

SEQ ID NO: 11778 - protein, 91 aa, Zea mays
  Coding DNA Sequence Number=SeqID_621
RAPPTGQCGPRRCHALRREIMAPPHCHAHGPVASEIPRAPETIPENPLVLVTTCGGFMGGGLVLLPPLLCDPFYKNTRGLLRVGGVPTQSY

SEQ ID NO: 11779 - protein, 125 aa, Zea mays
  Coding DNA Sequence Number=SeqID_623
DAGSMPIATVRRRREAMEDWRARSRGRDTQMQRIKRTAAPWCRIRINIGIKALPVDGSVARTPESGIGGQTRPREETSEDRRTSARMPVRRRSNGGEERGGGQCPSSSGTQWRPPRQRRRSCWSR

SEQ ID NO: 11780 - protein, 153 aa, Zea mays
  Coding DNA Sequence Number=SeqID_625
  Subcellular localization annotation: CTP_CleavageSite=68; ConfidenceScore=5.04e-01
NGTGTYHKDDQTHLLYKCHWTPETAKTSLSANAIGSRGASAASGQASGRARSHEMVCIGSLLRALVLSAAASAGRRRGPRILCGHEADVRVTPRHGHGWRRFRAVTGRMMLDSSDCASAAAAAETGQVQPQRRAVGAVPLAHDGGYASGGWER

SEQ ID NO: 11781 - protein, 72 aa, Zea mays
  Coding DNA Sequence Number=SeqID_626
RRSCASRRDRSVPSTSCSSHRTVTAYGHTDDDHVILTLQAPTLLRPSVRLGGSEVVDVFLFGMCYGLFLIWL

SEQ ID NO: 11782 - protein, 219 aa, Zea mays
  misc_feature (32)..(32): Xaa can be any naturally occurring amino acid
  misc_feature (75)..(75): Xaa can be any naturally occurring amino acid
  misc_feature (97)..(97): Xaa can be any naturally occurring amino acid
  misc_feature (102)..(102): Xaa can be any naturally occurring amino acid
  Coding DNA Sequence Number=SeqID_628
  Gene Ontology: Mol. function=RNA-directed DNA polymerase activity; Cellular component=integral to membrane; Biological process=RNA -dependent DNA replication
  Homolog annotation: Hit_ID=Q2QLW7; Match level="QueryCoverage=92%, HitCoverage=12%, E-value=5e-39, Identity=39%"; Hit description =Retrotransposon protein, putative, unclassified
RSSSCFGKKKRPNDSRFWKSLMKVKDHFLKHXKKNIGNGEDTSFWFDTWCGDLPLAVSFKRLFELSFDNNITSGXALQSNLNSLSFRRILGPETSTXFRTSXNWCESFAFSNEKDKVIWMFGSKEFSVKSLYSSIKSDTVNVPYKFLWKIKLPQKIKNFFWLLLKDRILTKVNLLKRGWVAAPDCSFCGISESSQHLLFEFWLVDVCLLNKNSRDFCLY

SEQ ID NO: 11783 - protein, 480 aa, Zea mays
  Coding DNA Sequence Number=SeqID_629
  Gene Ontology: Mol. function=protein binding; Cellular component =mitochondrion; Biological process=defense response to fungus
  Homolog annotation: Hit_ID=Q337L7; Match level="QueryCoverage=92%, HitCoverage=93%, E-value=1e-119, Identity=50%"; Hit description =Leucine Rich Repeat family protein, expressed
  Pfam annotation: Domain name=LRR_1; Domain location=112-135; Score =10.0; E_value=4.4; Accession=PF00560.23; Description=Leucine Rich Repeat
  Pfam annotation: Domain name=LRR_1; Domain location=137-159; Score =9.3; E_value=5.7; Accession=PF00560.23; Description=Leucine Rich Repeat
  Pfam annotation: Domain name=LRR_1; Domain location=161-183; Score =8.7; E_value=7.6; Accession=PF00560.23; Description=Leucine Rich Repeat
  Pfam annotation: Domain name=LRR_1; Domain location=186-208; Score =15.7; E_value=0.17; Accession=PF00560.23; Description=Leucine Rich Repeat
  Pfam annotation: Domain name=LRR_1; Domain location=210-232; Score =17.0; E_value=0.073; Accession=PF00560.23; Description=Leucine Rich Repeat
  Pfam annotation: Domain name=LRR_1; Domain location=273-295; Score =7.9; E_value=11; Accession=PF00560.23; Description=Leucine Rich Repeat
  Pfam annotation: Domain name=LRR_1; Domain location=297-319; Score =14.5; E_value=0.41; Accession=PF00560.23; Description=Leucine Rich Repeat
  Pfam annotation: Domain name=LRR_1; Domain location=321-343; Score =11.8; E_value=2; Accession=PF00560.23; Description=Leucine Rich Repeat
  Pfam annotation: Domain name=LRR_1; Domain location=345-366; Score =11.9; E_value=1.9; Accession=PF00560.23; Description=Leucine Rich Repeat
  Pfam annotation: Domain name=LRR_1; Domain location=88-107; Score =15.7; E_value=0.17; Accession=PF00560.23; Description=Leucine Rich Repeat
  Pfam module annotation: Pfam domain module=LRR_1::LRR_1::LRR_1::LRR _1::LRR_1::LRR_1::LRR_1::LRR_1::LRR_1::LRR_1; Domain location=112 -135::137-159::161-183::186-208::210-232::273-295::297-319::321 -343::345-366::88-107
MAEHARGSQILLIYLCLLLSSSAHLVTSMDLDSYDDYDNFSDEVVAPADYDDGSFSDEAAPARRRLYDISLNASSSNRSGAAFCRLLFLQILDLSNNKLTGELPDCLWEMQALQFMDLSNNSFSGKIPEAPPSHNCSLASLHLAGNSFTGEFPTVVGGCQQLATVDIGNNRFYGDIPRWIGTFVPALKILRLSSNNFSGQIPPELSQLSQLQLLDLAHNGLTGLIPRELGDLASMKHPKINSSTGSLDGSIYQDRIDIIWKGQDFTFQRILELMTGIDLSGNSLSHCIPDELTNLQGLRFLNLSRNRLSCGIPSSIGSLNVLESLDLSMNELSGAIPPGLSNMLSLNNLNLSSNNLSGTIPTGSQLQTLTDPSIYSNNPGLCGPPLNPCQDTSRVHEGDVGGYRDGDPWLYYCVIAGVVSGFWLWYGMLFSVAKLRCSVFLFADRVQYRVMQKVRPTNHFVSKEKSDPSSVPMISTSDTS

SEQ ID NO: 11784 - protein, 256 aa, Zea mays
  misc_feature (1)..(2): Xaa can be any naturally occurring amino acid
  misc_feature (4)..(4): Xaa can be any naturally occurring amino acid
  misc_feature (6)..(7): Xaa can be any naturally occurring amino acid
  misc_feature (10)..(10): Xaa can be any naturally occurring amino acid
  misc_feature (13)..(13): Xaa can be any naturally occurring amino acid
  misc_feature (16)..(16): Xaa can be any naturally occurring amino acid
  misc_feature (18)..(19): Xaa can be any naturally occurring amino acid
  misc_feature (25)..(25): Xaa can be any naturally occurring amino acid
  Coding DNA Sequence Number=SeqID_5738
  Gene Ontology: Mol. function=nucleoside-triphosphatase activity; Cellular component=intracellular; Biological process=regulation of transcription, DNA-dependent
  Homolog annotation: Hit_ID=Q3K679; Match level="QueryCoverage=99%, HitCoverage=39%, E-value=1e-105, Identity=76%"; Hit description =Sigma-54 Specific Transcriptional Regulator containing GAF, and Fis DNA-binding domains
  Pfam annotation: Domain name=HTH_7; Domain location=210-252; Score =10.9; E_value=0.074; Accession=PF02796.6; Description=Helix-turn -helix domain of resolvase
  Pfam annotation: Domain name=HTH_8; Domain location=212-252; Score =61.4; E_value=3.1e-15; Accession=PF02954.9; Description=Bacterial regulatory protein, Fis family
  Pfam annotation: Domain name=Sigma54_activat; Domain location=3-170; Score=200.1; E_value=5.5e-57; Accession=PF00158.16; Description =Sigma-54 interaction domain
  Pfam module annotation: Pfam domain module=HTH_7::HTH_8::Sigma54 _activat; Domain location=210-252::212-252::3-170
XXKXFXXLNXAAXPEXLXXSELFGXRGGSFTGARKEGMRGKLQQADGGTLFLDEIGDMPLALQTRLLRVLEDRLVVPIGGEPQAVNVRIISATHRNLLERVEDGSFREDLYYRLNGLEIALPPLRERSDKSQLLDFLLAEETGDQPVLLDSPARQALLAFAWPGNVRQLRTVLRTLAALCDDGRIGLEDLPAVIRQARPQPAVVEDRSDSPLDDAERLALLNALEQQRWHMSHTAEQLGVSRNTLYRKLRKHGIAR

SEQ ID NO: 11785 - protein, 173 aa, Zea mays
  Coding DNA Sequence Number=SeqID_5739
  Gene Ontology: Mol. function=transferase activity, transferring phosphorus-containing groups; Cellular component=integral to membrane; Biological process=peptidyl-histidine phosphorylation
  Homolog annotation: Hit_ID=Q9I310; Match level="QueryCoverage=100%, HitCoverage=25%, E-value=1e-40, Identity=50%"; Hit description =Uncharacterized signaling protein PA1727
  Pfam annotation: Domain name=MHYT; Domain location=116-173; Score =58.6; E_value=2.2e-14; Accession=PF03707.7; Description=Bacterial signalling protein N terminal repeat
  Pfam annotation: Domain name=MHYT; Domain location=53-114; Score =84.9; E_value=2.6e-22; Accession=PF03707.7; Description=Bacterial signalling protein N terminal repeat
  Pfam module annotation: Pfam domain module=MHYT::MHYT; Domain location=116-173::53-114
MLVGTYNPSLVLVSLGVAILASYTALGMANRVRAANGLPAARYWLAGGALAMGIGIWSMHFVGMLAFNLPIPMGYDLPLTLLSLAIAIGCSAFALWIVCKDDLPWRRLIMGALLMGAGIAAMHYIGMAAMRMMPGIIYDPTWFALSIAIAVAASGAALWITYRLRHDGPRVAL

SEQ ID NO: 11786 - protein, 203 aa, Zea mays
  Coding DNA Sequence Number=SeqID_5740
  Gene Ontology: Mol. function=oxidoreductase activity; Biological process=metabolic process
  Homolog annotation: Hit_ID=Q3KB92; Match level="QueryCoverage=96%, HitCoverage=37%, E-value=1e-65, Identity=67%"; Hit description =Aldehyde dehydrogenase
  Pfam annotation: Domain name=Aldedh; Domain location=1-203; Score= -283.1; E_value=0.0082; Accession=PF00171.12; Description=Aldehyde dehydrogenase family
AANAAAAAYPVYRSLSAQHRASFLEAIADELDVLGDDFIALVCRETALPAGRIQGERGRTSGQMRLFAKVLRRGDFYGARIDLALPDRQPLPRPDLRQYRIGLGPVAVFGASNFPLAFSTAGGDTAAALAAGCPVVFKAHSGHMATAERVAEAIMRAAQSTGMPDGVFNVIFGGGVGEALVKHPAIRAVGFTGSLKGGRALCD

SEQ ID NO: 11787 - protein, 75 aa, Zea mays
  Coding DNA Sequence Number=SeqID_5741
  Gene Ontology: Mol. function=protein binding
  Homolog annotation: Hit_ID=Q7VU53; Match level="QueryCoverage=84%, HitCoverage=10%, E-value=6e-24, Identity=82%"; Hit description =Putative uncharacterized protein
MEKTAAFPVSFPVLYRLAPHDPAGHRYRITLTVQTPAPEGQRLSLPAWIPGSYLIRDFSRQIESVAAYSGSRRVV

SEQ ID NO: 11788 - protein, 75 aa, Zea mays; identical to SEQ ID NO: 11787
  Coding DNA Sequence Number=SeqID_5742
  Gene Ontology: Mol. function=protein binding
  Homolog annotation: Hit_ID=Q7VU53; Match level="QueryCoverage=84%, HitCoverage=10%, E-value=6e-24, Identity=82%"; Hit description =Putative uncharacterized protein

SEQ ID NO: 11789 - protein, 173 aa, Zea mays
  misc_feature (1)..(51): Xaa can be any naturally occurring amino acid
  misc_feature (53)..(63): Xaa can be any naturally occurring amino acid
  misc_feature (172)..(173): Xaa can be any naturally occurring amino acid
  Coding DNA Sequence Number=SeqID_5743
XXXXXXXXXXXXXXXXXXXXXXXXXXXXXXXXXXXXXXXXXXXXXXXXXXXLXXXXXXXXXXXGRCAGRQADRHAPPGTGRRQRVGAVQHAIALCPRRVQRRLVRRGHRRLQDGPGARVGRPERPRRGRAPARQARTARHPRRPRNPVGRRSQGGLEPAGPCRAVVAGDAGXX

SEQ ID NO: 11790 - protein, 173 aa, Zea mays
  misc_feature (1)..(1): Xaa can be any naturally occurring amino acid
  misc_feature (111)..(120): Xaa can be any naturally occurring amino acid
  misc_feature (123)..(151): Xaa can be any naturally occurring amino acid
  misc_feature (153)..(173): Xaa can be any naturally occurring amino acid
  Coding DNA Sequence Number=SeqID_5744
XFRHPRPRPRDTVQQVPGRLGIAGRQDFAGAADGARSEPAELALGLVAGALVGRRVRQDHLVGVDGLAEPAAVERDAGKVQLRAERRRLVGGGLFQVAHGGLLVAQRIGRXXXXXXXXXXEVXXXXXXXXXXXXXXXXXXXXXXXXXXXXXPXXXXXXXXXXXXXXXXXXXXX

SEQ ID NO: 11791 - protein, 50 aa, Zea mays
  Coding DNA Sequence Number=SeqID_5745
  Gene Ontology: Mol. function=hydrolase activity, acting on ester bonds
  Homolog annotation: Hit_ID=Q4K625; Match level="QueryCoverage=100%, HitCoverage=8%, E-value=6e-14, Identity=76%"; Hit description =Phosphoesterase family protein
TIYDTGSILRLATRLFDLPTLDGLKARDDAMTARGQKPMGDLTNALTFSA

SEQ ID NO: 11792 - protein, 50 aa, Zea mays; identical to SEQ ID NO: 11791
  Coding DNA Sequence Number=SeqID_5746
  Gene Ontology: Mol. function=hydrolase activity, acting on ester bonds
  Homolog annotation: Hit_ID=Q4K625; Match level="QueryCoverage=100%, HitCoverage=8%, E-value=6e-14, Identity=76%"; Hit description =Phosphoesterase family protein

SEQ ID NO: 11793 - protein, 124 aa, Zea mays
  Coding DNA Sequence Number=SeqID_5747
  Gene Ontology: Mol. function=hydrolase activity; Cellular component =membrane; Biological process=metabolic process
  Homolog annotation: Hit_ID=A7MKA1; Match level="QueryCoverage=98%, HitCoverage=36%, E-value=1e-48, Identity=73%"; Hit description =Putative uncharacterized protein
DTYTVTAPDGVTLAVQESGNPDGPTLLFIHGLLGSHLNWEAQVNSPQLQRFRMITYDLRGHGLSSKPAEDAAYIEGRRWADDLNAVITASHADKPLLVGWSLGGAVISNYLARYGDSQIAGAVY

SEQ ID NO: 11794 - protein, 52 aa, Zea mays
  misc_feature (1)..(1): Xaa can be any naturally occurring amino acid
  Coding DNA Sequence Number=SeqID_5748
  Gene Ontology: Mol. function=transferase activity, transferring alkyl or aryl (other than methyl) groups; Biological process=aromatic amino acid family biosynthetic process
  Homolog annotation: Hit_ID=A1Z0H6; Match level="QueryCoverage=98%, HitCoverage=11%, E-value=9e-22, Identity=94%"; Hit description=3 -phosphoshikimate 1-carboxyvinyltransferase
XTLDCMRAFGAQVDIVDESTWRVAPTGYTAHDYLIEPDASAATYLWAAEVLT

SEQ ID NO: 11795 - protein, 52 aa, Zea mays; identical to SEQ ID NO: 11794
  misc_feature (1)..(1): Xaa can be any naturally occurring amino acid
  Coding DNA Sequence Number=SeqID_5749
  Gene Ontology: Mol. function=transferase activity, transferring alkyl or aryl (other than methyl) groups; Biological process=aromatic amino acid family biosynthetic process
  Homolog annotation: Hit_ID=A1Z0H6; Match level="QueryCoverage=98%, HitCoverage=11%, E-value=9e-22, Identity=94%"; Hit description=3 -phosphoshikimate 1-carboxyvinyltransferase

SEQ ID NO: 11796 - protein, 270 aa, Zea mays
  misc_feature (1)..(1): Xaa can be any naturally occurring amino acid
  misc_feature (3)..(5): Xaa can be any naturally occurring amino acid
  misc_feature (26)..(28): Xaa can be any naturally occurring amino acid
  misc_feature (33)..(34): Xaa can be any naturally occurring amino acid
  Coding DNA Sequence Number=SeqID_5750
  Gene Ontology: Mol. function=transporter activity; Cellular component= outer membrane-bounded periplasmic space; Biological process=transport
  Homolog annotation: Hit_ID=Q3K512; Match level="QueryCoverage=99%, HitCoverage=72%, E-value=1e-124, Identity=81%"; Hit description =Extracellular solute-binding protein, family 1 precursor
  Pfam annotation: Domain name=SBP_bac_1; Domain location=1-269; Score =44.5; E_value=3.7e-10; Accession=PF01547.15; Description=Bacterial extracellular solute-binding protein
XMXXXAGAAHADDKVLHVYNWSDYIXXXTIANXXKESGIKVVYDVFDSNETLEAKLLAGKSGYDIVVPSNNFLAKQIKAGVYQELDKSKLSNYDNLNKSLLKAVSISDPGNKHAFPYMWGSIGIGYNPEKVKAALGIDKIDSWDTILKPENLAKLKGCGVSFLDSPTEMLPVALHYLGLPTDTQKKEDLKQAEALFLKLRPSIGYFHSSKYISDLANGNICVAVGYSGDVQQAKSRAAEAGGKVKVAYDIPKEGAGSFYDMVAIPKDAEN

SEQ ID NO: 11797 - protein, 184 aa, Zea mays
  Coding DNA Sequence Number=SeqID_5751
  Gene Ontology: Mol. function=2 iron, 2 sulfur cluster binding; Cellular component=membrane; Biological process=electron transport
  Homolog annotation: Hit_ID=Q19A65; Match level="QueryCoverage=100%, HitCoverage=51%, E-value=3e-90, Identity=89%"; Hit description=PaaK
  Pfam annotation: Domain name=FAD_binding_6; Domain location=6-105; Score=69.7; E_value=9.6e-18; Accession=PF00970.14; Description =Oxidoreductase FAD-binding domain
  Pfam annotation: Domain name=NAD_binding_1; Domain location=116-184; Score=1.9; E_value=0.0013; Accession=PF00175.11; Description =Oxidoreductase NAD-binding domain
  Pfam module annotation: Pfam domain module=FAD_binding_6::NAD_binding_ 1; Domain location=6-105::116-184
MSKFHSLTIKDVRNETRDAVSIAFEIPQHLQDSFHFTQGQHLVMRTQLDGEEVRRSYSICTGVNDGELRIAIKRVAGGRFSAFANEQLKAGHSLEVMPPAGHFHVDLDPARHGHYLAVAAGSGITPILSIIKTTLQTEPHSRVTLLYGNRSSSGALFREQLEDLKNRYLQRLNLIFVFSREQQD

SEQ ID NO: 11798 - protein, 41 aa, Zea mays
  Coding DNA Sequence Number=SeqID_5752
  Gene Ontology: Mol. function=beta-lactamase activity; Biological process=beta-lactam antibiotic catabolic process
  Homolog annotation: Hit_ID=A5VZL4; Match level="QueryCoverage=100%, HitCoverage=9%, E-value=2e-15, Identity=95%"; Hit description=Beta -lactamase
VQIQGHYELQFEAVREAFAALFDDPQERGAALCIQIGGETV

SEQ ID NO: 11799 - protein, 41 aa, Zea mays; identical to SEQ ID NO: 11798
  Coding DNA Sequence Number=SeqID_5753
  Gene Ontology: Mol. function=beta-lactamase activity; Biological process=beta-lactam antibiotic catabolic process
  Homolog annotation: Hit_ID=A5VZL4; Match level="QueryCoverage=100%, HitCoverage=9%, E-value=2e-15, Identity=95%"; Hit description=Beta -lactamase

SEQ ID NO: 11800 - protein, 158 aa, Zea mays
  misc_feature (6)..(6): Xaa can be any naturally occurring amino acid
  misc_feature (23)..(23): Xaa can be any naturally occurring amino acid
  Coding DNA Sequence Number=SeqID_5754
  Homolog annotation: Hit_ID=Q08N58; Match level="QueryCoverage=92%, HitCoverage=49%, E-value=8e-16, Identity=36%"; Hit description =Putative uncharacterized protein
CVTVRXFKEVKETGGGYHVKMRXGFELDLSKKDLEDAAKYAQFKGDDPAMLTDANFMFAASAKRAQIEGNGLDDRPGEAQRSFAHAMQSLNNGEMPHEALDRLGLKGLYRNSSSSELASGKLGVVAYDRHSMAVIGGQVELWGRRGGSPKQGIAYAFI

SEQ ID NO: 11801 - protein, 158 aa, Zea mays; identical to SEQ ID NO: 11800
  misc_feature (6)..(6): Xaa can be any naturally occurring amino acid
  misc_feature (23)..(23): Xaa can be any naturally occurring amino acid
  Coding DNA Sequence Number=SeqID_5755
  Homolog annotation: Hit_ID=Q08N58; Match level="QueryCoverage=92%, HitCoverage=49%, E-value=8e-16, Identity=36%"; Hit description =Putative uncharacterized protein

SEQ ID NO: 11802 - protein, 374 aa, Zea mays
  misc_feature (187)..(192): Xaa can be any naturally occurring amino acid
  misc_feature (194)..(255): Xaa can be any naturally occurring amino acid
  misc_feature (257)..(311): Xaa can be any naturally occurring amino acid
  misc_feature (313)..(374): Xaa can be any naturally occurring amino acid
  Coding DNA Sequence Number=SeqID_5756
DGAIRAGSGLDVHPGLRAGLQAHRDPLVVGHFVAVGGFELLAGDLEHHARHLVARVVAGADDGMPRQAAGLDHLGVGDLDPALHVAQHGVGPAVEFAAEVGALHGLVLQGSIGEKQHAGFVHFRHLCVLQEIWCSPLYTSYHRTPALGQAPGSGPTAVSARACHTHVCRQDCLFQMNVRGYHRSGLXXXXXXSXXXXXXXXXXXXXXXXXXXXXXXXXXXXXXXXXXXXXXXXXXXXXXXXXXXXXXXXXXXXXXRXXXXXXXXXXXXXXXXXXXXXXXXXXXXXXXXXXXXXXXXXXXXXXXXXXXXXXXGXXXXXXXXXXXXXXXXXXXXXXXXXXXXXXXXXXXXXXXXXXXXXXXXXXXXXXXXXXXXXX

SEQ ID NO: 11803 - protein, 374 aa, Zea mays; identical to SEQ ID NO: 11802
  misc_feature (187)..(192): Xaa can be any naturally occurring amino acid
  misc_feature (194)..(255): Xaa can be any naturally occurring amino acid
  misc_feature (257)..(311): Xaa can be any naturally occurring amino acid
  misc_feature (313)..(374): Xaa can be any naturally occurring amino acid
  Coding DNA Sequence Number=SeqID_5757

SEQ ID NO: 11804 - protein, 247 aa, Zea mays
  misc_feature (2)..(2): Xaa can be any naturally occurring amino acid
  misc_feature (247)..(247): Xaa can be any naturally occurring amino acid
  Coding DNA Sequence Number=SeqID_5758
  Gene Ontology: Mol. function=transporter activity; Cellular component= integral to membrane; Biological process=transport
  Homolog annotation: Hit_ID=Q3K549; Match level="QueryCoverage=95%, HitCoverage=41%, E-value=1e-101, Identity=80%"; Hit description =Binding-protein-dependent transport systems inner membrane component
  Pfam annotation: Domain name=BPD_transp_1; Domain location=67-241; Score=0.8; E_value=0.0067; Accession=PF00528.12; Description=Binding- protein-dependent transport s
AXVFQPAPSKLRDGCYLAIVLLICAILLLVFGMAVYSSLVKFWPYNLSLSLAHYQFEDTAGGGWLAYRNSITMALCTALIGSVLIFTGAYLMEKTKGQKGLNLALRMLSFVPMAVPGLVLGLGYVFFFNLNGNPLHVLYGTMTLLVVCTIAHYLTTAQMTATTALRQLDAEFEAAALSLKAPLYRHYLRVTVPICLPALLDIVRYLFVSAMTTVSAAIFLYSPDTILAAVAVLNMDDAGNVGGAAAX

SEQ ID NO: 11805 - protein, 194 aa, Zea mays
  misc_feature (1)..(1): Xaa can be any naturally occurring amino acid
  misc_feature (3)..(13): Xaa can be any naturally occurring amino acid
  misc_feature (15)..(18): Xaa can be any naturally occurring amino acid
  misc_feature (20)..(25): Xaa can be any naturally occurring amino acid
  misc_feature (194)..(194): Xaa can be any naturally occurring amino acid
  Coding DNA Sequence Number=SeqID_5759
XSXXXXXXXXXXXAXXXXRXXXXXXAHPPRQRRGPAGPAVDRRRRHRGGPATQQRRPGAHPARRGGLRAPGRVPRPRPQAAGRRAGAAPALARAGAGRHRRLRGPPLRALSRRMTMRPDLPLALLLALILPLAPLGAQAANEHYLGYAYAAHGGAERYREEHWVVRDGARQTRLVLYRCPDGAAFARKWVRGGX

SEQ ID NO: 11806 - protein, 164 aa, Zea mays
  misc_feature (1)..(1): Xaa can be any naturally occurring amino acid
  misc_feature (10)..(12): Xaa can be any naturally occurring amino acid
  Coding DNA Sequence Number=SeqID_5761
  Gene Ontology: Mol. function=oxidoreductase activity; Cellular component=cellular_component; Biological process=metabolic process
  Homolog annotation: Hit_ID=Q4IYR0; Match level="QueryCoverage=96%, HitCoverage=57%, E-value=1e-62, Identity=73%"; Hit description=Short- chain dehydrogenase/reductase SDR
XAVNVRAPFXXXQEALKLMISQRVEGAVVNIQSVTGHGGQSFLSAYAASKGALAILTKNVAFSALRNRIRVNGLNIGWMDTPHEDEIQRHYHGAGDGWLEAAEAAQPFGRLLKPEEVAQSVAFLLSRESGMMTGTVIDLEQGVIGCGDGGTPRPDQALSLVEGA

SEQ ID NO: 11807 - protein, 148 aa, Zea mays
  misc_feature (148)..(148): Xaa can be any naturally occurring amino acid
  Coding DNA Sequence Number=SeqID_5762
  Gene Ontology: Mol. function=transferase activity, transferring phosphorus-containing groups; Cellular component=integral to membrane; Biological process=two-component signal transduction system (phosphorelay)
  Homolog annotation: Hit_ID=Q3K7G3; Match level="QueryCoverage=97%, HitCoverage=24%, E-value=9e-44, Identity=65%"; Hit description =Periplasmic Sensor Signal Transduction Histidine Kinase precursor
DLLDQKYHRYLLVFSTLLVALLLYLAIRLLRSFAEINRVNRALHVVNENLEQRVEERTRELKDAQGELLDSARQAGMAEIATNVLHNVGNVLNSVNISAELVTRKLRTSKALGLGKAMQLINEHRRDLGTFLTENEKGKLLPDYLNQX

SEQ ID NO: 11808 - protein, 70 aa, Zea mays
  misc_feature (1)..(7): Xaa can be any naturally occurring amino acid
  misc_feature (9)..(12): Xaa can be any naturally occurring amino acid
  misc_feature (17)..(18): Xaa can be any naturally occurring amino acid
  misc_feature (22)..(22): Xaa can be any naturally occurring amino acid
  misc_feature (31)..(32): Xaa can be any naturally occurring amino acid
  Coding DNA Sequence Number=SeqID_5763
  Gene Ontology: Mol. function=amino-acid N-acetyltransferase activity; Cellular component=cytoplasm; Biological process=amino acid biosynthetic process
  Homolog annotation: Hit_ID=A4XP61; Match level="QueryCoverage=82%, HitCoverage=13%, E-value=2e-18, Identity=79%"; Hit description=N -acetylglutamate synthase
XXXXXXXLXXXXETRAXXAQGXKTLFVLTTXXAHWFRERGFVPSTVDRLPSARASLYNYQRNSKIFEKAL

SEQ ID NO: 11809 - protein, 71 aa, Zea mays
  Coding DNA Sequence Number=SeqID_5764
  Gene Ontology: Mol. function=protein transporter activity; Cellular component=membrane; Biological process=protein secretion
  Homolog annotation: Hit_ID=A1WES9; Match level="QueryCoverage=95%, HitCoverage=18%, E-value=9e-14, Identity=54%"; Hit description =Efflux transporter, RND family, MFP subunit
VQRGQSDTFVYVVDGAGVAQPRPVKVERMQDGLAVIQQGLDAGQRVVVDGQYKLKPGSKVRELAAAAGGGQ

SEQ ID NO: 11810 - protein, 71 aa, Zea mays; identical to SEQ ID NO: 11809
  Coding DNA Sequence Number=SeqID_5765
  Gene Ontology: Mol. function=protein transporter activity; Cellular component=membrane; Biological process=protein secretion
  Homolog annotation: Hit_ID=A1WES9; Match level="QueryCoverage=95%, HitCoverage=18%, E-value=9e-14, Identity=54%"; Hit description =Efflux transporter, RND family, MFP subunit

SEQ ID NO: 11811 - protein, 148 aa, Zea mays
  misc_feature (1)..(64): Xaa can be any naturally occurring amino acid
  Coding DNA Sequence Number=SeqID_5766
  Homolog annotation: Hit_ID=Q9AJ69; Match level="QueryCoverage=43%, HitCoverage=58%, E-value=4e-09, Identity=52%"; Hit description =Putative uncharacterized protein
XXXXXXXXXXXXXXXXXXXXXXXXXXXXXXXXXXXXXXXXXXXXXXXXXXXXXXXXXXXXXXXXPATTRATPAANGCRPWRWRRNTAGKTGVIEPACSFQTTPAHTIKTHFVLLQALILGRFVNWPVTHENGWPLEIISQRDAVHTSR

SEQ ID NO: 11812 - protein, 148 aa, Zea mays; identical to SEQ ID NO: 11811
  misc_feature (1)..(64): Xaa can be any naturally occurring amino acid
  Coding DNA Sequence Number=SeqID_5767
  Homolog annotation: Hit_ID=Q9AJ69; Match level="QueryCoverage=43%, HitCoverage=58%, E-value=4e-09, Identity=52%"; Hit description =Putative uncharacterized protein

SEQ ID NO: 11813 - protein, 110 aa, Zea mays
  Coding DNA Sequence Number=SeqID_5768
  Gene Ontology: Mol. function=transferase activity, transferring phosphorus-containing groups; Cellular component=integral to membrane; Biological process=two-component signal transduction system (phosphorelay)
  Homolog annotation: Hit_ID=Q3K7M0; Match level="QueryCoverage=100%, HitCoverage=25%, E-value=3e-55, Identity=96%"; Hit description =Periplasmic Sensor Signal Transduction Histidine Kinase precursor
MEFKQSLAQRIIIAFALMSALVAGAFAMGIVATVHLVEEKLISAGLGGDLQRLLLMDSVEDWSHRPEPDQLFYFSGGPGDFELPKDLRHLDAGFHEVFREQLSYHAMVEI

SEQ ID NO: 11814 - protein, 254 aa, Zea mays
  misc_feature (6)..(6): Xaa can be any naturally occurring amino acid
  misc_feature (10)..(10): Xaa can be any naturally occurring amino acid
  misc_feature (15)..(15): Xaa can be any naturally occurring amino acid
  misc_feature (17)..(17): Xaa can be any naturally occurring amino acid
  Coding DNA Sequence Number=SeqID_5769
  Gene Ontology: Mol. function=DNA-directed DNA polymerase activity; Cellular component=cytoplasm; Biological process=DNA repair
  Homolog annotation: Hit_ID=Q3KH18; Match level="QueryCoverage=97%, HitCoverage=70%, E-value=1e-125, Identity=91%"; Hit description=DNA -directed DNA polymerase
  Pfam annotation: Domain name=IMS; Domain location=11-254; Score =186.7; E_value=5.8e-53; Accession=PF00817.11; Description =impBmucBsamB family
GARPYXKIIXVDCDXFXAAIEMRDDPTLAQKPLAVGGSADRRGVIATCNYEARAYGVRSAMSSRHALKLCPDLTIVKPRMDAYKEASKEIQTIFRDYTDLIEPLSLDEAYLDVSDSPHFGGSATRIAQDIRRRVSNQLHITVSAGVAPNKFLAKIASDWKKPNGLFVITPDQVEDFVSALPVKKLHGVGKVTADKLTRLGIEDCLQLREWNKLALVREFGSFGERLWSLARGIDDRVVQNDSRRQSISVENTYE

SEQ ID NO: 11815 - protein, 278 aa, Zea mays
  misc_feature (4)..(5): Xaa can be any naturally occurring amino acid
  misc_feature (7)..(11): Xaa can be any naturally occurring amino acid
  misc_feature (13)..(16): Xaa can be any naturally occurring amino acid
  misc_feature (19)..(20): Xaa can be any naturally occurring amino acid
  misc_feature (22)..(24): Xaa can be any naturally occurring amino acid
  misc_feature (26)..(27): Xaa can be any naturally occurring amino acid
  misc_feature (29)..(29): Xaa can be any naturally occurring amino acid
  misc_feature (278)..(278): Xaa can be any naturally occurring amino acid
  Coding DNA Sequence Number=SeqID_5770
  Gene Ontology: Mol. function=two-component response regulator activity; Biological process=two-component signal transduction system (phosphorelay)
  Homolog annotation: Hit_ID=Q4KIU5; Match level="QueryCoverage=99%, HitCoverage=69%, E-value=1e-113, Identity=77%"; Hit description =Putative uncharacterized protein
QVAXXGXXXXXLXXXXVTXXNXXXIXXDXEHVTTQCALIEGALEAKPLLAIVALGDGMDNQLVLNAMRAGARDFVAYGSRASEVAGLVRRLSKRLPAVTPNAHLGGLTVLYGTQGNADGALIASHLALVVQKSGQQTLLLDLGLPLADSLALLGLESSFHFGDALRHLRRLDSTLINSAFTSAEAGLRILAYHNNDEPLDRTSAAELYMLLSALRQHFQHIVVNLTGQPDSEALRTFVSHCDKLLWCTDQSVPDCRRNLAVLNLWREKGMKLDHARLX

SEQ ID NO: 11816 - protein, 159 aa, Zea mays
  misc_feature (115)..(117): Xaa can be any naturally occurring amino acid
  misc_feature (133)..(138): Xaa can be any naturally occurring amino acid
  misc_feature (140)..(143): Xaa can be any naturally occurring amino acid
  misc_feature (145)..(146): Xaa can be any naturally occurring amino acid
  misc_feature (149)..(153): Xaa can be any naturally occurring amino acid
  misc_feature (156)..(156): Xaa can be any naturally occurring amino acid
  misc_feature (159)..(159): Xaa can be any naturally occurring amino acid
  Coding DNA Sequence Number=SeqID_5771
  Gene Ontology: Mol. function=oxidoreductase activity; Cellular component=integral to membrane; Biological process=electron transport
  Homolog annotation: Hit_ID=A6V8Y1; Match level="QueryCoverage=99%, HitCoverage=77%, E-value=5e-44, Identity=56%"; Hit description=NAD
  Pfam annotation: Domain name=Flavodoxin_2; Domain location=1-154; Score=74.9; E_value=2.6e-19; Accession=PF02525.7; Description =Flavodoxin-like fold
MHALIVVAHHDSHSLTHSLAKQAAAGITAAGHTFEIADLAAEGFDPRYNAADHKVHRTRATPPADVLAEQARLDRADALVLVFPIFWWSMPALLKGWIDRVFVNGWAIDYSLETXXXKKLGHLQVHLLGVGGXXXXXXEXXXXAXXMRXXXXXGIXDYX

SEQ ID NO: 11817 - protein, 251 aa, Zea mays
  Coding DNA Sequence Number=SeqID_5772
  Gene Ontology: Mol. function=protein binding
  Homolog annotation: Hit_ID=Q3KBK8; Match level="QueryCoverage=98%, HitCoverage=15%, E-value=1e-36, Identity=38%"; Hit description =Leucine-rich repeat
MQDAPAVTPASSLDDNNEFIRQAIPDWLVQAPAHRIVALKQARLEQAQWTDSLSPLQRRTLKAFNETSFKSQHAVDKHLANIQALMPFATGLLNSALKEQFNISVDVEGTYLRLYEPLKLGKLGVKAGEYKVLEVSLIQATLHNFEASEGEDGAFDPASGFTQHPDWEGASPTISQTLSVPAFIRLCRTLDVGARYQAHLKEVLLPTDEAVAARLRDAVITSQKDALRAAAYLALLKQDIRPDDFVMVLKV

SEQ ID NO: 11818 - protein, 141 aa, Zea mays
  Coding DNA Sequence Number=SeqID_5773
  Gene Ontology: Mol. function=binding
  Homolog annotation: Hit_ID=Q4KCT2; Match level="QueryCoverage=96%, HitCoverage=25%, E-value=2e-33, Identity=52%"; Hit description=TPR domain protein, putative
  Pfam annotation: Domain name=TPR_1; Domain location=26-59; Score =33.3; E_value=8.8e-07; Accession=PF00515.18; Description =Tetratricopeptide repeat
  Pfam annotation: Domain name=TPR_2; Domain location=26-59; Score =32.5; E_value=1.5e-06; Accession=PF07719.7; Description =Tetratricopeptide repeat
  Pfam module annotation: Pfam domain module=TPR_1::TPR_2; Domain location=26-59::26-59
YWKGIAAYNAADYDLALATFAQLDTAQAAFYRGNIHVRRFKFDDAIAAYQQALQQQPQFPEASANLALALALKKDTENASDNAPEVKPDAVKFDKAAGKGKSKAIQTEQASNDALWLQNLTTSPANFLRRKFSLQDQGAQP

SEQ ID NO: 11819 - protein, 141 aa, Zea mays; identical to SEQ ID NO: 11818
  Coding DNA Sequence Number=SeqID_5774
  Gene Ontology: Mol. function=binding
  Homolog annotation: Hit_ID=Q4KCT2; Match level="QueryCoverage=96%, HitCoverage=25%, E-value=2e-33, Identity=52%"; Hit description=TPR domain protein, putative
  Pfam annotation: Domain name=TPR_1; Domain location=26-59; Score =33.3; E_value=8.8e-07; Accession=PF00515.18; Description =Tetratricopeptide repeat
  Pfam annotation: Domain name=TPR_2; Domain location=26-59; Score =32.5; E_value=1.5e-06; Accession=PF07719.7; Description =Tetratricopeptide repeat
  Pfam module annotation: Pfam domain module=TPR_1::TPR_2; Domain location=26-59::26-59

SEQ ID NO: 11820 - protein, 113 aa, Zea mays
  Coding DNA Sequence Number=SeqID_5775
  Gene Ontology: Mol. function=binding
  Homolog annotation: Hit_ID=Q4KKC5; Match level="QueryCoverage=100%, HitCoverage=13%, E-value=5e-34, Identity=62%"; Hit description =Heamin storage system, HmsH protein
DLTVEGEVSTHSYGHGVKPGLRLSAAYDIDDHWQVGGSGELLSRETPLRALTNDITANRLTGFVRWRANERREWTLSLSPSRFSDGNQRWELGLDGRERVYTAPHLKADLTLD

SEQ ID NO: 11821 - protein, 132 aa, Zea mays
  misc_feature (98)..(98): Xaa can be any naturally occurring amino acid
  misc_feature (105)..(106): Xaa can be any naturally occurring amino acid
  misc_feature (112)..(112): Xaa can be any naturally occurring amino acid
  misc_feature (118)..(118): Xaa can be any naturally occurring amino acid
  misc_feature (120)..(122): Xaa can be any naturally occurring amino acid
  misc_feature (124)..(125): Xaa can be any naturally occurring amino acid
  misc_feature (131)..(131): Xaa can be any naturally occurring amino acid
  Coding DNA Sequence Number=SeqID_5776
  Gene Ontology: Mol. function=monooxygenase activity
  Homolog annotation: Hit_ID=A9IMS5; Match level="QueryCoverage=100%, HitCoverage=33%, E-value=3e-59, Identity=84%"; Hit description =Alkanesulfonate monooxygenase
MDVFWFIPTHGDSRYLGTSRGARAAGYDYFRQVAVAADTLGYDGVLLPTGRSCEDAWVVASSLIGATRRLKFLVAIRPGVSSPQFSARMAATFDRLSXGRLLVNXXTGGDPXELEGDXVXXXHXXRYAITXD

SEQ ID NO: 11822 - protein, 182 aa, Zea mays
  misc_feature (1)..(1): Xaa can be any naturally occurring amino acid
  Coding DNA Sequence Number=SeqID_5777
  Gene Ontology: Mol. function=metal ion binding; Cellular component =plasma membrane; Biological process=culmination during sorocarp development
  Homolog annotation: Hit_ID=Q3KHW2; Match level="QueryCoverage=98%, HitCoverage=69%, E-value=9e-91, Identity=91%"; Hit description=Class II aldolase/adducin-like
  Pfam annotation: Domain name=Aldolase_II; Domain location=2-140; Score=53.1; E_value=9.7e-13; Accession=PF00596.11; Description=Class II Aldolase and Adducin N-terminal domain
XAGNKLMDSPYEVNPAGYTIHSAVHEVRHDVVCVLHTHTASGIAVSAQKQGVLPISQQSLFVLSSLAYHAYEGVALNHEEKARLQADLGENNFLMLHNHGLLTCGPSIADTFLMMFIFQRTCDIQVMAQNGGAELITIAPQILAGARAMIAGVTKSAQGMGGALAWPALLRKLDALDPGYKS

SEQ ID NO: 11823 - protein, 77 aa, Zea mays
  Coding DNA Sequence Number=SeqID_5778
  Gene Ontology: Cellular component=membrane; Biological process =pathogenesis
  Homolog annotation: Hit_ID=Q2L0V6; Match level="QueryCoverage=100%, HitCoverage=32%, E-value=2e-23, Identity=74%"; Hit description =Mg(2+) transport ATPase protein c
  Pfam annotation: Domain name=MgtC; Domain location=1-75; Score=-6.8; E_value=2.9e-05; Accession=PF02308.7; Description=MgtC family
MAFRVGGPDGGARVISYVVSGVGFLGAGAIMREGGSIRGLNTAATLWGSAAIGACAGASLILEAIAATVFVLAANTL

SEQ ID NO: 11824 - protein, 77 aa, Zea mays; identical to SEQ ID NO: 11823
  Coding DNA Sequence Number=SeqID_5779
  Gene Ontology: Cellular component=membrane; Biological process =pathogenesis
  Homolog annotation: Hit_ID=Q2L0V6; Match level="QueryCoverage=100%, HitCoverage=32%, E-value=2e-23, Identity=74%"; Hit description =Mg(2+) transport ATPase protein c
  Pfam annotation: Domain name=MgtC; Domain location=1-75; Score=-6.8; E_value=2.9e-05; Accession=PF02308.7; Description=MgtC family

SEQ ID NO: 11825 - protein, 149 aa, Zea mays
  Coding DNA Sequence Number=SeqID_5780
  Gene Ontology: Mol. function=oxidoreductase activity, acting on the CH-CH group of donors; Biological process=electron transport
  Homolog annotation: Hit_ID=UPI00006A2896; Match level="QueryCoverage =100%, HitCoverage=35%, E-value=3e-82, Identity=100%"; Hit description=UPI00006A2896 related cluster
  Pfam annotation: Domain name=Acyl-CoA_dh_2; Domain location=1-125; Score=49.6; E_value=1.1e-11; Accession=PF08028.2; Description=Acyl -CoA dehydrogenase, C-terminal doma
IALGALEQAKIHARQARPWIDSQQDHGWQDPFTIAAIGDLEWRVHGTEAILAKAGVAVDQALANPNEDTVANASLVVAQAKVLSAETALLASSKLFELAGTRSVSGKHNLDRFWRNARTHTLHDPARWKYHLIGNFVLNGVKPARHAWN

SEQ ID NO: 11826 - protein, 82 aa, Zea mays
  misc_feature (1)..(1): Xaa can be any naturally occurring amino acid
  Coding DNA Sequence Number=SeqID_5781
  Gene Ontology: Mol. function=transporter activity; Cellular component= integral to membrane; Biological process=transport
  Homolog annotation: Hit_ID=A9IJH2; Match level="QueryCoverage=98%, HitCoverage=20%, E-value=2e-28, Identity=79%"; Hit description =Putative Sugar efflux transpoter
XSPLGATALFSSLMAVGLAFVAPVMQSHGLLAVALTIWGIAQAALFIVCHVRLMKSAPEAPAFAASLNISGANIGIGLGAVV

SEQ ID NO: 11827 - protein, 82 aa, Zea mays; identical to SEQ ID NO: 11826
  misc_feature (1)..(1): Xaa can be any naturally occurring amino acid
  Coding DNA Sequence Number=SeqID_5782
  Gene Ontology: Mol. function=transporter activity; Cellular component= integral to membrane; Biological process=transport
  Homolog annotation: Hit_ID=A9IJH2; Match level="QueryCoverage=98%, HitCoverage=20%, E-value=2e-28, Identity=79%"; Hit description =Putative Sugar efflux transpoter

SEQ ID NO: 11828 - protein, 201 aa, Zea mays
  Coding DNA Sequence Number=SeqID_5783
  Gene Ontology: Mol. function=receptor activity; Cellular component =outer membrane-bounded periplasmic space
  Homolog annotation: Hit_ID=Q7WNE8; Match level="QueryCoverage=84%, HitCoverage=51%, E-value=1e-79, Identity=88%"; Hit description =Putative exported protein
  Pfam annotation: Domain name=Bug; Domain location=53-201; Score= -25.4; E_value=3e-09; Accession=PF03401.5; Description=Bordetella uptake gene (bug) product
MTRSPERSRMRRFAACCALALAATGAAQADDAYPSKPITIVVPFSPGSATDTSARILTEKLGPRLGVPIVIENKPGASGTIGSSTAARAAPDGYTLILTSSSTHSATPALFRKLPYDPTGDFIHVIRIATIPMMLVVRADSPYGSVSQLVQATRAKPLNYAYGSPTSQIAGATFNSVAGAAANAVPYKSQPPAVTDLLGGH

SEQ ID NO: 11829 - protein, 77 aa, Zea mays
  misc_feature (77)..(77): Xaa can be any naturally occurring amino acid
  Coding DNA Sequence Number=SeqID_5784
IQHRNLLIEAIQVDGFRQSLCQLALIHLLGDQVQQVINAEHRFNVRTGRTVGRTLDTRGGYPGDPVVITDALFRVVX

SEQ ID NO: 11830 - protein, 141 aa, Zea mays
  misc_feature (141)..(141): Xaa can be any naturally occurring amino acid
  Coding DNA Sequence Number=SeqID_5786
  Gene Ontology: Mol. function=transporter activity; Cellular component= integral to membrane; Biological process=transport
  Homolog annotation: Hit_ID=Q0JZF2; Match level="QueryCoverage=99%, HitCoverage=16%, E-value=3e-24, Identity=43%"; Hit description=Outer membrane fimbrial usher porin, FUP family precursor
  Subcellular localization annotation: CTP_CleavageSite=91; ConfidenceScore=5.12e-01
TDVQQSVTGATGEDGALTYGVNASRSLGGAAASSVAGGSAAYASPYATMAANASGGRGFSQYGATVSGGVVAYGGGVVFTPALGDTAVVVEARHAAGARVASGSGLRIDPWGRAVVSNLTPFASNEIEVDPKGLPLSVALX

SEQ ID NO: 11831 - protein, 141 aa, Zea mays; identical to SEQ ID NO: 11830
  misc_feature (141)..(141): Xaa can be any naturally occurring amino acid
  Coding DNA Sequence Number=SeqID_5787
  Gene Ontology: Mol. function=transporter activity; Cellular component= integral to membrane; Biological process=transport
  Homolog annotation: Hit_ID=Q0JZF2; Match level="QueryCoverage=99%, HitCoverage=16%, E-value=3e-24, Identity=43%"; Hit description=Outer membrane fimbrial usher porin, FUP family precursor
  Subcellular localization annotation: CTP_CleavageSite=91; ConfidenceScore=5.12e-01

SEQ ID NO: 11832 - protein, 135 aa, Zea mays
  Coding DNA Sequence Number=SeqID_5788
  Homolog annotation: Hit_ID=A9I8W8; Match level="QueryCoverage=100%, HitCoverage=78%, E-value=3e-34, Identity=49%"; Hit description =Putative uncharacterized protein
KQWRRLWNQLVRLEPGEMLSITTHKERMGWYHRKHMALESALFEAQERFEEFEAFRAWLKTGSGFVDWYPGPKGGVIPVPRSISYAKLEQADMEQFHDDAVVFLRTAHAQKTMWPHLPAARASEMLELVLQGFGE

SEQ ID NO: 11833 - protein, 135 aa, Zea mays; identical to SEQ ID NO: 11832
  Coding DNA Sequence Number=SeqID_5789
  Homolog annotation: Hit_ID=A9I8W8; Match level="QueryCoverage=100%, HitCoverage=78%, E-value=3e-34, Identity=49%"; Hit description =Putative uncharacterized protein

SEQ ID NO: 11834 - protein, 174 aa, Zea mays
  Coding DNA Sequence Number=SeqID_5790
  Gene Ontology: Mol. function=hydrolase activity; Biological process =CTP biosynthetic process
  Homolog annotation: Hit_ID=Q2KTV2; Match level="QueryCoverage=100%, HitCoverage=59%, E-value=4e-77, Identity=79%"; Hit description =Putative uncharacterized protein
  Pfam annotation: Domain name=AHS1; Domain location=3-172; Score= -101.6; E_value=0.0086; Accession=PF02682.7; Description=Allophanate hydrolase subunit 1
MTVRYTHGGDEFIFAEISESMSLAAFFKGMAITRALRERAVPGVSEICPANASYQIRYDPDQVAPEAMLAILREIEATIDLDNLRLDTRVIQVPVLYNDPWTHETLMRFRERHQDPASTDLEYAARINGFADTDAFIAAHSSAPWFVSMVGFVAGLPFMFQMVERERQLEVPKY

SEQ ID NO: 11835 - protein, 131 aa, Zea mays
  Coding DNA Sequence Number=SeqID_5791
  Gene Ontology: Mol. function=ATP-dependent DNA helicase activity; Cellular component=cytoplasm; Biological process=DNA unwinding during replication
  Homolog annotation: Hit_ID=Q3K4P8; Match level="QueryCoverage=100%, HitCoverage=19%, E-value=4e-57, Identity=85%"; Hit description=ATP -dependent DNA helicase Rep
MSRLNPRQQEAVNYVGGPLLVLAGAGSGKTSVITRKIAHLIQSCGIRAQYIVAMTFTNKAAREMKERVGTLLKGGEGRGLTVCTFHNLGLNIIRKEHVRLGYKPGFSIFDETDVKALMTDIMQKEYAGDDG

SEQ ID NO: 11836 - protein, 209 aa, Zea mays
  misc_feature (145)..(145): Xaa can be any naturally occurring amino acid
  misc_feature (157)..(157): Xaa can be any naturally occurring amino acid
  misc_feature (162)..(164): Xaa can be any naturally occurring amino acid
  misc_feature (171)..(172): Xaa can be any naturally occurring amino acid
  misc_feature (176)..(177): Xaa can be any naturally occurring amino acid
  misc_feature (180)..(196): Xaa can be any naturally occurring amino acid
  misc_feature (198)..(203): Xaa can be any naturally occurring amino acid
  misc_feature (205)..(209): Xaa can be any naturally occurring amino acid
  Coding DNA Sequence Number=SeqID_5792
  Homolog annotation: Hit_ID=Q3KE93; Match level="QueryCoverage=83%, HitCoverage=45%, E-value=9e-51, Identity=58%"; Hit description =Diguanylate cyclase precursor
MALDPITILVLTIALAGAAALYLAVEWRNVREPSLLYWTAGFAIISVGSTLALLRASGLLLIGIWFANGLLITAHWLFLLGVARFTQVRLSRAWYLIFVAWFAMLLLPEGQSWSKAMLLANSLLVALPTLRASFLLRPHGRSLSXGAVQLRYVLLAXGLFYXXXSLVAIVXXTLIXXTAXXXXXXXXXXXXXXXXXMXXXXXXTXXXXX

SEQ ID NO: 11837 - protein, 92 aa, Zea mays
  Coding DNA Sequence Number=SeqID_5793
  Gene Ontology: Mol. function=nucleoside-triphosphatase activity; Cellular component=integral to membrane; Biological process=protein catabolic process
  Homolog annotation: Hit_ID=A9HYU7; Match level="QueryCoverage=100%, HitCoverage=14%, E-value=3e-45, Identity=97%"; Hit description=Cell division protein FtsH
  Pfam annotation: Domain name=Peptidase_M41; Domain location=35-92; Score=-104.4; E_value=0.00024; Accession=PF01434.8; Description =Peptidase family M41
TILARGCPGFSGADLANLVNEAALFAARRNGRTVDMSDFEKAKDKIIMGAERRSIVMPEEERKNTAYHESGHAIVARLLPKTDPVHKVTIIP

SEQ ID NO: 11838 - protein, 237 aa, Zea mays
  misc_feature (3)..(7): Xaa can be any naturally occurring amino acid
  misc_feature (9)..(11): Xaa can be any naturally occurring amino acid
  Coding DNA Sequence Number=SeqID_5794
  Gene Ontology: Mol. function=argininosuccinate lyase activity; Cellular component=cytoplasm; Biological process=arginine biosynthetic process via ornithine
  Homolog annotation: Hit_ID=Q4J014; Match level="QueryCoverage=97%, HitCoverage=42%, E-value=2e-87, Identity=71%"; Hit description =Argininosuccinate lyase precursor
  Pfam annotation: Domain name=Lyase_1; Domain location=21-237; Score= -123.6; E_value=0.0039; Accession=PF00206.10; Description=Lyase
PKXXXXXKXXXECAAQAAKVGATPGSSQSAHKAKGDPTQTQFAWLNRINKASIVMLTEEGIVKPDMGHKIAGGVRFAIDQADQPDGKRPEDVLQLEKIMTDKIGPEASLIHSGRSRQDMLATYRLANLRSQVLAYSDALNATRQRILNIADKNIDTLVPAYTNGVQAMPISYAHYLLAFEAAFDRDGQRIRELYTRLNLSPMGTAVLANSAYPLNRERLAELLGFDGVRENSLDSSQ

SEQ ID NO: 11839 - protein, 167 aa, Zea mays
  Coding DNA Sequence Number=SeqID_5795
  Gene Ontology: Mol. function=nucleoside-triphosphatase activity; Cellular component=chloroplast; Biological process=transport
  Homolog annotation: Hit_ID=A1FNN0; Match level="QueryCoverage=100%, HitCoverage=69%, E-value=2e-84, Identity=95%"; Hit description=ABC transporter related
  Pfam annotation: Domain name=ABC_tran; Domain location=29-167; Score =70.9; E_value=4.2e-18; Accession=PF00005.17; Description=ABC transporter
MATLKAQHLAKAYKSRQVVRDVSLSIDSGQIVGLLGPNGAGKTTCFYMIVGLVQADQGRVLIDDLDVSHQPMHGRAQAGIGYLPQEASIFRKLSVSDNIMAILETRKELDRAGRKKELESLLQEFHINHIRDNLGMSLSGGERRRVEIARALATAPKFILLDEPFAG

SEQ ID NO: 11840 - protein, 153 aa, Zea mays
  misc_feature (1)..(1): Xaa can be any naturally occurring amino acid
  Coding DNA Sequence Number=SeqID_5796
  Gene Ontology: Mol. function=transferase activity, transferring phosphorus-containing groups; Cellular component=membrane; Biological process=two-component signal transduction system (phosphorelay)
  Homolog annotation: Hit_ID=Q3KBH6; Match level="QueryCoverage=88%, HitCoverage=19%, E-value=7e-38, Identity=59%"; Hit description =Sensor protein
  Pfam annotation: Domain name=HATPase_c; Domain location=3-120; Score =89.3; E_value=1.3e-23; Accession=PF02518.16; Description=Histidine kinase-, DNA gyrase B-, and HSP90-like ATPase
XNQLENALLNLAINARDAMKGEGVIRITGENIILNPPDCAGKSINPGEYVRLAVADSGAGMSPTILARAFEPFFTTKPNGHGTGLGLSMVFGFVRQSGGHVEVESVEGSGTMVQMYFPRNLGEPESHDTPVQLTQHSGGQETILVVEDNEGVR

SEQ ID NO: 11841 - protein, 175 aa, Zea mays
  misc_feature (1)..(1): Xaa can be any naturally occurring amino acid
  misc_feature (5)..(5): Xaa can be any naturally occurring amino acid
  misc_feature (9)..(10): Xaa can be any naturally occurring amino acid
  misc_feature (16)..(17): Xaa can be any naturally occurring amino acid
  Coding DNA Sequence Number=SeqID_5797
  Gene Ontology: Mol. function=nucleoside-triphosphatase activity; Cellular component=intracellular; Biological process=amino acid transport
  Homolog annotation: Hit_ID=B0KSF5; Match level="QueryCoverage=99%, HitCoverage=68%, E-value=3e-78, Identity=85%"; Hit description=ABC transporter related
  Pfam annotation: Domain name=ABC_tran; Domain location=3-145; Score =129.2; E_value=1.2e-35; Accession=PF00005.17; Description=ABC transporter
XAACXAGIXXQVGMVXXQFNLFPHMTVLENLMVGPRLVSKLSEPQARELAHEYLDRVRIGDQADKYPSQLSGGQQQRVAIARALCMRPRIMLFDEPTSALDPEMVKEVLDVMGELAQDGITMVCVTHEMGFARRVADRIIFMDQGCIIEQAKPTEFFDNPQHERAREFLSQILSH

SEQ ID NO: 11842 - protein, 93 aa, Zea mays
  Coding DNA Sequence Number=SeqID_5798
  Gene Ontology: Mol. function=hydrolase activity, acting on carbon -nitrogen (but not peptide) bonds, in linear amidines; Biological process=metabolic process
  Homolog annotation: Hit_ID=Q7WAL0; Match level="QueryCoverage=92%, HitCoverage=20%, E-value=1e-34, Identity=81%"; Hit description=N -carbamoyl-L-amino acid amidohydrolase
MPTALPVFPLLNAERLWSRVETLSRYTLPDQPWTRRAFSPLFLEARDWLRGEFEAAGLATRLDAGGNLIGTRAGRNPQRKPIATGSHCDTVMS

SEQ ID NO: 11843 - protein, 195 aa, Zea mays
  Coding DNA Sequence Number=SeqID_5799
  Gene Ontology: Mol. function=adenosylmethionine decarboxylase activity; Biological process=spermidine biosynthetic process
  Homolog annotation: Hit_ID=Q399C7; Match level="QueryCoverage=43%, HitCoverage=66%, E-value=1e-11, Identity=43%"; Hit description=S -adenosylmethionine decarboxylase related
  Pfam annotation: Domain name=AdoMet_dc; Domain location=94-195; Score= 133.4; E_value=6.6e-37; Accession=PF02675.6; Description=S -adenosylmethionine decarboxylase
FAARDRPGLPVAAGQPRGQDVRKGRLRHGQVHLRHLRPDRGHGRHRRQLARRPLHQRRRQRRQQQQLGRRLVGQLGLVIGRFAQVTPHATPGRHILADFRGVSARLLADAQALERELVLAAEAAGARVLGAHFHHFGEGAGVTGVVMLSESHISIHSWPEHRFAALDIFMCGAARPELALERLRAALGPETVRVT

SEQ ID NO: 11844 - protein, 195 aa, Zea mays; identical to SEQ ID NO: 11843
  Coding DNA Sequence Number=SeqID_5800
  Gene Ontology: Mol. function=adenosylmethionine decarboxylase activity; Biological process=spermidine biosynthetic process
  Homolog annotation: Hit_ID=Q399C7; Match level="QueryCoverage=43%, HitCoverage=66%, E-value=1e-11, Identity=43%"; Hit description=S -adenosylmethionine decarboxylase related
  Pfam annotation: Domain name=AdoMet_dc; Domain location=94-195; Score= 133.4; E_value=6.6e-37; Accession=PF02675.6; Description=S -adenosylmethionine decarboxylase

SEQ ID NO: 11845 - protein, 210 aa, Zea mays
  misc_feature (1)..(1): Xaa can be any naturally occurring amino acid
  misc_feature (210)..(210): Xaa can be any naturally occurring amino acid
  Coding DNA Sequence Number=SeqID_5801
  Gene Ontology: Mol. function=signal transducer activity; Cellular component=membrane; Biological process=signal transduction
  Homolog annotation: Hit_ID=A1FQ35; Match level="QueryCoverage=98%, HitCoverage=32%, E-value=7e-65, Identity=58%"; Hit description =Methyl-accepting chemotaxis sensory transducer precursor
  Pfam annotation: Domain name=Cache_1; Domain location=114-198; Score =25.8; E_value=6.6e-05; Accession=PF02743.8; Description=Cache domain
XIRQIDNGMKQFFDGISQNVEYVAKDPRVVAARDLKSYAGADAAQIPLTATNKDLLGIFDQFAKSHPSTAYLSLGLSDGGYASWPDDTKLNNYDPRVRPWYQAAIAAPGKTVRTGAYYWAPDDVSLIGTVHTVADDTGKILGVVGLDVSLKQLTELVRNIKLGDSGYLMLVEANGNVLVDPSDAKHNFKPMADLGPDYAELAKRGDGVTX

SEQ ID NO: 11846 - protein, 53 aa, Zea mays
  Coding DNA Sequence Number=SeqID_5802
  Gene Ontology: Mol. function=transferase activity, transferring phosphorus-containing groups; Cellular component=membrane; Biological process=two-component signal transduction system (phosphorelay)
  Homolog annotation: Hit_ID=Q3KCW2; Match level="QueryCoverage=100%, HitCoverage=9%, E-value=8e-16, Identity=79%"; Hit description=Sensor protein
THRLLAFSRRQSLDSKPVQINQLVSSMGELLQRSLNESITLDIRLTEQLWTAE

SEQ ID NO: 11847 - protein, 53 aa, Zea mays; identical to SEQ ID NO: 11846
  Coding DNA Sequence Number=SeqID_5803
  Gene Ontology: Mol. function=transferase activity, transferring phosphorus-containing groups; Cellular component=membrane; Biological process=two-component signal transduction system (phosphorelay)
  Homolog annotation: Hit_ID=Q3KCW2; Match level="QueryCoverage=100%, HitCoverage=9%, E-value=8e-16, Identity=79%"; Hit description=Sensor protein

SEQ ID NO: 11848 - protein, 69 aa, Zea mays
  misc_feature (69)..(69): Xaa can be any naturally occurring amino acid
  Coding DNA Sequence Number=SeqID_5804
AVGMVLARDLHHHAGHRGHRNADAQVGQRHDRRERPVGHVGREAEQADRAHGGGQGDAAQQRGRDVPAX

SEQ ID NO: 11849 - protein, 279 aa, Zea mays
  misc_feature (1)..(2): Xaa can be any naturally occurring amino acid
  misc_feature (5)..(8): Xaa can be any naturally occurring amino acid
  misc_feature (10)..(14): Xaa can be any naturally occurring amino acid
  misc_feature (18)..(24): Xaa can be any naturally occurring amino acid
  misc_feature (28)..(29): Xaa can be any naturally occurring amino acid
  Coding DNA Sequence Number=SeqID_5806
XXDQXXXXMXXXXXLVVXXXXXXXRHRXXAQQVGVVERDARRRAFHEPHAQHDLAGRGHGQQPLQADIHGMAGLGLGRIVGDRRDPIARHHRASHAGGRVGVFEQAFQEPVLARVDVVPEEADVARGIGELDLRAARARTRIGADVEGLYRLRRGQPVHVAGDDGERLALGALRLGIDRARRAAQARIVRAVVVDHIVIGLAARGQRRQLHHVHAVPRVFGGGWLEAVRTLHRFGAGQHDLLDVQAPDRFHDFGGDDLVLVVDHLEQIGVQPGGRQRDV

SEQ ID NO: 11850 - protein, 181 aa, Zea mays
  misc_feature (1)..(42): Xaa can be any naturally occurring amino acid
  misc_feature (44)..(52): Xaa can be any naturally occurring amino acid
  misc_feature (54)..(71): Xaa can be any naturally occurring amino acid
  misc_feature (73)..(106): Xaa can be any naturally occurring amino acid
  misc_feature (109)..(110): Xaa can be any naturally occurring amino acid
  misc_feature (143)..(144): Xaa can be any naturally occurring amino acid
  misc_feature (167)..(168): Xaa can be any naturally occurring amino acid
  misc_feature (180)..(181): Xaa can be any naturally occurring amino acid
  Coding DNA Sequence Number=SeqID_5808
XXXXXXXXXXXXXXXXXXXXXXXXXXXXXXXXXXXXXXXXXXRXXXXXXXXXEXXXXXXXXXXXXXXXXXXRXXXXXXXXXXXXXXXXXXXXXXXXXXXXXXXXXXTNXXGALPGGGYAIFTGAAGTVTVDGGAGPVRVSGIXXATDRYTVQGAPITLVGSGGNPPXXVVGDGTYASGQXX

SEQ ID NO: 11851 - protein, 181 aa, Zea mays
  misc_feature (2)..(3): Xaa can be any naturally occurring amino acid
  misc_feature (14)..(14): Xaa can be any naturally occurring amino acid
  misc_feature (16)..(19): Xaa can be any naturally occurring amino acid
  misc_feature (21)..(21): Xaa can be any naturally occurring amino acid
  misc_feature (27)..(27): Xaa can be any naturally occurring amino acid
  misc_feature (33)..(34): Xaa can be any naturally occurring amino acid
  Coding DNA Sequence Number=SeqID_5810
  Gene Ontology: Mol. function=adenylosuccinate synthase activity; Cellular component=cytoplasm; Biological process=purine nucleotide biosynthetic process
  Homolog annotation: Hit_ID=Q3KIY4; Match level="QueryCoverage=100%, HitCoverage=42%, E-value=4e-90, Identity=90%"; Hit description =Adenylosuccinate synthetase
  Pfam annotation: Domain name=Adenylsucc_synt; Domain location=1-175; Score=9.8; E_value=5.3e-25; Accession=PF00709.11; Description =Adenylosuccinate synthetase
VXXGSGVGPMFLDXIXXXXKXYTTRVXSGPFPXXLFDDVGAHLAKQGHEFGATTGRARRCGWFDAVILRRAIDVNSISGICLTKLDVLDGLETINICIGYKDAEGKDVAPTDADSYVGLQPVYEEVPGWTESTVGAKTLEELPANARAYIKRVEELIGAPIDIISTGPDRNETIVLRHPFA

SEQ ID NO: 11852 - protein, 53 aa, Zea mays
  Coding DNA Sequence Number=SeqID_5811
  Gene Ontology: Mol. function=transferase activity, transferring nitrogenous groups; Cellular component=intracellular; Biological process=regulation of transcription, DNA-dependent
  Homolog annotation: Hit_ID=A6V3J4; Match level="QueryCoverage=100%, HitCoverage=11%, E-value=1e-20, Identity=92%"; Hit description =Probable transcriptional regulator
SGYYVHQTPALTAPTPDIARVERPGLVTRSSIIQQVLVESRREGVFPLGAAVP

SEQ ID NO: 11853 - protein, 53 aa, Zea mays; identical to SEQ ID NO: 11852
  Coding DNA Sequence Number=SeqID_5812
  Gene Ontology: Mol. function=transferase activity, transferring nitrogenous groups; Cellular component=intracellular; Biological process=regulation of transcription, DNA-dependent
  Homolog annotation: Hit_ID=A6V3J4; Match level="QueryCoverage=100%, HitCoverage=11%, E-value=1e-20, Identity=92%"; Hit description =Probable transcriptional regulator

SEQ ID NO: 11854 - protein, 156 aa, Zea mays
  misc_feature (133)..(134): Xaa can be any naturally occurring amino acid
  misc_feature (143)..(156): Xaa can be any naturally occurring amino acid
  Coding DNA Sequence Number=SeqID_5813
RCRFRSWQHISSCLCVVQARPGPDQGPGRRPARAGDSVDDAGRLAGALDLVHAGIGQAHRFLGRQAARIERHHADAGALVGQGGLAELVAADGGGGGAVFERARRFLGIAALGLVAWRRVAARQRGAGADQHXXIAAQPPDHXXXXXXXXXXXXXX

SEQ ID NO: 11855 - protein, 156 aa, Zea mays; identical to SEQ ID NO: 11854
  misc_feature (133)..(134): Xaa can be any naturally occurring amino acid
  misc_feature (143)..(156): Xaa can be any naturally occurring amino acid
  Coding DNA Sequence Number=SeqID_5814

SEQ ID NO: 11856 - protein, 69 aa, Zea mays
  Coding DNA Sequence Number=SeqID_5815
  Homolog annotation: Hit_ID=A5W5X7; Match level="QueryCoverage=100%, HitCoverage=36%, E-value=2e-16, Identity=60%"; Hit description =Siphovirus Gp157 family protein
EDELPDDLTVVKTDIVADKKAIAAKLKEIRDHNEAVRKRIAAGEDAEHEIIPEPKWAHLERGDSSIRIR

SEQ ID NO: 11857 - protein, 69 aa, Zea mays; identical to SEQ ID NO: 11856
  Coding DNA Sequence Number=SeqID_5816
  Homolog annotation: Hit_ID=A5W5X7; Match level="QueryCoverage=100%, HitCoverage=36%, E-value=2e-16, Identity=60%"; Hit description =Siphovirus Gp157 family protein

SEQ ID NO: 11858 - protein, 178 aa, Zea mays
  Coding DNA Sequence Number=SeqID_5817
  Gene Ontology: Mol. function=hydrolase activity; Biological process =metabolic process
  Homolog annotation: Hit_ID=Q48G38; Match level="QueryCoverage=81%, HitCoverage=84%, E-value=7e-50, Identity=63%"; Hit description=HAD -superfamily hydrolase, putative
  Pfam annotation: Domain name=Hydrolase; Domain location=2-151; Score =21.3; E_value=0.00093; Accession=PF00702.16; Description=haloacid dehalogenase-like hydrolase
HITSFTAASASIREAVGHTLANQLPWRVPQPAEVLVEHWVSHFPAAAVPMPGAAALIQALEHRHIKVGIVSNGAEHSRRKTIAALPFAQSVGTVVSSQAFGTAKPAREIFHEAAARLGVLPEHCWFVGDHPLNDYQGAKAAGMYAVWFQGFHQWPAGLAPAQDTIKSLDELPALIAKR

SEQ ID NO: 11859 - protein, 178 aa, Zea mays; identical to SEQ ID NO: 11858
  Coding DNA Sequence Number=SeqID_5818
  Gene Ontology: Mol. function=hydrolase activity; Biological process =metabolic process
  Homolog annotation: Hit_ID=Q48G38; Match level="QueryCoverage=81%, HitCoverage=84%, E-value=7e-50, Identity=63%"; Hit description=HAD -superfamily hydrolase, putative
  Pfam annotation: Domain name=Hydrolase; Domain location=2-151; Score =21.3; E_value=0.00093; Accession=PF00702.16; Description=haloacid dehalogenase-like hydrolase

SEQ ID NO: 11860 - protein, 294 aa, Zea mays
  misc_feature (1)..(1): Xaa can be any naturally occurring amino acid
  misc_feature (248)..(248): Xaa can be any naturally occurring amino acid
  misc_feature (250)..(250): Xaa can be any naturally occurring amino acid
  misc_feature (252)..(254): Xaa can be any naturally occurring amino acid
  misc_feature (256)..(256): Xaa can be any naturally occurring amino acid
  misc_feature (259)..(294): Xaa can be any naturally occurring amino acid
  Coding DNA Sequence Number=SeqID_5819
  Gene Ontology: Mol. function=protein dimerization activity; Cellular component=endoplasmic reticulum lumen; Biological process=proteolysis
  Homolog annotation: Hit_ID=A9I4R1; Match level="QueryCoverage=87%, HitCoverage=64%, E-value=1e-133, Identity=89%"; Hit description =Putative hydrolase
  Pfam annotation: Domain name=M20_dimer; Domain location=85-196; Score= 23.1; E_value=0.001; Accession=PF07687.4; Description=Peptidase dimerisation domain
  Pfam annotation: Domain name=Peptidase_M20; Domain location=2-276; Score=104.9; E_value=2.4e-28; Accession=PF01546.18; Description =Peptidase family M20M25M40
  Pfam module annotation: Pfam domain module=M20_dimer::Peptidase_M20; Domain location=85-196::2-276
XPGLMHGCGHDGHTAVLIGAAKYLAQTRNFDGTAVLIFQPAEEGRGGAKAMMEDGLFDTFPCDAIYALHNWPGLKPGTIGINPGPMMAAADRFEILITGRGGHGAHPYQTIDPVTIAGQIITALQTIVSRNVNPLDSAVVSIGSLQAGHPGAMSVIPREARMVGTVRTFRKSVQEMVETRMRELVTAIASAFGGTAELTYERIYPATLNTPQHANLVADIATEMIGKENVVRDLVPSMGSEDFSFMLXSXPXXXFXLGXXXXXXXXXXXXXXXXXXXXXXXXXXXXXXXXXXXX

SEQ ID NO: 11861 - protein, 289 aa, Zea mays
  misc_feature (1)..(8): Xaa can be any naturally occurring amino acid
  misc_feature (11)..(13): Xaa can be any naturally occurring amino acid
  misc_feature (16)..(16): Xaa can be any naturally occurring amino acid
  misc_feature (25)..(27): Xaa can be any naturally occurring amino acid
  misc_feature (38)..(39): Xaa can be any naturally occurring amino acid
  misc_feature (289)..(289): Xaa can be any naturally occurring amino acid
  Coding DNA Sequence Number=SeqID_5820
  Gene Ontology: Mol. function=serine-type endopeptidase activity; Biological process=proteolysis
  Homolog annotation: Hit_ID=Q3K6J8; Match level="QueryCoverage=96%, HitCoverage=34%, E-value=1e-137, Identity=90%"; Hit description=ATP -dependent protease, putative
XXXXXXXXAEXXXSEXFVWDALKRXXXSRKLKMESPLXXLGRLATVTLNPQVIPLQLKVIIIGSRQLYYALQDADPDFQEMFRVLVDFDEDIPMVDESLEQFAQLLKTRTSEEGMAPLTSDAVARLATYSARLAENQGRLSARIGDLFQLVSEADFIRHLAGDERTDSGHIERALKAKATRTGRVSARILDDMLAGVILIDTAGAAVGKCNGLTVLEVGDSAFGVPARISASVYPGGSGIVDIEREVNLGQPIHSKGVMILTGYLGSRYAQEFPLAISASIALEQSYGX

SEQ ID NO: 11862 - protein, 108 aa, Zea mays
  misc_feature (1)..(1): Xaa can be any naturally occurring amino acid
  Coding DNA Sequence Number=SeqID_5821
  Gene Ontology: Mol. function=4-carboxymuconolactone decarboxylase activity; Biological process=catechol catabolic process
  Homolog annotation: Hit_ID=Q9I6Q6; Match level="QueryCoverage=96%, HitCoverage=78%, E-value=2e-47, Identity=88%"; Hit description=Gamma- carboxymuconolactone decarboxylase
  Pfam annotation: Domain name=CMD; Domain location=11-95; Score=110.0; E_value=7.1e-30; Accession=PF02627.10; Description=Carboxymuconolacton e decarboxylase family
XSLNALTEFNSEFQEMITRHAWGDIWTRPGLPRHTRSLITIAMLIGMNRTEELKLHLRAAASNGVTRAEIKEVLMQSAIYCGIPAANATFHLAESVWDELGVESRDPV

SEQ ID NO: 11863 - protein, 204 aa, Zea mays
  misc_feature (1)..(1): Xaa can be any naturally occurring amino acid
  Coding DNA Sequence Number=SeqID_5822
  Gene Ontology: Mol. function=structural molecule activity; Cellular component=flagellin-based flagellum basal body, distal rod; Biological process=flagellum organization and biogenesis
  Homolog annotation: Hit_ID=A1FEM6; Match level="QueryCoverage=99%, HitCoverage=77%, E-value=1e-96, Identity=85%"; Hit description =Flagellar basal-body rod FlgG
  Pfam annotation: Domain name=DUF1078; Domain location=165-203; Score =77.9; E_value=3.4e-20; Accession=PF06429.3; Description=Domain of unknown function (DUF1078)
XDSELPSGLQLGTGVAIVGTQKNFSAGNLQQTGQPLDLAVNGKGFFQILQPDGTTTYTRDGTFHLDANGQVVTANGFALEPAIVVPNNAQTFTVGNDGTVSITVAGNPASQVIGNLQTADFINPAGLQAIGNNLFLETASSGAPQIGTPGLNGFGTTLQSTLETSNVSTVEEMVNMITTQRAYEMNSKVISTADQMLSFVTQNL

SEQ ID NO: 11864 - protein, 86 aa, Zea mays
  Coding DNA Sequence Number=SeqID_5823
  Gene Ontology: Mol. function=two-component response regulator activity; Cellular component=intracellular; Biological process=two -component signal transduction system (phosphorelay)
  Homolog annotation: Hit_ID=Q0JZE8; Match level="QueryCoverage=95%, HitCoverage=34%, E-value=2e-21, Identity=65%"; Hit description =Response regulator, OmpR-family
  Pfam annotation: Domain name=Trans_reg_C; Domain location=5-82; Score= 56.8; E_value=7.6e-14; Accession=PF00486.18; Description =Transcriptional regulatory protein, C ter
ARLGAQEVLLTGAEQRILEILMRAPGQVVARDQISLYALGRSADRYDRSIDTHISSLRRKLQLDQAGDAPAIRNLRGLGYVLAGAA

SEQ ID NO: 11865 - protein, 86 aa, Zea mays; identical to SEQ ID NO: 11864
  Coding DNA Sequence Number=SeqID_5824
  Gene Ontology: Mol. function=two-component response regulator activity; Cellular component=intracellular; Biological process=two -component signal transduction system (phosphorelay)
  Homolog annotation: Hit_ID=Q0JZE8; Match level="QueryCoverage=95%, HitCoverage=34%, E-value=2e-21, Identity=65%"; Hit description =Response regulator, OmpR-family
  Pfam annotation: Domain name=Trans_reg_C; Domain location=5-82; Score= 56.8; E_value=7.6e-14; Accession=PF00486.18; Description =Transcriptional regulatory protein, C ter

SEQ ID NO: 11866 - protein, 100 aa, Zea mays
  Coding DNA Sequence Number=SeqID_5825
  Gene Ontology: Mol. function=sequence-specific DNA binding; Cellular component=intracellular; Biological process=regulation of transcription, DNA-dependent
  Homolog annotation: Hit_ID=A9HVK3; Match level="QueryCoverage=98%, HitCoverage=47%, E-value=8e-48, Identity=95%"; Hit description =Transcriptional regulator, AsnC-family
  Pfam annotation: Domain name=AsnC_trans_reg; Domain location=11-87; Score=116.9; E_value=5.9e-32; Accession=PF01037.11; Description=AsnC family
DPASLGFMDTVIVHVTLESHSEETLYEFGRALAQIPEVLEAFLVSGDYDYYIRIAVRDTRDYERLLREQLYRIPGIRHSKSCFVLRRLKETMLPLNGPTT

SEQ ID NO: 11867 - protein, 217 aa, Zea mays
  misc_feature (208)..(209): Xaa can be any naturally occurring amino acid
  Coding DNA Sequence Number=SeqID_5826
  Gene Ontology: Mol. function=calcium ion binding; Cellular component =extracellular region; Biological process=pathogenesis
  Homolog annotation: Hit_ID=Q4W1T5; Match level="QueryCoverage=73%, HitCoverage=38%, E-value=5e-15, Identity=37%"; Hit description=HlyJ haemolysin-like protein
  Pfam annotation: Domain name=HemolysinCabind; Domain location=137 -154; Score=19.6; E_value=0.012; Accession=PF00353.9; Description =Hemolysin-type calcium-binding repeat
  Pfam annotation: Domain name=HemolysinCabind; Domain location=155 -172; Score=0.3; E_value=51; Accession=PF00353.9; Description =Hemolysin-type calcium-binding repeat
  Pfam annotation: Domain name=HemolysinCabind; Domain location=173 -190; Score=15.3; E_value=0.23; Accession=PF00353.9; Description =Hemolysin-type calcium-binding repeat
  Pfam module annotation: Pfam domain module=HemolysinCabind::HemolysinC abind::HemolysinCabind; Domain location=137-154::155-172::173-190
MYFSSLSKLAADQNPLDKNEKKYTNTDILRHDQNVKIYQEITYVSKGGKPVGAAGNEFIIETANHDDKVVIKKSPDNNLIAIINNTPYQLNLLRSPDGSETQPLRIRTNGGNDCVLIDPQVDNDIRIELGAGDDYAQAGSGNTRLYGGAGNDRLKLGSGNGIAMGDDGDDLLIAGSGNSILKGNNGNDRMQAGQGLPERRLLMDGGDXXDFMIVTPQ

SEQ ID NO: 11868 - protein, 217 aa, Zea mays; identical to SEQ ID NO: 11867
  misc_feature (208)..(209): Xaa can be any naturally occurring amino acid
  Coding DNA Sequence Number=SeqID_5827
  Gene Ontology: Mol. function=calcium ion binding; Cellular component =extracellular region; Biological process=pathogenesis
  Homolog annotation: Hit_ID=Q4W1T5; Match level="QueryCoverage=73%, HitCoverage=38%, E-value=5e-15, Identity=37%"; Hit description=HlyJ haemolysin-like protein
  Pfam annotation: Domain name=HemolysinCabind; Domain location=137 -154; Score=19.6; E_value=0.012; Accession=PF00353.9; Description =Hemolysin-type calcium-binding repeat
  Pfam annotation: Domain name=HemolysinCabind; Domain location=155 -172; Score=0.3; E_value=51; Accession=PF00353.9; Description =Hemolysin-type calcium-binding repeat
  Pfam annotation: Domain name=HemolysinCabind; Domain location=173 -190; Score=15.3; E_value=0.23; Accession=PF00353.9; Description =Hemolysin-type calcium-binding repeat
  Pfam module annotation: Pfam domain module=HemolysinCabind::HemolysinC abind::HemolysinCabind; Domain location=137-154::155-172::173-190

SEQ ID NO: 11869 - protein, 204 aa, Zea mays
  misc_feature (1)..(1): Xaa can be any naturally occurring amino acid
  Coding DNA Sequence Number=SeqID_5828
  Homolog annotation: Hit_ID=Q7W6J4; Match level="QueryCoverage=99%, HitCoverage=38%, E-value=1e-57, Identity=57%"; Hit description =Putative exported protein
  Pfam annotation: Domain name=DUF1800; Domain location=1-204; Score= -115.7; E_value=2.3e-07; Accession=PF08811.1; Description=Protein of unknown function (DUF1800)
XLARHPATARFISAKLAAYFMGDAPPASVIDRMARTFQASDGDIAATLQTLYGSPEFTQSLRTGVFKDPVHYVYSALRLTYADLPPIANPRPAMAMLRQLGQPLNQRLTPDGYPQAQSDWAGSGQMTARFEVARAIAAAPQAFYREGDDKGPVELPRLPDLLRENAADGLFARLSPATRDAIAQAKNPKDANTYLLASPEFMRR

SEQ ID NO: 11870 - protein, 248 aa, Zea mays
  Coding DNA Sequence Number=SeqID_5829
  Homolog annotation: Hit_ID=A1AE18; Match level="QueryCoverage=93%, HitCoverage=68%, E-value=8e-69, Identity=54%"; Hit description =Putative uncharacterized protein
RAQVDDTCGMLETRAEVDKDIAELNGNTSDFRLSEAQAFLESMNQTMASSLFYGDQSVNPERITGLAPRFSLKSAPNGGNIIDAGGTGADNTSVWLVVWGKNTAHGIFPKGSKAGLIHEDMGLIDAFDSNNNRFRAYADHWQWKSGLTLRDWRYVVRIANVDISDLVGQTGTQAPTAATAIMKLMLRAMARIPAMGMGTPVFYANRTVKEMLSIAALDKSQNALAIEAATNQFGTVAPGSVGNLRFPR

SEQ ID NO: 11871 - protein, 179 aa, Zea mays
  misc_feature (179)..(179): Xaa can be any naturally occurring amino acid
  Coding DNA Sequence Number=SeqID_5830
  Subcellular localization annotation: CTP_CleavageSite=16; ConfidenceScore=5.25e-01
TPRGIASGRFHTPGMPAMTTPTPLRPTPESLLTQLCLGPSFRETASVQLRYSLHTLYPALALDPDIVLVCTPAWGVVGDQVQPLEPRYQTLTDILAHQAVSGLPTLYIEGVHFLTQQPLSDPPLHLPVRIGEIAQMLNVLAPVMLCAFQEQQLNYWNRMIEGQPQWRTLSSSLQAVWNX

SEQ ID NO: 11872 - protein, 179 aa, Zea mays; identical to SEQ ID NO: 11871
  misc_feature (179)..(179): Xaa can be any naturally occurring amino acid
  Coding DNA Sequence Number=SeqID_5831
  Subcellular localization annotation: CTP_CleavageSite=16; ConfidenceScore=5.25e-01

SEQ ID NO: 11873 - protein, 224 aa, Zea mays
  Coding DNA Sequence Number=SeqID_5832
  Gene Ontology: Mol. function=phosphotransferase activity, carboxyl group as acceptor; Cellular component=intracellular; Biological process=organic acid metabolic process
  Homolog annotation: Hit_ID=Q7VZB6; Match level="QueryCoverage=100%, HitCoverage=56%, E-value=1e-96, Identity=75%"; Hit description =Acetate kinase
  Pfam annotation: Domain name=Acetate_kinase; Domain location=4-224; Score=-61.5; E_value=5.1e-11; Accession=PF00871.8; Description =Acetokinase family
MSDTILVINAGSSSIKFYLYDIDDKQALAPRLGGQLEGIGTSHPRLRVRDAAGQTLVERDIAPSHAPDVPNGQEVVGTWLSGHLGGAPLAVGHRVVHGGPDLSEPVLIDDDILARLEAFTPLAPLHQPNNLAPIRVIRERRPWIPQVACFDTAFHRSHSDVADRYALPESLYQQGVRRYGFHGLSYEYIAQRLRQALPEIAMGKIIAAHLGSGVSACAMHQGKS

SEQ ID NO: 11874 - protein, 247 aa, Zea mays
  misc_feature (1)..(1): Xaa can be any naturally occurring amino acid
  misc_feature (232)..(232): Xaa can be any naturally occurring amino acid
  misc_feature (237)..(239): Xaa can be any naturally occurring amino acid
  misc_feature (243)..(245): Xaa can be any naturally occurring amino acid
  Coding DNA Sequence Number=SeqID_5833
  Gene Ontology: Mol. function=DNA-directed DNA polymerase activity; Cellular component=DNA polymerase III complex; Biological process =DNA replication
  Homolog annotation: Hit_ID=Q3KFA8; Match level="QueryCoverage=97%, HitCoverage=34%, E-value=1e-102, Identity=76%"; Hit description=DNA polymerase III, tau subunit / DNA polymerase III, gamma subunit
XPWNDPVEAEVELQPAVEPVLETTSEQPELTPMPAPTPDSVVPDAPEWVSAPVPEPTVAQVDAATPGTDLDDEPPLDEDYIEPDMDSAYSYLDDLASEHTAEPAPEPEPEPAAMPATGLALQWLELFPKLPISGMTGSIAANCTLIAVDGDHWLLHLDPAHSALFNATQQRRLNDALNQFHGRTLTISIELIKPEQETPAQAASRRRVNRQREAEESIHGDPLIQQMMEQFXAVVRXXXIEPXXXAP

SEQ ID NO: 11875 - protein, 138 aa, Zea mays
  Coding DNA Sequence Number=SeqID_5834
  Gene Ontology: Mol. function=phosphogluconate dehydrogenase (decarboxylating) activity; Biological process=valine metabolic process
  Homolog annotation: Hit_ID=Q39F81; Match level="QueryCoverage=98%, HitCoverage=46%, E-value=2e-57, Identity=85%"; Hit description=6 -phosphogluconate dehydrogenase, NAD-binding
CRDSFVCGAVPSALAMKLSVNLFLITMVTGLTESVHFAERQGIDLALFAEVLNAGPMASDVSRVKLGKLVTQDFSVQAAITDVLKNSRLVAEAARSAGIASPLLDASHALYGETEAQGLGASDMVAVIRAIERRTDAG

SEQ ID NO: 11876 - protein, 138 aa, Zea mays; identical to SEQ ID NO: 11875
  Coding DNA Sequence Number=SeqID_5835
  Gene Ontology: Mol. function=phosphogluconate dehydrogenase (decarboxylating) activity; Biological process=valine metabolic process
  Homolog annotation: Hit_ID=Q39F81; Match level="QueryCoverage=98%, HitCoverage=46%, E-value=2e-57, Identity=85%"; Hit description=6 -phosphogluconate dehydrogenase, NAD-binding

SEQ ID NO: 11877 - protein, 269 aa, Zea mays
  misc_feature (154)..(154): Xaa can be any naturally occurring amino acid
  misc_feature (175)..(176): Xaa can be any naturally occurring amino acid
  misc_feature (184)..(185): Xaa can be any naturally occurring amino acid
  misc_feature (249)..(250): Xaa can be any naturally occurring amino acid
  misc_feature (260)..(261): Xaa can be any naturally occurring amino acid
  misc_feature (263)..(263): Xaa can be any naturally occurring amino acid
  misc_feature (265)..(266): Xaa can be any naturally occurring amino acid
  misc_feature (268)..(268): Xaa can be any naturally occurring amino acid
  Coding DNA Sequence Number=SeqID_5836
  Gene Ontology: Mol. function=transferase activity, transferring phosphorus-containing groups; Cellular component=membrane; Biological process=two-component signal transduction system (phosphorelay)
  Homolog annotation: Hit_ID=Q7WRD5; Match level="QueryCoverage=98%, HitCoverage=34%, E-value=4e-78, Identity=56%"; Hit description =Sensor protein
  Pfam annotation: Domain name=CHASE2; Domain location=1-249; Score =107.3; E_value=4.8e-29; Accession=PF05226.2; Description=CHASE2 domain
ILYDRAVALTGRDMSPDIVIVAIDDTSIDALGRWPWRRAVHAALLDRLQGARAVGLDLIFAEPDTTHPGDDAILADSLRRNGHTVLPVVLDRLAYPSSISTPIPILAQAAAGSGFINANLDADGVLRSAMLTTRFAGERWQHFALSMLDVGGQXAMAERLLRRAGKDGGILIPYXXPAAHTRAXXYLSVLRGDVPPEQLRGKYVLVGAWATGLGDAYTTPVSHEVSGMPGVEIIANLLQAANDDIAFRXXAPWLNALFSXXPXLXXCXL

SEQ ID NO: 11878 - protein, 68 aa, Zea mays
  misc_feature (68)..(68): Xaa can be any naturally occurring amino acid
  Coding DNA Sequence Number=SeqID_5837
  Gene Ontology: Mol. function=N-acetyltransferase activity; Biological process=metabolic process
  Homolog annotation: Hit_ID=Q0K8R1; Match level="QueryCoverage=97%, HitCoverage=40%, E-value=2e-15, Identity=60%"; Hit description =Putative uncharacterized protein h16_A2522
  Pfam annotation: Domain name=Acetyltransf_1; Domain location=1-67; Score=39.9; E_value=9.1e-09; Accession=PF00583.14; Description =Acetyltransferase (GNAT) family
VAGMVDWEKNFIWALHVHPAQQRRGVGAALLALAEDGMRAAGFGEARLETDTFNTQSRAFYAKHGYAX

SEQ ID NO: 11879 - protein, 68 aa, Zea mays; identical to SEQ ID NO: 11878
  misc_feature (68)..(68): Xaa can be any naturally occurring amino acid
  Coding DNA Sequence Number=SeqID_5838
  Gene Ontology: Mol. function=N-acetyltransferase activity; Biological process=metabolic process
  Homolog annotation: Hit_ID=Q0K8R1; Match level="QueryCoverage=97%, HitCoverage=40%, E-value=2e-15, Identity=60%"; Hit description =Putative uncharacterized protein h16_A2522
  Pfam annotation: Domain name=Acetyltransf_1; Domain location=1-67; Score=39.9; E_value=9.1e-09; Accession=PF00583.14; Description =Acetyltransferase (GNAT) family

SEQ ID NO: 11880 - protein, 129 aa, Zea mays
  misc_feature (129)..(129): Xaa can be any naturally occurring amino acid
  Coding DNA Sequence Number=SeqID_5839
  Gene Ontology: Mol. function=sequence-specific DNA binding; Cellular component=intracellular; Biological process=regulation of transcription, DNA-dependent
  Homolog annotation: Hit_ID=Q7VUR8; Match level="QueryCoverage=98%, HitCoverage=81%, E-value=2e-61, Identity=91%"; Hit description =Glutamate uptake regulatory protein
  Pfam annotation: Domain name=AsnC_trans_reg; Domain location=68-128; Score=57.1; E_value=6.2e-14; Accession=PF01037.11; Description=AsnC family
  Pfam annotation: Domain name=HTH_11; Domain location=7-63; Score =11.5; E_value=0.013; Accession=PF08279.2; Description=HTH domain
  Pfam annotation: Domain name=HTH_DeoR; Domain location=10-60; Score =1.7; E_value=0.042; Accession=PF08220.3; Description=DeoR-like helix- turn-helix domain
  Pfam module annotation: Pfam domain module=AsnC_trans_reg::HTH _11::HTH_DeoR; Domain location=68-128::7-63::10-60
GIPMDQTDIKILALLQKDATCSVAEIAEQVNLSVTPCWRRIQKLKDDGVIARNAILLDPRALGLNLTVFVSIKTSQHNEKWTQSLINAVMALPNVVEFHRMAGDIDYLLKVVVEDMAAYDRFYRRLIAX

SEQ ID NO: 11881 - protein, 125 aa, Zea mays
  Coding DNA Sequence Number=SeqID_5840
  Gene Ontology: Mol. function=gluconate transmembrane transporter activity; Cellular component=membrane; Biological process=gluconate transport
  Homolog annotation: Hit_ID=Q4KBD5; Match level="QueryCoverage=79%, HitCoverage=20%, E-value=2e-40, Identity=82%"; Hit description =Gluconate transporter family protein
SQLGADLGRVLMFGLPLTAFLCYVGYRVAGRMTRRFYPMSDDIRAEVYGPHVTNDDLRAWHNGNAQNVEQGAGAVAHMGLEESTSSLVAKLPPAPAPGFGLIVSLILLPIILILLGTLATSLLPI

SEQ ID NO: 11882 - protein, 167 aa, Zea mays
  misc_feature (9)..(9): Xaa can be any naturally occurring amino acid
  misc_feature (11)..(12): Xaa can be any naturally occurring amino acid
  Coding DNA Sequence Number=SeqID_5841
  Gene Ontology: Mol. function=catalytic activity; Cellular component =nucleus; Biological process=metabolic process
  Homolog annotation: Hit_ID=Q4ZUZ0; Match level="QueryCoverage=94%, HitCoverage=39%, E-value=6e-84, Identity=95%"; Hit description =Mandelate racemase/muconate lactonizing enzyme:Mandelate racemase/muconate lactonizing enzyme
  Pfam annotation: Domain name=MR_MLE_N; Domain location=13-115; Score =152.6; E_value=1e-42; Accession=PF02746.6; Description=Mandelate racemase  muconate lactonizing enzyme, N-terminal domain
SAFKRDKKXKXXKLTTFIVPPRWCFLKVETDQGVTGWGEPVVEGRAHTVAAAVEELSDYLIGKDPRNIEDIWTVLYRGGFYRGGAIHMSALAGIDQALWDIKGKALGVSVSDLLGGQVRDKIRVYSWIGGDRPADTARAAKEAVARGFTAVKMNGTEELQFLDSFEK

SEQ ID NO: 11883 - protein, 191 aa, Zea mays
  misc_feature (180)..(180): Xaa can be any naturally occurring amino acid
  misc_feature (182)..(182): Xaa can be any naturally occurring amino acid
  Coding DNA Sequence Number=SeqID_5842
  Gene Ontology: Mol. function=ATPase activity, coupled to transmembrane movement of substances; Cellular component=integral to membrane; Biological process=transport
  Homolog annotation: Hit_ID=Q3KKA0; Match level="QueryCoverage=82%, HitCoverage=59%, E-value=1e-46, Identity=66%"; Hit description=ABC-3 precursor
  Pfam annotation: Domain name=ABC-3; Domain location=27-186; Score =26.8; E_value=1.3e-12; Accession=PF00950.8; Description=ABC 3 transport family
MPMTCMALLSLTPPHPIPTFMEIAASMADFLLYALLAGLALALVAGPLGSFVVWRRMAYFGDTLSHAALLGVAMGFLLDVSPTIAVTVGCLLLAVLLVTLQQRQPLASDTLLGILAPSTLSLGLVVLSFMHEVRIDLMAYLFGDLLAISPTDLAWILGGSAAVLVLLVTLWRPLLAITVXEXLTGADPDAA

SEQ ID NO: 11884 - protein, 105 aa, Zea mays
  Coding DNA Sequence Number=SeqID_5843
  Gene Ontology: Mol. function=heme transporter activity; Cellular component=membrane; Biological process=respiratory chain complex IV assembly
  Homolog annotation: Hit_ID=Q2L207; Match level="QueryCoverage=100%, HitCoverage=23%, E-value=2e-46, Identity=84%"; Hit description =Putative cytochrome c biogenesis protein
  Pfam annotation: Domain name=Cytochrom_C_asm; Domain location=1-100; Score=4.9; E_value=9.3e-06; Accession=PF01578.11; Description =Cytochrome C assembly protein
LPPLEVLDDIMYRAIAIGFAFFTVATILGALWAADAWGAYWQWDPKETWALIVWLNYAAWLHMRLIKGLRGTMAAYWALTGLLITGFAFLGVNMFLSGLHSYGQL

SEQ ID NO: 11885 - protein, 52 aa, Zea mays
  Coding DNA Sequence Number=SeqID_5844
  Gene Ontology: Mol. function=nucleoside-triphosphatase activity; Cellular component=plasma membrane; Biological process=peptide transport
  Homolog annotation: Hit_ID=Q7W5M9; Match level="QueryCoverage=100%, HitCoverage=8%, E-value=2e-20, Identity=98%"; Hit description =Putative ABC transporter ATP-binding subunit
LTVRFVGSERTVEAVRNLSFHVDRGETLAIVGESGSGKSVTSLALMRLVEHG

SEQ ID NO: 11886 - protein, 52 aa, Zea mays; identical to SEQ ID NO: 11885
  Coding DNA Sequence Number=SeqID_5845
  Gene Ontology: Mol. function=nucleoside-triphosphatase activity; Cellular component=plasma membrane; Biological process=peptide transport
  Homolog annotation: Hit_ID=Q7W5M9; Match level="QueryCoverage=100%, HitCoverage=8%, E-value=2e-20, Identity=98%"; Hit description =Putative ABC transporter ATP-binding subunit

SEQ ID NO: 11887 - protein, 150 aa, Zea mays
  Coding DNA Sequence Number=SeqID_5846
  Gene Ontology: Mol. function=carbon-nitrogen ligase activity, with glutamine as amido-N-donor; Biological process=translation
  Homolog annotation: Hit_ID=A1WE75; Match level="QueryCoverage=100%, HitCoverage=32%, E-value=6e-44, Identity=56%"; Hit description =Amidase
FWRTRSAIDLGGLPQERRAKILPFIRTWAESGGGQSGEAVFRSYYETLNVRARTVAATAPFDYVLSPVAPVVAYNAEWAAPTNEVATTMHHIGYTLPYNMSEQPAASVNCGYTRAGLPIGLQIAGARFDDLGVLRVARAWERMRPAQHPW

SEQ ID NO: 11888 - protein, 289 aa, Zea mays
  misc_feature (107)..(107): Xaa can be any naturally occurring amino acid
  misc_feature (117)..(117): Xaa can be any naturally occurring amino acid
  misc_feature (134)..(134): Xaa can be any naturally occurring amino acid
  misc_feature (220)..(220): Xaa can be any naturally occurring amino acid
  misc_feature (224)..(224): Xaa can be any naturally occurring amino acid
  misc_feature (226)..(226): Xaa can be any naturally occurring amino acid
  misc_feature (237)..(240): Xaa can be any naturally occurring amino acid
  misc_feature (245)..(245): Xaa can be any naturally occurring amino acid
  misc_feature (252)..(252): Xaa can be any naturally occurring amino acid
  misc_feature (254)..(258): Xaa can be any naturally occurring amino acid
  misc_feature (260)..(269): Xaa can be any naturally occurring amino acid
  misc_feature (271)..(275): Xaa can be any naturally occurring amino acid
  misc_feature (278)..(281): Xaa can be any naturally occurring amino acid
  misc_feature (284)..(288): Xaa can be any naturally occurring amino acid
  Coding DNA Sequence Number=SeqID_5847
  Gene Ontology: Mol. function=hydrolase activity, acting on acid anhydrides, catalyzing transmembrane movement of substances; Cellular component=integral to membrane; Biological process=copper ion transport
  Homolog annotation: Hit_ID=A4XUH2; Match level="QueryCoverage=68%, HitCoverage=25%, E-value=1e-50, Identity=49%"; Hit description =Copper-translocating P-type ATPase
  Pfam annotation: Domain name=YHS; Domain location=104-147; Score =60.2; E_value=6.8e-15; Accession=PF04945.3; Description=YHS domain
MDHQHPAGSTSPPFWRRKTGVVLIMLIAIGAFYGVREHFTHVYPYLPYLILLICPLMHFFGHGHGGHDHGDQAGTNIAMPTPPSHHDHGPAHAASPNDGGLRDPVCXMAVIPPSKFXESYQGQTYQFCSQKCQXKFRADPERYIGNHPSAEPSSAAIEPTLQVATEFTCPMHPEIRQPGPGNCPKCGMTLEPVMPALDDDDKPELLDFTRRFWWSLPLTXMVAXLXMAGHSLQIFHXXXXNWIEXALATPVXLXXXXXFXXXXXXXXXXRXXXXXTLXXXXTAXXXXXY

SEQ ID NO: 11889 - protein, 144 aa, Zea mays
  misc_feature (144)..(144): Xaa can be any naturally occurring amino acid
  Coding DNA Sequence Number=SeqID_5848
  Gene Ontology: Mol. function=O-sialoglycoprotein endopeptidase activity; Cellular component=extracellular region; Biological process=proteolysis
  Homolog annotation: Hit_ID=Q3K5S1; Match level="QueryCoverage=99%, HitCoverage=41%, E-value=1e-64, Identity=87%"; Hit description =Probable O-sialoglycoprotein endopeptidase
  Pfam annotation: Domain name=Peptidase_M22; Domain location=23-144; Score=67.6; E_value=4.2e-17; Accession=PF00814.15; Description =Glycoprotease family
MLVLGLETSCDETGVALYDSERGLLADALFSQIDLHRAYGGVVPELASRDHVKRMLPLIRQVLDEAGCVPTEIDAIAYTAGPGLVGALLVGASCAQALAFAWGIPALGVHHMEGHLLAPMLEENPPEFPFVALLVSGGHTQLVX

SEQ ID NO: 11890 - protein, 65 aa, Zea mays
  misc_feature (1)..(1): Xaa can be any naturally occurring amino acid
  misc_feature (58)..(65): Xaa can be any naturally occurring amino acid
  Coding DNA Sequence Number=SeqID_5849
XSSIEHAHNGHGPVIVQGVGDGASLLMMQEAEIGVGGMAPRSASWKMGQVQAGLDHAXXXXXXXX

SEQ ID NO: 11891 - protein, 65 aa, Zea mays
  misc_feature (1)..(8): Xaa can be any naturally occurring amino acid
  misc_feature (65)..(65): Xaa can be any naturally occurring amino acid
  Coding DNA Sequence Number=SeqID_5850
XXXXXXXXGVIQACLDLAHFPRRGARRHAANPNLRFLHHQKRCTIAYSLNDDGSVTIMGVFYGGX

SEQ ID NO: 11892 - protein, 75 aa, Zea mays
  Coding DNA Sequence Number=SeqID_5852
  Gene Ontology: Mol. function=carbon-nitrogen ligase activity, with glutamine as amido-N-donor; Biological process=translation
  Homolog annotation: Hit_ID=A4FFE3; Match level="QueryCoverage=100%, HitCoverage=16%, E-value=8e-21, Identity=64%"; Hit description =Enantiomer-selective amidase
TGDMPTTMGAAHFLGHRPEADAECVALLRAAGAIVIGKTLTHEFAYGPTGDRSVQGASRNPWRTSQITGGSSAGS

SEQ ID NO: 11893 - protein, 72 aa, Zea mays
  Coding DNA Sequence Number=SeqID_5853
  Homolog annotation: Hit_ID=Q4K9E5; Match level="QueryCoverage=93%, HitCoverage=37%, E-value=2e-08, Identity=46%"; Hit description=RNA polymerase sigma-70 factor, ECF subfamily
LYRLRAMSLRSSRPSGFLAYYEELLAVWTRKLGCRDAARDLAHDALVKCLETDPAQVAQPRAYLHQAARNAA

SEQ ID NO: 11894 - protein, 72 aa, Zea mays; identical to SEQ ID NO: 11893
  Coding DNA Sequence Number=SeqID_5854
  Homolog annotation: Hit_ID=Q4K9E5; Match level="QueryCoverage=93%, HitCoverage=37%, E-value=2e-08, Identity=46%"; Hit description=RNA polymerase sigma-70 factor, ECF subfamily

SEQ ID NO: 11895 - protein, 162 aa, Zea mays
  misc_feature (151)..(154): Xaa can be any naturally occurring amino acid
  misc_feature (156)..(162): Xaa can be any naturally occurring amino acid
  Coding DNA Sequence Number=SeqID_5855
  Gene Ontology: Mol. function=oxidoreductase activity, acting on the CH-CH group of donors; Biological process=electron transport
  Homolog annotation: Hit_ID=Q3K6C4; Match level="QueryCoverage=95%, HitCoverage=28%, E-value=8e-80, Identity=89%"; Hit description=Acyl -CoA dehydrogenase-like
  Pfam annotation: Domain name=Acyl-CoA_dh_N; Domain location=59-156; Score=-21.1; E_value=0.027; Accession=PF02771.7; Description=Acyl -CoA dehydrogenase, N-terminal domain
MNLHQFAETHDVTNQPPSLDGTNLYRIDLPLQEWSRRFGAGWAEQRIDTYGALAGGPLMEAGFLANQNKPVFNSHDRFGHRIDLVEFHPAYHELMRTAVEHGLPSLPWAHPQSGAHVARASMTYLHSQAEAGTGCPLTMTFACVPALRLQXXXXEXXXXXXX

SEQ ID NO: 11896 - protein, 150 aa, Zea mays
  misc_feature (1)..(3): Xaa can be any naturally occurring amino acid
  misc_feature (150)..(150): Xaa can be any naturally occurring amino acid
  Coding DNA Sequence Number=SeqID_5856
  Gene Ontology: Mol. function=transporter activity; Cellular component= cell outer membrane; Biological process=nutrient import
  Homolog annotation: Hit_ID=Q4K5N7; Match level="QueryCoverage=97%, HitCoverage=16%, E-value=6e-60, Identity=76%"; Hit description=Heme transport protein, putative
XXXTPGYDVTYQTDTYGVQAQNTSTFALSELSVLKANYGLEFFYDKVRPDSNQPVEAGSAVEASALESITPRGDRAMGSLFGRLDYDYDDWLNLNAGLRYDRYRLRGETGLNTRTFIIGTTRQIGVPVGYDVDREEGHFSPTFGLSIKPX

SEQ ID NO: 11897 - protein, 207 aa, Zea mays
  Coding DNA Sequence Number=SeqID_5857
  Homolog annotation: Hit_ID=Q6Q512; Match level="QueryCoverage=59%, HitCoverage=41%, E-value=1e-07, Identity=28%"; Hit description=Non -LEE-encoded type III effector H
VTRADGAVQARIYHNNRQTPLLVQHLQGDQWQRLGARGGPPSVASDLGPKIGGGGEGTIYESLDGKSVYKDYGPSSMTAADDFVDNETLCLNSYYGDGFATTIFEDGRRYLKMGKLDGVDVNTLARGSLPPEARLLLDDAFRRMEQKNLYHNDLQLSNFLYSARDNKIYPVDLNANGLEDMTPFLASLYKRDRDELRRAYYALIAKA

SEQ ID NO: 11898 - protein, 207 aa, Zea mays; identical to SEQ ID NO: 11897
  Coding DNA Sequence Number=SeqID_5858
  Homolog annotation: Hit_ID=Q6Q512; Match level="QueryCoverage=59%, HitCoverage=41%, E-value=1e-07, Identity=28%"; Hit description=Non -LEE-encoded type III effector H

SEQ ID NO: 11899 - protein, 184 aa, Zea mays
  misc_feature (1)..(1): Xaa can be any naturally occurring amino acid
  misc_feature (145)..(146): Xaa can be any naturally occurring amino acid
  misc_feature (155)..(158): Xaa can be any naturally occurring amino acid
  misc_feature (160)..(172): Xaa can be any naturally occurring amino acid
  misc_feature (174)..(179): Xaa can be any naturally occurring amino acid
  misc_feature (182)..(184): Xaa can be any naturally occurring amino acid
  Coding DNA Sequence Number=SeqID_5859
  Gene Ontology: Mol. function=alcohol dehydrogenase activity; Cellular component=cytoplasm; Biological process=metabolic process
  Homolog annotation: Hit_ID=A9BVZ3; Match level="QueryCoverage=83%, HitCoverage=44%, E-value=6e-73, Identity=88%"; Hit description =Alcohol dehydrogenase GroES domain protein
  Pfam annotation: Domain name=ADH_zinc_N; Domain location=22-159; Score=145.4; E_value=1.6e-40; Accession=PF00107.16; Description=Zinc- binding dehydrogenase
  Pfam annotation: Domain name=TrkA_N; Domain location=26-136; Score= -9.3; E_value=0.044; Accession=PF02254.8; Description=TrkA-N domain
  Pfam module annotation: Pfam domain module=ADH_zinc_N::TrkA_N; Domain location=22-159::26-136
XAPVLCAGVTVYKGLKMTDTRPGNWVVISGIGGLGHMAVQYARAMGLNVAAVDIDDDKLAFAKRLGAEVVVNAKTTDPAAYLKKEIGGAHGALITAVSPKAFEQALGMVRRGGTVALNGLPPGDFPLSIFDMVLNGVTVRGSIVXXRLDLQESLXXXXEXXXXXXXXXXXXXNXXXXXXRMXXX

SEQ ID NO: 11900 - protein, 171 aa, Zea mays
  Coding DNA Sequence Number=SeqID_5860
  Gene Ontology: Mol. function=oxidoreductase activity, acting on single donors with incorporation of molecular oxygen, incorporation of two atoms of oxygen; Cellular component=integral to membrane; Biological process=electron transport
  Homolog annotation: Hit_ID=A9I5W4; Match level="QueryCoverage=100%, HitCoverage=53%, E-value=4e-71, Identity=77%"; Hit description =Putative uncharacterized protein
LILVAAGAGGHAGQLNPIALVNEIRAFHDGPLALSGCISHGKDILAAQALGCDFAYMGTRFIATRESLANDAYREMILRAQAADVTYTPHFSGVPANYLTESIRAAGLDPTRLPDYDAPPPNLDKSTRPKAWKDIWSAGQGVGATQEILSVAELVTQLETEYQEAKRALLR

SEQ ID NO: 11901 - protein, 227 aa, Zea mays
  misc_feature (5)..(7): Xaa can be any naturally occurring amino acid
  misc_feature (9)..(9): Xaa can be any naturally occurring amino acid
  misc_feature (11)..(12): Xaa can be any naturally occurring amino acid
  misc_feature (14)..(26): Xaa can be any naturally occurring amino acid
  misc_feature (28)..(34): Xaa can be any naturally occurring amino acid
  misc_feature (37)..(37): Xaa can be any naturally occurring amino acid
  misc_feature (43)..(45): Xaa can be any naturally occurring amino acid
  Coding DNA Sequence Number=SeqID_5861
  Gene Ontology: Mol. function=nucleotide binding
  Homolog annotation: Hit_ID=Q3KGM3; Match level="QueryCoverage=85%, HitCoverage=80%, E-value=1e-100, Identity=89%"; Hit description =Putative uncharacterized protein
  Pfam annotation: Domain name=DUF1989; Domain location=35-197; Score =208.6; E_value=1.5e-59; Accession=PF02254.8; Description=Domain of unknown function (DUF1989)
SPRGXXXAXLXXKXXXXXXXXXXXXXAXXXXXXXNAXEKTERXXXPDSLKCQHTAKLTSGHCLYSDMGRVLAAITADTCGWSDSIGGVLCASEVAEKYGKGRYQELRNGFYRNGTDNLLVELGKWGLGLSDLLMTLNLFSKITVDDAGTLHFAEGHSKAGDYIELYAPMDTLVVLTALQHPMDPNPEYAPQPLKLSWMNADPSVAEHCRTSRPENERGFINTDRLFA

SEQ ID NO: 11902 - protein, 210 aa, Zea mays
  misc_feature (160)..(161): Xaa can be any naturally occurring amino acid
  misc_feature (164)..(164): Xaa can be any naturally occurring amino acid
  misc_feature (169)..(171): Xaa can be any naturally occurring amino acid
  misc_feature (173)..(177): Xaa can be any naturally occurring amino acid
  misc_feature (181)..(184): Xaa can be any naturally occurring amino acid
  misc_feature (189)..(191): Xaa can be any naturally occurring amino acid
  misc_feature (193)..(194): Xaa can be any naturally occurring amino acid
  misc_feature (196)..(209): Xaa can be any naturally occurring amino acid
  Coding DNA Sequence Number=SeqID_5862
  Gene Ontology: Mol. function=transferase activity; Biological process= glutamine metabolic process
  Homolog annotation: Hit_ID=A9INQ1; Match level="QueryCoverage=68%, HitCoverage=55%, E-value=3e-32, Identity=51%"; Hit description =Putative glutamine amidotransferase class-I
MSRSADCTYFHDAAVTPPPPLDNRLDYDVRWLPSPAAGIFHAHTPMTAAISSARPVLILHTGDPDDTLKSQFGGYAEQLARASGLTPDALEVVAVHAGERPRAPDQYRAALITGSPAMVTDLEPWSEDTAAWLREAAAAGLPMFGICYGHQLLAHALGGXXGYXPAGRXXXTXXXXXLPAXXXXKLLAXXXPXXPXXXXXXXXXXXXXXP

SEQ ID NO: 11903 - protein, 211 aa, Zea mays
  misc_feature (133)..(144): Xaa can be any naturally occurring amino acid
  misc_feature (146)..(180): Xaa can be any naturally occurring amino acid
  misc_feature (182)..(208): Xaa can be any naturally occurring amino acid
  misc_feature (210)..(211): Xaa can be any naturally occurring amino acid
  Coding DNA Sequence Number=SeqID_5863
INGINLYRQQGTGPAAEIGLLPLATHRGDRPHLGAGAGRYRAHKRCGGREWKNPVTGLGLADDRAPKERVQMKISLVLMLLSLAFASQVFAKDDRRECKAELVKLKAAFSTNYTTQNHHGYRRAKDAKDQGDXXXXXXXXXXXXGXXXXXXXXXXXXXXXXXXXXXXXXXXXXXXXXXXXFXXXXXXXXXXXXXXXXXXXXXXXXXXXGXX

SEQ ID NO: 11904 - protein, 201 aa, Zea mays
  misc_feature (11)..(12): Xaa can be any naturally occurring amino acid
  Coding DNA Sequence Number=SeqID_5864
  Gene Ontology: Mol. function=nucleoside-triphosphatase activity; Cellular component=membrane; Biological process=amino acid transport
  Homolog annotation: Hit_ID=Q3KJE8; Match level="QueryCoverage=100%, HitCoverage=72%, E-value=1e-102, Identity=93%"; Hit description=ABC transporter-like
  Pfam annotation: Domain name=ABC_tran; Domain location=1-170; Score =152.8; E_value=9.6e-43; Accession=PF00005.17; Description=ABC transporter
RHFNRLIDPTXXAILVDGEDILQLDMEALRQFRRHKISMVFQSFGLLPHKSVVDNVAYGLKVRGETKQVCTERALHWIETVGLKGYENKYPHQLSGGMRQRVGLARALAADTDIILMDEAFSALDPLIRAEMQDQLLELQKTLHKTIVFITHDLDEAVRIGNRIAILKDGKLIQVGTPREILHSPADEYVDRFVQRRAAVV

SEQ ID NO: 11905 - protein, 155 aa, Zea mays
  misc_feature (135)..(155): Xaa can be any naturally occurring amino acid
  Coding DNA Sequence Number=SeqID_5865
  Homolog annotation: Hit_ID=A9HWV6; Match level="QueryCoverage=70%, HitCoverage=60%, E-value=5e-26, Identity=55%"; Hit description =Putative uncharacterized protein
  Pfam annotation: Domain name=Hemerythrin; Domain location=18-81; Score=26.1; E_value=0.00013; Accession=PF01814.13; Description =Hemerythrin
MAVSFPGGPAAAPTPDDPLGLLSACHGRIARQCATLRRLAAHLPTHGSDAAAQVAAAGVARYFQTAAIHHHEDEEEDLFPALIESMAGSDAVCLHALVDGLIADHARLAALWAPLRQILDEIAAGHPAVLPAAQXXXXXXXXXXXXXXXXXXXXX

SEQ ID NO: 11906 - protein, 155 aa, Zea mays; identical to SEQ ID NO: 11905
  misc_feature (135)..(155): Xaa can be any naturally occurring amino acid
  Coding DNA Sequence Number=SeqID_5866
  Homolog annotation: Hit_ID=A9HWV6; Match level="QueryCoverage=70%, HitCoverage=60%, E-value=5e-26, Identity=55%"; Hit description =Putative uncharacterized protein
  Pfam annotation: Domain name=Hemerythrin; Domain location=18-81; Score=26.1; E_value=0.00013; Accession=PF01814.13; Description =Hemerythrin

SEQ ID NO: 11907 - protein, 152 aa, Zea mays
  misc_feature (152)..(152): Xaa can be any naturally occurring amino acid
  Coding DNA Sequence Number=SeqID_5867
  Gene Ontology: Mol. function=two-component response regulator activity; Cellular component=intracellular; Biological process=two -component signal transduction system (phosphorelay)
  Homolog annotation: Hit_ID=Q4K6E0; Match level="QueryCoverage=91%, HitCoverage=15%, E-value=2e-65, Identity=87%"; Hit description =Transcriptional regulator, LuxR family
MPTTAFYKSPAMTDLSRIQGPASAVIPTLEGRFYRPPLPDGYVLRPRLCERLSEGLAGRLLLVSAPAGFGKSSLAVEFCQSLPAHWQSLWLGVSPRDNDPGRFLERLLDGLQQYFPQLGAQSLGLLKMRQRHQPFAFEEWLDGLLDELTVHX

SEQ ID NO: 11908 - protein, 201 aa, Zea mays
  misc_feature (1)..(42): Xaa can be any naturally occurring amino acid
  misc_feature (45)..(45): Xaa can be any naturally occurring amino acid
  misc_feature (47)..(53): Xaa can be any naturally occurring amino acid
  misc_feature (56)..(61): Xaa can be any naturally occurring amino acid
  misc_feature (201)..(201): Xaa can be any naturally occurring amino acid
  Coding DNA Sequence Number=SeqID_5868
XXXXXXXXXXXXXXXXXXXXXXXXXXXXXXXXXXXXXXXXXXGKXSXXXXXXXAEXXXXXXQPAAPHGRQPRPAAARQVRPGPAGDAGWPVRRGRAEPGPQSRGRPRAEPRGAAAQGRGRPARAGRHVPQRAVPGMTAAMPLTPDARELLSLLAYVYLENNRPEKTAVVLNALRTLGLADPRQLATLALAQLRAGKPDAAX

SEQ ID NO: 11909 - protein, 169 aa, Zea mays
  misc_feature (147)..(148): Xaa can be any naturally occurring amino acid
  misc_feature (155)..(159): Xaa can be any naturally occurring amino acid
  misc_feature (161)..(163): Xaa can be any naturally occurring amino acid
  Coding DNA Sequence Number=SeqID_5870
  Gene Ontology: Mol. function=protein histidine kinase activity; Cellular component=membrane; Biological process=two-component signal transduction system (phosphorelay)
  Homolog annotation: Hit_ID=A9DFR3; Match level="QueryCoverage=90%, HitCoverage=15%, E-value=7e-54, Identity=64%"; Hit description =ATPase, histidine kinase-, DNA gyrase B-, and HSP90-like domain protein
MIESISFKTRARTVDHLGREQIADCPTAISELWKNAYDAYSRKVSLDIYQDDTPIAALVDDGHGMNKEEFIQKWLVIGTESKATGEAAADDDRKGLLPRPRQGQKGIGRLSAAALGPLLLFVSKRSMSSFVLALIDWRLFENPFLLXXDVQIPVXXXXXKXXXLKNINT

SEQ ID NO: 11910 - protein, 121 aa, Zea mays
  misc_feature (1)..(1): Xaa can be any naturally occurring amino acid
  Coding DNA Sequence Number=SeqID_5871
  Gene Ontology: Mol. function=transcription factor activity; Biological process=regulation of transcription, DNA-dependent
  Homolog annotation: Hit_ID=Q3KJV0; Match level="QueryCoverage=99%, HitCoverage=38%, E-value=1e-51, Identity=84%"; Hit description =Transcriptional regulator, LysR family
XDMFDYPLAAPLISQGTRKLLANLSGRMDFSPSIHTEHFPALVKIVLQSNAIGVGTEEAFAEDIAKGKLVLLHWRNLPQNLESLNARCGIVSRTGFRLSPAAKAMIETLVAVDQHEVSVAV

SEQ ID NO: 11911 - protein, 248 aa, Zea mays
  misc_feature (3)..(5): Xaa can be any naturally occurring amino acid
  misc_feature (10)..(14): Xaa can be any naturally occurring amino acid
  misc_feature (22)..(22): Xaa can be any naturally occurring amino acid
  misc_feature (29)..(29): Xaa can be any naturally occurring amino acid
  Coding DNA Sequence Number=SeqID_5872
  Gene Ontology: Mol. function=adenylosuccinate lyase activity; Cellular component=extracellular region; Biological process=purine ribonucleotide biosynthetic process
  Homolog annotation: Hit_ID=B0KMQ8; Match level="QueryCoverage=99%, HitCoverage=52%, E-value=1e-119, Identity=87%"; Hit description =Adenylosuccinate lyase
  Pfam annotation: Domain name=Lyase_1; Domain location=2-248; Score =75.1; E_value=2.3e-19; Accession=PF00206.10; Description=Lyase
DAXXXISEVXXXXXEANAVLNXLAENFAXEHAERVKEIERTTNHDVKAIEYLLKEQAAKLPELAKVSEFIHFACTSEDINNLSHALMLREGRDDVMLPLMRQTADAIRELAIRFADVPMLSRTHGQPASPTTLGKELANVVYRLERQIAQVAAVPLLGKINGAVGNYNAHLSAYPEIDWEENARAFIEDELGLGFNPYTTQIEPHDYIAELFDAIARFNTILIDFDRDIWGYISLGYFKQRTIAGEIG

SEQ ID NO: 11912 - protein, 258 aa, Zea mays
  misc_feature (221)..(222): Xaa can be any naturally occurring amino acid
  misc_feature (225)..(230): Xaa can be any naturally occurring amino acid
  misc_feature (246)..(247): Xaa can be any naturally occurring amino acid
  Coding DNA Sequence Number=SeqID_5873
  Gene Ontology: Mol. function=transferase activity, transferring phosphorus-containing groups; Cellular component=membrane; Biological process=two-component signal transduction system (phosphorelay)
  Homolog annotation: Hit_ID=Q3K7N0; Match level="QueryCoverage=94%, HitCoverage=35%, E-value=1e-118, Identity=86%"; Hit description =Diguanylate cyclase/phosphodiesterase precursor
QAVYSLDREMGMQVIEGLFQDDAVRMASIGHPNETMLAEKTRDLQQSPTRWLTDLILGQERTFTTPLVGRGPYSEYYGDLSITLDTATYGKGFLVSSVIIFISGVLRALAMGLVLYLVYHWLLTKPLSRVIEHLSSINPDRPSEHKIPQLKGHEKNELGIWISTANQLLESIERNTHLRHEAENSLLRMAQYDFLTGLPNRQKLQEQLDKILTDAGRRQRXXRSXXXXXXDFKSVNEQFTYQAGDXXLLALADRLRAH

SEQ ID NO: 11913 - protein, 202 aa, Zea mays
  Coding DNA Sequence Number=SeqID_5874
  Gene Ontology: Mol. function=ATP-dependent DNA helicase activity; Cellular component=intracellular; Biological process=DNA recombination
  Homolog annotation: Hit_ID=Q3K4K8; Match level="QueryCoverage=100%, HitCoverage=29%, E-value=1e-98, Identity=90%"; Hit description=ATP -dependent DNA helicase RecG
  Pfam annotation: Domain name=DEAD; Domain location=59-196; Score =64.4; E_value=3.8e-16; Accession=PF00270.19; Description=DEADDEAH box helicase
  Pfam annotation: Domain name=ResIII; Domain location=55-202; Score= -27.6; E_value=0.0098; Accession=PF04851.6; Description=Type III restriction enzyme, res subunit
  Pfam module annotation: Pfam domain module=DEAD::ResIII; Domain location=59-196::55-202
ELALGHHWAQHRLAFEELLTHQLSQQRLRESMRSLRAPAMPKATRLPAQYLANLGFAPTGAQQRVGNEIAYDLSQKEPMLRLIQGDVGAGKTVVAALAALQALEAGYQVALMAPTEILAEQHFITFKRWLEPLGLEVAWLAGKLKGKNRVAALEQIAAGAPMVVGTHALFQDEVKFKNLALVIIDEQHRFGVQQRLALRQKG

SEQ ID NO: 11914 - protein, 191 aa, Zea mays
  misc_feature (184)..(184): Xaa can be any naturally occurring amino acid
  Coding DNA Sequence Number=SeqID_5875
  Gene Ontology: Mol. function=transferase activity, transferring pentosyl groups; Cellular component=peptidoglycan-based cell wall; Biological process=cell wall organization and biogenesis
  Homolog annotation: Hit_ID=Q3K584; Match level="QueryCoverage=98%, HitCoverage=78%, E-value=4e-93, Identity=84%"; Hit description =Monofunctional biosynthetic peptidoglycan transglycosylase
  Pfam annotation: Domain name=Transgly; Domain location=1-155; Score =251.2; E_value=2.3e-72; Accession=PF00912.12; Description =Transglycosylase
GEPIDVQRTWVPWDQISDELKVAVMAGEDQRFPQHWGFDFDAIQAALLHNERGGSIRGASTLSQQVSKNLFLWTGRSYFRKGLEAWFTGLIEILWPKQRILEVYLNSVEWDEGVFGAEAAARHHFGVSAKALTRQQASYLAAVLPNPRVWSASHPTSYVARRAAWIRQQMSQLGGDSYLNELNXSRKAPLG

SEQ ID NO: 11915 - protein, 122 aa, Zea mays
  misc_feature (116)..(122): Xaa can be any naturally occurring amino acid
  Coding DNA Sequence Number=SeqID_5876
  Gene Ontology: Mol. function=peroxidase activity
  Homolog annotation: Hit_ID=Q1LE34; Match level="QueryCoverage=76%, HitCoverage=41%, E-value=6e-29, Identity=69%"; Hit description =Uncharacterised peroxidase-related
  Pfam annotation: Domain name=CMD; Domain location=42-120; Score=44.4; E_value=4e-10; Accession=PF02627.10; Description=Carboxymuconolactone decarboxylase family
  Subcellular localization annotation: CTP_CleavageSite=35; ConfidenceScore=5.31e-01
MSRVPLLDSASAPAASQDLLRHIHGAFGATPNMFRAVANSPAALASMWAAFGALGGGTLSAQLGEKIAVAVADSNRCEYCLAAHTALGRKAGASAEEMAAAQAGRANDPRTAAALXXXXXXX

SEQ ID NO: 11916 - protein, 306 aa, Zea mays
  misc_feature (219)..(219): Xaa can be any naturally occurring amino acid
  misc_feature (254)..(257): Xaa can be any naturally occurring amino acid
  misc_feature (261)..(265): Xaa can be any naturally occurring amino acid
  misc_feature (271)..(273): Xaa can be any naturally occurring amino acid
  misc_feature (275)..(278): Xaa can be any naturally occurring amino acid
  misc_feature (281)..(281): Xaa can be any naturally occurring amino acid
  misc_feature (285)..(289): Xaa can be any naturally occurring amino acid
  misc_feature (291)..(304): Xaa can be any naturally occurring amino acid
  misc_feature (306)..(306): Xaa can be any naturally occurring amino acid
  Coding DNA Sequence Number=SeqID_5877
  Gene Ontology: Mol. function=oxidoreductase activity, acting on the CH-CH group of donors; Biological process=electron transport
  Homolog annotation: Hit_ID=B0KMK8; Match level="QueryCoverage=94%, HitCoverage=73%, E-value=1e-114, Identity=69%"; Hit description=Acyl- CoA dehydrogenase type 2 domain
  Pfam annotation: Domain name=Acyl-CoA_dh_2; Domain location=155-295; Score=32.1; E_value=1.4e-06; Accession=PF08028.2; Description=Acyl -CoA dehydrogenase, C-terminal doma
  Subcellular localization annotation: CTP_CleavageSite=70; ConfidenceScore=5.31e-01
SSIAHVFGFHHLMLATVRLFATPAQWQTWFSLTASNNWFWGNTLNPLDTRTVVKRHTGWREFSGQKNFCSGANDSEMLIASAIDESAGGKLLIAAIPSARSGIILHNDWNNMGQRQTDSGSVTFKRVRVEESDLLLDPGPLSTPFACLRPLIAQLHFANIFLGIAEGAFEEARQYTLEEARPWFRSSASHSTQDPYILSHYGDFWVALQSTRLLVERAXEVLDAAWAKGSALTNEERGTAAIAIATAKVAASRXXXXLCSXXXXXTGARAXXXSXXXXRHXRNLXXXXXHXXXXXXXXXXXXXXLX

SEQ ID NO: 11917 - protein, 211 aa, Zea mays
  misc_feature (1)..(5): Xaa can be any naturally occurring amino acid
  misc_feature (8)..(13): Xaa can be any naturally occurring amino acid
  misc_feature (16)..(19): Xaa can be any naturally occurring amino acid
  misc_feature (22)..(23): Xaa can be any naturally occurring amino acid
  misc_feature (25)..(26): Xaa can be any naturally occurring amino acid
  misc_feature (29)..(30): Xaa can be any naturally occurring amino acid
  Coding DNA Sequence Number=SeqID_5878
  Gene Ontology: Mol. function=oxidoreductase activity, acting on paired donors, with incorporation or reduction of molecular oxygen, NADH or NADPH as one donor, and incorporation of one atom of oxygen; Cellular component=...
  Gene Ontology: Cellular component=mitochondrion; Biological process =ubiquinone biosynthetic process
  Homolog annotation: Hit_ID=Q3K4Y4; Match level="QueryCoverage=97%, HitCoverage=52%, E-value=5e-90, Identity=82%"; Hit description=2 -octaprenyl-3-methyl-6-methoxy-1,4-benzoquinol hydroxylase / 2- ...
  Homolog annotation: Hit description=octaprenyl-6-methoxyphenol hydroxylase precursor
XXXXXIAXXXXXXAHXXXXFEXXTXXGPXXLLPLPDNRCALVWTRIGMDAKRLAELDERSFLSELQGVFGYRLGTLKQVGARHLYPLTLVEAEEQVRSHLAVLGNAAHSLHPIAGQGFNLSLRDAYALAEALLAGPAIPGDLATLQAYRERQRMDQKLTVGFSDQVTRLFGSAQPLVALGRNMGLLGLDLLPPAKRWFARQAMGLGTRPDA

SEQ ID NO: 11918 - protein, 56 aa, Zea mays
  misc_feature (56)..(56): Xaa can be any naturally occurring amino acid
  Coding DNA Sequence Number=SeqID_5879
  Homolog annotation: Hit_ID=A1FXB4; Match level="QueryCoverage=98%, HitCoverage=28%, E-value=2e-25, Identity=100%"; Hit description=RNA polymerase, sigma-24 subunit, ECF subfamily
GDTAAYELLYRRHAPRVFAVLWRLCGGQQARAEDALQEAFLQAWKALPGFRFESSX

SEQ ID NO: 11919 - protein, 56 aa, Zea mays; identical to SEQ ID NO: 11918
  misc_feature (56)..(56): Xaa can be any naturally occurring amino acid
  Coding DNA Sequence Number=SeqID_5880
  Homolog annotation: Hit_ID=A1FXB4; Match level="QueryCoverage=98%, HitCoverage=28%, E-value=2e-25, Identity=100%"; Hit description=RNA polymerase, sigma-24 subunit, ECF subfamily

SEQ ID NO: 11920 - protein, 165 aa, Zea mays; identical to SEQ ID NO: 11420
  misc_feature (153)..(153): Xaa can be any naturally occurring amino acid
  misc_feature (159)..(164): Xaa can be any naturally occurring amino acid
  Coding DNA Sequence Number=SeqID_5881
  Gene Ontology: Mol. function=tetracycline:hydrogen antiporter activity; Cellular component=integral to membrane; Biological process=response to antibiotic
  Homolog annotation: Hit_ID=A9HWX9; Match level="QueryCoverage=84%, HitCoverage=29%, E-value=1e-22, Identity=43%"; Hit description =Probable methylenomycin A resistance protein
  Pfam annotation: Domain name=DUF1328; Domain location=1-40; Score= -14.6; E_value=0.1; Accession=PF07043.3; Description=Protein of unknown function (DUF1328)

SEQ ID NO: 11921 - protein, 110 aa, Zea mays
  Coding DNA Sequence Number=SeqID_5306
SNHLSFIYRTMLHGSMAALVTVYNMLALENAAAILTIVSFNTVGAFTLVALYLAVSSAHIIYAGSRSSIALLLYPSRAAASGLARWEGRHGPKNQEQSSSQVHDPSTDLD

SEQ ID NO: 11922 - protein, 192 aa, Zea mays
  misc_feature (1)..(5): Xaa can be any naturally occurring amino acid
  misc_feature (7)..(10): Xaa can be any naturally occurring amino acid
  misc_feature (12)..(25): Xaa can be any naturally occurring amino acid
  misc_feature (29)..(30): Xaa can be any naturally occurring amino acid
  misc_feature (32)..(34): Xaa can be any naturally occurring amino acid
  misc_feature (36)..(40): Xaa can be any naturally occurring amino acid
  misc_feature (42)..(45): Xaa can be any naturally occurring amino acid
  misc_feature (47)..(48): Xaa can be any naturally occurring amino acid
  misc_feature (52)..(52): Xaa can be any naturally occurring amino acid
  misc_feature (60)..(61): Xaa can be any naturally occurring amino acid
  Coding DNA Sequence Number=SeqID_5307
XXXXXAXXXXYXXXXXXXXXXXXXXNQPXXHXXXIXXXXXGXXXXLXXIQWXIVHRDFRXXSQKIISLAMVRHKPKQLREKIVRGAIIQIIHLESTLSQPKRTVAGSFDARVHPGESLALSGAGWFSSTSYFLLCDAEGSLQLHRPNNEENDFPRPDPWARTASSADLVLPKLELIWPPEWKMTRIRVVWPP

SEQ ID NO: 11923 - protein, 227 aa, Zea mays
  misc_feature (203)..(204): Xaa can be any naturally occurring amino acid
  misc_feature (216)..(217): Xaa can be any naturally occurring amino acid
  misc_feature (220)..(221): Xaa can be any naturally occurring amino acid
  misc_feature (224)..(224): Xaa can be any naturally occurring amino acid
  Coding DNA Sequence Number=SeqID_5309
  Gene Ontology: Mol. function=structural constituent of cell wall; Biological process=lipid metabolic process
  Homolog annotation: Hit_ID=A2WZH6; Match level="QueryCoverage=88%, HitCoverage=61%, E-value=3e-84, Identity=70%"; Hit description =Putative uncharacterized protein
MARQLVAAVAALVAVCALAAAAGVQAQPPRKLPPNYHMISPGKFGQRSQQLSCKDTNGRKAGCMGKCDKRCPNQCIVLCPSCKTYCMCDFYAGVSCGDPRFTGGDGNNFYFHGKKDQDFCIVSDADLHINAHFIGKRNPSMSRGFTWIQALGIRFAHHRLFMGAKNTTSWNGDVDHLEMSFDDAAIEIPIEVGARWQSAAVPXXTVTRTAATNGVXXHLXXVFXISA

SEQ ID NO: 11924 - protein, 97 aa, Zea mays
  Coding DNA Sequence Number=SeqID_5310
DPRACAHAVHRRGCSSHGGAVVQPRRGRKRRRETEKAIRIAHSLHVLQRRAHPCVRHHGPMPRYRAERCPGRWHQAKPGHGRRRENRSVESKVLITR

SEQ ID NO: 11925 - protein, 125 aa, Zea mays
  Coding DNA Sequence Number=SeqID_5312
  Gene Ontology: Mol. function=phosphotransferase activity, alcohol group as acceptor; Biological process=metabolic process
  Homolog annotation: Hit_ID=A7P3M6; Match level="QueryCoverage=54%, HitCoverage=7%, E-value=1e-27, Identity=88%"; Hit description =Chromosome chr1 scaffold_5, whole genome shotgun sequence
LLSDRRECIRVRICEGRFALLIREPIREGNFIIQPKVDFDISASTVAGLLKLGYQAVAYIEASAVIYQDGKVIMFLNQCSSFFYLEKRMHTCLPLNGQSLFYFCKSLPTPVLLCHYCLLVQRFIL

SEQ ID NO: 11926 - protein, 125 aa, Zea mays; identical to SEQ ID NO: 11925
  Coding DNA Sequence Number=SeqID_5313
  Gene Ontology: Mol. function=phosphotransferase activity, alcohol group as acceptor; Biological process=metabolic process
  Homolog annotation: Hit_ID=A7P3M6; Match level="QueryCoverage=54%, HitCoverage=7%, E-value=1e-27, Identity=88%"; Hit description =Chromosome chr1 scaffold_5, whole genome shotgun sequence

SEQ ID NO: 11927 - protein, 190 aa, Zea mays
  misc_feature (179)..(179): Xaa can be any naturally occurring amino acid
  misc_feature (184)..(186): Xaa can be any naturally occurring amino acid
  Coding DNA Sequence Number=SeqID_5314
  Gene Ontology: Mol. function=hydrolase activity, acting on carbon -nitrogen (but not peptide) bonds; Biological process=carbohydrate metabolic process
  Homolog annotation: Hit_ID=Q12EN6; Match level="QueryCoverage=87%, HitCoverage=53%, E-value=1e-64, Identity=71%"; Hit description =Putative uncharacterized protein precursor
  Pfam annotation: Domain name=Polysacc_deac_1; Domain location=42-190; Score=-16.8; E_value=0.031; Accession=PF01522.11; Description =Polysaccharide deacetylase
MNPSLLQGTNAGLAAPWTPAPLAGHDRFAYQPITERADYAWPNGARLAVYLGFNIEHFAFGEGLGAELGPASPHPDVLNYAWREYGNRVGAWRCLELFDALGLPAGALINTALYDHCPELVDACLARGDELIGHGYSNAHRQGGLGEAEERALLEHCRDRIGRHAGSAPTGWLSPWISXCRATXXXLHPY

SEQ ID NO: 11928 - protein, 279 aa, Zea mays
  misc_feature (2)..(4): Xaa can be any naturally occurring amino acid
  misc_feature (12)..(12): Xaa can be any naturally occurring amino acid
  misc_feature (279)..(279): Xaa can be any naturally occurring amino acid
  Coding DNA Sequence Number=SeqID_5315
  Gene Ontology: Mol. function=oxidoreductase activity, acting on the CH-CH group of donors; Cellular component=integral to membrane; Biological process=electron transport
  Homolog annotation: Hit_ID=B0KKU2; Match level="QueryCoverage=99%, HitCoverage=71%, E-value=1e-137, Identity=85%"; Hit description=Acyl- CoA dehydrogenase type 2 domain
KXXXPLLEDLKXILPTIAANAFQAEQDRKVPDENIALLKSIGMHRAFQPKPFGGMEISLPQFADCIALLAGACASTAWAMSLLCTHSHQLALFSAKLQQEVWDDNPNATASSSIAPFGRTEEVEGGVLFSGEMGWSSGCDHAEWAIVGFRRKNAEGSQDYCFAVLPRSDYQIRDDWFAAGMKGSGTKTLIIDNVRVPEHRIQKAKDMMEGKSAGFGLYPDSKIFYSPYRPYFASGFSTVSLGVAERMLEVFREKTKTRVRAYTGAAVGAATPALMRLAX

SEQ ID NO: 11929 - protein, 204 aa, Zea mays
  misc_feature (1)..(1): Xaa can be any naturally occurring amino acid
  misc_feature (5)..(7): Xaa can be any naturally occurring amino acid
  Coding DNA Sequence Number=SeqID_5316
  Gene Ontology: Mol. function=methyltransferase activity; Biological process=metabolic process
  Homolog annotation: Hit_ID=Q4KGL2; Match level="QueryCoverage=99%, HitCoverage=75%, E-value=1e-57, Identity=57%"; Hit description =Putative uncharacterized protein
  Pfam annotation: Domain name=Methyltransf_11; Domain location=48-148; Score=55.8; E_value=1.5e-13; Accession=PF08241.2; Description =Methyltransferase domain
  Pfam annotation: Domain name=Methyltransf_12; Domain location=48-146; Score=25.5; E_value=0.00019; Accession=PF08242.2; Description =Methyltransferase domain
  Pfam module annotation: Pfam domain module=Methyltransf _11::Methyltransf_12; Domain location=48-148::48-146
XAERXXXEHARVCADTRPPGLLRRLGLWRDERLVRRALKIAGEPGLILDLACGTGRFWPVLAEHSNRVILASDNSQDMLDHARTHHAPGLLKRIKTFQGSAFSIGLSANAVDCIFCLELFRHVPTPEGRLALLGEFHRVSRDTVIVSVNSDSGYRAVQPALAAVASHRAQVEAEFRQAGFKVLNQQEFLPGSAMWRVYVLRKRG

SEQ ID NO: 11930 - protein, 141 aa, Zea mays
  misc_feature (4)..(4): Xaa can be any naturally occurring amino acid
  Coding DNA Sequence Number=SeqID_5317
  Gene Ontology: Mol. function=oxidoreductase activity, acting on the CH-OH group of donors, NAD or NADP as acceptor; Cellular component =cytoplasm; Biological process=pyridoxine biosynthetic process
  Homolog annotation: Hit_ID=Q3K9D1; Match level="QueryCoverage=97%, HitCoverage=36%, E-value=7e-56, Identity=77%"; Hit description =Erythronate-4-phosphate dehydrogenase
VGRXADLCVLATPHIAGYSLDGRQRGTAQIYQALCRYLGQEAIIQLSDLLPEPWLAEVTLNANTDPAWALAALCRGVYDPRRDDADFRRSLVGTVDEQRKAFDQLRKLYPPRREIEGLKVRISGDSAALSNIVAALGAQAI

SEQ ID NO: 11931 - protein, 139 aa, Zea mays
  Coding DNA Sequence Number=SeqID_5318
  Gene Ontology: Mol. function=signal transducer activity; Cellular component=membrane; Biological process=signal transduction
  Homolog annotation: Hit_ID=Q3KI74; Match level="QueryCoverage=100%, HitCoverage=20%, E-value=2e-48, Identity=78%"; Hit description =Chemotaxis sensory transducer
  Pfam annotation: Domain name=MCPsignal; Domain location=2-139; Score =8.1; E_value=3.1e-07; Accession=PF00015.11; Description=Methyl -accepting chemotaxis protein (MCP) signaling domain
GLVQSQQGSIAALASEIDQSVRVINQLAIDSQSISRVLEVIKSIAEQTNLLALNAAIEAARAGEQGRGFAVVADEVRTLARRTQHSTEEIEQMIAKLHSGVGAAVKAMGTSHEMANGTVGQSEKVQQALENILGAVGMI

SEQ ID NO: 11932 - protein, 185 aa, Zea mays
  Coding DNA Sequence Number=SeqID_5319
  Gene Ontology: Mol. function=receptor activity; Cellular component =outer membrane-bounded periplasmic space; Biological process=amino acid transport
  Homolog annotation: Hit_ID=Q0K2M0; Match level="QueryCoverage=72%, HitCoverage=32%, E-value=1e-58, Identity=80%"; Hit description=ABC -type transporter, periplasmic component precursor
METTMTPMPRISQQRSTPNPRLARALVALTAVAGLSLGGPAQAQTAPAAISDDIVRLGLILDMSGIYADVTGKGSATAAQMAIDDFGGTVLGKKIDLLVADHQNKADIAAARAREWYDTQKVDAIMDVAGSAPALAVLEVAREKKKIVVFSGPGTERITNDLCSPYSVHYTYDTWSLANTTARAT

SEQ ID NO: 11933 - protein, 164 aa, Zea mays
  Coding DNA Sequence Number=SeqID_5320
  Homolog annotation: Hit_ID=Q4J0L1; Match level="QueryCoverage=98%, HitCoverage=83%, E-value=2e-54, Identity=62%"; Hit description =Putative uncharacterized protein
  Pfam annotation: Domain name=DUF1470; Domain location=1-162; Score =127.4; E_value=4.1e-35; Accession=PF07336.2; Description=Protein of unknown function (DUF1470)
GVPFEFWQGDADVQRWLVRLGWCEEGAVPVFEEGALLGAARGLREVIRLLLEQRKAGQQGDPAALNAFLRKAVSHPQLVWPAPGELRLERQRKQQTAEQFLAPIAEAAATLLVEGDFGLIRTCEHPECVLWFYDRTKGHKRRWCSMALCGNRHKVAEFRKRKLL

SEQ ID NO: 11934 - protein, 152 aa, Zea mays
  Coding DNA Sequence Number=SeqID_5321
  Gene Ontology: Mol. function=carbon-sulfur lyase activity; Cellular component=cytoplasm; Biological process=metabolic process
  Homolog annotation: Hit_ID=Q4K971; Match level="QueryCoverage=88%, HitCoverage=30%, E-value=1e-43, Identity=66%"; Hit description=ADP -ribosylglycohydrolase family protein
SSRTTHGALEAIECCLVLAECISNALRGDSKAQVLKVDYLDLSEPKVVDIADGHYLDKARSDIVGSGYAVASLEAALWCFYHTNSFAEAVLAAANLGDDADTTAAIVGQLAGAYYGVQGIPIEWLGKVWQREEIQETADALFQAAQGQAAAL

SEQ ID NO: 11935 - protein, 62 aa, Zea mays
  Coding DNA Sequence Number=SeqID_630
  Gene Ontology: Mol. function=RNA-directed DNA polymerase activity; Biological process=RNA-dependent DNA replication
  Homolog annotation: Hit_ID=Q8H0A3; Match level="QueryCoverage=82%, HitCoverage=9%, E-value=2e-10, Identity=59%"; Hit description =Retrotransposon protein, putative, unclassified
LDLEDSTAIEVLFRATHWFRTWAVLHKQEEGIQIKEACRRLECTALQIFAQHGWRFTNRITS

SEQ ID NO: 11936 - protein, 83 aa, Zea mays
  Coding DNA Sequence Number=SeqID_631
  Gene Ontology: Mol. function=nucleic acid binding
  Homolog annotation: Hit_ID=Q2QNI2; Match level="QueryCoverage=98%, HitCoverage=6%, E-value=1e-26, Identity=76%"; Hit description=Zinc knuckle family protein, putative, expressed
GESEKVLLLMESGVRIPFCVHFCSDKSTTPSGFNLKLRKHIRNKRLEDVHMLRYDMTILFHFGLGSNAHFIILDLYAQINILP

SEQ ID NO: 11937 - protein, 123 aa, Zea mays
  Coding DNA Sequence Number=SeqID_632
RCSCKGRQELRPRCQKIIGNGPCLTPIQFVAHPILPSLAVLGLTVPAAIAQQQASRSHRCGPCLTPSQFVCLPELHRATLRDHLRRASFRGCLWCILCLGKEEEEEGVEADLQEFQDFDEFED

SEQ ID NO: 11938 - protein, 134 aa, Zea mays
  misc_feature (92)..(92): Xaa can be any naturally occurring amino acid
  Coding DNA Sequence Number=SeqID_634
  Gene Ontology: Mol. function=DNA-directed RNA polymerase activity; Cellular component=RNA polymerase complex; Biological process =transcription, DNA-dependent
  Homolog annotation: Hit_ID=A2XIZ2; Match level="QueryCoverage=85%, HitCoverage=79%, E-value=7e-16, Identity=47%"; Hit description =Putative uncharacterized protein
  Pfam annotation: Domain name=RNA_pol_Rpb6; Domain location=61-116; Score=60.1; E_value=7.7e-15; Accession=PF01192.13; Description=RNA polymerase Rpb6
MADDDYNEIDMGYEDEPPEPEIEEGAEEELENNEDAPDDVIGGEGEDKEQEKTKRERKTTKYMTKYERARILGTRALQISMNAPVMVELEGXKTDPLEIAMKELRARKRVSFSLKLAKHAVSEGTKAVTKFTSS

SEQ ID NO: 11939 - protein, 249 aa, Zea mays
  Coding DNA Sequence Number=SeqID_635
  Subcellular localization annotation: CTP_CleavageSite=79; ConfidenceScore=5.13e-01
DILTGTQKDGSMMEHPHRAQNPPPKRRRNSPRAKYKVYKPTPPLPLFPLPPPPAPRDSLLSSRRSPSPTRNPSDCHCPRAARPMNGGGSGLAPNAAHTADEVFRDYKGRRAGMIKALTTGTPPLAPPIGPLILSCLRGFIRLTRGFSCPVQDVERFFKLCDPGECARYLWFLAPGCGVIAEEASVVFLLGFRCFGGGLEAKFGEISLFSVSSTLTRHASDSIIGGLAAFVNALLVLDCSCSNLVRDWTP

SEQ ID NO: 11940 - protein, 153 aa, Zea mays
  misc_feature (94)..(94): Xaa can be any naturally occurring amino acid
  Coding DNA Sequence Number=SeqID_637
  Gene Ontology: Mol. function=nucleic acid binding; Cellular component= chromatin; Biological process=chromatin assembly or disassembly
  Homolog annotation: Hit_ID=Q9FW76; Match level="QueryCoverage=98%, HitCoverage=9%, E-value=5e-12, Identity=33%"; Hit description =Putative gag-pol polyprotein
  Pfam annotation: Domain name=Chromo; Domain location=30-81; Score =49.7; E_value=1e-11; Accession=PF00385.14; Description='chromo' (CHRromatin Organisation MOdifier)
FPGMHAGKLKKAVGSSVVVAQLPDRLDSHQIPERVLQRRWGPNGASQGLILWSGLHPSLATWEDLIPLRQRFPRAPAWGQAACYREGNLSLSTXSTSEDLQVQQAEAAVSEELQQQQSNVETGGPQEETTAGLRRGTRQRKANVRFQGPEWRT

SEQ ID NO: 11941 - protein, 180 aa, Zea mays
  misc_feature (19)..(19): Xaa can be any naturally occurring amino acid
  misc_feature (68)..(68): Xaa can be any naturally occurring amino acid
  misc_feature (100)..(100): Xaa can be any naturally occurring amino acid
  misc_feature (172)..(172): Xaa can be any naturally occurring amino acid
  misc_feature (174)..(175): Xaa can be any naturally occurring amino acid
  Coding DNA Sequence Number=SeqID_638
  Gene Ontology: Mol. function=3'-5'-exoribonuclease activity; Cellular component=exosome (RNase complex); Biological process=RNA processing
  Homolog annotation: Hit_ID=A2YQN5; Match level="QueryCoverage=98%, HitCoverage=77%, E-value=9e-66, Identity=68%"; Hit description =Putative uncharacterized protein
  Subcellular localization annotation: CTP_CleavageSite=31; ConfidenceScore=5.12e-01
TGPITASSGSAYAEFGKTXIVSVFGPRESKKAMMHTDVGRLNCNVSYTTFATPVRGMVHHISTSRGLXVEGDLPIIISCASLALADAGIMMYDLVTSLSXSCFGKNIIIDPTSDEEARQDGSLVVAFMPVRKEITQLALTGEWSDGRITNQAVELCMDACSKHGDILRDRLXDXXTLTSE

SEQ ID NO: 11942 - protein, 78 aa, Zea mays
  Coding DNA Sequence Number=SeqID_639
  Subcellular localization annotation: CTP_CleavageSite=63; ConfidenceScore=5.41e-01
MGLFSSERYEIIAGRITKNSSSSTSSSSNKKPPNMLLPRTHYPTKSPTEGRRRPTKGWRRRPTVTTGRERKRRGEVAR

SEQ ID NO: 11943 - protein, 193 aa, Zea mays
  Coding DNA Sequence Number=SeqID_641
FPEILGMTFLANPLLYTLNFPLVVDGTPPHESPCSSLAAHGTPPASDPLPLAFDSLPQQSYAHGSPSQFSIPYLPSPWPSTPSKDATLSSWFPPFDERGWSAPPLPSEPQRQQPPPGVEDVAGPPPWNLLARHRCLISIASTLSPSRSRIRIIRSHCSSLFCSNDSIASNMIHVCFEGFTVGVVVEKLRGTRL

SEQ ID NO: 11944 - protein, 161 aa, Zea mays
  Coding DNA Sequence Number=SeqID_643
  Subcellular localization annotation: CTP_CleavageSite=40; ConfidenceScore=5.63e-01
LSARVPAASPPPTRAAGTPGGRTAPCPRTPAASRGTPCRPAASPWHPCTARRCCCPLHARGFCCCLPFGARSWCFAWFWSAPPLFCSPFSLNRNVGTAHGLRLTARRHVGGREDGGGGTPVAGSGQRRERKQRPPAAVSFRWCGGVRQDSFLWGSIARTWE

SEQ ID NO: 11945 - protein, 161 aa, Zea mays; identical to SEQ ID NO: 11944
  Coding DNA Sequence Number=SeqID_644
  Subcellular localization annotation: CTP_CleavageSite=40; ConfidenceScore=5.63e-01

SEQ ID NO: 11946 - protein, 218 aa, Zea mays
  misc_feature (87)..(88): Xaa can be any naturally occurring amino acid
  misc_feature (195)..(195): Xaa can be any naturally occurring amino acid
  misc_feature (218)..(218): Xaa can be any naturally occurring amino acid
  Coding DNA Sequence Number=SeqID_645
  Subcellular localization annotation: CTP_CleavageSite=60; ConfidenceScore=5.71e-01
PVSLPPRSLRLVPLQITSSGSHPLLALSASSLCKYTRSSRPRLRVSLLRVSRSGPPAAARANAVAACPLLHQTPACDTLLESNRRWXXRKKGEHSRLSHAMKVNKGGGRSALRRCRRRLCLVAAGTAPRAVRSARLRGYSRLFRRRMFYLIIWLCFQARSGVGESSTIHRTTVKGVRAACIQQTMAVSLQPATMXPSKGPTPHTSSRTGEQGRQSSRX

SEQ ID NO: 11947 - protein, 142 aa, Zea mays
  misc_feature (138)..(141): Xaa can be any naturally occurring amino acid
  Coding DNA Sequence Number=SeqID_5322
  Gene Ontology: Mol. function=transporter activity; Cellular component= outer membrane-bounded periplasmic space; Biological process=transport
  Homolog annotation: Hit_ID=Q3K4Z9; Match level="QueryCoverage=83%, HitCoverage=33%, E-value=3e-42, Identity=72%"; Hit description =Taurine ABC transporter, periplasmic binding protein precursor
MNTLKLARNLLSAMGLAVLSLSAQSADLTIGYINGIDPIKRAIADGEYEKGIGQKIDWRKFDAGPAVLAAMASGDVQIGNLGSSPLAAAASRNMPLVAFIVSAQIRSSEALVVRDGSGIKTPDDLIGKTIAVPFVVCXXXXT

SEQ ID NO: 11948 - protein, 216 aa, Zea mays
  Coding DNA Sequence Number=SeqID_5323
  Gene Ontology: Mol. function=poly(beta-D-mannuronate) lyase activity; Cellular component=periplasmic space; Biological process=alginic acid catabolic process
  Homolog annotation: Hit_ID=Q2KVN4; Match level="QueryCoverage=78%, HitCoverage=50%, E-value=2e-52, Identity=56%"; Hit description =Putative alginate lyase precursor
ATAKLSPFRGARPAAARWRYAACLPLILLGAQALAAPQPCEAPPPGPRDLEGTGYYTDAAHSQIDPALQARNQAQTRPLNDYARRVADLSDAYLAHGDAAAGQCALTWLASWAKDGAMLGRMIHGNNDQADYLRQWTHGAAALAYLKTLPLATPAQRGLIGPWLEQLSRANLAYWEDPRHQRNNHYYWTGVGILATAIANDDAGLRRGAQAIYRKG

SEQ ID NO: 11949 - protein, 155 aa, Zea mays
  misc_feature (3)..(6): Xaa can be any naturally occurring amino acid
  misc_feature (9)..(9): Xaa can be any naturally occurring amino acid
  misc_feature (13)..(15): Xaa can be any naturally occurring amino acid
  misc_feature (17)..(18): Xaa can be any naturally occurring amino acid
  misc_feature (22)..(26): Xaa can be any naturally occurring amino acid
  misc_feature (32)..(33): Xaa can be any naturally occurring amino acid
  misc_feature (38)..(41): Xaa can be any naturally occurring amino acid
  misc_feature (155)..(155): Xaa can be any naturally occurring amino acid
  Coding DNA Sequence Number=SeqID_5324
  Gene Ontology: Cellular component=integral to membrane
  Homolog annotation: Hit_ID=Q4KHA1; Match level="QueryCoverage=99%, HitCoverage=17%, E-value=3e-64, Identity=78%"; Hit description =Membrane protein, putative
  Pfam annotation: Domain name=DUF470; Domain location=52-155; Score =104.1; E_value=4.3e-28; Accession=PF04329.3; Description=Family of unknown function (DUF470)
SHXXXXQFXLDAXXXRXXRSLXXXXXVLVVVXXTWLLXXXXPIIHLPTPEELERATKILMNSAQPDGGLALTGDKALLFHPNDEAFLMYARRGRSLVALYDPIGPTLQRAEMIWQFRDLCDIHHARPVFYQVRAENLPYYMDIGLTAIKLGEEAX

SEQ ID NO: 11950 - protein, 259 aa, Zea mays
  misc_feature (200)..(200): Xaa can be any naturally occurring amino acid
  misc_feature (232)..(233): Xaa can be any naturally occurring amino acid
  misc_feature (248)..(253): Xaa can be any naturally occurring amino acid
  misc_feature (255)..(257): Xaa can be any naturally occurring amino acid
  Coding DNA Sequence Number=SeqID_5325
  Gene Ontology: Mol. function=phosphoserine transaminase activity; Cellular component=cytoplasm; Biological process=amino acid biosynthetic process
  Homolog annotation: Hit_ID=Q9HZ66; Match level="QueryCoverage=92%, HitCoverage=66%, E-value=1e-109, Identity=79%"; Hit description =Phosphoserine aminotransferase
  Pfam annotation: Domain name=Aminotran_5; Domain location=23-259; Score=-101.6; E_value=1.2e-06; Accession=PF00266.9; Description =Aminotransferase class-V
MLKPRIIAPPHQIRVRLDVSKRAYNFCAGPAALPEAVLQRAQGELLDWHGKGLSVMEMSHRSDEFVSIATKAEQDMRDLLDIPSDYKVLFLQGGASQQFAQIPLNLLPESGTADYIDTGIWGQKAIEEASRYGHVNVAGTAKPYDYFAIPGQNEWKLSKDAAYVHYVANETIGGLEFDWVPEVGDVPLVCDMSSDILSRXIDVSKYGMIYAGAQKNIGPSGILVNIIREDLXXRARSLCPTMLNYKVXXXXXXMXXXPV

SEQ ID NO: 11951 - protein, 55 aa, Zea mays
  misc_feature (1)..(1): Xaa can be any naturally occurring amino acid
  Coding DNA Sequence Number=SeqID_5326
  Homolog annotation: Hit_ID=A6V7M9; Match level="QueryCoverage=96%, HitCoverage=16%, E-value=4e-07, Identity=58%"; Hit description =Transcriptional regulator, LysR family
  Pfam annotation: Domain name=HTH_1; Domain location=3-34; Score=35.0; E_value=2.7e-07; Accession=PF00126.17; Description=Bacterial regulatory helix-turn-helix protein, lysR family
XSPLSRTIKELEEDLGAPLFARTTRSTRLTRAGRLLLEHVPRVFAALDQARASVC

SEQ ID NO: 11952 - protein, 55 aa, Zea mays; identical to SEQ ID NO: 11951
  misc_feature (1)..(1): Xaa can be any naturally occurring amino acid
  Coding DNA Sequence Number=SeqID_5327
  Homolog annotation: Hit_ID=A6V7M9; Match level="QueryCoverage=96%, HitCoverage=16%, E-value=4e-07, Identity=58%"; Hit description =Transcriptional regulator, LysR family
  Pfam annotation: Domain name=HTH_1; Domain location=3-34; Score=35.0; E_value=2.7e-07; Accession=PF00126.17; Description=Bacterial regulatory helix-turn-helix protein, lysR family

SEQ ID NO: 11953 - protein, 285 aa, Zea mays
  misc_feature (1)..(1): Xaa can be any naturally occurring amino acid
  misc_feature (253)..(255): Xaa can be any naturally occurring amino acid
  misc_feature (274)..(274): Xaa can be any naturally occurring amino acid
  misc_feature (276)..(276): Xaa can be any naturally occurring amino acid
  misc_feature (278)..(282): Xaa can be any naturally occurring amino acid
  Coding DNA Sequence Number=SeqID_5328
  Gene Ontology: Mol. function=binding; Cellular component=outer membrane; Biological process=cell adhesion
  Homolog annotation: Hit_ID=Q4ZTJ1; Match level="QueryCoverage=95%, HitCoverage=29%, E-value=2e-76, Identity=54%"; Hit description=Outer membrane autotransporter barrel
XKLDNNIYDMSGGAILGNLVTAFGTDTIIVSGGNIGGNISTSGGNDSITVSGGVISGEIRASVGNDTFNWINGGQINSAVLMGDGDDTALISGLNETLLGTTPSIDGGLGNDQLTFDNTTSSTAARYIGWETVNLNNNSRFDLAGDFFLGDSASNTGTFNIDGSSTLGVTQGSIRPYTAGALATLNNAGTLDMTSRSNSATDTLTVYGNYVGNNGQLWLQTVLGDENSATDKLVVSDGTISGHTQMTVSNLGXXXGLTQNSGIEVVQALNGATXSXDXXXXXKGF

SEQ ID NO: 11954 - protein, 236 aa, Zea mays
  misc_feature (4)..(5): Xaa can be any naturally occurring amino acid
  misc_feature (8)..(9): Xaa can be any naturally occurring amino acid
  Coding DNA Sequence Number=SeqID_5329
  Gene Ontology: Mol. function=3-hydroxybutyryl-CoA dehydrogenase activity; Cellular component=mitochondrial inner membrane; Biological process=fatty acid metabolic process
  Homolog annotation: Hit_ID=Q8YB80; Match level="QueryCoverage=97%, HitCoverage=40%, E-value=4e-91, Identity=71%"; Hit description=3 -HYDROXYBUTYRYL-COA DEHYDROGENASE
  Pfam annotation: Domain name=3HCDH; Domain location=134-231; Score =158.6; E_value=1.7e-44; Accession=PF00725.12; Description=3 -hydroxyacyl-CoA dehydrogenase, C-terminal domain
  Pfam annotation: Domain name=3HCDH_N; Domain location=1-132; Score =123.9; E_value=4.5e-34; Accession=PF02737.8; Description=3 -hydroxyacyl-CoA dehydrogenase, NAD binding domain
  Pfam module annotation: Pfam domain module=3HCDH::3HCDH_N; Domain location=134-231::1-132
VGIXXKIXXAAMDAALENLHVAATVEALHDCDLVVEAIVENLDAKRGLLQQLEGVVSAGCILATNTSSLSVTAIATGCQHPERVAGLHFFNPVPLMRVVEVIDGLATAPKVGDDLLAFVARTGHRGVRAKDTPGFIVNHAGRAYGTEALKMLDEGIAERGDIDRILREGAGFRMGPLELLDLTGLDVSHPVMESIYNQFYQEARYKPSPLTRQMLAGGRLGRKSGQGFYRYENGQV

SEQ ID NO: 11955 - protein, 273 aa, Zea mays
  Coding DNA Sequence Number=SeqID_5330
  Gene Ontology: Mol. function=gamma-glutamyltransferase activity; Cellular component=membrane; Biological process=glutathione biosynthetic process
  Homolog annotation: Hit_ID=Q9I6W8; Match level="QueryCoverage=99%, HitCoverage=50%, E-value=1e-117, Identity=74%"; Hit description =Probable gamma-glutamyltranspeptidase
  Pfam annotation: Domain name=G_glu_transpept; Domain location=1-271; Score=66.3; E_value=1.4e-18; Accession=PF01019.11; Description=Gamma- glutamyltranspeptidase
VWEIPPSGQGLVALMALKILEGFSFDHRDSQQTWHRQLEAMKLAYSDGLHYITDPLHMRVAVADLLSDGYSSRRREQIGEQAQPPKPGDPHASGTVYLATADAEGNMVSFIQSNYHGFGSGVVLPDSGIALQNRGQEFSLDPGHANCLMPGKKTFHTIIPGFLTRDGQALGPFGVMGGYMQPQGHVQMVMNLVDFGLNPQAALDAPRWQWLGEMKVGIEQGASRDLANALARRGHQVQIASDLTDFGRGQIILRDPVSGVLCGGTEPRADSIL

SEQ ID NO: 11956 - protein, 225 aa, Zea mays
  misc_feature (196)..(198): Xaa can be any naturally occurring amino acid
  misc_feature (204)..(206): Xaa can be any naturally occurring amino acid
  misc_feature (208)..(209): Xaa can be any naturally occurring amino acid
  misc_feature (211)..(221): Xaa can be any naturally occurring amino acid
  Coding DNA Sequence Number=SeqID_5331
  Gene Ontology: Mol. function=oxidoreductase activity; Cellular component=mitochondrion; Biological process=electron transport
  Homolog annotation: Hit_ID=Q4KDZ4; Match level="QueryCoverage=93%, HitCoverage=52%, E-value=5e-96, Identity=83%"; Hit description =Putative uncharacterized protein
  Pfam annotation: Domain name=DAO; Domain location=4-225; Score=130.0; E_value=7.1e-36; Accession=PF01266.14; Description=FAD dependent oxidoreductase
  Pfam annotation: Domain name=Pyr_redox_2; Domain location=4-171; Score=-41.9; E_value=0.029; Accession=PF07992.4; Description =Pyridine nucleotide-disulphide oxidoreduc
  Pfam module annotation: Pfam domain module=DAO::Pyr_redox_2; Domain location=4-225::4-171
MIYDFCIIGGGIVGLATAMELLKRQPNASLVILEKETLLAKHQTGHNSGVIHAGIYYAPGSLKADLCKRGAEATKQFCTEHGIKFEVCGKLLVASTPLEVQRMEALYARSQLNGMKVERLDADQLRQREPNIVGLGGLFLDATGIVDYREVCETMARVIRRAGGEICLERTVTSIVEDTDKVTVSTRGESWQAKHXXXCAGLQXXXLXXMXXXXXXXXXXXPVEK

SEQ ID NO: 11957 - protein, 90 aa, Zea mays
  misc_feature (3)..(3): Xaa can be any naturally occurring amino acid
  Coding DNA Sequence Number=SeqID_5332
  Gene Ontology: Mol. function=two-component response regulator activity; Cellular component=intracellular; Biological process=two -component signal transduction system (phosphorelay)
  Homolog annotation: Hit_ID=A9IF20; Match level="QueryCoverage=96%, HitCoverage=38%, E-value=3e-32, Identity=79%"; Hit description=Two -component response regulator
  Pfam annotation: Domain name=Response_reg; Domain location=1-86; Score=53.2; E_value=8.8e-13; Accession=PF00072.14; Description =Response regulator receiver domain
GSXARDGVNGLHLALEGAYDLIVLDVMLPGVDGFGILAAVRANKDTPILMLTARDAVEDRVRGLEGGADDYLVKPFAFSELLARVQALLR

SEQ ID NO: 11958 - protein, 40 aa, Zea mays
  Coding DNA Sequence Number=SeqID_5333
YTHHVTFSFTISATSHCCSVQFNNLKHHRVHYANVVLETI

SEQ ID NO: 11959 - protein, 53 aa, Zea mays
  Coding DNA Sequence Number=SeqID_5335
  Homolog annotation: Hit_ID=Q4KH05; Match level="QueryCoverage=60%, HitCoverage=16%, E-value=3e-08, Identity=81%"; Hit description=YceI -like family protein
MCLFKPMAVLLLAAAAVPAHADWYLDNESSRLSFVTTKNTDIAEVQRFLVLHG

SEQ ID NO: 11960 - protein, 53 aa, Zea mays; identical to SEQ ID NO: 11959
  Coding DNA Sequence Number=SeqID_5336
  Homolog annotation: Hit_ID=Q4KH05; Match level="QueryCoverage=60%, HitCoverage=16%, E-value=3e-08, Identity=81%"; Hit description=YceI -like family protein

SEQ ID NO: 11961 - protein, 103 aa, Zea mays
  Coding DNA Sequence Number=SeqID_5337
  Gene Ontology: Mol. function=transporter activity; Cellular component= integral to membrane; Biological process=transport
  Homolog annotation: Hit_ID=A8G9G0; Match level="QueryCoverage=72%, HitCoverage=18%, E-value=3e-28, Identity=77%"; Hit description=L -fucose transporter
MLSKDTHLAGTRAVPTYRWALMLVTSLFFLWGLSYGLLDVLNKHFQEVLHVSKAQSGLLQGAYFGAYFLIALPAGLLMDRHGYKAGILLGLCLYAAGALLFMP

SEQ ID NO: 11962 - protein, 103 aa, Zea mays; identical to SEQ ID NO: 11961
  Coding DNA Sequence Number=SeqID_5338
  Gene Ontology: Mol. function=transporter activity; Cellular component= integral to membrane; Biological process=transport
  Homolog annotation: Hit_ID=A8G9G0; Match level="QueryCoverage=72%, HitCoverage=18%, E-value=3e-28, Identity=77%"; Hit description=L -fucose transporter

SEQ ID NO: 11963 - protein, 91 aa, Zea mays
  Coding DNA Sequence Number=SeqID_5339
  Gene Ontology: Mol. function=transporter activity; Cellular component= cell outer membrane; Biological process=transport
  Homolog annotation: Hit_ID=A4Y162; Match level="QueryCoverage=98%, HitCoverage=12%, E-value=1e-29, Identity=61%"; Hit description=TonB -dependent receptor precursor
TGQLALRQGYTYGDFHYRNDDRFGDNTLPGIPKHYYQAQLRYSHPSGFYTSLNGEHSSRVAVDYANSYYAAAYTLLGATVGYDAPKHDWQA

SEQ ID NO: 11964 - protein, 89 aa, Zea mays
  Coding DNA Sequence Number=SeqID_5340
  Gene Ontology: Mol. function=FMN binding
  Homolog annotation: Hit_ID=Q3K7L3; Match level="QueryCoverage=100%, HitCoverage=36%, E-value=1e-39, Identity=86%"; Hit description =Pyridoxamine 5'-phosphate oxidase-like, FMN-binding
LTLANPFAGKAELSMIEHMNSDHTKAIAHYVELAGLPTTEPAQLAGIDSEGMHLRIGQALYWLPFAEPCNTPTQVREALVFLAHAEVWP

SEQ ID NO: 11965 - protein, 140 aa, Zea mays
  Coding DNA Sequence Number=SeqID_5341
  Gene Ontology: Mol. function=[glutamate-ammonia-ligase] adenylyltransferase activity
  Homolog annotation: Hit_ID=Q3KJ48; Match level="QueryCoverage=99%, HitCoverage=14%, E-value=2e-59, Identity=83%"; Hit description =Glutamate-ammonia-ligase adenylyltransferase
DKLRQEVSEMRAKMRDNLGTKSTAAGTAANAFEPTVAFDLKQDAGGIVDIEFMVQYAALAWSAQHPSLLRYTDNIRILEGLEQVGLMPAADAHLLREVYKAYRSAAHRQALQNEAGTVAGDQFADERRQVQRIWHELGLS

SEQ ID NO: 11966 - protein, 158 aa, Zea mays
  Coding DNA Sequence Number=SeqID_5342
  Gene Ontology: Mol. function=transferase activity, transferring glycosyl groups; Cellular component=cytoplasm; Biological process =pyrimidine nucleotide biosynthetic process
  Homolog annotation: Hit_ID=Q4K3R9; Match level="QueryCoverage=100%, HitCoverage=73%, E-value=3e-67, Identity=83%"; Hit description =Orotate phosphoribosyltransferase
  Pfam annotation: Domain name=Pribosyltran; Domain location=1-115; Score=65.9; E_value=1.4e-16; Accession=PF00156.17; Description =Phosphoribosyl transferase domain
IVESGISFDVLFGPAYKGIPLAAATAVALAEHHALDLPWCFNRKEAKAHGEGGSLVGAPLKGDVLIIDDVITAGTAIREVMQIIASQDGAKAAGVLIALNRQERGNGELSAIQEVERDFAIPVVSIVSLNQVLQFLEDDPQLKQHLPAVKAYREQFGV

SEQ ID NO: 11967 - protein, 219 aa, Zea mays
  Coding DNA Sequence Number=SeqID_5343
  Gene Ontology: Mol. function=sugar:hydrogen symporter activity; Cellular component=periplasmic space; Biological process=transport
  Homolog annotation: Hit_ID=Q4IYR2; Match level="QueryCoverage=99%, HitCoverage=70%, E-value=1e-84, Identity=70%"; Hit description =Periplasmic binding protein/LacI transcriptional regulator precursor
TAATQKMTVNAQQAGIPLVYVNRRPDIPGLPAGVGYVGSDEIKAGEIQMRYLAEKMNGKGNLAIMLGLLSNNATHNRTQGVKNVLKDYPNIHIVEEQSADWQRSKAMDLMNNWIVSGKKIDAVAANADEMAIGAAMAITQAGMHPGKDILVGGSDGGPAGLDAIKKDLLVVTAYQDNKGQAVGSIDLALKMIRKQPYTAELTIPYQQITKDNYQAFLTP

SEQ ID NO: 11968 - protein, 292 aa, Zea mays
  misc_feature (5)..(7): Xaa can be any naturally occurring amino acid
  misc_feature (9)..(10): Xaa can be any naturally occurring amino acid
  misc_feature (20)..(21): Xaa can be any naturally occurring amino acid
  Coding DNA Sequence Number=SeqID_5344
  Gene Ontology: Mol. function=oxidoreductase activity, acting on CH-OH group of donors; Cellular component=mitochondrial inner membrane; Biological process=glycine betaine biosynthetic process from choline
  Homolog annotation: Hit_ID=Q3IC75; Match level="QueryCoverage=98%, HitCoverage=51%, E-value=9e-63, Identity=43%"; Hit description =Putative choline dehydrogenase
  Pfam annotation: Domain name=GMC_oxred_C; Domain location=190-292; Score=43.8; E_value=6.1e-10; Accession=PF05199.4; Description=GMC oxidoreductase
RTERXXXAXXYLDSAAGRDXXVVKSRAFVTGLVFSGKAAVGVKYEIDGVEQISHAAKEVILSAGAFGSPQLLLLAGIGDQDELKALGIELRHHLPGVGKNLQDHVAVAIQYSTPKQGVSPTRALSPLGRLFVGARWMAARSGLGASNYFEVGAFFRGNDQVEYANLEHEFLPMVGEFYRGKARITPGFQYFTSVMRPASRGSVTLASKDPKADPLIRLNFLTAPGDLEQLREGLRKTREMIAQRSWDELRGEELSPGKHLQSDAELEAWIRDNAGTTFHACSTCRMGVDEMA

SEQ ID NO: 11969 - protein, 78 aa, Zea mays
  Coding DNA Sequence Number=SeqID_5345
  Gene Ontology: Mol. function=transferase activity, transferring phosphorus-containing groups; Cellular component=membrane; Biological process=peptidyl-histidine phosphorylation
  Homolog annotation: Hit_ID=Q4ZPW8; Match level="QueryCoverage=98%, HitCoverage=19%, E-value=8e-21, Identity=68%"; Hit description =Sensor protein
MESFARVLSLQIEAEESLQQTEADLQQERETAELREQFIAVLGHDLRNPLFAINVGAERLLRKHPDPATDTLVRHMLA

SEQ ID NO: 11970 - protein, 78 aa, Zea mays; identical to SEQ ID NO: 11969
  Coding DNA Sequence Number=SeqID_5346
  Gene Ontology: Mol. function=transferase activity, transferring phosphorus-containing groups; Cellular component=membrane; Biological process=peptidyl-histidine phosphorylation
  Homolog annotation: Hit_ID=Q4ZPW8; Match level="QueryCoverage=98%, HitCoverage=19%, E-value=8e-21, Identity=68%"; Hit description =Sensor protein

SEQ ID NO: 11971 - protein, 62 aa, Zea mays
  Coding DNA Sequence Number=SeqID_5347
  Gene Ontology: Mol. function=binding
  Homolog annotation: Hit_ID=Q48D67; Match level="QueryCoverage=100%, HitCoverage=3%, E-value=5e-13, Identity=61%"; Hit description =Filamentous hemagglutinin
GLGRLQLNEVLTYKSSQGLTLKAGDRMASSKGLILDVASLNNGGELLSDGNVSITLSGDLNN

SEQ ID NO: 11972 - protein, 62 aa, Zea mays; identical to SEQ ID NO: 11971
  Coding DNA Sequence Number=SeqID_5348
  Gene Ontology: Mol. function=binding
  Homolog annotation: Hit_ID=Q48D67; Match level="QueryCoverage=100%, HitCoverage=3%, E-value=5e-13, Identity=61%"; Hit description =Filamentous hemagglutinin

SEQ ID NO: 11973 - protein, 306 aa, Zea mays
  misc_feature (1)..(1): Xaa can be any naturally occurring amino acid
  misc_feature (240)..(240): Xaa can be any naturally occurring amino acid
  misc_feature (266)..(266): Xaa can be any naturally occurring amino acid
  misc_feature (275)..(275): Xaa can be any naturally occurring amino acid
  misc_feature (279)..(280): Xaa can be any naturally occurring amino acid
  misc_feature (282)..(282): Xaa can be any naturally occurring amino acid
  misc_feature (284)..(285): Xaa can be any naturally occurring amino acid
  misc_feature (289)..(298): Xaa can be any naturally occurring amino acid
  misc_feature (301)..(301): Xaa can be any naturally occurring amino acid
  misc_feature (303)..(304): Xaa can be any naturally occurring amino acid
  misc_feature (306)..(306): Xaa can be any naturally occurring amino acid
  Coding DNA Sequence Number=SeqID_5349
  Gene Ontology: Mol. function=3-isopropylmalate dehydratase activity; Cellular component=3-isopropylmalate dehydratase complex; Biological process=branched chain family amino acid biosynthetic process
  Homolog annotation: Hit_ID=Q3KDQ3; Match level="QueryCoverage=93%, HitCoverage=60%, E-value=1e-126, Identity=79%"; Hit description=3 -isopropylmalate dehydratase, large subunit
  Pfam annotation: Domain name=Aconitase; Domain location=2-305; Score =148.0; E_value=2.7e-41; Accession=PF00330.10; Description=Aconitase family (aconitate hydratase)
XVNPTTPKRIATMPDAGGARQVSYLAENCRDFGIELLDILDKRQGIEHVIAPEQGFILPGMVIAAGDSHTTTYGALGAFGFGIGTSEIEHLLASQTLVYKRLKSLRVTVDGELAHGLTSKDVIMALIGKIGASGATGYAIEFCGSTIDALSVEARMTICNMAVEAGARGAFMAPDEKVFAYLKGKPRAPNGELWERALVGWRQLHSDADAVFDLEVQLDATALEPMVTWGTSPDQAAPIXARVPDPQDVSDLILRQDMRRALNYMXLEAGMPLSXIVIXXAXIXXCTNXXXXXXXXXXSVXRXXHX

SEQ ID NO: 11974 - protein, 213 aa, Zea mays
  Coding DNA Sequence Number=SeqID_5350
  Gene Ontology: Mol. function=P-P-bond-hydrolysis-driven protein transmembrane transporter activity; Cellular component=integral to membrane; Biological process=intracellular protein transport across a membrane
  Homolog annotation: Hit_ID=Q3KJD2; Match level="QueryCoverage=85%, HitCoverage=69%, E-value=8e-88, Identity=89%"; Hit description=Sec -independent periplasmic protein translocase
  Pfam annotation: Domain name=TatC; Domain location=48-213; Score =185.4; E_value=1.4e-52; Accession=PF00902.8; Description=Sec -independent protein translocase protein (TatC)
MPPRQQPNPRRRLPCRPRDPAAASPMSADKPETDQHMPLVSHLTELRTRLLRCVAAIFIIFAGLFAFTQQIYTFVSTPLRNYLPAGATMIATDVSSPFLTPLKLTMMVSLFLAIPVILHQIWGFIAPGLYKHEKRIAVPLLVSSILLFYTGMAFAYFLVFPLIFKFFAAATPAGVEMMTDITSYLDFVMTLFFAFGVAFEIPVAVVLLVWIGV

SEQ ID NO: 11975 - protein, 291 aa, Zea mays
  misc_feature (1)..(1): Xaa can be any naturally occurring amino acid
  misc_feature (5)..(5): Xaa can be any naturally occurring amino acid
  misc_feature (7)..(10): Xaa can be any naturally occurring amino acid
  misc_feature (13)..(15): Xaa can be any naturally occurring amino acid
  misc_feature (17)..(17): Xaa can be any naturally occurring amino acid
  Coding DNA Sequence Number=SeqID_5351
  Gene Ontology: Mol. function=transporter activity; Cellular component= cell outer membrane; Biological process=transport
  Homolog annotation: Hit_ID=Q3KBJ5; Match level="QueryCoverage=99%, HitCoverage=32%, E-value=1e-144, Identity=83%"; Hit description=TonB- dependent receptor precursor
XVINXIXXXXLTXXXLXTNYDSPTRSGGGDSHNFSGSYGFGDLADDRFNVFGVVSYDKQTRLAAKDRDYTYNYQPGRGLDFTSGTAAPANWSQGSNATNPLAGSGCNSPGLLSRNGICRQSLWSYLDLVPETEKTSAFAKATGKLADDHTVSLEYFWARNENRTQIGPGTLMGAQVNPGTAFYPGNGITPGPTGFALDPTQPVDVNWRETDAGARKHEDDNTSQRLLLSFEGTVANWDYNVGASYNQNKVVQTILDGYVNDQTISQGIANGVINPFGPQSEAGRALLASSR

SEQ ID NO: 11976 - protein, 139 aa, Zea mays
  misc_feature (1)..(1): Xaa can be any naturally occurring amino acid
  Coding DNA Sequence Number=SeqID_5352
  Gene Ontology: Mol. function=inorganic phosphate transmembrane transporter activity; Cellular component=1-2nm peptidoglycan-based cell wall; Biological process=phosphate transport
  Homolog annotation: Hit_ID=Q3K4F4; Match level="QueryCoverage=99%, HitCoverage=24%, E-value=2e-59, Identity=85%"; Hit description =Phosphate transport system permease protein 2
  Pfam annotation: Domain name=BPD_transp_1; Domain location=2-120; Score=-19.8; E_value=0.07; Accession=PF00528.12; Description=Binding- protein-dependent transport s
XLFFAEALPAPTFGTPGLLWASLTLALLAVPVVIVATEEGLARIPRTVREGSLALGATKAETLWKIVLPMASPAMMTGMILAVARAAGEVAPLMLVGVVKLAPSLPVDGNYPYLHLDQKIMHLGFHIYDVGFQSPNVEA

SEQ ID NO: 11977 - protein, 198 aa, Zea mays
  misc_feature (157)..(157): Xaa can be any naturally occurring amino acid
  misc_feature (171)..(171): Xaa can be any naturally occurring amino acid
  Coding DNA Sequence Number=SeqID_5353
  Gene Ontology: Mol. function=transporter activity; Cellular component= outer membrane-bounded periplasmic space; Biological process=transport
  Homolog annotation: Hit_ID=Q209R4; Match level="QueryCoverage=100%, HitCoverage=67%, E-value=9e-90, Identity=83%"; Hit description=Amino acid ABC transporter
  Pfam annotation: Domain name=SBP_bac_3; Domain location=1-158; Score=- 10.6; E_value=2.8e-07; Accession=PF00497.10; Description=Bacterial extracellular solute-binding proteins, family 3
VISSLGKNPEREKVIDFSKAYAPFYLAVFGPPDAPISTVDDLKGKTISVTRGAIEDIELTAVAPKEATIKRFEDNNSTIAAYLAGQVDLIASGNVVMVAISERNPKRVPALKVKLKDSPVYVGVNKNEPALLDKVNQILVAAKADGSLEKNAMQWLXSRCRLISDRGNEGXLWPINSTLCRFWPIPICCCAARCSPLS

SEQ ID NO: 11978 - protein, 220 aa, Zea mays
  misc_feature (1)..(1): Xaa can be any naturally occurring amino acid
  Coding DNA Sequence Number=SeqID_5354
  Gene Ontology: Mol. function=transferase activity, transferring phosphorus-containing groups; Cellular component=membrane; Biological process=regulation of transcription, DNA-dependent
  Homolog annotation: Hit_ID=Q1IG55; Match level="QueryCoverage=99%, HitCoverage=60%, E-value=1e-108, Identity=89%"; Hit description =Sensor protein
  Pfam annotation: Domain name=HATPase_c; Domain location=144-220; Score=7.2; E_value=0.013; Accession=PF02518.16; Description =Histidine kinase-, DNA gyrase B-, and HSP90-like ATPase
  Pfam annotation: Domain name=HisKA; Domain location=40-105; Score =66.4; E_value=9.3e-17; Accession=PF00512.15; Description=His Kinase A (phosphoacceptor) domain
  Pfam module annotation: Pfam domain module=HATPase_c::HisKA; Domain location=144-220::40-105
XYAVTPILSHGATLLLLEVHPRDRLLRITKEEAQLSKQETSKMLVRGLAHEIKNPLGGIRGAAQLLARELPDENLKDYTNVIIEEADRLRNLVDRMLGSNKLPSLAMTNVHEVLERVCQLVEAESQGCITLVRDYDPSIPDVLIDREQMIQAVLNIVRNAMQAISSQNELRLGRISLRTRALRQFTIGHVRHRLVTKVEIIDNGPGIPAELQETIFFPMV

SEQ ID NO: 11979 - protein, 229 aa, Zea mays
  Coding DNA Sequence Number=SeqID_5355
  Gene Ontology: Mol. function=arylformamidase activity; Cellular component=cytoplasm; Biological process=metabolic process
  Homolog annotation: Hit_ID=Q9AQQ0; Match level="QueryCoverage=76%, HitCoverage=59%, E-value=5e-33, Identity=44%"; Hit description =Putative uncharacterized protein ORFcat5
  Pfam annotation: Domain name=Abhydrolase_3; Domain location=116-229; Score=-78.5; E_value=0.014; Accession=PF07859.3; Description =alphabeta hydrolase fold
  Subcellular localization annotation: CTP_CleavageSite=19; ConfidenceScore=5.19e-01
MPRCRATSSARWRCWRRITARRRSSSNTSFPRTTGRPFMRDADIDLFFPTIAEREVQYNARESVADFDACVRRYAESAAAVKSRRPGLLNLRYGMGQDERLDLFLPAANRGPAPLFVFIHGGYWRAQRKEDAPVMAEAFNAAGAAVAVPEYTLAPEATLPEIVREMRSALAWLYHNAAAYGVDPERIYVGGSSPGGHLAAMLAAPAWPASYGVPDDVVKGTLALSGLFD

SEQ ID NO: 11980 - protein, 224 aa, Zea mays
  Coding DNA Sequence Number=SeqID_5356
  Gene Ontology: Mol. function=dihydrolipoyllysine-residue succinyltransferase activity; Cellular component=pyruvate dehydrogenase complex; Biological process=metabolic process
  Homolog annotation: Hit_ID=Q4ZZ35; Match level="QueryCoverage=76%, HitCoverage=53%, E-value=3e-48, Identity=62%"; Hit description =Dihydrolipoamide acetyltransferase
  Pfam annotation: Domain name=Biotin_lipoyl; Domain location=34-106; Score=101.8; E_value=2.1e-27; Accession=PF00364.12; Description =Biotin-requiring enzyme
  Pfam annotation: Domain name=E3_binding; Domain location=157-195; Score=68.5; E_value=2.2e-17; Accession=PF02817.7; Description=e3 binding domain
  Pfam annotation: Domain name=GCV_H; Domain location=32-129; Score= -51.1; E_value=0.0024; Accession=PF01597.9; Description=Glycine cleavage H-protein
  Pfam module annotation: Pfam domain module=Biotin_lipoyl::E3 _binding::GCV_H; Domain location=34-106::157-195::32-129
PAAAPAAAEKPAAAAEAPAAPAAVPAAPAAATVQDIHVPDIGSSGKAKIIELLVKVGDTVEADQSLITLESDKASMEIPSPAAGVVESIAVKLEDEVGTGDFILKLKVAGASAPAAAAPAAAAPAAKAEAAPAAAPAPAAKAEAAPAPAAAPAPSGAKVHAGPAVRQLAREFGVELSAVSATGPHGRVLKEDVQVYVKSMMQKAKEAPAAGGATGGSGIPPIRT

SEQ ID NO: 11981 - protein, 259 aa, Zea mays
  misc_feature (205)..(207): Xaa can be any naturally occurring amino acid
  misc_feature (218)..(219): Xaa can be any naturally occurring amino acid
  misc_feature (232)..(234): Xaa can be any naturally occurring amino acid
  misc_feature (240)..(241): Xaa can be any naturally occurring amino acid
  misc_feature (244)..(247): Xaa can be any naturally occurring amino acid
  misc_feature (249)..(255): Xaa can be any naturally occurring amino acid
  misc_feature (258)..(259): Xaa can be any naturally occurring amino acid
  Coding DNA Sequence Number=SeqID_5357
GAWAQAGEKPRASARAAPSRKRLAMHGLVMLMSPYGFFMWSHYLDLAMRVPMKKYYFPYDGAYGGVGGVRRPYYADPGSKLIAHTDLAAVVVFQFAGEAAFDLAVNAPVGRQPGVERHVDQITAVVRHRIAQPVSRNAVVQDLDTAAAPQVLQPEQPRGQGQRMLFVRLQGQPGSGADLGIDRRAGIDPHIDAVVGAVQRIGAGXXXGHFDRGFDEGXXIEQVLPPSRLHAXXXRRGSRXXAVXXXXDXXXXXXXGFXX

SEQ ID NO: 11982 - protein, 259 aa, Zea mays; identical to SEQ ID NO: 11981
  misc_feature (205)..(207): Xaa can be any naturally occurring amino acid
  misc_feature (218)..(219): Xaa can be any naturally occurring amino acid
  misc_feature (232)..(234): Xaa can be any naturally occurring amino acid
  misc_feature (240)..(241): Xaa can be any naturally occurring amino acid
  misc_feature (244)..(247): Xaa can be any naturally occurring amino acid
  misc_feature (249)..(255): Xaa can be any naturally occurring amino acid
  misc_feature (258)..(259): Xaa can be any naturally occurring amino acid
  Coding DNA Sequence Number=SeqID_5358

SEQ ID NO: 11983 - protein, 172 aa, Zea mays
  misc_feature (145)..(148): Xaa can be any naturally occurring amino acid
  misc_feature (151)..(153): Xaa can be any naturally occurring amino acid
  misc_feature (155)..(166): Xaa can be any naturally occurring amino acid
  misc_feature (168)..(169): Xaa can be any naturally occurring amino acid
  Coding DNA Sequence Number=SeqID_5359
  Gene Ontology: Mol. function=2-amino-4-hydroxy-6-hydroxymethyldihydrop teridine diphosphokinase activity; Biological process=folic acid and derivative biosynthetic process
  Homolog annotation: Hit_ID=Q4K4W7; Match level="QueryCoverage=89%, HitCoverage=90%, E-value=8e-72, Identity=87%"; Hit description=2 -amino-4-hydroxy-6-hydroxymethyldihydropteridine pyrophosphokinase
  Pfam annotation: Domain name=HPPK; Domain location=7-128; Score=71.0; E_value=3.9e-18; Accession=PF01288.10; Description=7,8-dihydro-6 -hydroxymethylpterin-pyrophosphokinase (HPPK)
MSLTQVYLGLGSNIEREAHLRAGLDALAGFLTDLRCSPVFESQPVGIKSGPFFNLVVSAYTDLPLMELDRRLKFIEADNGRYAPDRKGLPLDIDVLLYGELVGNFDGLILPRAEILKNAFVLWPLSLMAPERVHPEAGKTFAALXXXXQIXXXLXXXXXXXXXXXXTXXALL

SEQ ID NO: 11984 - protein, 196 aa, Zea mays
  Coding DNA Sequence Number=SeqID_5360
  Gene Ontology: Mol. function=two-component response regulator activity; Cellular component=cytoplasm; Biological process=two -component signal transduction system (phosphorelay)
  Homolog annotation: Hit_ID=Q4K635; Match level="QueryCoverage=100%, HitCoverage=87%, E-value=1e-96, Identity=89%"; Hit description=DNA -binding heavy metal response regulator, putative
  Pfam annotation: Domain name=Response_reg; Domain location=1-84; Score=56.9; E_value=7e-14; Accession=PF00072.14; Description =Response regulator receiver domain
  Pfam annotation: Domain name=Trans_reg_C; Domain location=118-192; Score=76.8; E_value=7.2e-20; Accession=PF00486.18; Description =Transcriptional regulatory protein, C ter
  Pfam module annotation: Pfam domain module=Response_reg::Trans_reg_C; Domain location=1-84::118-192
CAATGADGLHLSRQHAYDLVMLDVNLPLMDGWDVLQRIRQNSSTRIMMLTAQGRLADRIKGLDLGADDYLVKPFEFPELLARVRTLMRRSVHSPVPDVLRVADLELDQGRHRAFRGLQRIDLTTKEFALLHLLMRQSGVVLSRTQIISFVWDMNFDCDTNVVEVSIRRLRAKIDDPFERKLIHTLRGVGYVLEDRE

SEQ ID NO: 11985 - protein, 95 aa, Zea mays
  Coding DNA Sequence Number=SeqID_5361
  Gene Ontology: Mol. function=histidinol dehydrogenase activity; Biological process=amino acid biosynthetic process
  Homolog annotation: Hit_ID=Q48EC9; Match level="QueryCoverage=100%, HitCoverage=21%, E-value=2e-38, Identity=86%"; Hit description =Histidinol dehydrogenase
MTTSTAIARLNAADPDFAHHLDHLLSWESVSDDTVNQRVLDIIKAVRERGDAALVDFTRQFDGLDVPSMADLILPRERLELALTRITAPQREALE

SEQ ID NO: 11986 - protein, 287 aa, Zea mays
  misc_feature (2)..(6): Xaa can be any naturally occurring amino acid
  misc_feature (14)..(15): Xaa can be any naturally occurring amino acid
  misc_feature (18)..(21): Xaa can be any naturally occurring amino acid
  misc_feature (35)..(35): Xaa can be any naturally occurring amino acid
  misc_feature (287)..(287): Xaa can be any naturally occurring amino acid
  Coding DNA Sequence Number=SeqID_5362
  Gene Ontology: Mol. function=ATP-dependent helicase activity; Cellular component=cytoplasm; Biological process=regulation of transcription, DNA-dependent
  Homolog annotation: Hit_ID=Q4KGF7; Match level="QueryCoverage=91%, HitCoverage=55%, E-value=1e-126, Identity=87%"; Hit description=ATP -dependent RNA helicase SrmB
  Pfam annotation: Domain name=Helicase_C; Domain location=152-228; Score=116.8; E_value=6.6e-32; Accession=PF00271.21; Description =Helicase conserved C-terminal domain
DXXXXXMLRKVPDXXIGXXXXMIEQLNAGNLDLKXVEVLVLDEADRMLDMGFADDVQRLVQECVNRQQTMLFSATTGGSTLRDMVAKVLNNPEHLQVNNVSDLNSTTRQQIITADHNVHKEQILNWLLANETYQKAIVFTNTRAMADRIYGRLVAQEYKAFVLHGEKDQKDRKLAIDRLKQGGVKILVATDVAARGLDVDGLDMVINFDMPRSGDEYVHRIGRTGRAGNDGLAISLICHGDWNLMSSIERYLKQSFERRTIKEVKGTYGGPKKVKASGKAVGVKKKX

SEQ ID NO: 11987 - protein, 111 aa, Zea mays
  misc_feature (110)..(111): Xaa can be any naturally occurring amino acid
  Coding DNA Sequence Number=SeqID_5363
  Subcellular localization annotation: CTP_CleavageSite=51; ConfidenceScore=5.36e-01
ASTSSGARPSRASQRAQEAPAGPPPTMTASCICCISSLVRRPRAGVRPWPNCSQRAGPVRRRLTIPGFHPGFHHAHSPHHPIRARARRPHRHPRTRTPRHPAAARRCRVXX

SEQ ID NO: 11988 - protein, 111 aa, Zea mays; identical to SEQ ID NO: 11987
  misc_feature (110)..(111): Xaa can be any naturally occurring amino acid
  Coding DNA Sequence Number=SeqID_5364
  Subcellular localization annotation: CTP_CleavageSite=51; ConfidenceScore=5.36e-01

SEQ ID NO: 11989 - protein, 164 aa, Zea mays
  misc_feature (154)..(155): Xaa can be any naturally occurring amino acid
  Coding DNA Sequence Number=SeqID_5365
  Gene Ontology: Mol. function=transporter activity; Cellular component= 1-2nm peptidoglycan-based cell wall; Biological process=transport
  Homolog annotation: Hit_ID=Q3KBM5; Match level="QueryCoverage=99%, HitCoverage=74%, E-value=7e-69, Identity=82%"; Hit description=Amino acid ABC transporter, permease protein, 3-TM region, His/Glu/Gln/Arg/o pine
  Pfam annotation: Domain name=BPD_transp_1; Domain location=17-164; Score=27.3; E_value=5.7e-05; Accession=PF00528.12; Description =Binding-protein-dependent transport s
MNYQLNFAAVWRDFPSLLAGLGLGLELALLSIAIGCVIGLLMAFAMLSRHRALRIVASVYVTVIRNTPILVLILLIYFALPSLGIRLDKIPSFIITLSLYAGAYLTEVFRAGLLNIPKGLREAGLAIGLGEWRIRAYITVPLMLRNVLPALSNXXISLFKDTSP

SEQ ID NO: 11990 - protein, 213 aa, Zea mays
  misc_feature (33)..(33): Xaa can be any naturally occurring amino acid
  misc_feature (146)..(146): Xaa can be any naturally occurring amino acid
  misc_feature (171)..(172): Xaa can be any naturally occurring amino acid
  misc_feature (175)..(175): Xaa can be any naturally occurring amino acid
  misc_feature (178)..(179): Xaa can be any naturally occurring amino acid
  misc_feature (182)..(187): Xaa can be any naturally occurring amino acid
  misc_feature (191)..(213): Xaa can be any naturally occurring amino acid
  Coding DNA Sequence Number=SeqID_5366
  Gene Ontology: Mol. function=oxidoreductase activity, acting on the aldehyde or oxo group of donors, disulfide as acceptor; Cellular component=mitochondrial membrane; Biological process=metabolic process
  Homolog annotation: Hit_ID=Q7W5S2; Match level="QueryCoverage=89%, HitCoverage=19%, E-value=3e-91, Identity=87%"; Hit description=2 -oxoglutarate dehydrogenase E1 component
MSSEIESLSTSYLFGGNAPYVEELYEAYLDNPXSVPDNWREYFDQLQHAPATDGQESTRDQAHAPIVESFAQRAKANAFVQRAAEPDLSVASKQVSVQSLIAAYRSLGSRWADLDPLKRQERPPIPELDPAFYGLTEADLDQTYSXTNTYFTTASTMTLRDILKALRDTYXXSIXAEXXHIXXXXXXRWIXXXXXXXXXXXXXXXXXXXXXXX

SEQ ID NO: 11991 - protein, 199 aa, Zea mays
  Coding DNA Sequence Number=SeqID_5367
  Gene Ontology: Mol. function=transporter activity; Cellular component= membrane; Biological process=transport
  Homolog annotation: Hit_ID=Q48MT4; Match level="QueryCoverage=99%, HitCoverage=46%, E-value=2e-89, Identity=87%"; Hit description =Uracil transporter
  Pfam annotation: Domain name=MIP; Domain location=3-152; Score= -119.6; E_value=0.058; Accession=PF00230.10; Description=Major intrinsic protein
  Pfam annotation: Domain name=Xan_ur_permease; Domain location=10-199; Score=-135.8; E_value=0.0049; Accession=PF00860.11; Description =Permease family
  Pfam module annotation: Pfam domain module=MIP::Xan_ur_permease; Domain location=3-152::10-199
MQDEFNDPLWRQILSGAQMLFVAFGALVLMPLITGLDPNVALFTAGLGTLLFQVVTGRQVPVFLASSFAFITPIILAKGQFGLAATMGGVMAAGFVYTFLGLAVKIKGTGFIDRLLPPVVIGPVIISIGLAMAPIAANMAMGKAGDGSELIHYQTAMLISMPALLTTLIVAVFGKGIFRLVPIISGVLVGFAMSFYFGV

SEQ ID NO: 11992 - protein, 191 aa, Zea mays
  misc_feature (25)..(26): Xaa can be any naturally occurring amino acid
  Coding DNA Sequence Number=SeqID_5368
  Gene Ontology: Mol. function=DNA binding; Cellular component =cytoplasm; Biological process=chromosome segregation
  Homolog annotation: Hit_ID=Q7W0S6; Match level="QueryCoverage=100%, HitCoverage=63%, E-value=8e-67, Identity=74%"; Hit description =Probable chromosome partitioning protein ParB
  Pfam annotation: Domain name=ParBc; Domain location=39-131; Score =124.8; E_value=2.6e-34; Accession=PF02195.8; Description=ParB-like nuclease domain
MATKKPKGLGRGLDALLGADAPAIXXIGKAPAKPEGLPSTLPVSKMRAGKYQPRTRMDEGALGELAESIRTQGIMQPILVRALGDAPGHYEIIAGERRFRAAQLAGLKEVPVLVREVADENAAVMALIENIQREDLNPLEEAHGVRRLLDEFGLTHEQAAQAIGRSRSATSNLLRLLNLAAAVQTMLLAGD

SEQ ID NO: 11993 - protein, 68 aa, Zea mays
  misc_feature (68)..(68): Xaa can be any naturally occurring amino acid
  Coding DNA Sequence Number=SeqID_5369
  Gene Ontology: Mol. function=4-alpha-hydroxytetrahydrobiopterin dehydratase activity
  Homolog annotation: Hit_ID=Q7WG14; Match level="QueryCoverage=98%, HitCoverage=59%, E-value=2e-11, Identity=52%"; Hit description =Putative pterin-4-alpha-carbinolamine dehydratase
  Pfam annotation: Domain name=Pterin_4a; Domain location=3-68; Score =27.0; E_value=9.5e-06; Accession=PF01329.9; Description=Pterin 4 alpha carbinolamine dehydratase
MSMFPPARIGTDIAVAALSGWQAVAMRDAIEKRFRFANFNAAFGFMARVAMFAEKLNHHPEWTNVYNX

SEQ ID NO: 11994 - protein, 68 aa, Zea mays; identical to SEQ ID NO: 11993
  misc_feature (68)..(68): Xaa can be any naturally occurring amino acid
  Coding DNA Sequence Number=SeqID_5370
  Gene Ontology: Mol. function=4-alpha-hydroxytetrahydrobiopterin dehydratase activity
  Homolog annotation: Hit_ID=Q7WG14; Match level="QueryCoverage=98%, HitCoverage=59%, E-value=2e-11, Identity=52%"; Hit description =Putative pterin-4-alpha-carbinolamine dehydratase
  Pfam annotation: Domain name=Pterin_4a; Domain location=3-68; Score =27.0; E_value=9.5e-06; Accession=PF01329.9; Description=Pterin 4 alpha carbinolamine dehydratase

SEQ ID NO: 11995 - protein, 251 aa, Zea mays
  Coding DNA Sequence Number=SeqID_5371
  Gene Ontology: Mol. function=siderophore-iron transmembrane transporter activity; Cellular component=cell outer membrane; Biological process=siderophore transport
  Homolog annotation: Hit_ID=A6T3S6; Match level="QueryCoverage=97%, HitCoverage=29%, E-value=3e-40, Identity=39%"; Hit description=Outer membrane receptor for ferric coprogen and ferric-rhodotorulic acid
  Pfam annotation: Domain name=Plug; Domain location=98-207; Score =48.2; E_value=2.9e-11; Accession=PF07715.5; Description=TonB -dependent Receptor Plug Domain
  Pfam annotation: Domain name=STN; Domain location=1-52; Score=33.2; E_ value=9.5e-07; Accession=PF07660.4; Description=Secretin and TonB N terminus short domain
  Pfam module annotation: Pfam domain module=Plug::STN; Domain location= 98-207::1-52
VSLSFDASLLAGKESAGLRGSFEVEAGFRRILQGSGFEAVARAPGRYMLRGLPKAAGSDATDVTQLNAVTVSGYREGDAPNRGYTVSSTSSATKLDLAPKETPQSITTFTAQQIQDQGLLTLSEVLDQTPGITLVTAGVEGAGSQPVYSRTFPVRSVQMDGVMASSYILSGSSNGDIGMQDSFLYERIDVIRGSTSLTGGEGDASASLNFVRKHPYLDRHLSANLKYGSWNNRRAELDLSTPINDRLRVRI

SEQ ID NO: 11996 - protein, 83 aa, Zea mays
  Coding DNA Sequence Number=SeqID_5372
  Gene Ontology: Mol. function=transcription factor activity; Biological process=regulation of transcription, DNA-dependent
  Homolog annotation: Hit_ID=Q0K164; Match level="QueryCoverage=100%, HitCoverage=27%, E-value=4e-18, Identity=49%"; Hit description =Transcriptional regulator, LysR-family
GVVPTDAGHILARYVKRQQNIQESFFSEIDSLRKAERGHIDLVLGEGFVELMFDRVLPGYWRSHPEVTLDIDVARTSEIVQRI

SEQ ID NO: 11997 - protein, 83 aa, Zea mays; identical to SEQ ID NO: 11996
  Coding DNA Sequence Number=SeqID_5373
  Gene Ontology: Mol. function=transcription factor activity; Biological process=regulation of transcription, DNA-dependent
  Homolog annotation: Hit_ID=Q0K164; Match level="QueryCoverage=100%, HitCoverage=27%, E-value=4e-18, Identity=49%"; Hit description =Transcriptional regulator, LysR-family

SEQ ID NO: 11998 - protein, 71 aa, Zea mays
  misc_feature (70)..(71): Xaa can be any naturally occurring amino acid
  Coding DNA Sequence Number=SeqID_5374
  Gene Ontology: Mol. function=transporter activity; Cellular component= integral to membrane; Biological process=transport
  Homolog annotation: Hit_ID=Q4K4Z9; Match level="QueryCoverage=97%, HitCoverage=25%, E-value=7e-32, Identity=100%"; Hit description =Peptide ABC transporter, permease protein
PLIAEFGLRFCFVFLFISALSFLGLGIQPPTADWGSMVRDNAVLITFGDISPLLPALAVALITVSVNFVXX

SEQ ID NO: 11999 - protein, 71 aa, Zea mays; identical to SEQ ID NO: 11998
  misc_feature (70)..(71): Xaa can be any naturally occurring amino acid
  Coding DNA Sequence Number=SeqID_5375
  Gene Ontology: Mol. function=transporter activity; Cellular component= integral to membrane; Biological process=transport
  Homolog annotation: Hit_ID=Q4K4Z9; Match level="QueryCoverage=97%, HitCoverage=25%, E-value=7e-32, Identity=100%"; Hit description =Peptide ABC transporter, permease protein

SEQ ID NO: 12000 - protein, 100 aa, Zea mays
  Coding DNA Sequence Number=SeqID_5376
  Gene Ontology: Mol. function=transcription factor activity; Biological process=regulation of transcription, DNA-dependent
  Homolog annotation: Hit_ID=A9I4J8; Match level="QueryCoverage=100%, HitCoverage=32%, E-value=1e-38, Identity=77%"; Hit description =Transcriptional regulator, LysR-family
IREGVDLALRVRTKLDTDAELVVRHLGTARGTLVASPGYLQRHGAPDTPQDLASHTTLSFSDPQNEVRWPLRNDKGEEVHIELKPQLSCNDFIVLVEAAV

SEQ ID NO: 12001 - protein, 181 aa, Zea mays
  misc_feature (2)..(2): Xaa can be any naturally occurring amino acid
  misc_feature (4)..(4): Xaa can be any naturally occurring amino acid
  Coding DNA Sequence Number=SeqID_5377
  Homolog annotation: Hit_ID=Q4KJA8; Match level="QueryCoverage=98%, HitCoverage=55%, E-value=2e-82, Identity=82%"; Hit description =Putative uncharacterized protein
PXYXSALHYREALPFRLSPLSGAARPVRCATMQLIERPRAYVHLPTASLQLIYDLRLEVPKEAKSLSLFHVDERLEGDQLVARLDRQRPDLYLMPLKDGQPCAELYTLKKDQLYPASTRGLYLAESFAQQEGWVVRDERIRWKDWLRQQGLSAPEKESKLKRLTGKAKLLLKKIVPHKRAR

SEQ ID NO: 12002 - protein, 76 aa, Zea mays
  Coding DNA Sequence Number=SeqID_5378
  Gene Ontology: Mol. function=oxidoreductase activity; Biological process=metabolic process
  Homolog annotation: Hit_ID=Q7VSP3; Match level="QueryCoverage=69%, HitCoverage=10%, E-value=2e-11, Identity=58%"; Hit description =Probable aldehyde dehydrogenase
MFRNYLRRPISGHPGQPGKGRTSVDELSQQAFLNHIGGEWVACASGATAPNLNPADSADVVGRFQQSDATDGARAV

SEQ ID NO: 12003 - protein, 76 aa, Zea mays; identical to SEQ ID NO: 12002
  Coding DNA Sequence Number=SeqID_5379
  Gene Ontology: Mol. function=oxidoreductase activity; Biological process=metabolic process
  Homolog annotation: Hit_ID=Q7VSP3; Match level="QueryCoverage=69%, HitCoverage=10%, E-value=2e-11, Identity=58%"; Hit description =Probable aldehyde dehydrogenase

SEQ ID NO: 12004 - protein, 49 aa, Zea mays
  Coding DNA Sequence Number=SeqID_5380
  Homolog annotation: Hit_ID=A0AZN9; Match level="QueryCoverage=95%, HitCoverage=28%, E-value=5e-12, Identity=63%"; Hit description =Putative uncharacterized protein
MPSDLLLRAVLIGVGATLVMDLWALLLKRLFNAPSLDYAMVGRWIGHLP

SEQ ID NO: 12005 - protein, 49 aa, Zea mays; identical to SEQ ID NO: 12004
  Coding DNA Sequence Number=SeqID_5381
  Homolog annotation: Hit_ID=A0AZN9; Match level="QueryCoverage=95%, HitCoverage=28%, E-value=5e-12, Identity=63%"; Hit description =Putative uncharacterized protein

SEQ ID NO: 12006 - protein, 165 aa, Zea mays
  Coding DNA Sequence Number=SeqID_5382
  Gene Ontology: Mol. function=GTP binding; Cellular component =membrane; Biological process=Mo-molybdopterin cofactor biosynthetic process
  Homolog annotation: Hit_ID=Q46R78; Match level="QueryCoverage=93%, HitCoverage=84%, E-value=5e-54, Identity=69%"; Hit description =Molybdopterin-guanine dinucleotide biosynthesis MobB region
  Pfam annotation: Domain name=MobB; Domain location=3-135; Score =123.2; E_value=7.5e-34; Accession=PF03205.4; Description =Molybdopterin guanine dinucleotide synthesis protein B
MTPVFGIAGRSGSGKTTLIEAMLPLLGARGLKVSVIKHSHHDFEMEPPGKDSARFRQAGAQEVMVASPFRYAIVHELRGAPEPPLAEQVARLAPADLVLVEGFKQAAIPRIEVYRPALGKPPLHAEDGSFLAVVTDAALDTGLPCLPLNDPAAVADFIARTVGRG

SEQ ID NO: 12007 - protein, 256 aa, Zea mays
  Coding DNA Sequence Number=SeqID_5383
  Gene Ontology: Mol. function=phospho-N-acetylmuramoyl-pentapeptide -transferase activity; Cellular component=integral to membrane; Biological process=cell wall organization and biogenesis
  Homolog annotation: Hit_ID=Q7WFR9; Match level="QueryCoverage=90%, HitCoverage=61%, E-value=1e-120, Identity=91%"; Hit description =Phospho-N-acetylmuramoyl-pentapeptide-transferase
  Pfam annotation: Domain name=Glycos_transf_4; Domain location=110 -256; Score=21.8; E_value=7.9e-07; Accession=PF00953.11; Description =Glycosyl transferase
MTDKRPRGRGTTMLLEIARLLSDDVRALGVFEYITLRAVLACATALLIGLVAGPRVIRKLTEMKIGQAVRSYGPETHLVKTGTPTMGGVLILISIAISTLLWADWTNRFVWVVLLVTFGFGWIGWMDDYRKVVYRDPEGMPARQKFFWQATIGLVAAVYLAFAVSAPANTELWPLFKAWVGSGFTMSLPTRADLIVPFFKTVSYPLGVLGFVALTWAVIVGTSNAVNLTDGLDGLAIMPTVMVGSALGIFAYVVGR

SEQ ID NO: 12008 - protein, 153 aa, Zea mays
  Coding DNA Sequence Number=SeqID_5384
  Gene Ontology: Mol. function=catalytic activity; Cellular component =membrane
  Homolog annotation: Hit_ID=Q3K7L7; Match level="QueryCoverage=95%, HitCoverage=56%, E-value=9e-44, Identity=58%"; Hit description =Phosphoesterase, PA-phosphatase-like
PGLFLESEFTMHAIAVRPGSQPLNFWLCLGVPAMLAVVMLLLELTSLDMDVAKLFYNASEGGFVGRHSFFLEDILHDRAKQMVIVFSVLAIAGFAGAFIVERLKPYRRELGCLVLSLALATSFVSPLKTVTGVQCPWSVKEFGGQETYSELLS

SEQ ID NO: 12009 - protein, 183 aa, Zea mays
  misc_feature (166)..(167): Xaa can be any naturally occurring amino acid
  misc_feature (177)..(178): Xaa can be any naturally occurring amino acid
  misc_feature (180)..(182): Xaa can be any naturally occurring amino acid
  Coding DNA Sequence Number=SeqID_5385
  Gene Ontology: Mol. function=porin activity; Cellular component =integral to membrane; Biological process=transport
  Homolog annotation: Hit_ID=Q4KGR5; Match level="QueryCoverage=94%, HitCoverage=40%, E-value=5e-76, Identity=82%"; Hit description =Phenylacetic acid-specific porin
  Pfam annotation: Domain name=OprD; Domain location=16-183; Score= -21.0; E_value=1.6e-12; Accession=PF03573.4; Description=outer membrane porin, OprD family
  Subcellular localization annotation: CTP_CleavageSite=20; ConfidenceScore=5.33e-01
MLRTQPPARSSRFTQTALASAAAFAGFSPVGQAAFFEDSTATLETRNMYFNRDFRDGTSAQQSKRDEWAQGFMLNLQSGYTDGTVGFGVDALGMLGVKLDSSPDRTGTGLLPTHDDGRAANEYSKLGLTGKVKISATELKIGALIPELPILKPNDGRILPQTFEGXXLSSKEFKNLXXTXXXS

SEQ ID NO: 12010 - protein, 224 aa, Zea mays
  misc_feature (1)..(3): Xaa can be any naturally occurring amino acid
  misc_feature (5)..(7): Xaa can be any naturally occurring amino acid
  misc_feature (9)..(10): Xaa can be any naturally occurring amino acid
  misc_feature (12)..(13): Xaa can be any naturally occurring amino acid
  misc_feature (20)..(21): Xaa can be any naturally occurring amino acid
  misc_feature (27)..(28): Xaa can be any naturally occurring amino acid
  Coding DNA Sequence Number=SeqID_5386
  Gene Ontology: Mol. function=iron-sulfur cluster binding; Cellular component=chloroplast; Biological process=electron transport
  Homolog annotation: Hit_ID=Q4KIY4; Match level="QueryCoverage=86%, HitCoverage=45%, E-value=2e-64, Identity=65%"; Hit description =Nitrite reductase family protein
  Pfam annotation: Domain name=NIR_SIR_ferr; Domain location=46-113; Score=39.3; E_value=1.4e-08; Accession=PF03460.7; Description =NitriteSulfite reductase ferredoxin-like half domain
XXXDXXXMXXLXXETSVDNXXRQLNLXXQPVDGFSRHSNPAPLHLGSYPQRQKNQYYVAAVAPLGRLDSAMLRGAAQLAVDHGDATLRVTPWQGLLLPNIRDATAVIERLERLGFLCSVDQPLARLIACTGSSGCAKGLADTKADALQLATLAPGHSVHLSGCPRSCAAAHTAPVTLLAVSPGHYDLYFRDAGQPGFGRLNARTLSIEAAGALLRAHPRSNTDD

SEQ ID NO: 12011 - protein, 161 aa, Zea mays
  Coding DNA Sequence Number=SeqID_5387
  Gene Ontology: Mol. function=transcription factor activity; Biological process=regulation of transcription, DNA-dependent
  Homolog annotation: Hit_ID=A5W158; Match level="QueryCoverage=100%, HitCoverage=53%, E-value=2e-64, Identity=77%"; Hit description =Transcriptional regulator, LysR family precursor
  Pfam annotation: Domain name=HTH_1; Domain location=1-48; Score=42.2; E_value=1.8e-09; Accession=PF00126.17; Description=Bacterial regulatory helix-turn-helix protein, lysR family
SGSFSAAARKLGRVPSAINMAVSQLEAELDLLLFDRSTRKAIPTAAAKALEPQARQVASQLNLLDAHALQLHQGLEERLVLAMAPELQTGVWNRPLSIIASEFPTLEIEIRSASHPEAMRMLHDGRVQLALGFERPGLDERETFLEAGSQLLVAVASPDHP

SEQ ID NO: 12012 - protein, 264 aa, Zea mays
  misc_feature (228)..(230): Xaa can be any naturally occurring amino acid
  Coding DNA Sequence Number=SeqID_5388
  Gene Ontology: Mol. function=dihydrofolate reductase activity; Cellular component=cytoplasm; Biological process=chromosome segregation
  Homolog annotation: Hit_ID=Q3KG74; Match level="QueryCoverage=99%, HitCoverage=96%, E-value=1e-126, Identity=89%"; Hit description =Condensin subunit ScpA
  Pfam annotation: Domain name=ScpA_ScpB; Domain location=50-262; Score= 107.4; E_value=4.4e-29; Accession=PF02616.5; Description=ScpAB protein
SQAGAQQELPFAMVYGQAVMEMPLDLYIPPDALEVFLEAFEGPLDLLLYLIRKQNINILDIPVAEITRQYMGYVELMQTVRLELAAEYLVMAAMLAEIKSRMLLPRSESIEAEEDDPRAELIRRLQEYERFKAAAEGIDGLSRVGRDVVVPKLDAPEARARKLLPDVSLEELLMSMAEVLRRGDMFESHQVSREALSTRERMSDVLDRLKGGGFVPFVELFTKEEGRXXXVVTFMAILELVKESLVELVQNEPFAAIHVRARAE

SEQ ID NO: 12013 - protein, 73 aa, Zea mays
  Coding DNA Sequence Number=SeqID_5389
  Gene Ontology: Mol. function=signal transducer activity; Cellular component=membrane; Biological process=regulation of transcription, DNA-dependent
  Homolog annotation: Hit_ID=Q3K759; Match level="QueryCoverage=100%, HitCoverage=13%, E-value=4e-23, Identity=71%"; Hit description =Chemotaxis sensory transducer, Pas/Pac sensor
MKINLPVTGRNVDFAPDANILSTTDLTSTITYANQDFIDISGYTREELLGTPHNLLRHPDMPPAAFAHMWQVL

SEQ ID NO: 12014 - protein, 73 aa, Zea mays; identical to SEQ ID NO: 12013
  Coding DNA Sequence Number=SeqID_5390
  Gene Ontology: Mol. function=signal transducer activity; Cellular component=membrane; Biological process=regulation of transcription, DNA-dependent
  Homolog annotation: Hit_ID=Q3K759; Match level="QueryCoverage=100%, HitCoverage=13%, E-value=4e-23, Identity=71%"; Hit description =Chemotaxis sensory transducer, Pas/Pac sensor

SEQ ID NO: 12015 - protein, 105 aa, Zea mays
  misc_feature (105)..(105): Xaa can be any naturally occurring amino acid
  Coding DNA Sequence Number=SeqID_5391
  Gene Ontology: Mol. function=catalytic activity; Biological process =cellular metabolic process
  Homolog annotation: Hit_ID=Q4K7W2; Match level="QueryCoverage=99%, HitCoverage=42%, E-value=4e-38, Identity=75%"; Hit description=TDP -glucose-4,6-dehydratase-related protein
IGKTFFEASKDRYRFTLTDRIEPDFALGEHRFIRADLGDKTALAALLDGIDVIVHLSGIPHASATFDELLPNNILATTYLFEAAVAAGVKRLVFASSAQTIEGYX

SEQ ID NO: 12016 - protein, 105 aa, Zea mays; identical to SEQ ID NO: 12015
  misc_feature (105)..(105): Xaa can be any naturally occurring amino acid
  Coding DNA Sequence Number=SeqID_5392
  Gene Ontology: Mol. function=catalytic activity; Biological process =cellular metabolic process
  Homolog annotation: Hit_ID=Q4K7W2; Match level="QueryCoverage=99%, HitCoverage=42%, E-value=4e-38, Identity=75%"; Hit description=TDP -glucose-4,6-dehydratase-related protein

SEQ ID NO: 12017 - protein, 182 aa, Zea mays
  misc_feature (6)..(7): Xaa can be any naturally occurring amino acid
  misc_feature (10)..(13): Xaa can be any naturally occurring amino acid
  misc_feature (19)..(20): Xaa can be any naturally occurring amino acid
  misc_feature (27)..(30): Xaa can be any naturally occurring amino acid
  Coding DNA Sequence Number=SeqID_5393
  Gene Ontology: Mol. function=transporter activity; Cellular component= membrane; Biological process=transport
  Homolog annotation: Hit_ID=A1VQ37; Match level="QueryCoverage=96%, HitCoverage=56%, E-value=4e-38, Identity=48%"; Hit description=Inner- membrane translocator precursor
VVAGMXXLGXXXXRIALAXXYPREHLXXXXATFGFILFFNELTRIIWGPAPISMGLPSWLSGTIDLLGVTYPLYRFLIIVAGLAVAAGCYALIHRTRLGMLIRAGSTDRMMVGALGVNIARLNTLLFVLGAVLAGVAGLMAGPILSAQTGMGEPILILTLVVIVIGGIGSVRGAFLAALMVG

SEQ ID NO: 12018 - protein, 200 aa, Zea mays
  Coding DNA Sequence Number=SeqID_5394
  Gene Ontology: Mol. function=histidinol dehydrogenase activity; Cellular component=chloroplast; Biological process=amino acid biosynthetic process
  Homolog annotation: Hit_ID=Q13I58; Match level="QueryCoverage=100%, HitCoverage=45%, E-value=2e-98, Identity=84%"; Hit description =Histidinol dehydrogenase
  Pfam annotation: Domain name=Histidinol_dh; Domain location=1-182; Score=-221.2; E_value=4.7e-07; Accession=PF00815.10; Description =Histidinol dehydrogenase
GELCAVDLLGQAEHGPTSPAVLLTTSETLARDTLVEIERQLNLLPTAGIAAQAWADCGEVIVCDSEAEMLAVADELAFEHVQVMTRDPDYFLKNLSNFGALFLGPRTNVSFGDKVIGTNHTLPTNRAARYTGGLWVGKFLKTCTYQRVLTDAASATMGEYCSRLCHMENFAGHGEQANIRVRRYGNRPDLPWYQPVEAQA

SEQ ID NO: 12019 - protein, 102 aa, Zea mays
  Coding DNA Sequence Number=SeqID_5395
  Gene Ontology: Mol. function=shikimate 5-dehydrogenase activity; Cellular component=cytoplasm; Biological process=metabolic process
  Homolog annotation: Hit_ID=Q4K9I1; Match level="QueryCoverage=100%, HitCoverage=37%, E-value=2e-43, Identity=86%"; Hit description =Shikimate 5-dehydrogenase/quinate 5-dehydrogenase family protein
  Pfam annotation: Domain name=Shikimate_DH; Domain location=1-101; Score=-3.9; E_value=0.0004; Accession=PF01488.10; Description =Shikimate  quinate 5-dehydrogenase
FALRGSGGMAKAVASALRDGGYAKGVIVARNEVAGRALAQSLGYEWQAQLGALRPQMLVNVTPIGMTGGAEADQLAFEADAIDAAETVFDVVAIPSETPLIL

SEQ ID NO: 12020 - protein, 248 aa, Zea mays
  misc_feature (2)..(7): Xaa can be any naturally occurring amino acid
  misc_feature (10)..(11): Xaa can be any naturally occurring amino acid
  misc_feature (15)..(18): Xaa can be any naturally occurring amino acid
  misc_feature (22)..(24): Xaa can be any naturally occurring amino acid
  misc_feature (30)..(34): Xaa can be any naturally occurring amino acid
  misc_feature (36)..(40): Xaa can be any naturally occurring amino acid
  misc_feature (44)..(46): Xaa can be any naturally occurring amino acid
  misc_feature (52)..(52): Xaa can be any naturally occurring amino acid
  Coding DNA Sequence Number=SeqID_5396
  Gene Ontology: Mol. function=catalytic activity; Biological process =metabolic process
  Homolog annotation: Hit_ID=A9I5Y3; Match level="QueryCoverage=89%, HitCoverage=56%, E-value=2e-93, Identity=76%"; Hit description =Strain DSM 12804, complete genome
  Pfam annotation: Domain name=CoA_transf_3; Domain location=32-170; Score=19.2; E_value=9.5e-10; Accession=PF02515.7; Description=CoA -transferase family III
QXXXXXXLAXXRRPXXXXCRSXXXHARFPXXXXXDXXXXXEGGXXXDKKAYXLLIQSESGFLSVTGTADDPVKAGCSIADISAGMYAYSAILNALLLRQKTGLGSRLDVSMLESMVEWMGFPMYYAFEGATPPVRAGAAHASIYPYGPFPTGDGNTIMLGLQNEREWRVFCAQVLRQAELAEDPRFATNSLRTANREALRALIVTAFADLSVQQVTDRLEDAQIANARVNDMAGVWAHPQLRARDRWS

SEQ ID NO: 12021 - protein, 106 aa, Zea mays
  Coding DNA Sequence Number=SeqID_5397
  Gene Ontology: Mol. function=protein serine/threonine kinase activity; Biological process=protein amino acid phosphorylation
  Homolog annotation: Hit_ID=Q4IUI8; Match level="QueryCoverage=100%, HitCoverage=21%, E-value=1e-31, Identity=63%"; Hit description =Putative uncharacterized protein
YTLFFRRLGDESAALAVARLRDGFLDLKGFDEWADLYKARVERDASGTEEQRRERMHGVNPLYILRNYLAQNAIQAAELGDYSEVRRLHEVLTKPFEEQPGMEQYA

SEQ ID NO: 12022 - protein, 121 aa, Zea mays
  Coding DNA Sequence Number=SeqID_5398
  Gene Ontology: Cellular component=integral to membrane; Biological process=cell wall catabolic process
  Homolog annotation: Hit_ID=Q4KF02; Match level="QueryCoverage=99%, HitCoverage=13%, E-value=2e-44, Identity=74%"; Hit description =Putative uncharacterized protein
SALSSGMAQALQLGEMTLKSKLNQPLSVEIELLDVGGLTASEITPSLASSQAFVDAGVDRQAFLNDLTFTPVVNPNGRSVVRVTSSQPLPDSYVRFLLQVQWPNGRLMRDYSVLLDPAKFD

SEQ ID NO: 12023 - protein, 50 aa, Zea mays
  Coding DNA Sequence Number=SeqID_5399
  Homolog annotation: Hit_ID=Q1I8J6; Match level="QueryCoverage=90%, HitCoverage=29%, E-value=9e-09, Identity=62%"; Hit description =Putative uncharacterized protein
ALLGMTLVIEVFVYPDAWPTHLTWAGLLLPLLAYGGGAWSLDRVLSGQRR

SEQ ID NO: 12024 - protein, 50 aa, Zea mays; identical to SEQ ID NO: 12023
  Coding DNA Sequence Number=SeqID_5400
  Homolog annotation: Hit_ID=Q1I8J6; Match level="QueryCoverage=90%, HitCoverage=29%, E-value=9e-09, Identity=62%"; Hit description =Putative uncharacterized protein

SEQ ID NO: 12025 - protein, 94 aa, Zea mays
  misc_feature (94)..(94): Xaa can be any naturally occurring amino acid
  Coding DNA Sequence Number=SeqID_5401
  Homolog annotation: Hit_ID=Q3C073; Match level="QueryCoverage=81%, HitCoverage=27%, E-value=6e-07, Identity=36%"; Hit description =Putative secreted protein precursor
RWIAATALALGIAALPVYRASAAYCCDPWGFVGYSAFVQAGASMVSDFTSWASDIVEVLAGDIYPDWWSGVNGHQAVMTQQLAAQQALFEGKQX

SEQ ID NO: 12026 - protein, 96 aa, Zea mays
  misc_feature (94)..(96): Xaa can be any naturally occurring amino acid
  Coding DNA Sequence Number=SeqID_5402
  Homolog annotation: Hit_ID=Q3C073; Match level="QueryCoverage=80%, HitCoverage=27%, E-value=6e-07, Identity=36%"; Hit description =Putative secreted protein precursor
RWIAATALALGIAALPVYRASAAYCCDPWGFVGYSAFVQAGASMVSDFTSWASDIVEVLAGDIYPDWWSGVNGHQAVMTQQLAAQQALFEGKQXXX

SEQ ID NO: 12027 - protein, 108 aa, Zea mays
  Coding DNA Sequence Number=SeqID_5403
  Gene Ontology: Mol. function=transcription factor activity; Biological process=regulation of transcription, DNA-dependent
  Homolog annotation: Hit_ID=Q7VS79; Match level="QueryCoverage=100%, HitCoverage=36%, E-value=2e-49, Identity=91%"; Hit description =Probable LysR-family transcriptional regulator
  Pfam annotation: Domain name=HTH_1; Domain location=5-63; Score=59.7; E_value=9.9e-15; Accession=PF00126.17; Description=Bacterial regulatory helix-turn-helix protein, lysR family
MKIDHGNLRALAAVVREGSFERAALALSVTPSAVSQRIKALEDRMGRLLVQRTVPAAATGDGQVLVQLAEQTALLEHDALNRLGVADDDVPHASIPIAVNHDSLETWF

SEQ ID NO: 12028 - protein, 59 aa, Zea mays
  Coding DNA Sequence Number=SeqID_5404
  Gene Ontology: Mol. function=oxidoreductase activity; Cellular component=integral to membrane; Biological process=electron transport
  Homolog annotation: Hit_ID=Q4K9Y3; Match level="QueryCoverage=93%, HitCoverage=30%, E-value=3e-11, Identity=61%"; Hit description =Cytochrome b561 family protein
ALWGADWPLLLHETAANVLAGLVGVHVLAAVFESIQVRDNLPLSMLTGRRRRLPDDRAQ

SEQ ID NO: 12029 - protein, 59 aa, Zea mays; identical to SEQ ID NO: 12028
  Coding DNA Sequence Number=SeqID_5405
  Gene Ontology: Mol. function=oxidoreductase activity; Cellular component=integral to membrane; Biological process=electron transport
  Homolog annotation: Hit_ID=Q4K9Y3; Match level="QueryCoverage=93%, HitCoverage=30%, E-value=3e-11, Identity=61%"; Hit description =Cytochrome b561 family protein

SEQ ID NO: 12030 - protein, 291 aa, Zea mays
  misc_feature (257)..(257): Xaa can be any naturally occurring amino acid
  misc_feature (271)..(279): Xaa can be any naturally occurring amino acid
  misc_feature (282)..(282): Xaa can be any naturally occurring amino acid
  misc_feature (284)..(289): Xaa can be any naturally occurring amino acid
  Coding DNA Sequence Number=SeqID_5406
  Gene Ontology: Mol. function=signal transducer activity; Cellular component=membrane; Biological process=signal transduction
  Homolog annotation: Hit_ID=Q3KIY3; Match level="QueryCoverage=100%, HitCoverage=43%, E-value=4e-93, Identity=65%"; Hit description =Chemotaxis sensory transducer
SQKLSGELAQAGKEVTSSLDSLSSSTRQRLTAGLSTRLQEEQKQLRATLEKDLQDSASDMAQLLASVAPRAMWDSDVPTLSEFARRAQRNPNVLFVVYDDAAGEHLTRYLNRENPINQALLEKGKGERALDKVLDAAKNDPSVFYVEASISPNGVEIGKVRMGVSTAAVETDLAALDKRFAALIASGDQLVGDSLKGAAADSAAAMGARLQSAQATASQMTANTTNAVQEAAGTLRWRIGMGLAVVGFGVLLLIAVXLGRRVVNRLKLLIXXXXXXXXXEGXLXXXXXXNS

SEQ ID NO: 12031 - protein, 54 aa, Zea mays
  Coding DNA Sequence Number=SeqID_5407
  Gene Ontology: Mol. function=transporter activity; Biological process= transport
  Homolog annotation: Hit_ID=Q4ZNN1; Match level="QueryCoverage=100%, HitCoverage=10%, E-value=4e-23, Identity=88%"; Hit description =Extracellular solute-binding protein, family 5 precursor
TQSWQMLVDGEYDISVMYWTNDILDPDQKTTFVLGHDTNQNYMTRYKNDKVKDL

SEQ ID NO: 12032 - protein, 54 aa, Zea mays; identical to SEQ ID NO: 12031
  Coding DNA Sequence Number=SeqID_5408
  Gene Ontology: Mol. function=transporter activity; Biological process= transport
  Homolog annotation: Hit_ID=Q4ZNN1; Match level="QueryCoverage=100%, HitCoverage=10%, E-value=4e-23, Identity=88%"; Hit description =Extracellular solute-binding protein, family 5 precursor

SEQ ID NO: 12033 - protein, 76 aa, Zea mays
  Coding DNA Sequence Number=SeqID_5409
  Gene Ontology: Mol. function=protein transporter activity; Cellular component=membrane; Biological process=protein secretion
  Homolog annotation: Hit_ID=Q4KKC9; Match level="QueryCoverage=100%, HitCoverage=25%, E-value=1e-33, Identity=94%"; Hit description=HlyD family secretion protein
MKKPFLTIGRVVLTLLVVTFACVVVWRMVMYYMFAPWTRDGHIRADIVQIAPDVSGLIQQVDVRDNQLVVRGQVLF

SEQ ID NO: 12034 - protein, 85 aa, Zea mays
  misc_feature (84)..(85): Xaa can be any naturally occurring amino acid
  Coding DNA Sequence Number=SeqID_5410
QLPESVGETVRKKDKARTPGNLKKRRVKLPKPGQTVPRESKATVDGKAADLKPLHLPASANAAPQLNAMGQPLVPFSAKQAAQXX

SEQ ID NO: 12035 - protein, 52 aa, Zea mays
  Coding DNA Sequence Number=SeqID_5412
  Gene Ontology: Mol. function=O-methyltransferase activity
  Homolog annotation: Hit_ID=A9AMQ1; Match level="QueryCoverage=100%, HitCoverage=23%, E-value=2e-14, Identity=76%"; Hit description=O -methyltransferase family 3 precursor
RDNGGGALISSEFEPSKIALARQHLEQGGVSDLVEIRQGDALVTLATGLPDS

SEQ ID NO: 12036 - protein, 52 aa, Zea mays; identical to SEQ ID NO: 12035
  Coding DNA Sequence Number=SeqID_5413
  Gene Ontology: Mol. function=O-methyltransferase activity
  Homolog annotation: Hit_ID=A9AMQ1; Match level="QueryCoverage=100%, HitCoverage=23%, E-value=2e-14, Identity=76%"; Hit description=O -methyltransferase family 3 precursor

SEQ ID NO: 12037 - protein, 232 aa, Zea mays
  misc_feature (3)..(3): Xaa can be any naturally occurring amino acid
  misc_feature (12)..(15): Xaa can be any naturally occurring amino acid
  misc_feature (22)..(22): Xaa can be any naturally occurring amino acid
  misc_feature (25)..(25): Xaa can be any naturally occurring amino acid
  Coding DNA Sequence Number=SeqID_5414
  Gene Ontology: Mol. function=transferase activity; Cellular component= membrane; Biological process=biosynthetic process
  Homolog annotation: Hit_ID=A9I752; Match level="QueryCoverage=100%, HitCoverage=60%, E-value=1e-104, Identity=78%"; Hit description =Putative glycosyltranferase
  Pfam annotation: Domain name=Glycos_transf_1; Domain location=91-232; Score=99.9; E_value=7.9e-27; Accession=PF00534.10; Description =Glycosyl transferases group 1
  Subcellular localization annotation: CTP_CleavageSite=54; ConfidenceScore=5.02e-01
RSXIVLGMMTTXXXXSVLASTXLPXRVIATEHTHPPSQTLSGLWQRLRRLTYPRAARVVALTRGTAQWIEQHVPGSRLAVIPNPVHWPLPKGEPVLAPPAGDGRKRLLAVGRLHGDKGFDLLLQAYARLAPSHPDWDLVILGEGDERRALEAQVREAGLRDRVSLPGRAGNVGDWYQSADLYVLTSRFEGLSNTLLESMASGLAAVAFDCDTGPREIVREGIDGVLVRPNGD

SEQ ID NO: 12038 - protein, 110 aa, Zea mays
  misc_feature (9)..(10): Xaa can be any naturally occurring amino acid
  Coding DNA Sequence Number=SeqID_5415
  Gene Ontology: Mol. function=siderophore-iron transmembrane transporter activity; Cellular component=cell outer membrane; Biological process=siderophore transport
  Homolog annotation: Hit_ID=A5W6N0; Match level="QueryCoverage=95%, HitCoverage=12%, E-value=1e-36, Identity=62%"; Hit description=TonB -dependent siderophore receptor precursor
  Pfam annotation: Domain name=TonB_dep_Rec; Domain location=1-110; Score=1.4; E_value=0.05; Accession=PF00593.14; Description=TonB dependent receptor
SPIIVASYXXRHMLRLWGDYQLDGTLSKWSVGTGVNAQSSNYRIQGIKLEQAGYAVWNARLAYRVDDTWTVALNGNNLFDKNYYQTVGTADWGNFYGEPRNFTVSLKGNF

SEQ ID NO: 12039 - protein, 184 aa, Zea mays
  Coding DNA Sequence Number=SeqID_5416
  Gene Ontology: Mol. function=catalytic activity
  Homolog annotation: Hit_ID=Q4K489; Match level="QueryCoverage=97%, HitCoverage=97%, E-value=8e-79, Identity=81%"; Hit description=HDIG domain protein
  Pfam annotation: Domain name=HD; Domain location=29-119; Score=22.1; E_value=0.00011; Accession=PF01966.12; Description=HD domain
MNTEQAIAEVFGLYEQHGTADYIGEPVSQIEHMSQAAQLAMAEGFDEEVVLAAFFHDIGHICGQGGENMGGYGVVSHERLGADYLRQAGFSERMAKLVEYHVQAKRYLTFSQPDYYARLSEASRRTLGYQGGVMTAEEARAFEQDPLCAVSLRMRHWDEQAKEMHVPVMDLEVLKSKARQLLAA

SEQ ID NO: 12040 - protein, 102 aa, Zea mays
  Coding DNA Sequence Number=SeqID_5417
  Gene Ontology: Mol. function=transporter activity; Cellular component= cell outer membrane; Biological process=transport
  Homolog annotation: Hit_ID=B0KKV6; Match level="QueryCoverage=96%, HitCoverage=14%, E-value=3e-35, Identity=71%"; Hit description=TonB -dependent siderophore receptor
FLSNGDSSGNKTYQKNTPSLSVMYAFTPELHGYISAGKGFETPTQAELAYAPGNIEGFNFGLKPSESTQYEVGLKAQLSDTRINAAVFQITTEDELVVDQSI

SEQ ID NO: 12041 - protein, 124 aa, Zea mays
  misc_feature (1)..(1): Xaa can be any naturally occurring amino acid
  misc_feature (123)..(123): Xaa can be any naturally occurring amino acid
  Coding DNA Sequence Number=SeqID_5418
  Gene Ontology: Mol. function=tRNA nucleotidyltransferase activity; Cellular component=exosome (RNase complex); Biological process=tRNA processing
  Homolog annotation: Hit_ID=Q4K3R6; Match level="QueryCoverage=99%, HitCoverage=51%, E-value=9e-59, Identity=95%"; Hit description =Ribonuclease PH
  Pfam annotation: Domain name=RNase_PH_C; Domain location=43-110; Score=80.7; E_value=4.9e-21; Accession=PF03725.5; Description=3' exoribonuclease family, domain 2
XDVIQADGGTRTASITGAMVALVDALKVIKKRGGLKGGDPLKQMIAAVSVGMYQGEPVLDLDYLEDSAAETDLNVVMTSTGGFIEVQGTAEGAPFQPADLNAMLALAQKGMTEIFELQNAALXD

SEQ ID NO: 12042 - protein, 210 aa, Zea mays
  misc_feature (1)..(11): Xaa can be any naturally occurring amino acid
  misc_feature (177)..(179): Xaa can be any naturally occurring amino acid
  misc_feature (183)..(184): Xaa can be any naturally occurring amino acid
  misc_feature (193)..(202): Xaa can be any naturally occurring amino acid
  misc_feature (204)..(210): Xaa can be any naturally occurring amino acid
  Coding DNA Sequence Number=SeqID_5419
XXXXXXXXXXXVNSSPLDRSNNSPLNQQWDELERLANLAHTDILPDASLTLAALMTVYRLPRPASAEEALALIEQLRATTAATFPYVSSAAHSLMAVSKHTRHIAVLNDRYTMRAALKSITLDTQLNSTLDMTFNLALGSPFFGLIDKGAQLLAGLRQEAAFQRVSASRQFDLARVXXXERGXXPQWLRAGTXXXXXXXXXXRXXXXXXX

SEQ ID NO: 12043 - protein, 213 aa, Zea mays
  misc_feature (1)..(6): Xaa can be any naturally occurring amino acid
  misc_feature (8)..(9): Xaa can be any naturally occurring amino acid
  misc_feature (17)..(17): Xaa can be any naturally occurring amino acid
  misc_feature (21)..(22): Xaa can be any naturally occurring amino acid
  misc_feature (32)..(32): Xaa can be any naturally occurring amino acid
  misc_feature (35)..(35): Xaa can be any naturally occurring amino acid
  misc_feature (39)..(42): Xaa can be any naturally occurring amino acid
  misc_feature (44)..(44): Xaa can be any naturally occurring amino acid
  misc_feature (46)..(47): Xaa can be any naturally occurring amino acid
  misc_feature (54)..(54): Xaa can be any naturally occurring amino acid
  misc_feature (60)..(61): Xaa can be any naturally occurring amino acid
  misc_feature (72)..(72): Xaa can be any naturally occurring amino acid
  misc_feature (78)..(78): Xaa can be any naturally occurring amino acid
  misc_feature (81)..(82): Xaa can be any naturally occurring amino acid
  misc_feature (86)..(86): Xaa can be any naturally occurring amino acid
  misc_feature (93)..(94): Xaa can be any naturally occurring amino acid
  misc_feature (108)..(109): Xaa can be any naturally occurring amino acid
  misc_feature (111)..(112): Xaa can be any naturally occurring amino acid
  misc_feature (124)..(124): Xaa can be any naturally occurring amino acid
  misc_feature (126)..(126): Xaa can be any naturally occurring amino acid
  misc_feature (129)..(136): Xaa can be any naturally occurring amino acid
  misc_feature (138)..(138): Xaa can be any naturally occurring amino acid
  Coding DNA Sequence Number=SeqID_5421
  Gene Ontology: Mol. function=cation transmembrane transporter activity; Cellular component=integral to membrane; Biological process=cation transport
  Homolog annotation: Hit_ID=P13511; Match level="QueryCoverage=57%, HitCoverage=11%, E-value=3e-33, Identity=62%"; Hit description =Cobalt-zinc-cadmium resistance protein czcA
XXXXXXNXXRRLSHAQXQQGXXLTRSERFHEXFAXAREXXXXLXFXXLIIMVVXLPIFAXXGVEGRMFHPMXLTVVLXLLXXMILXVTFVPAXXGLFIGKKVSEKENXXMXXGKRRYAPLLDLXLXRTXXXXXXXXLXSSTKAQLLGLRQEAFQRVSASRQFDLARVYVLNADGDLSGYALDDTPKVLTRTDTPLSSLTSMAEPLLELGRWFP

SEQ ID NO: 12044 - protein, 198 aa, Zea mays
  Coding DNA Sequence Number=SeqID_5422
  Gene Ontology: Mol. function=oxidoreductase activity, acting on single donors with incorporation of molecular oxygen, incorporation of two atoms of oxygen; Cellular component=cellular_component; Biological process=...
  Gene Ontology: Biological process=aromatic compound metabolic process
  Homolog annotation: Hit_ID=Q3KGU3; Match level="QueryCoverage=100%, HitCoverage=84%, E-value=1e-109, Identity=91%"; Hit description =Protocatechuate 3,4-dioxygenase, beta subunit
  Pfam annotation: Domain name=Dioxygenase_C; Domain location=19-198; Score=218.0; E_value=2.2e-62; Accession=PF00775.11; Description =Dioxygenase
NLRSPSKPLVFLPHSLSEITGPTIGAERINEKDSDLTAQHEGEPQGERIIIHGRVLDENGLPVPGILVEIWQANAAGRYNHKRDQHDAPLDPNFTGTGRTVTDAEGWYQFQTIKPGAYPWGNHHNAWRPAHIHFSLFGPSVLTRLVTQMYFPGDPLLAYDPIYNCVPDTSAKERLIASFDLEKTIPHYALGYRWDIVL

SEQ ID NO: 12045 - protein, 169 aa, Zea mays
  misc_feature (169)..(169): Xaa can be any naturally occurring amino acid
  Coding DNA Sequence Number=SeqID_5423
  Gene Ontology: Mol. function=NAD+ nucleosidase activity
  Homolog annotation: Hit_ID=Q3KFG2; Match level="QueryCoverage=98%, HitCoverage=10%, E-value=2e-60, Identity=67%"; Hit description=Rhs family protein
PADKTATNGCPVSMVTGEELLTLTDGSLEGVLPFAWTRLYRSSAVELDCGLGFGWSHSLAQRLVVSGESVVWTDHENRSTTFPLPSAARPAITNSLAEAAIYLGSLPDELVLAQASLFYHFRNGVLTSISDAYDNRLRISRDYSGRIQRIDNHVGQGLLLRYDRGHIVX

SEQ ID NO: 12046 - protein, 172 aa, Zea mays
  misc_feature (1)..(1): Xaa can be any naturally occurring amino acid
  Coding DNA Sequence Number=SeqID_5424
  Gene Ontology: Mol. function=transcription factor activity; Biological process=regulation of transcription, DNA-dependent
  Homolog annotation: Hit_ID=Q9I5F4; Match level="QueryCoverage=89%, HitCoverage=49%, E-value=1e-69, Identity=80%"; Hit description =Probable transcriptional regulator
XVIRYSIDDYTNLYGLCLFDECFAVYGSPEQVALARERTPTLISVRWHNSKLYALGWQAWCEKAGEDWLQSASPLREYDEEHYALQAAIAGQGLVLASNILVSESVASGLLVPYRPQIRVNGAGYSALCVPGRERHPPVRAFFEWLQEEARLSGHTLENPIKLFGLPGTHNQ

SEQ ID NO: 12047 - protein, 131 aa, Zea mays
  misc_feature (5)..(6): Xaa can be any naturally occurring amino acid
  misc_feature (9)..(9): Xaa can be any naturally occurring amino acid
  Coding DNA Sequence Number=SeqID_5425
  Gene Ontology: Mol. function=catalytic activity; Cellular component =cytoplasm; Biological process=metabolic process
  Homolog annotation: Hit_ID=A5VXZ7; Match level="QueryCoverage=93%, HitCoverage=57%, E-value=6e-56, Identity=86%"; Hit description =Nucleoside-diphosphate-sugar epimerase-like protein
RYNFXXSTXDMVVAFAKRAREMGARHLIVISAIGADPKSSIFYNRVKGEMEQALKAQDWPQLTIVRPSLLLGERLEPRLAEQLAGPLSRLIPGKYHGIEVCELARAMWRLALEEQDGVRVVESDELRKLGK

SEQ ID NO: 12048 - protein, 50 aa, Zea mays
  misc_feature (50)..(50): Xaa can be any naturally occurring amino acid
  Coding DNA Sequence Number=SeqID_5426
  Gene Ontology: Mol. function=nucleoside-triphosphatase activity; Cellular component=excinuclease repair complex; Biological process =response to DNA damage stimulus
  Homolog annotation: Hit_ID=Q2KVT5; Match level="QueryCoverage=96%, HitCoverage=2%, E-value=4e-19, Identity=95%"; Hit description =Putative excinuclease ABC subunit
RVEAPRPMPVAANTPRLLLEGVNAHNLKNVSVELPLGRLVCVTGVSGSGX

SEQ ID NO: 12049 - protein, 50 aa, Zea mays; identical to SEQ ID NO: 12048
  misc_feature (50)..(50): Xaa can be any naturally occurring amino acid
  Coding DNA Sequence Number=SeqID_5427
  Gene Ontology: Mol. function=nucleoside-triphosphatase activity; Cellular component=excinuclease repair complex; Biological process =response to DNA damage stimulus
  Homolog annotation: Hit_ID=Q2KVT5; Match level="QueryCoverage=96%, HitCoverage=2%, E-value=4e-19, Identity=95%"; Hit description =Putative excinuclease ABC subunit

SEQ ID NO: 12050 - protein, 204 aa, Zea mays
  misc_feature (66)..(66): Xaa can be any naturally occurring amino acid
  Coding DNA Sequence Number=SeqID_5428
  Gene Ontology: Mol. function=nucleotide binding; Cellular component =plastid chromosome; Biological process=cobalamin biosynthetic process
  Homolog annotation: Hit_ID=Q4KAH6; Match level="QueryCoverage=85%, HitCoverage=41%, E-value=4e-85, Identity=89%"; Hit description =Cobalamin biosynthesis protein CobW
  Pfam annotation: Domain name=cobW; Domain location=77-204; Score =138.0; E_value=2.6e-38; Accession=PF02492.9; Description=Cobalamin synthesis proteinP47K
  Subcellular localization annotation: CTP_CleavageSite=82; ConfidenceScore=5.48e-01
RVYLTATPLPEQGGKAQPAPASPPASPKPGDLPRNRFSTSTGRGDPVANSASAHPRRATRPVCPPXGHPMKTLAKLPVTIVTGFLGSGKTTLLRHMLDNAQGRRIAVIVNEFGELGIDGEILKQCSIGCTEEEANGRVYELANGCLCCTVQEEFFPVMRELVARRGDLDHILIETSGLALPKPLVQAFQWPEIRSACTVDAVIT

SEQ ID NO: 12051 - protein, 105 aa, Zea mays
  misc_feature (8)..(9): Xaa can be any naturally occurring amino acid
  misc_feature (11)..(11): Xaa can be any naturally occurring amino acid
  Coding DNA Sequence Number=SeqID_5429
  Homolog annotation: Hit_ID=Q4K5X7; Match level="QueryCoverage=80%, HitCoverage=24%, E-value=5e-41, Identity=96%"; Hit description =Putative uncharacterized protein
GVGRLFAXXAXVGLSAAAGGAREVCNLDFAEGNLAVGRENGQLNPQLPTMEFVQSDYFPAIRQLAGLPISQRRGQKLPSYPRLGQRQYDLVLLDPPAWAKSAFGT

SEQ ID NO: 12052 - protein, 321 aa, Zea mays
  misc_feature (1)..(1): Xaa can be any naturally occurring amino acid
  misc_feature (3)..(3): Xaa can be any naturally occurring amino acid
  misc_feature (5)..(11): Xaa can be any naturally occurring amino acid
  misc_feature (14)..(21): Xaa can be any naturally occurring amino acid
  misc_feature (23)..(23): Xaa can be any naturally occurring amino acid
  misc_feature (25)..(27): Xaa can be any naturally occurring amino acid
  misc_feature (29)..(30): Xaa can be any naturally occurring amino acid
  misc_feature (35)..(35): Xaa can be any naturally occurring amino acid
  misc_feature (48)..(48): Xaa can be any naturally occurring amino acid
  misc_feature (53)..(53): Xaa can be any naturally occurring amino acid
  Coding DNA Sequence Number=SeqID_5430
  Gene Ontology: Mol. function=transporter activity; Cellular component= integral to membrane; Biological process=transport
  Homolog annotation: Hit_ID=Q4KDE4; Match level="QueryCoverage=93%, HitCoverage=53%, E-value=1e-68, Identity=50%"; Hit description =Sulfate transporter, putative
  Pfam annotation: Domain name=Sulfate_transp; Domain location=22-304; Score=108.1; E_value=2.6e-29; Accession=PF00916.10; Description =Sulfate transporter family
XGXFXXXXXXXSWXXXXXXXXKXVXXXFXXGLALXIILKQLASVVGVXLTDNXLIRFLPQLLEQLPRWNWAAAAVAGVALLLLWLCARIKRLPGGLLVVILGIAAGQWLDLQAHGVALIGVIDLRLEFAHLPVLPFADWLRLGELAFAMVMILYAESYGSISAFALKHGDRVSSNRDLLALGAANLLSGLFQGMPTGAGYSATSANEAAGANSRLAGAVAALVVLAIVLTVLPLVALTPEPVLAAIVIYALGRGLSLQPLGRYFSWRRDRLLVICAVAAVLVLGVLDGLLVAVGISVVLMLRQMSSADVRELGRIDGGHDF

SEQ ID NO: 12053 - protein, 205 aa, Zea mays
  misc_feature (5)..(5): Xaa can be any naturally occurring amino acid
  misc_feature (8)..(16): Xaa can be any naturally occurring amino acid
  misc_feature (205)..(205): Xaa can be any naturally occurring amino acid
  Coding DNA Sequence Number=SeqID_5431
  Gene Ontology: Cellular component=outer membrane-bounded periplasmic space; Biological process=transport
  Homolog annotation: Hit_ID=Q7WI54; Match level="QueryCoverage=91%, HitCoverage=53%, E-value=4e-96, Identity=93%"; Hit description =Putative transport protein
  Pfam annotation: Domain name=SBP_bac_7; Domain location=1-205; Score=- 67.4; E_value=5.1e-05; Accession=PF03480.4; Description=Bacterial extracellular solute-binding protein, family 7
GPRSXIKXXXXXXXXXPELLRLMSTGVVEFGTATLSYFASDNPINEAIDLAGLAPDVKTAREVTNAFEPVYARLYGEGSNVKLLGISTYPAQVLFCNAEIKGLADIKGKKVRTSSRTTAEFVEALGGSSVTMAFGEVVPALQNKVVDCAITGSLSGYSAKWYEVSTHLVALPINWNQQIHAVNQKAWDKLDPNVRTFLQANVKTX

SEQ ID NO: 12054 - protein, 186 aa, Zea mays
  misc_feature (159)..(159): Xaa can be any naturally occurring amino acid
  misc_feature (163)..(168): Xaa can be any naturally occurring amino acid
  misc_feature (170)..(178): Xaa can be any naturally occurring amino acid
  misc_feature (180)..(186): Xaa can be any naturally occurring amino acid
  Coding DNA Sequence Number=SeqID_5432
  Gene Ontology: Mol. function=oxidoreductase activity, acting on the aldehyde or oxo group of donors, NAD or NADP as acceptor; Cellular component=mitochondrial matrix; Biological process=metabolic process
  Homolog annotation: Hit_ID=A0GEL4; Match level="QueryCoverage=90%, HitCoverage=35%, E-value=8e-53, Identity=61%"; Hit description =Succinic semialdehyde dehydrogenase
  Pfam annotation: Domain name=Aldedh; Domain location=15-184; Score= -236.9; E_value=0.00016; Accession=PF00171.12; Description=Aldehyde dehydrogenase family
MNPLIRTGNFIDGQWSSGGPVYPVLNPANGAQIAEVQRAGAEETNLAIAAANRALPAWRKLTAKERSQRLKRWSDLMLSNQKDLAHLLSLEQGKPLAEAMGEVVYAASFLEWFAEEAKRAYGDVIPSHKADARIIVTKEAIGVVAAITPWNFPLAMVTXKVGXXXXXXCXXXXXXXXXTXXXXXXX

SEQ ID NO: 12055 - protein, 122 aa, Zea mays
  Coding DNA Sequence Number=SeqID_5433
  Gene Ontology: Biological process=electron transport
  Homolog annotation: Hit_ID=Q7WAC2; Match level="QueryCoverage=89%, HitCoverage=50%, E-value=2e-39, Identity=72%"; Hit description =Putative exported protein
SPAGRIDGFIPQPAMEPMRHLITGRAWRGLLLALCMLLAACGDRNVDWTLYNVKGHLPDLKFSLPGAGGKTVSSDDLKGKTVLLFFGYASCPDICPTTMAQLTAVLQNLGDKARDVRILFVS

SEQ ID NO: 12056 - protein, 193 aa, Zea mays
  Coding DNA Sequence Number=SeqID_5434
  Gene Ontology: Mol. function=transcription factor activity; Cellular component=intracellular; Biological process=regulation of transcription, DNA-dependent
  Homolog annotation: Hit_ID=Q4K8P0; Match level="QueryCoverage=91%, HitCoverage=81%, E-value=4e-67, Identity=70%"; Hit description =Transcriptional regulator, GntR family
  Pfam annotation: Domain name=FCD; Domain location=55-178; Score=10.0; E_value=1.9e-05; Accession=PF07729.2; Description=FCD domain
  Pfam annotation: Domain name=GntR; Domain location=1-45; Score=12.0; E_value=0.0043; Accession=PF00392.11; Description=Bacterial regulatory proteins, gntR fa
  Pfam module annotation: Pfam domain module=FCD::GntR; Domain location= 55-178::1-45
LPGMPLVESELVNAYNASRNTVREALHHLGREGLTSYVRNKGVIVRRLGVEEVRDIFKVRRTLELQAIAASKPLREYQSDLMLESIEAAQLAQDRENWQAFGTHSLRFHQHIVGLMRSPLLDEFFTHIAAQMRLVFSNAPSEETFQKPWLERDRQIHDLLVDGHKQAAGEALASYLNDSESLLLDILSSIPKP

SEQ ID NO: 12057 - protein, 193 aa, Zea mays; identical to SEQ ID NO: 12056
  Coding DNA Sequence Number=SeqID_5435
  Gene Ontology: Mol. function=transcription factor activity; Cellular component=intracellular; Biological process=regulation of transcription, DNA-dependent
  Homolog annotation: Hit_ID=Q4K8P0; Match level="QueryCoverage=91%, HitCoverage=81%, E-value=4e-67, Identity=70%"; Hit description =Transcriptional regulator, GntR family
  Pfam annotation: Domain name=FCD; Domain location=55-178; Score=10.0; E_value=1.9e-05; Accession=PF07729.2; Description=FCD domain
  Pfam annotation: Domain name=GntR; Domain location=1-45; Score=12.0; E_value=0.0043; Accession=PF00392.11; Description=Bacterial regulatory proteins, gntR fa
  Pfam module annotation: Pfam domain module=FCD::GntR; Domain location= 55-178::1-45

SEQ ID NO: 12058 - protein, 51 aa, Zea mays
  Coding DNA Sequence Number=SeqID_5436
  Gene Ontology: Mol. function=protein transporter activity; Cellular component=type II protein secretion system complex; Biological process=protein secretion by the type II secretion system
  Homolog annotation: Hit_ID=Q48JN3; Match level="QueryCoverage=100%, HitCoverage=6%, E-value=1e-12, Identity=74%"; Hit description =General secretion pathway protein GspD
PNLLTLDNEAASIFVGQTIPFVTGSYVTGGGGTSNNPFQTVQREEVGLKLN

SEQ ID NO: 12059 - protein, 51 aa, Zea mays; identical to SEQ ID NO: 12058
  Coding DNA Sequence Number=SeqID_5437
  Gene Ontology: Mol. function=protein transporter activity; Cellular component=type II protein secretion system complex; Biological process=protein secretion by the type II secretion system
  Homolog annotation: Hit_ID=Q48JN3; Match level="QueryCoverage=100%, HitCoverage=6%, E-value=1e-12, Identity=74%"; Hit description =General secretion pathway protein GspD

SEQ ID NO: 12060 - protein, 214 aa, Zea mays
  misc_feature (48)..(53): Xaa can be any naturally occurring amino acid
  misc_feature (60)..(65): Xaa can be any naturally occurring amino acid
  misc_feature (67)..(74): Xaa can be any naturally occurring amino acid
  misc_feature (77)..(78): Xaa can be any naturally occurring amino acid
  misc_feature (80)..(94): Xaa can be any naturally occurring amino acid
  misc_feature (96)..(96): Xaa can be any naturally occurring amino acid
  misc_feature (98)..(98): Xaa can be any naturally occurring amino acid
  misc_feature (100)..(114): Xaa can be any naturally occurring amino acid
  misc_feature (116)..(118): Xaa can be any naturally occurring amino acid
  misc_feature (120)..(127): Xaa can be any naturally occurring amino acid
  misc_feature (129)..(137): Xaa can be any naturally occurring amino acid
  misc_feature (139)..(140): Xaa can be any naturally occurring amino acid
  misc_feature (142)..(143): Xaa can be any naturally occurring amino acid
  misc_feature (147)..(148): Xaa can be any naturally occurring amino acid
  misc_feature (150)..(154): Xaa can be any naturally occurring amino acid
  misc_feature (157)..(162): Xaa can be any naturally occurring amino acid
  misc_feature (164)..(181): Xaa can be any naturally occurring amino acid
  misc_feature (183)..(210): Xaa can be any naturally occurring amino acid
  misc_feature (213)..(214): Xaa can be any naturally occurring amino acid
  Coding DNA Sequence Number=SeqID_5438
  Subcellular localization annotation: CTP_CleavageSite=39; ConfidenceScore=5.40e-01
SGATKAAAPTRTSAPGAFPRRRQLLDKPTWHRAPLPAPRAMPSQPGKXXXXXXSWTTRSXXXXXXHXXXXXXXXHHXXHXXXXXXXXXXXXXXXPXPXSXXXXXXXXXXXXXXXPXXXCXXXXXXXXIXXXXXXXXXRXXQXXLAEXXLXXXXXILXXXXXXAXXXXXXXXXXXXXXXXXXSXXXXXXXXXXXXXXXXXXXXXXXXXXXXLPXX

SEQ ID NO: 12061 - protein, 214 aa, Zea mays; identical to SEQ ID NO: 12060
  misc_feature (48)..(53): Xaa can be any naturally occurring amino acid
  misc_feature (60)..(65): Xaa can be any naturally occurring amino acid
  misc_feature (67)..(74): Xaa can be any naturally occurring amino acid
  misc_feature (77)..(78): Xaa can be any naturally occurring amino acid
  misc_feature (80)..(94): Xaa can be any naturally occurring amino acid
  misc_feature (96)..(96): Xaa can be any naturally occurring amino acid
  misc_feature (98)..(98): Xaa can be any naturally occurring amino acid
  misc_feature (100)..(114): Xaa can be any naturally occurring amino acid
  misc_feature (116)..(118): Xaa can be any naturally occurring amino acid
  misc_feature (120)..(127): Xaa can be any naturally occurring amino acid
  misc_feature (129)..(137): Xaa can be any naturally occurring amino acid
  misc_feature (139)..(140): Xaa can be any naturally occurring amino acid
  misc_feature (142)..(143): Xaa can be any naturally occurring amino acid
  misc_feature (147)..(148): Xaa can be any naturally occurring amino acid
  misc_feature (150)..(154): Xaa can be any naturally occurring amino acid
  misc_feature (157)..(162): Xaa can be any naturally occurring amino acid
  misc_feature (164)..(181): Xaa can be any naturally occurring amino acid
  misc_feature (183)..(210): Xaa can be any naturally occurring amino acid
  misc_feature (213)..(214): Xaa can be any naturally occurring amino acid
  Coding DNA Sequence Number=SeqID_5439
  Subcellular localization annotation: CTP_CleavageSite=39; ConfidenceScore=5.40e-01

SEQ ID NO: 12062 - protein, 197 aa, Zea mays
  misc_feature (1)..(6): Xaa can be any naturally occurring amino acid
  misc_feature (8)..(46): Xaa can be any naturally occurring amino acid
  misc_feature (49)..(55): Xaa can be any naturally occurring amino acid
  misc_feature (57)..(65): Xaa can be any naturally occurring amino acid
  misc_feature (77)..(79): Xaa can be any naturally occurring amino acid
  misc_feature (197)..(197): Xaa can be any naturally occurring amino acid
  Coding DNA Sequence Number=SeqID_5440
XXXXXXGXXXXXXXXXXXXXXXXXXXXXXXXXXXXXXXXXXXXXXXCAXXXXXXXWXXXXXXXXXPVSAGHGPGARXXXPALAAAGATAPGPGPAPATPAPAAMPAAARPGHGPGGAAAAGRRDPPGCPAIAPGARPGRARDGGTASSLQRLDHRLQPGAPDIRRDQAQLAVADAAGAVDDEGLGHAVDAVFDADAX

SEQ ID NO: 12063 - protein, 197 aa, Zea mays; identical to SEQ ID NO: 12062
  misc_feature (1)..(6): Xaa can be any naturally occurring amino acid
  misc_feature (8)..(46): Xaa can be any naturally occurring amino acid
  misc_feature (49)..(55): Xaa can be any naturally occurring amino acid
  misc_feature (57)..(65): Xaa can be any naturally occurring amino acid
  misc_feature (77)..(79): Xaa can be any naturally occurring amino acid
  misc_feature (197)..(197): Xaa can be any naturally occurring amino acid
  Coding DNA Sequence Number=SeqID_5441

SEQ ID NO: 12064 - protein, 149 aa, Zea mays
  Coding DNA Sequence Number=SeqID_5442
  Gene Ontology: Mol. function=electron carrier activity; Cellular component=membrane; Biological process=electron transport
  Homolog annotation: Hit_ID=Q3K4U7; Match level="QueryCoverage=100%, HitCoverage=23%, E-value=1e-36, Identity=57%"; Hit description =Cytochrome c, class I precursor
ASVRKDTEKALMAYRQSLQDGLPIEQVQQRLDVAKGKLTESAGLLGSDGLSWSLSYISGLLILLREGLEAILVLAAILAFLRNTGQQSAVRSVNVGWGLALLAGLATWALAAYVIDVSGAQRELLEGCTALFASVMVLWLGVWMHDRRH

SEQ ID NO: 12065 - protein, 285 aa, Zea mays
  misc_feature (5)..(5): Xaa can be any naturally occurring amino acid
  misc_feature (7)..(7): Xaa can be any naturally occurring amino acid
  misc_feature (10)..(10): Xaa can be any naturally occurring amino acid
  misc_feature (12)..(16): Xaa can be any naturally occurring amino acid
  Coding DNA Sequence Number=SeqID_5443
  Gene Ontology: Mol. function=3-oxoacyl-[acyl-carrier-protein] synthase activity; Cellular component=mitochondrion; Biological process=biosynthetic process
  Homolog annotation: Hit_ID=Q4KB45; Match level="QueryCoverage=100%, HitCoverage=67%, E-value=1e-115, Identity=74%"; Hit description=3 -oxoacyl-(Acyl-carrier-protein) synthase II
  Pfam annotation: Domain name=Ketoacyl-synt_C; Domain location=235 -285; Score=-44.6; E_value=0.055; Accession=PF02801.12; Description =Beta-ketoacyl synthase, C-terminal do
  Pfam annotation: Domain name=ketoacyl-synt; Domain location=4-227; Score=173.3; E_value=6.5e-49; Accession=PF00109.16; Description=Beta- ketoacyl synthase, N-terminal domain
  Pfam module annotation: Pfam domain module=Ketoacyl-synt_C::ketoacyl -synt; Domain location=235-285::4-227
GAIGXAXYPXHXXXXXAISIGGQVLDRTQDPEAGFDPDTVIPAKEQRKMDRFIVFALAAAQEALAQAGWSPQTPSQQERTATIIASGVGGFPAIAEAVRTADSKGPRRLSPFTIPSFLGNMAAGHVSIQHQLKGPLGSPVTACAAGVQAIGDAARMIRAGEIDIAVCGGAEACIHRVSLGGFAAARALSSDYNDTPTLASRPFDQGRDGFVMGEGAGILVIEELEHALARGATPIAELVGYGTSADAYHMTSGPEDGSGARRAMELAIAQAGISAAQIQHLNAHA

SEQ ID NO: 12066 - protein, 108 aa, Zea mays
  Coding DNA Sequence Number=SeqID_5444
  Gene Ontology: Mol. function=DNA binding; Cellular component =intracellular; Biological process=regulation of transcription, DNA -dependent
  Homolog annotation: Hit_ID=A9C0U5; Match level="QueryCoverage=96%, HitCoverage=59%, E-value=4e-43, Identity=80%"; Hit description =Transcriptional regulator, HxlR family
  Pfam annotation: Domain name=DUF24; Domain location=19-108; Score =84.4; E_value=3.6e-22; Accession=PF01638.8; Description =Transcriptional regulator
MRSKSFEGMVCSIATVLDAVGDRWAMLILRDLVLGLRRYDDLRRSTGIANATLADRLRQLEQNGLIERRLYQSGPDRHEYLPTAKGRDIALVLQALAQVGDQWQPGRC

SEQ ID NO: 12067 - protein, 108 aa, Zea mays; identical to SEQ ID NO: 12066
  Coding DNA Sequence Number=SeqID_5445
  Gene Ontology: Mol. function=DNA binding; Cellular component =intracellular; Biological process=regulation of transcription, DNA -dependent
  Homolog annotation: Hit_ID=A9C0U5; Match level="QueryCoverage=96%, HitCoverage=59%, E-value=4e-43, Identity=80%"; Hit description =Transcriptional regulator, HxlR family
  Pfam annotation: Domain name=DUF24; Domain location=19-108; Score =84.4; E_value=3.6e-22; Accession=PF01638.8; Description =Transcriptional regulator

SEQ ID NO: 12068 - protein, 250 aa, Zea mays
  misc_feature (218)..(219): Xaa can be any naturally occurring amino acid
  misc_feature (225)..(226): Xaa can be any naturally occurring amino acid
  misc_feature (235)..(235): Xaa can be any naturally occurring amino acid
  misc_feature (239)..(244): Xaa can be any naturally occurring amino acid
  misc_feature (247)..(248): Xaa can be any naturally occurring amino acid
  Coding DNA Sequence Number=SeqID_5446
  Gene Ontology: Mol. function=transporter activity; Cellular component= membrane; Biological process=transport
  Homolog annotation: Hit_ID=Q9I4A0; Match level="QueryCoverage=93%, HitCoverage=48%, E-value=4e-43, Identity=42%"; Hit description =Probable outer membrane component of multidrug efflux pump
  Pfam annotation: Domain name=OEP; Domain location=3-171; Score=17.2; E_value=0.0011; Accession=PF02321.8; Description=Outer membrane efflux protein
ALLARLEQVDGERLPSTSLDYGLAYGRSRDDQTLAQATNGHAGAEWSHTPEFSLSYTLDLWGEVRYRIAAARADAQVARALEDELRVTVAAQTARAYAQACVYGLQEQVQVHSVQLLEQSVAVTQKLQKAGAATDLDLTRLQGLLEETRAPLPMFKARRSSALYELAVLSGLPPEQVTPRSCAHSPQLQAALPVGEGWALVQRRPDIRRAEGQLRLAXXTVGLSXXELYPRITLXRDAXXXXXXALXXLR

SEQ ID NO: 12069 - protein, 73 aa, Zea mays
  misc_feature (1)..(1): Xaa can be any naturally occurring amino acid
  Coding DNA Sequence Number=SeqID_5447
  Homolog annotation: Hit_ID=Q3KIT7; Match level="QueryCoverage=98%, HitCoverage=21%, E-value=3e-32, Identity=95%"; Hit description =Membrane protein, putative
XARGQLPPFLDAYLPASAAEFRVAIGEWLSKHLSELQLVGKDAAHMFVTLLIGMVLGAIIALQRVPDLTKRKP

SEQ ID NO: 12070 - protein, 83 aa, Zea mays
  Coding DNA Sequence Number=SeqID_5448
  Gene Ontology: Mol. function=secondary active sulfate transmembrane transporter activity; Cellular component=outer membrane-bounded periplasmic space; Biological process=sulfate transport
  Homolog annotation: Hit_ID=Q88CK9; Match level="QueryCoverage=100%, HitCoverage=24%, E-value=8e-39, Identity=90%"; Hit description =Sulfate ABC transporter, periplasmic sulfate-binding protein
NAEKKGNTEIATEYLKHLYSPAGQEIAAKNFYRPRDEKVAAKYAQQFPKLDLVTIDKDFGGWKTAQPKFFNDGGVFDQIYSAQ

SEQ ID NO: 12071 - protein, 289 aa, Zea mays
  misc_feature (252)..(253): Xaa can be any naturally occurring amino acid
  misc_feature (265)..(270): Xaa can be any naturally occurring amino acid
  misc_feature (272)..(272): Xaa can be any naturally occurring amino acid
  misc_feature (277)..(277): Xaa can be any naturally occurring amino acid
  misc_feature (281)..(282): Xaa can be any naturally occurring amino acid
  Coding DNA Sequence Number=SeqID_5449
  Gene Ontology: Mol. function=phosphopantetheine binding; Cellular component=nucleus; Biological process=metabolic process
  Homolog annotation: Hit_ID=Q0PH95; Match level="QueryCoverage=96%, HitCoverage=80%, E-value=1e-108, Identity=48%"; Hit description=MassB
  Pfam annotation: Domain name=AMP-binding; Domain location=100-289; Score=-92.4; E_value=0.0016; Accession=PF00501.18; Description=AMP -binding enzyme
DLGVGFALTVQGVAEVDVQRVGDYMLSALRNLVTALQQAPTTPLHQVSILPPAERHQVLVGFNTTARDYPAGKTVHALFEAQALASPEAVAVVHGHASLSYRDLNLRANRLAHYLIDQGVKPGDSVVIALPRSIDLLVSQLAILKCAAVYVPLDVNAPEERQAFMVQDSHAKHVLNDLAALNLATQPAHNPNLAQSAESVAYIMYTSGSTGAPKGVQVPHRAISRLVINNGYADFNHRDRVAFASNPAFDAXXLDVWAPLLNGGXXXXXXHXTLLSXAAFXXLSVSTCL

SEQ ID NO: 12072 - protein, 58 aa, Zea mays
  misc_feature (58)..(58): Xaa can be any naturally occurring amino acid
  Coding DNA Sequence Number=SeqID_5450
  Gene Ontology: Mol. function=oxidoreductase activity; Biological process=electron transport
  Homolog annotation: Hit_ID=Q3K9X9; Match level="QueryCoverage=98%, HitCoverage=8%, E-value=4e-24, Identity=92%"; Hit description=2,4 -dienoyl-CoA reductase
TVAAERGHQVTLFDSASEIGGQFNIAKRVPGKEEFFETLRYFKRKLQTTHVELCLNTX

SEQ ID NO: 12073 - protein, 58 aa, Zea mays; identical to SEQ ID NO: 12072
  misc_feature (58)..(58): Xaa can be any naturally occurring amino acid
  Coding DNA Sequence Number=SeqID_5451
  Gene Ontology: Mol. function=oxidoreductase activity; Biological process=electron transport
  Homolog annotation: Hit_ID=Q3K9X9; Match level="QueryCoverage=98%, HitCoverage=8%, E-value=4e-24, Identity=92%"; Hit description=2,4 -dienoyl-CoA reductase

SEQ ID NO: 12074 - protein, 139 aa, Zea mays
  Coding DNA Sequence Number=SeqID_5452
  Gene Ontology: Mol. function=nucleoside-triphosphatase activity; Cellular component=intracellular; Biological process=transport
  Homolog annotation: Hit_ID=A0TTX2; Match level="QueryCoverage=99%, HitCoverage=58%, E-value=8e-50, Identity=71%"; Hit description=ABC transporter related
  Pfam annotation: Domain name=ABC_tran; Domain location=2-137; Score =38.4; E_value=5.2e-10; Accession=PF00005.17; Description=ABC transporter
EVARRGVAYAAQDQPLFPDLNIRDNLRLGLANDRLFDERFGEIADLFPVFASRLRQHAGTLSGGEQKMLLVARGLMQRPALLLLDEITEGLQPSMIERLGRALNWERERRGTSMFIVEQNVAFALDVADRYLVLKQGAI

SEQ ID NO: 12075 - protein, 76 aa, Zea mays
  Coding DNA Sequence Number=SeqID_5453
  Homolog annotation: Hit_ID=Q7VYL6; Match level="QueryCoverage=100%, HitCoverage=19%, E-value=2e-32, Identity=82%"; Hit description =Putative exported protein
GGWDTHVGQGNASGMLANRLGQLGRALAGYADAMGPAWKQATVVVISEFGRTFRENGNKGTDHGHGTVYWVLGGNV

SEQ ID NO: 12076 - protein, 150 aa, Zea mays
  misc_feature (94)..(94): Xaa can be any naturally occurring amino acid
  Coding DNA Sequence Number=SeqID_5454
  Gene Ontology: Mol. function=motor activity; Cellular component =flagellin-based flagellum basal body, distal rod, L ring; Biological process=ciliary or flagellar motility
  Homolog annotation: Hit_ID=Q3KG60; Match level="QueryCoverage=99%, HitCoverage=64%, E-value=8e-69, Identity=87%"; Hit description =Flagellar L-ring protein precursor
  Pfam annotation: Domain name=FlgH; Domain location=1-150; Score=59.4; E_value=1.2e-14; Accession=PF02107.7; Description=Flagellar L-ring protein
TNNGSIYQAGFEQNLYSDRKAFRVGDIITITLNEKTQASKNANSQIGKTSKTSIGLTSLFGGVPNTNNPLGSGDLSLDAGYSGDRATNGKSAAXQGNSLTGSITVTVADVLPNGIIAVRGEKWMTLNTGDELVRIAGMVRADDISTDNTV

SEQ ID NO: 12077 - protein, 263 aa, Zea mays
  misc_feature (1)..(1): Xaa can be any naturally occurring amino acid
  misc_feature (261)..(261): Xaa can be any naturally occurring amino acid
  Coding DNA Sequence Number=SeqID_5455
  Gene Ontology: Mol. function=transporter activity; Biological process= transport
  Homolog annotation: Hit_ID=Q4K4Z7; Match level="QueryCoverage=99%, HitCoverage=47%, E-value=1e-136, Identity=89%"; Hit description =Peptide ABC transporter, periplasmic peptide-binding protein
XKTVALLKRNPMLVIEETKGAQHYTFPMLCDSNEFKNNDIRMAMKHAINRETLLASVLHGYGLVGNDHPIQPGSRFINAALEQRTYDPDKSRFYLRKAGVESLKVRLQASDAAYTGAVDASVLFKEQARQAGIDIDVVREPADGYFSNIWMKQPFTTSFWYSSLTADRMFSIGYAKGAAWNETHWDNPRFNQLLNAARGEMNAPLRQEMYNEMQSLCRDDGGAIVPLFASSVAARSNRISHGPLTAPYGELDGLRLIERWXQA

SEQ ID NO: 12078 - protein, 295 aa, Zea mays
  misc_feature (1)..(1): Xaa can be any naturally occurring amino acid
  misc_feature (263)..(264): Xaa can be any naturally occurring amino acid
  misc_feature (266)..(266): Xaa can be any naturally occurring amino acid
  misc_feature (274)..(275): Xaa can be any naturally occurring amino acid
  misc_feature (279)..(284): Xaa can be any naturally occurring amino acid
  misc_feature (291)..(291): Xaa can be any naturally occurring amino acid
  misc_feature (294)..(294): Xaa can be any naturally occurring amino acid
  Coding DNA Sequence Number=SeqID_5456
  Gene Ontology: Mol. function=peptidase activity
  Homolog annotation: Hit_ID=Q3KIX1; Match level="QueryCoverage=98%, HitCoverage=26%, E-value=1e-149, Identity=88%"; Hit description =Transglutaminase-like
  Pfam annotation: Domain name=Transglut_core; Domain location=95-167; Score=77.7; E_value=3.8e-20; Accession=PF01841.9; Description =Transglutaminase-like superfamily
XVAEMAVFNPFDFFLEPYAEKIPFSYAADEQRELAPYLETLPLTPRFAAYLAGIDRTPLPAVDFLVGLNQRLAADIGYLIRMEPGVQTPEFTLENASGSCRDSAWLLVQLLRNLGLAARFVSGYLIQLTADVKALDGPSGTEVDFTDLHAWCEVYLPGAGWIGLDATSGLFAGEGHIPLACSPDPSSAAPISGLVEPCECEFTHEMSVERIWEAPRVTKPYTEEQWLAIQALGRQIDGDLLKDDVRLTMGGEPTFVSIDDPDXXEXNTAALGPXXRRLXXXXXXRMRKHYXPQXP

SEQ ID NO: 12079 - protein, 172 aa, Zea mays
  misc_feature (13)..(14): Xaa can be any naturally occurring amino acid
  misc_feature (25)..(25): Xaa can be any naturally occurring amino acid
  Coding DNA Sequence Number=SeqID_5457
  Gene Ontology: Mol. function=phosphoribosylaminoimidazole carboxylase activity; Cellular component=phosphoribosylaminoimidazole carboxylase complex; Biological process=purine nucleotide biosynthetic process
  Homolog annotation: Hit_ID=P72157; Match level="QueryCoverage=94%, HitCoverage=99%, E-value=2e-59, Identity=72%"; Hit description =Phosphoribosylaminoimidazole carboxylase catalytic subunit
  Pfam annotation: Domain name=AIRC; Domain location=12-170; Score =318.9; E_value=9.4e-93; Accession=PF00731.10; Description=AIR carboxylase
FACGRPERRTSAXXGVIMGSKSDWXTLSHTADMLEKLGIPYEVKVVSAHRTPDLLFQYADEAESRGIEVIIAGAGGAAHLPGMCAAKTHLPVLGVPVQSSMLSGVDSLLSIVQMPAGIPVATLAIGKAGAINAALLSASILGAKHPQFHAVLKKFRAEQTDSVLDNPDPRIA

SEQ ID NO: 12080 - protein, 91 aa, Zea mays
  Coding DNA Sequence Number=SeqID_5458
RASCRTFPATPRMTVHPPPETSGGGFLSAGEQGICAQVSEAFIAALLCGLLQAVSLRLAQKSSISQGVNIAPDVGHFDTHLDRICFICNEL

SEQ ID NO: 12081 - protein, 232 aa, Zea mays
  Coding DNA Sequence Number=SeqID_5460
  Gene Ontology: Mol. function=gluconolactonase activity; Cellular component=cytoplasm; Biological process=regulation of transcription, DNA-dependent
  Homolog annotation: Hit_ID=Q3K8M4; Match level="QueryCoverage=100%, HitCoverage=79%, E-value=1e-101, Identity=74%"; Hit description =Gluconolactonase
  Pfam annotation: Domain name=SGL; Domain location=6-232; Score=201.6; E_value=1.9e-57; Accession=PF08450.2; Description=SMP-30Gluconolaconas eLRE-like region
MSWNAVTPHRARLGEGPFWDEQGQALYWVDIIGQQALRLKDGQLHTWQLPEPVSAFIPCASGDALVTLSSGVYRLDLDSAPRDPRLTLLCVADPQPGNRANEARCDAQGRLWLGTMQNNIGAHGEDLPVLQRSGGLFRVDADGQVTPLLQGLGIPNTLLWNDAATHVHFGDSLDGTLYRHAITDDGQLEPAQVWFGPHSRGGPDGSAMDAEGYIWNARWDGSCLLRLTPGGE

SEQ ID NO: 12082 - protein, 283 aa, Zea mays
  misc_feature (1)..(1): Xaa can be any naturally occurring amino acid
  misc_feature (271)..(276): Xaa can be any naturally occurring amino acid
  Coding DNA Sequence Number=SeqID_5461
  Gene Ontology: Mol. function=signal transducer activity; Cellular component=membrane; Biological process=signal transduction
  Homolog annotation: Hit_ID=Q3KIP0; Match level="QueryCoverage=98%, HitCoverage=42%, E-value=6e-91, Identity=68%"; Hit description =Chemotaxis sensory transducer precursor
  Pfam annotation: Domain name=HAMP; Domain location=66-135; Score =22.3; E_value=0.0018; Accession=PF00672.15; Description=HAMP domain
XKRELNSLLTRYPAELKRTREQIQQRTELAISTHLKINAVQQAIAGLEPVVRAQHAQIQGEVRLMQGVMIGLILLIALLIDTLQRRLARVLTNLAPALSTWAEGDFSQHIALGKTNRELHDIEESLNRLRAYLVDLVGTIRGNAEQVAGSSSALAELSSGMHDGAERQAGDTAQIRDSLGELEATIQQVAGDASQAAQASRSAGQAVEQGQRVIGLSLNGLHALVGEVQINAQMIEKLAEESATIGGVLTVIRSIADQTNLLALNAAIEAXXXXXXGRGPLNG

SEQ ID NO: 12083 - protein, 55 aa, Zea mays
  Coding DNA Sequence Number=SeqID_5462
  Gene Ontology: Mol. function=hydrolase activity, acting on carbon -nitrogen (but not peptide) bonds
  Homolog annotation: Hit_ID=Q3KEU7; Match level="QueryCoverage=100%, HitCoverage=8%, E-value=8e-21, Identity=90%"; Hit description =Putative uncharacterized protein
TVGGLELHAEGLPRLTALELFTHGSAWFSSEQGKKGQIKVGQLADVAALSADFFS

SEQ ID NO: 12084 - protein, 55 aa, Zea mays; identical to SEQ ID NO: 12083
  Coding DNA Sequence Number=SeqID_5463
  Gene Ontology: Mol. function=hydrolase activity, acting on carbon -nitrogen (but not peptide) bonds
  Homolog annotation: Hit_ID=Q3KEU7; Match level="QueryCoverage=100%, HitCoverage=8%, E-value=8e-21, Identity=90%"; Hit description =Putative uncharacterized protein

SEQ ID NO: 12085 - protein, 133 aa, Zea mays
  misc_feature (91)..(94): Xaa can be any naturally occurring amino acid
  misc_feature (96)..(96): Xaa can be any naturally occurring amino acid
  misc_feature (99)..(102): Xaa can be any naturally occurring amino acid
  misc_feature (104)..(106): Xaa can be any naturally occurring amino acid
  misc_feature (108)..(115): Xaa can be any naturally occurring amino acid
  misc_feature (117)..(117): Xaa can be any naturally occurring amino acid
  misc_feature (119)..(122): Xaa can be any naturally occurring amino acid
  misc_feature (126)..(126): Xaa can be any naturally occurring amino acid
  Coding DNA Sequence Number=SeqID_5464
  Gene Ontology: Mol. function=transcription factor activity; Cellular component=cytoplasm; Biological process=regulation of transcription, DNA-dependent
  Homolog annotation: Hit_ID=A9IM68; Match level="QueryCoverage=81%, HitCoverage=33%, E-value=1e-30, Identity=67%"; Hit description =Transcriptional regulator, LysR-family
  Pfam annotation: Domain name=HTH_1; Domain location=20-79; Score =73.7; E_value=6.2e-19; Accession=PF00126.17; Description=Bacterial regulatory helix-turn-helix protein, lysR family
MDEQAYADEVGPSAGRPLNLRQIEVFRAIMMAGSISGAGRMLHVSQPAVSRVLALTETRLGYRLFERVKSRLSPTAEARRLYAEVEQVYGXXXXVXDLXXXXGXXXAXXXXXXXXAXYXXXXVPMXLGPGGFP

SEQ ID NO: 12086 - protein, 133 aa, Zea mays; identical to SEQ ID NO: 12085
  misc_feature (91)..(94): Xaa can be any naturally occurring amino acid
  misc_feature (96)..(96): Xaa can be any naturally occurring amino acid
  misc_feature (99)..(102): Xaa can be any naturally occurring amino acid
  misc_feature (104)..(106): Xaa can be any naturally occurring amino acid
  misc_feature (108)..(115): Xaa can be any naturally occurring amino acid
  misc_feature (117)..(117): Xaa can be any naturally occurring amino acid
  misc_feature (119)..(122): Xaa can be any naturally occurring amino acid
  misc_feature (126)..(126): Xaa can be any naturally occurring amino acid
  Coding DNA Sequence Number=SeqID_5465
  Gene Ontology: Mol. function=transcription factor activity; Cellular component=cytoplasm; Biological process=regulation of transcription, DNA-dependent
  Homolog annotation: Hit_ID=A9IM68; Match level="QueryCoverage=81%, HitCoverage=33%, E-value=1e-30, Identity=67%"; Hit description =Transcriptional regulator, LysR-family
  Pfam annotation: Domain name=HTH_1; Domain location=20-79; Score =73.7; E_value=6.2e-19; Accession=PF00126.17; Description=Bacterial regulatory helix-turn-helix protein, lysR family

SEQ ID NO: 12087 - protein, 231 aa, Zea mays
  misc_feature (1)..(6): Xaa can be any naturally occurring amino acid
  misc_feature (9)..(19): Xaa can be any naturally occurring amino acid
  misc_feature (21)..(23): Xaa can be any naturally occurring amino acid
  misc_feature (30)..(30): Xaa can be any naturally occurring amino acid
  Coding DNA Sequence Number=SeqID_5466
  Gene Ontology: Mol. function=oxidoreductase activity; Cellular component=cytoplasm; Biological process=metabolic process
  Homolog annotation: Hit_ID=A4VJU9; Match level="QueryCoverage=96%, HitCoverage=42%, E-value=1e-69, Identity=60%"; Hit description =Xenobiotic reductase
  Pfam annotation: Domain name=Oxidored_FMN; Domain location=1-228; Score=-27.6; E_value=2.5e-10; Accession=PF00724.10; Description =NADH:flavin oxidoreductase  NADH oxid
XXXXXXDPXXXXXXXXXXXSXXXAGGHVSXVRPKRGYVVPRALETDEIPGIVEAYRRGAQLAQEAGFDGVEVHGANGYLLDQFLQDSTNHRTDGYGGSLEARARLMLEVVDASVSVWGAGRVGLHLSPRGDAHTMGDSDPATTFNYVARAARRRGLAFLCAREHEGADSLGPQLKESFGGVYIANEGFTRESAEAAIAAGRADAVAFGVQYIANPDLAQRFALKAPLNAPD

SEQ ID NO: 12088 - protein, 126 aa, Zea mays
  Coding DNA Sequence Number=SeqID_5467
  Gene Ontology: Mol. function=transporter activity; Cellular component= integral to membrane; Biological process=transport
  Homolog annotation: Hit_ID=Q6J675; Match level="QueryCoverage=100%, HitCoverage=28%, E-value=1e-57, Identity=83%"; Hit description=Major facilitator superfamily-like permease
LILWSAATFFMGFAGSFVILFVLRLAVGALEAPAYPINNRVVTTWFPEKERATAIGFYTSGQFVGLAFLTPVLAWLQHHYGWHMVFVSTGLLGIIWGVLWYLIYREPRQFKGANAAEIELIQKGGG

SEQ ID NO: 12089 - protein, 115 aa, Zea mays
  misc_feature (3)..(3): Xaa can be any naturally occurring amino acid
  Coding DNA Sequence Number=SeqID_5468
  Gene Ontology: Mol. function=hydrolase activity, hydrolyzing O -glycosyl compounds; Biological process=carbohydrate metabolic process
  Homolog annotation: Hit_ID=Q4KAF7; Match level="QueryCoverage=99%, HitCoverage=28%, E-value=7e-40, Identity=70%"; Hit description =Branched-chain amino acid ABC transporter, periplasmic amino acid- binding protein
TPXNRDLVKLTKAKYGINPTYPLAADYISTKVMLETIISTGSFDGPTVAKAMRGLSYEGPTGKESIRAGDHQVIKDYYLLVGKAAGDMADKDDLAKVLSSGQSFPPVEATGCVLG

SEQ ID NO: 12090 - protein, 115 aa, Zea mays; identical to SEQ ID NO: 12089
  misc_feature (3)..(3): Xaa can be any naturally occurring amino acid
  Coding DNA Sequence Number=SeqID_5469
  Gene Ontology: Mol. function=hydrolase activity, hydrolyzing O -glycosyl compounds; Biological process=carbohydrate metabolic process
  Homolog annotation: Hit_ID=Q4KAF7; Match level="QueryCoverage=99%, HitCoverage=28%, E-value=7e-40, Identity=70%"; Hit description =Branched-chain amino acid ABC transporter, periplasmic amino acid- binding protein

SEQ ID NO: 12091 - protein, 166 aa, Zea mays
  misc_feature (147)..(148): Xaa can be any naturally occurring amino acid
  Coding DNA Sequence Number=SeqID_5470
  Homolog annotation: Hit_ID=Q4IVJ0; Match level="QueryCoverage=99%, HitCoverage=73%, E-value=2e-50, Identity=60%"; Hit description =Putative uncharacterized protein
  Pfam annotation: Domain name=DUF480; Domain location=14-166; Score =241.3; E_value=2.1e-69; Accession=PF04337.3; Description=Protein of unknown function, DUF480
MTTEHDTTSEEPRLNSTEIRILGCLIEKQATSPETYPLTLNALVIACNQKTSREPVMNLSQGQVGQSLRALEGRGFTRLVMGSRADRWEHRVDKALELVPAQVILSGLLFLRGPQTVNELLTRSGRMHEFEDTEQVVHQLERLIARXXALLVPRQSGTCTPKRSHN

SEQ ID NO: 12092 - protein, 171 aa, Zea mays
  misc_feature (1)..(30): Xaa can be any naturally occurring amino acid
  misc_feature (32)..(36): Xaa can be any naturally occurring amino acid
  misc_feature (39)..(47): Xaa can be any naturally occurring amino acid
  misc_feature (50)..(55): Xaa can be any naturally occurring amino acid
  misc_feature (57)..(59): Xaa can be any naturally occurring amino acid
  misc_feature (61)..(62): Xaa can be any naturally occurring amino acid
  misc_feature (64)..(65): Xaa can be any naturally occurring amino acid
  misc_feature (68)..(69): Xaa can be any naturally occurring amino acid
  misc_feature (72)..(72): Xaa can be any naturally occurring amino acid
  misc_feature (75)..(75): Xaa can be any naturally occurring amino acid
  misc_feature (77)..(77): Xaa can be any naturally occurring amino acid
  misc_feature (170)..(171): Xaa can be any naturally occurring amino acid
  Coding DNA Sequence Number=SeqID_5471
XXXXXXXXXXXXXXXXXXXXXXXXXXXXXXRXXXXXRFXXXXXXXXXKAXXXXXXIXXXNXXLXXGAXXPMXPGXAXQRSNDGMLRIDNLQALGSDSALSTELTGAAAMWSRPGMFHALETGGDNPATGKSDGIGTRDNIGAWLEKQAPKTDSDTLTFLDGAATRDAVAXX

SEQ ID NO: 12093 - protein, 118 aa, Zea mays
  Coding DNA Sequence Number=SeqID_5473
  Gene Ontology: Mol. function=L-lactate dehydrogenase (cytochrome) activity; Cellular component=peroxisome; Biological process=electron transport
  Homolog annotation: Hit_ID=Q4ZY06; Match level="QueryCoverage=100%, HitCoverage=31%, E-value=3e-57, Identity=85%"; Hit description=L -lactate dehydrogenase [cytochrome]
  Pfam annotation: Domain name=FMN_dh; Domain location=1-118; Score= -155.3; E_value=1e-05; Accession=PF01070.8; Description=FMN-dependent dehydrogenase
MPTPGARYRDAHSGMSGAYGPQRQILQAMTKPAWAFDVGLLGRPHDLGNISKYLGKPTQLKDYIGWLANNFDPSISWKDLEWIREFWKGPMIIKGILDPEDAKDAVSFGADGIVVSNH

SEQ ID NO: 12094 - protein, 218 aa, Zea mays
  Coding DNA Sequence Number=SeqID_5474
  Gene Ontology: Mol. function=isocitrate dehydrogenase (NADP+) activity; Cellular component=cytoplasm; Biological process =tricarboxylic acid cycle
  Homolog annotation: Hit_ID=Q3KA72; Match level="QueryCoverage=100%, HitCoverage=29%, E-value=1e-102, Identity=88%"; Hit description =Isocitrate dehydrogenase
AMKFTLERTRKGLDTISVTGNVLRDYLTDLFPIMELGTSAKMLSIVPLMNGGGLFETGAGGSAPKHVQQLVEENFLRWDSLGEFLALAASLEHLGVNYNNPKALVLSKTLDQATGQFLDNNKSPSRKVGNIDNRGSHFYLALYWAQALAAQTEDTALQAQFGELAKTLTANEATIVAELNAVQGKPVDIGGYYAPNAELTSKAMRPSATLNAAIAALV

SEQ ID NO: 12095 - protein, 64 aa, Zea mays
  misc_feature (1)..(3): Xaa can be any naturally occurring amino acid
  Coding DNA Sequence Number=SeqID_5475
  Gene Ontology: Mol. function=xanthine dehydrogenase activity; Biological process=electron transport
  Homolog annotation: Hit_ID=A1FGD1; Match level="QueryCoverage=95%, HitCoverage=7%, E-value=3e-24, Identity=85%"; Hit description =Xanthine dehydrogenase
XXXRRMGGGFGGKETQAASPACLCAVVARLTGQPTKMRLPRVEDMLMTGKRHPFYIEYDVGFDD

SEQ ID NO: 12096 - protein, 64 aa, Zea mays; identical to SEQ ID NO: 12095
  misc_feature (1)..(3): Xaa can be any naturally occurring amino acid
  Coding DNA Sequence Number=SeqID_5476
  Gene Ontology: Mol. function=xanthine dehydrogenase activity; Biological process=electron transport
  Homolog annotation: Hit_ID=A1FGD1; Match level="QueryCoverage=95%, HitCoverage=7%, E-value=3e-24, Identity=85%"; Hit description =Xanthine dehydrogenase

SEQ ID NO: 12097 - protein, 192 aa, Zea mays
  Coding DNA Sequence Number=SeqID_5477
  Gene Ontology: Mol. function=1-acylglycerol-3-phosphate O -acyltransferase activity; Cellular component=membrane; Biological process=phospholipid biosynthetic process
  Homolog annotation: Hit_ID=Q3KFH0; Match level="QueryCoverage=94%, HitCoverage=74%, E-value=2e-87, Identity=85%"; Hit description=1 -acyl-sn-glycerol-3-phosphate acyltransferase
  Pfam annotation: Domain name=Acyltransferase; Domain location=1-122; Score=134.0; E_value=4.1e-37; Accession=PF01553.11; Description =Acyltransferase
SLRSKPSSCVIIANHQSNYDLFVFGTVVPYRTVCIGKKSLKWVPLFGQLFWLAGNVLIDRGNAHKARRSMLTTTHTLQHADTSIWVFPEGTRNLGETLLPFKKGAFQMAIAAGVPIVQVCVSTYVKQMKLNRWNSGDILIRSLPPIPTKGLTMDDMPLLMQTCREQMRDCIEAMDRELQTAPVITGEPRRIC

SEQ ID NO: 12098 - protein, 197 aa, Zea mays
  misc_feature (1)..(94): Xaa can be any naturally occurring amino acid
  misc_feature (98)..(103): Xaa can be any naturally occurring amino acid
  misc_feature (105)..(105): Xaa can be any naturally occurring amino acid
  misc_feature (107)..(113): Xaa can be any naturally occurring amino acid
  misc_feature (115)..(121): Xaa can be any naturally occurring amino acid
  misc_feature (123)..(124): Xaa can be any naturally occurring amino acid
  Coding DNA Sequence Number=SeqID_5478
XXXXXXXXXXXXXXXXXXXXXXXXXXXXXXXXXXXXXXXXXXXXXXXXXXXXXXXXXXXXXXXXXXXXXXXXXXXXXXXXXXXXXXXXXXXXXXSYFXXXXXXGXGXXXXXXXTXXXXXXXAXXPDCSGTRREIRFPSRRSSGKDGCSNSPANIYIESVKITLGVGIREAWQAITDTTLNKSLLLDIVERRTGHGTH

SEQ ID NO: 12099 - protein, 197 aa, Zea mays; identical to SEQ ID NO: 12098
  misc_feature (1)..(94): Xaa can be any naturally occurring amino acid
  misc_feature (98)..(103): Xaa can be any naturally occurring amino acid
  misc_feature (105)..(105): Xaa can be any naturally occurring amino acid
  misc_feature (107)..(113): Xaa can be any naturally occurring amino acid
  misc_feature (115)..(121): Xaa can be any naturally occurring amino acid
  misc_feature (123)..(124): Xaa can be any naturally occurring amino acid
  Coding DNA Sequence Number=SeqID_5479

SEQ ID NO: 12100 - protein, 141 aa, Zea mays
  Coding DNA Sequence Number=SeqID_5480
  Gene Ontology: Mol. function=peptidase activity; Biological process =proteolysis
  Homolog annotation: Hit_ID=Q88H64; Match level="QueryCoverage=100%, HitCoverage=21%, E-value=1e-71, Identity=89%"; Hit description =Peptidase, U32 family
KAETTPPPVYPESHLSFLANVYNQKARDFYHRHGVQLIDAAYEAHEETGEVPVMITKHCLRFSFNLCPKQAKGVTGVKTKVAPMQLIHGDEVLTLKFDCKPCEMHVIGKIKGHILGLPQPGSVVGYISPDDLLKTIPRGAH

SEQ ID NO: 12101 - protein, 146 aa, Zea mays
  misc_feature (4)..(4): Xaa can be any naturally occurring amino acid
  Coding DNA Sequence Number=SeqID_5481
  Gene Ontology: Mol. function=oxidoreductase activity, acting on single donors with incorporation of molecular oxygen, incorporation of two atoms of oxygen; Biological process=aromatic compound metabolic process
  Homolog annotation: Hit_ID=Q12BM1; Match level="QueryCoverage=100%, HitCoverage=84%, E-value=5e-46, Identity=62%"; Hit description =Carboxymuconolactone decarboxylase
  Pfam annotation: Domain name=CMD; Domain location=12-90; Score=55.6; E_value=1.7e-13; Accession=PF02627.10; Description=Carboxymuconolacto ne decarboxylase family
ISPXYQVLLNSPAVVQGWEAMLTAIRLNTSLSPRVRELIILRVATLNNAPYEFDAHVPHALAAGMPQAVVDQLRGGPRADAVQGLEAGEADVLALTDAMTRDIEVPDALFAPLRARYNDQELVELTATVAAYNMVSRFLVALRVGH

SEQ ID NO: 12102 - protein, 244 aa, Zea mays
  misc_feature (75)..(75): Xaa can be any naturally occurring amino acid
  Coding DNA Sequence Number=SeqID_647
  Subcellular localization annotation: CTP_CleavageSite=45; ConfidenceScore=5.21e-01
LKLKNLHFENWNTLQFTTLPSTKSYWVGWSCTAARLVACTPAWPLASVGSVATACGLRKERGRVVRGLLAWRSGXVRPGGAAVRGGSQARADARARRRQPAAPRSSPRRSSCCSVLVVVADCLCSWSTRRQRLAAGFPKLVALIFYWANPRYCSGNTRPYWALRPWCVAYWPGGRAPCGQAEPRSAEAARRARTRGQDAGSPQPLARRLVGRRAAQCSSSSRTASAPGPLGDSGWRLASLSSLP

SEQ ID NO: 12103 - protein, 106 aa, Zea mays
  Coding DNA Sequence Number=SeqID_649
QPTNFAILKYKFFYSFPTTHRSTSFTILTYSARLIVIVLMHVGRILIWSPIPLLPAPYDPTSPPFVTMIVIVSMMTYTRVDCAIITVFILFFFDLIGEFDSFSFSF

SEQ ID NO: 12104 - protein, 141 aa, Zea mays
  misc_feature (1)..(68): Xaa can be any naturally occurring amino acid
  Coding DNA Sequence Number=SeqID_651
XXXXXXXXXXXXXXXXXXXXXXXXXXXXXXXXXXXXXXXXXXXXXXXXXXXXXXXXXXXXXXXXXXXXLKRWKRLCANKLRLNISHLLDAPSIAAINKTQRSNPSAQPRRCPPPAPSPPRGTPCPHLRRSRKSDFYQKPGR

SEQ ID NO: 12105 - protein, 140 aa, Zea mays
  Coding DNA Sequence Number=SeqID_652
IKDSSRGSASPFHLREPFSSAAGERQRIRSLVLPLPCARLIIGAARWPGGGLGSSSSVVGLARVGNQDHASASATNCSPEQLGRCGSALSVASLHGNTNSDKQVTEDPDTKQVENTEQEPIEGEEQVAQKEVYNEEYKLI

SEQ ID NO: 12106 - protein, 81 aa, Zea mays
  Coding DNA Sequence Number=SeqID_654
SSCLLVRLVALLRLLLNIPTKSRGLDSLHRKRVYARTPRPSPPHGHGSRRLPLILAPVHKPYVAQEFPPSDPRYPAQPRRS

SEQ ID NO: 12107 - protein, 94 aa, Zea mays
  misc_feature (12)..(12): Xaa can be any naturally occurring amino acid
  Coding DNA Sequence Number=SeqID_656
  Gene Ontology: Mol. function=binding; Cellular component=cytoplasm
  Homolog annotation: Hit_ID=A2ZUT9; Match level="QueryCoverage=98%, HitCoverage=11%, E-value=6e-42, Identity=90%"; Hit description =Putative uncharacterized protein
MFWRMTGLSAAXPLRDKAQVEQLLRYVVEEVPDDAERKRSFKFPFIASEIFTCEIDVILRTLVEDEELMDLLFSFVKPDHPHSTLLSGYFSKVT

SEQ ID NO: 12108 - protein, 73 aa, Zea mays
  Coding DNA Sequence Number=SeqID_657
RELDLYYHQNVMLPHITAQTWIPAWPMWIEMHSLMVSSYGMERRPTEGIGRRGKGLSRGGRRVRRRLSLRCSI

SEQ ID NO: 12109 - protein, 68 aa, Zea mays
  Coding DNA Sequence Number=SeqID_659
VIGFCWGFLEQTQNRINLNHNQELHHLGVCSGPSQQHPYHKNSKVLHKSTRGGKKEHKSESNQELQQQ

SEQ ID NO: 12110 - protein, 109 aa, Zea mays
  misc_feature (3)..(3): Xaa can be any naturally occurring amino acid
  Coding DNA Sequence Number=SeqID_661
PEXSPFGTFFSWLDLGGVLGNSMTYTKHIIRPTHITYGSLEQPPTKTSKPDTSPRQLDCKSTTTVAHAPALTMLLWFHSHLHLVARPWCHVLCLLGPPGSLLELVFSAR

SEQ ID NO: 12111 - protein, 292 aa, Zea mays
  Coding DNA Sequence Number=SeqID_663
  Gene Ontology: Mol. function=protein disulfide oxidoreductase activity; Cellular component=chloroplast; Biological process=cell redox homeostasis
  Homolog annotation: Hit_ID=Q2QX01; Match level="QueryCoverage=88%, HitCoverage=89%, E-value=1e-124, Identity=85%"; Hit description =Monothiol glutaredoxin-S12, chloroplast precursor
  Pfam annotation: Domain name=Glutaredoxin; Domain location=202-269; Score=95.1; E_value=2.2e-25; Accession=PF00462.14; Description =Glutaredoxin
  Pfam annotation: Domain name=SH3BGR; Domain location=201-291; Score= -21.9; E_value=0.091; Accession=PF04908.5; Description=SH3-binding, glutamic acid-rich protein
  Pfam module annotation: Pfam domain module=Glutaredoxin::SH3BGR; Domain location=202-269::201-291
  Subcellular localization annotation: CTP_CleavageSite=49; ConfidenceScore=5.78e-01
MAMASTATAAASLRLALPLLSSPASSSSSSNTLRFPLRRRSSARPIAVSAFKKLSEASAVPIPQEPTELLLVDEDALPPKAGVYGVYDPAGELQFVGISRNVRASVEGHRRKVPANLCASVKVAVSDEETPDRSALNNAWKSWMQEHIEATGKAPPGNVAGNHTWVGGPQRPPDLRLTPGRHVQLTVPLEQLIDRLVKENRVVAFIKGSRSAPQCGFSQRVVGILEGHGVDFVTVDVLDEEHNHGLRETLKAYSSWPTFPQVFVGGELVGGCDIVSSMAEKGELAALLIIQK

SEQ ID NO: 12112 - protein, 96 aa, Zea mays
  Coding DNA Sequence Number=SeqID_5482
  Gene Ontology: Mol. function=transporter activity; Cellular component= 1-2nm peptidoglycan-based cell wall; Biological process=transport
  Homolog annotation: Hit_ID=Q3K4V7; Match level="QueryCoverage=98%, HitCoverage=42%, E-value=2e-43, Identity=90%"; Hit description=Amino acid ABC transporter, permease protein, 3-TM region, His/Glu/Gln/Arg/o pine
LAMTRFEAFRHVVLLPALGKVWPALSSQIIIVMLGSAVCSQIATEELSFAANFIQSRNFRAFETYALTTLVYLCMALMIRQLLNWIGRRYVMRNAR

SEQ ID NO: 12113 - protein, 292 aa, Zea mays
  misc_feature (8)..(8): Xaa can be any naturally occurring amino acid
  misc_feature (12)..(14): Xaa can be any naturally occurring amino acid
  misc_feature (19)..(19): Xaa can be any naturally occurring amino acid
  misc_feature (25)..(25): Xaa can be any naturally occurring amino acid
  Coding DNA Sequence Number=SeqID_5483
  Gene Ontology: Mol. function=oxidoreductase activity, acting on the CH-OH group of donors, NAD or NADP as acceptor; Cellular component =glycerol-3-phosphate dehydrogenase complex; Biological process =glycerol-3-phosphate biosynthetic process
  Homolog annotation: Hit_ID=Q3K8F9; Match level="QueryCoverage=97%, HitCoverage=80%, E-value=1e-135, Identity=88%"; Hit description =Glycerol-3-phosphate dehydrogenase [NAD(P)+] (EC 1.1.1.94) (NAD(P)H- dependent ...
  Homolog annotation: Hit description=glycerol-3-phosphate dehydrogenase)
  Pfam annotation: Domain name=NAD_Gly3P_dh_C; Domain location=140-284; Score=203.0; E_value=7.3e-58; Accession=PF07479.4; Description=NAD -dependent glycerol-3-phosphate de
  Pfam annotation: Domain name=NAD_Gly3P_dh_N; Domain location=4-123; Score=76.0; E_value=1.2e-19; Accession=PF01210.13; Description=NAD -dependent glycerol-3-phosphate de
  Pfam module annotation: Pfam domain module=NAD_Gly3P_dh_C::NAD_Gly3P _dh_N; Domain location=140-284::4-123
MDPRAFRXKTPXXXKGIKXLPAVSXVTDLLATLTECDLCFVALPSSALRSVLAPHSERLAGKLLVSLTKGIEAHTFKLMSEILEEIAPEARIGVLSGPNLAREVAEHALTATVIASEDEELCERVQAVLHGRTFRVYASADRFGVELGGALKNVYAIIAGMAVALGMGENTKSMLITRALAEMTRFAVNQGANPMTFLGLAGVGDLIVTCSSPKSRNYQVGFALGQGLSLEDAVTRLGEVAEGVNTLKVLKAKAQEVGVYMPLVAGLHAILFEGRTLNQVIELLMRAEPKTD

SEQ ID NO: 12114 - protein, 259 aa, Zea mays
  misc_feature (259)..(259): Xaa can be any naturally occurring amino acid
  Coding DNA Sequence Number=SeqID_5484
  Gene Ontology: Mol. function=transferase activity, transferring phosphorus-containing groups; Biological process=two-component signal transduction system (phosphorelay)
  Homolog annotation: Hit_ID=Q3K7G3; Match level="QueryCoverage=97%, HitCoverage=41%, E-value=5e-89, Identity=65%"; Hit description =Periplasmic Sensor Signal Transduction Histidine Kinase precursor
MGRQAPMKLSRRATQLMLSAMTLILASTLVFLYLKSSSEQTTYTESRDLIREIKQLNSQWDSEVLKARIALTHNYDPLVAPLKEINDLWAQLERRESQNTHEDPAHWQSSQDAYRQAIQEKARLVEQFKSHNAVLRNSLAFLPTAEDDIQAQFLALTDGDKLLQQSIATDTYDVLLSSLEFAQVTSDDKAADILVGLNKLAINKLSLPESFQVPVEILSKHISLILREQPVVNDLLERIAAVPLADHLDDLTNQLNQDX

SEQ ID NO: 12115 - protein, 248 aa, Zea mays
  misc_feature (225)..(236): Xaa can be any naturally occurring amino acid
  misc_feature (239)..(247): Xaa can be any naturally occurring amino acid
  Coding DNA Sequence Number=SeqID_5485
  Gene Ontology: Mol. function=carbon-nitrogen ligase activity, with glutamine as amido-N-donor; Cellular component=intracellular; Biological process=translation
  Homolog annotation: Hit_ID=Q1IED4; Match level="QueryCoverage=90%, HitCoverage=46%, E-value=1e-120, Identity=95%"; Hit description =Aspartyl/glutamyl-tRNA(Asn/Gln) amidotransferase subunit B
  Pfam annotation: Domain name=GatB_N; Domain location=1-225; Score =448.7; E_value=7.7e-132; Accession=PF02934.6; Description=PET112 family, N terminal region
MQWEVVIGLEIHTQLATQSKIFSGSATTFGSEPNTQASLVDLGMPGVLPVLNQEAVRMAVMFGLAIDAEIGQHNVFARKNYFYPDLPKGYQISQMELPIVGKGYLDIPLEDGTIKRVGVTRAHLEEDAGKSLHEEFNGATGIDLNRAGTPLLEIVSEPDMRSAKEAVAYVKTIHALVRYLGICDGNMAEGSLRCDCNVSVRPKGQVEYGTRCEIKNVNSFRFIEXXXXXXXXXXXXLIXXXXXXXXXT

SEQ ID NO: 12116 - protein, 216 aa, Zea mays
  Coding DNA Sequence Number=SeqID_5486
  Gene Ontology: Mol. function=amine dehydrogenase activity; Cellular component=periplasmic space; Biological process=methylamine metabolic process
  Homolog annotation: Hit_ID=B0KNK2; Match level="QueryCoverage=96%, HitCoverage=54%, E-value=2e-68, Identity=57%"; Hit description=Amine dehydrogenase precursor
  Pfam annotation: Domain name=Me-amine-dh_H; Domain location=1-217; Score=-116.4; E_value=0.0002; Accession=PF06433.2; Description =Methylamine dehydrogenase heavy chain (
TQSRSVTAEIAIPGCVLNYPVGTRRFASLCGDGSLQVVTLNEQGQETSRNRTHFFDPNAEKLNERAVNVGDTYYFTTTTGTIRPVDFSGDEPKILPSWSLTTDAEKKTGWAPGGWQLMAVAPKLNRMYVLMHDNHEPMKWEDPSTIIWAYDLKTMKKIATLEAPTPVWSMQATGDDKPLLLGADVEGGLQIFDLKTNKLTGSMAKVAKTATQIMSY

SEQ ID NO: 12117 - protein, 216 aa, Zea mays; identical to SEQ ID NO: 12116
  Coding DNA Sequence Number=SeqID_5487
  Gene Ontology: Mol. function=amine dehydrogenase activity; Cellular component=periplasmic space; Biological process=methylamine metabolic process
  Homolog annotation: Hit_ID=B0KNK2; Match level="QueryCoverage=96%, HitCoverage=54%, E-value=2e-68, Identity=57%"; Hit description=Amine dehydrogenase precursor
  Pfam annotation: Domain name=Me-amine-dh_H; Domain location=1-217; Score=-116.4; E_value=0.0002; Accession=PF06433.2; Description =Methylamine dehydrogenase heavy chain (

SEQ ID NO: 12118 - protein, 155 aa, Zea mays
  Coding DNA Sequence Number=SeqID_5488
  Gene Ontology: Mol. function=motor activity; Cellular component =flagellin-based flagellum basal body; Biological process=ciliary or flagellar motility
  Homolog annotation: Hit_ID=Q4KG58; Match level="QueryCoverage=83%, HitCoverage=84%, E-value=7e-52, Identity=83%"; Hit description =Flagellar motor switch protein FliN
  Pfam annotation: Domain name=SpoA; Domain location=72-148; Score =122.4; E_value=1.3e-33; Accession=PF01052.11; Description=Surface presentation of antigens (SPOA) protein
MATEHENTSAEDQALADEWAAALEETGDVGQDDIDALLAADAATAPVGNRLPMEEFGSVPKNNEPVTLDGPNLDVILDIPVSISMEVGSTEINIRNLLQLNQGSVIELDRLAGEPLDVLVNGTLIAHGEVVVVNEKFGIRLTDVISPSERIKKLR

SEQ ID NO: 12119 - protein, 146 aa, Zea mays
  misc_feature (146)..(146): Xaa can be any naturally occurring amino acid
  Coding DNA Sequence Number=SeqID_5489
  Gene Ontology: Mol. function=metallopeptidase activity; Cellular component=cell wall; Biological process=proteolysis
  Homolog annotation: Hit_ID=A1UKT6; Match level="QueryCoverage=80%, HitCoverage=44%, E-value=1e-29, Identity=54%"; Hit description=VanX D-Ala-D-Ala dipeptidase. Metallo peptidase. MEROPS family M15D precursor
  Pfam annotation: Domain name=Peptidase_M15; Domain location=26-146; Score=-54.5; E_value=0.02; Accession=PF01427.8; Description=D-ala-D -ala dipeptidase
MPYSFPAVAALSLLVLAAPAAADTPMPANMVYLRSLDPSIAQDIRYASPHNFTGAPLDGYNAAECVLSADAAKALVRVQAELARQGYGLKVFDCYRPSRAVANMGRFASLPGDPAKAEFYPRVNKQDFWRLGYVAKVSNHSRGAAX

SEQ ID NO: 12120 - protein, 146 aa, Zea mays; identical to SEQ ID NO: 12119
  misc_feature (146)..(146): Xaa can be any naturally occurring amino acid
  Coding DNA Sequence Number=SeqID_5490
  Gene Ontology: Mol. function=metallopeptidase activity; Cellular component=cell wall; Biological process=proteolysis
  Homolog annotation: Hit_ID=A1UKT6; Match level="QueryCoverage=80%, HitCoverage=44%, E-value=1e-29, Identity=54%"; Hit description=VanX D-Ala-D-Ala dipeptidase. Metallo peptidase. MEROPS family M15D precursor
  Pfam annotation: Domain name=Peptidase_M15; Domain location=26-146; Score=-54.5; E_value=0.02; Accession=PF01427.8; Description=D-ala-D -ala dipeptidase

SEQ ID NO: 12121 - protein, 118 aa, Zea mays
  Coding DNA Sequence Number=SeqID_5491
SVAGSLISPAQGNNIVSTLRRENQYAGYHSEHCRKPPSSTQPTSSCRSSLQFDQRLADRAWRPARSIRLRAHTGTCADLLQLPGGSGSRPSQPDPTINPTEDLGAIPSTWPRADSNIW

SEQ ID NO: 12122 - protein, 60 aa, Zea mays
  misc_feature (60)..(60): Xaa can be any naturally occurring amino acid
  Coding DNA Sequence Number=SeqID_5493
APAESAVCRAVAAVVWASVAAPSAALAATCAEPAALSAPAAASWALSAMLLATSPAPWAX

SEQ ID NO: 12123 - protein, 131 aa, Zea mays
  misc_feature (5)..(5): Xaa can be any naturally occurring amino acid
  misc_feature (9)..(11): Xaa can be any naturally occurring amino acid
  Coding DNA Sequence Number=SeqID_5495
  Gene Ontology: Mol. function=iron ion transmembrane transporter activity; Biological process=high-affinity iron ion transport
  Homolog annotation: Hit_ID=Q4K5Z5; Match level="QueryCoverage=90%, HitCoverage=35%, E-value=2e-52, Identity=84%"; Hit description =Heme/hemin ABC transporter, periplasmic heme/hemin-binding protein
RSTKXGVLXXXGHAGGKPLIAGKDTAADWMLQQAGGHNLATHKGYKPFSVESLAGLNPEVLVFADRALTGDAARAALFKENPILASTPAAKNGRVYELDPTLLVGGLGPRLPQSLVKLSAGFYPSQANTAP

SEQ ID NO: 12124 - protein, 55 aa, Zea mays
  misc_feature (55)..(55): Xaa can be any naturally occurring amino acid
  Coding DNA Sequence Number=SeqID_5496
  Gene Ontology: Mol. function=allantoicase activity; Cellular component=cytosol; Biological process=purine base metabolic process
  Homolog annotation: Hit_ID=Q4J4X3; Match level="QueryCoverage=98%, HitCoverage=16%, E-value=2e-24, Identity=92%"; Hit description =Allantoicase
  Pfam annotation: Domain name=Allantoicase; Domain location=1-54; Score=-13.0; E_value=1.4e-07; Accession=PF03561.6; Description =Allantoicase repeat
ALACSDEHFGRMSNILNPGRGINMGDGWETARRRTPGNDWVIVALGHPGEIEKIX

SEQ ID NO: 12125 - protein, 55 aa, Zea mays; identical to SEQ ID NO: 12124
  misc_feature (55)..(55): Xaa can be any naturally occurring amino acid
  Coding DNA Sequence Number=SeqID_5497
  Gene Ontology: Mol. function=allantoicase activity; Cellular component=cytosol; Biological process=purine base metabolic process
  Homolog annotation: Hit_ID=Q4J4X3; Match level="QueryCoverage=98%, HitCoverage=16%, E-value=2e-24, Identity=92%"; Hit description =Allantoicase
  Pfam annotation: Domain name=Allantoicase; Domain location=1-54; Score=-13.0; E_value=1.4e-07; Accession=PF03561.6; Description =Allantoicase repeat

SEQ ID NO: 12126 - protein, 81 aa, Zea mays
  misc_feature (1)..(1): Xaa can be any naturally occurring amino acid
  Coding DNA Sequence Number=SeqID_5498
  Gene Ontology: Mol. function=DNA-directed DNA polymerase activity; Cellular component=cytoplasm; Biological process=response to DNA damage stimulus
  Homolog annotation: Hit_ID=Q3KBG7; Match level="QueryCoverage=97%, HitCoverage=7%, E-value=1e-33, Identity=88%"; Hit description=Error -prone DNA polymerase
  Pfam annotation: Domain name=tRNA_anti; Domain location=4-66; Score =15.0; E_value=0.04; Accession=PF01336.15; Description=OB-fold nucleic acid binding domain
XRPGTASGVTFVTLEDEFGNINVVVWRDLAERQRQALVGSRLLKVDGRWEAVGEVRHLIAGRLTDLTPLLSGISVRSRDFR

SEQ ID NO: 12127 - protein, 207 aa, Zea mays
  misc_feature (11)..(11): Xaa can be any naturally occurring amino acid
  Coding DNA Sequence Number=SeqID_5499
  Gene Ontology: Mol. function=monooxygenase activity; Cellular component=intracellular
  Homolog annotation: Hit_ID=Q48HH9; Match level="QueryCoverage=91%, HitCoverage=42%, E-value=3e-87, Identity=84%"; Hit description =Monooxygenase, NtaA/SnaA/SoxA family
IFRVRFRPTRXKRARSFGRDADQLSILPGIRPIVGRDEAEVERRYQQAVELVTVEDAIVALGRPFNDHDFSKYPLDEPFPELGDLGSNSQKGGSDRIKQLARDEGLTLREVALRFSRPKRDFVGTPEQVADAIQTWFEAGAADGFIINSLLPDGLQYFTEQVVPVLQERGLFRREYSGVTLRENLGLDVPANRYSAALETQPTQIAI

SEQ ID NO: 12128 - protein, 67 aa, Zea mays
  misc_feature (1)..(1): Xaa can be any naturally occurring amino acid
  Coding DNA Sequence Number=SeqID_5500
  Gene Ontology: Mol. function=amino-acid N-acetyltransferase activity; Cellular component=cytoplasm; Biological process=amino acid biosynthetic process
  Homolog annotation: Hit_ID=A4XP61; Match level="QueryCoverage=98%, HitCoverage=15%, E-value=4e-27, Identity=92%"; Hit description=N -acetylglutamate synthase
XKGINRLLDERSIVLLSPLGYSPTGEIFNLACEDVATRAAIDLGADKLLLFGADLGLIDEHGRLVRE

SEQ ID NO: 12129 - protein, 67 aa, Zea mays; identical to SEQ ID NO: 12128
  misc_feature (1)..(1): Xaa can be any naturally occurring amino acid
  Coding DNA Sequence Number=SeqID_5501
  Gene Ontology: Mol. function=amino-acid N-acetyltransferase activity; Cellular component=cytoplasm; Biological process=amino acid biosynthetic process
  Homolog annotation: Hit_ID=A4XP61; Match level="QueryCoverage=98%, HitCoverage=15%, E-value=4e-27, Identity=92%"; Hit description=N -acetylglutamate synthase

SEQ ID NO: 12130 - protein, 68 aa, Zea mays
  misc_feature (2)..(2): Xaa can be any naturally occurring amino acid
  Coding DNA Sequence Number=SeqID_5502
  Homolog annotation: Hit_ID=Q3K972; Match level="QueryCoverage=98%, HitCoverage=11%, E-value=2e-28, Identity=89%"; Hit description =Putative uncharacterized protein precursor
MXHVLDPIHGRVERWYLPGSHSLNFLLENALGGGGIASLRIDPQGKAFAQQLLEIPIAVPQHIADQFT

SEQ ID NO: 12131 - protein, 68 aa, Zea mays; identical to SEQ ID NO: 12130
  misc_feature (2)..(2): Xaa can be any naturally occurring amino acid
  Coding DNA Sequence Number=SeqID_5503
  Homolog annotation: Hit_ID=Q3K972; Match level="QueryCoverage=98%, HitCoverage=11%, E-value=2e-28, Identity=89%"; Hit description =Putative uncharacterized protein precursor

SEQ ID NO: 12132 - protein, 286 aa, Zea mays
  misc_feature (241)..(241): Xaa can be any naturally occurring amino acid
  misc_feature (264)..(265): Xaa can be any naturally occurring amino acid
  misc_feature (267)..(278): Xaa can be any naturally occurring amino acid
  misc_feature (281)..(284): Xaa can be any naturally occurring amino acid
  Coding DNA Sequence Number=SeqID_5504
  Gene Ontology: Mol. function=transcription factor activity; Biological process=regulation of transcription, DNA-dependent
  Homolog annotation: Hit_ID=Q4KFU6; Match level="QueryCoverage=91%, HitCoverage=81%, E-value=1e-113, Identity=77%"; Hit description =Transcriptional regulator, LysR family
  Pfam annotation: Domain name=HTH_1; Domain location=15-74; Score =73.7; E_value=5.9e-19; Accession=PF00126.17; Description=Bacterial regulatory helix-turn-helix protein, lysR family
  Pfam annotation: Domain name=LysR_substrate; Domain location=98-282; Score=64.6; E_value=3.4e-16; Accession=PF03466.10; Description=LysR substrate binding domain
  Pfam annotation: Domain name=Sigma70_r4_2; Domain location=2-55; Score=8.1; E_value=0.098; Accession=PF08281.2; Description=Sigma-70, region 4
  Pfam module annotation: Pfam domain module=HTH_1::LysR_substrate::Sigm a70_r4_2; Domain location=15-74::98-282::2-55
MDLCVMSINLPLPLLGEMAIFVKVVETGSFSEAARQLGASPSSVSRSISRLEKALATRLLQRTTRKLRLSEGGEEVFKRCQEMVSAARSVMEISGQYTHEAEGLVRVSVPKAVGRFVVHPHMPEFLRRYPKVDVQLILEDRHVDLIDDNVDLSIRITDSPPPGLVGRQLLPIEHLICATPHYLAEHGAPQDPHDLLEHSCIYLGETPGDARWKFRQGSKAVTVGVRGRYAANHTGVRLDAXLQHVGIGSLPYFTARHALEAGEXXQXXXXXXXXXXXXGDXXXXHY

SEQ ID NO: 12133 - protein, 78 aa, Zea mays
  Coding DNA Sequence Number=SeqID_5505
  Gene Ontology: Mol. function=transcription factor activity; Cellular component=cytoplasm; Biological process=regulation of transcription, DNA-dependent
  Homolog annotation: Hit_ID=A8TN53; Match level="QueryCoverage=100%, HitCoverage=25%, E-value=3e-23, Identity=71%"; Hit description =Transcriptional regulator, LysR family protein
  Pfam annotation: Domain name=HTH_1; Domain location=7-66; Score=76.6; E_value=8.3e-20; Accession=PF00126.17; Description=Bacterial regulatory helix-turn-helix protein, lysR family
MRRLPPLGALRAFEAAARHLSFTRAAAELCVTQAAISHQVRALEQWLGRELFVRRGHALALTHKGQAYLDELSLAFDR

SEQ ID NO: 12134 - protein, 78 aa, Zea mays; identical to SEQ ID NO: 12133
  Coding DNA Sequence Number=SeqID_5506
  Gene Ontology: Mol. function=transcription factor activity; Cellular component=cytoplasm; Biological process=regulation of transcription, DNA-dependent
  Homolog annotation: Hit_ID=A8TN53; Match level="QueryCoverage=100%, HitCoverage=25%, E-value=3e-23, Identity=71%"; Hit description =Transcriptional regulator, LysR family protein
  Pfam annotation: Domain name=HTH_1; Domain location=7-66; Score=76.6; E_value=8.3e-20; Accession=PF00126.17; Description=Bacterial regulatory helix-turn-helix protein, lysR family

SEQ ID NO: 12135 - protein, 185 aa, Zea mays
  misc_feature (146)..(152): Xaa can be any naturally occurring amino acid
  misc_feature (154)..(154): Xaa can be any naturally occurring amino acid
  misc_feature (162)..(162): Xaa can be any naturally occurring amino acid
  misc_feature (168)..(173): Xaa can be any naturally occurring amino acid
  misc_feature (178)..(182): Xaa can be any naturally occurring amino acid
  Coding DNA Sequence Number=SeqID_5507
  Gene Ontology: Mol. function=transporter activity; Cellular component= integral to membrane; Biological process=transport
  Homolog annotation: Hit_ID=Q3KAV7; Match level="QueryCoverage=95%, HitCoverage=32%, E-value=2e-67, Identity=76%"; Hit description =General substrate transporter
MSEHAQPLDPALGARSSNDTQKVIFASSLGTVFEWYDFFLYGALAAVISKQFFAGVNDTTAFIFALMAFAAGFVVRPFGALVFGRLGDMIGRKYTFLATIILMGLATFCVGLLPTYSSIGIAAPIILVALRMLQGLALGGEYGGAXXXXXXXAXAGKRGFHXSWIQSXXXXXXLLSLXXXXXIKF

SEQ ID NO: 12136 - protein, 52 aa, Zea mays
  misc_feature (52)..(52): Xaa can be any naturally occurring amino acid
  Coding DNA Sequence Number=SeqID_5508
  Gene Ontology: Mol. function=acyl-CoA thioesterase activity; Cellular component=peroxisome; Biological process=acyl-CoA metabolic process
  Homolog annotation: Hit_ID=Q3K6F1; Match level="QueryCoverage=98%, HitCoverage=17%, E-value=5e-21, Identity=96%"; Hit description =Palmitoyl-CoA hydrolase
SQDLGFRQLFGGQVLGQSLSAASQTVEEARHVHSLHGYFLRPGDAALPVVYX

SEQ ID NO: 12137 - protein, 52 aa, Zea mays; identical to SEQ ID NO: 12136
  misc_feature (52)..(52): Xaa can be any naturally occurring amino acid
  Coding DNA Sequence Number=SeqID_5509
  Gene Ontology: Mol. function=acyl-CoA thioesterase activity; Cellular component=peroxisome; Biological process=acyl-CoA metabolic process
  Homolog annotation: Hit_ID=Q3K6F1; Match level="QueryCoverage=98%, HitCoverage=17%, E-value=5e-21, Identity=96%"; Hit description =Palmitoyl-CoA hydrolase

SEQ ID NO: 12138 - protein, 114 aa, Zea mays
  Coding DNA Sequence Number=SeqID_5510
  Gene Ontology: Mol. function=ribokinase activity; Cellular component =cytosol; Biological process=D-ribose metabolic process
  Homolog annotation: Hit_ID=Q4ZMV5; Match level="QueryCoverage=98%, HitCoverage=36%, E-value=2e-40, Identity=75%"; Hit description =Carbohydrate kinase, PfkB
DLRECTLIVLQLEINLPTVYYAIEFAHRHGIAVLLNPAPALAGLSAEHLAQLDFLVPNESELALITGKTVDSPDSARAAARTLVASGIRHVIVTLGEHGALYVGEEGEFEVPGQ

SEQ ID NO: 12139 - protein, 243 aa, Zea mays
  misc_feature (216)..(216): Xaa can be any naturally occurring amino acid
  misc_feature (224)..(231): Xaa can be any naturally occurring amino acid
  misc_feature (234)..(242): Xaa can be any naturally occurring amino acid
  Coding DNA Sequence Number=SeqID_5511
  Gene Ontology: Mol. function=hydrolase activity, acting on glycosyl bonds; Cellular component=intracellular; Biological process=base -excision repair
  Homolog annotation: Hit_ID=Q4K7R7; Match level="QueryCoverage=91%, HitCoverage=78%, E-value=1e-70, Identity=62%"; Hit description=DNA-3- methyladenine glycosylase II
  Pfam annotation: Domain name=AlkA_N; Domain location=1-75; Score =16.4; E_value=9.9e-06; Accession=PF06029.2; Description=AlkA N -terminal domain
  Pfam annotation: Domain name=HhH-GPD; Domain location=81-226; Score =51.9; E_value=2.2e-12; Accession=PF00730.15; Description=HhH-GPD superfamily base excision DNA repair protein
  Pfam module annotation: Pfam domain module=AlkA_N::HhH-GPD; Domain location=1-75::81-226
GQQGWLSVSPGAGDWLEVTVDFPNPAALPEIERRLRNMFDLSADPKRINRQLANDPLMASLVAARPGLRVPGTWDGLELAIRAVLGQQITVVAAIKLAGKLVAQYGTPLVTPHAGVTHVFPSAEVLAAADLATLGMPKSRGRTLSGVAQALLDDPQVFQPKASLKEGVARLVALPGIGDWTAQYIAMRQMREQDAFASGDIGLINALVALEGGPVXPRQLLARXXXXXXXXAYXXXXXXXXXF

SEQ ID NO: 12140 - protein, 226 aa, Zea mays
  misc_feature (226)..(226): Xaa can be any naturally occurring amino acid
  Coding DNA Sequence Number=SeqID_5512
  Gene Ontology: Mol. function=lysophospholipase activity; Cellular component=outer membrane; Biological process=lipid metabolic process
  Homolog annotation: Hit_ID=Q4KGC6; Match level="QueryCoverage=99%, HitCoverage=30%, E-value=1e-103, Identity=87%"; Hit description =Patatin-like phospholipase family
  Pfam annotation: Domain name=Patatin; Domain location=30-223; Score =176.3; E_value=7.7e-50; Accession=PF01734.12; Description=Patatin -like phospholipase
MMRRLLSCLLLCLLPVLVQAVENPRPKIGLVLSGGAARGLAHIGVLKALEEQGIHIDAIAGTSMGAVIGGLYASGYKIDELEKLALSIDWRLALSDAPPREDVPFRRKQDDRDFLVKQKLSFRDDGSLGLPLGVIQGQNLALLLESMFAHTSNVRDFDKLPIPFRAVATDITSGEKVVFRKGHLPQVIRASMSIPAVFAPVELDGRLLVDGGMTDNIPLDVAREMX

SEQ ID NO: 12141 - protein, 103 aa, Zea mays
  Coding DNA Sequence Number=SeqID_5513
  Gene Ontology: Mol. function=transporter activity; Cellular component= cell outer membrane; Biological process=transport
  Homolog annotation: Hit_ID=Q2RY00; Match level="QueryCoverage=80%, HitCoverage=11%, E-value=1e-09, Identity=40%"; Hit description=TonB -dependent receptor precursor
  Pfam annotation: Domain name=Plug; Domain location=34-101; Score =10.2; E_value=0.08; Accession=PF07715.5; Description=TonB-dependent Receptor Plug Domain
AAPAAAADSAPVAVTPATAELPPIYVTARKRLENLINVPVSVSVFDGGELQDLRTANVESVLRMTPNVGYSALGDGRSTHLSIRGIGTMAQPLGSDDTSVVAY

SEQ ID NO: 12142 - protein, 103 aa, Zea mays; identical to SEQ ID NO: 12141
  Coding DNA Sequence Number=SeqID_5514
  Gene Ontology: Mol. function=transporter activity; Cellular component= cell outer membrane; Biological process=transport
  Homolog annotation: Hit_ID=Q2RY00; Match level="QueryCoverage=80%, HitCoverage=11%, E-value=1e-09, Identity=40%"; Hit description=TonB -dependent receptor precursor
  Pfam annotation: Domain name=Plug; Domain location=34-101; Score =10.2; E_value=0.08; Accession=PF07715.5; Description=TonB-dependent Receptor Plug Domain

SEQ ID NO: 12143 - protein, 263 aa, Zea mays
  misc_feature (19)..(19): Xaa can be any naturally occurring amino acid
  Coding DNA Sequence Number=SeqID_5515
  Gene Ontology: Mol. function=endopeptidase inhibitor activity; Cellular component=extrachromosomal circular DNA; Biological process= metabolic process
  Homolog annotation: Hit_ID=A3DAI5; Match level="QueryCoverage=92%, HitCoverage=13%, E-value=3e-71, Identity=56%"; Hit description=Alpha- 2-macroglobulin domain protein precursor
  Pfam annotation: Domain name=A2M_N; Domain location=3-250; Score =124.7; E_value=2.8e-34; Accession=PF01835.9; Description=Alpha-2 -macroglobulin family N-terminal region
RPIGRNGLPVASGHTDAEXHAHFAKLDELRREKTPLMYVVSRGNDQSFLPIARQSQQLDLSRFDVGGLEEDGAINRLSAYLFTDRGLYRPGETAHLAMIVRSGDWKGALQGLPVELQITDPRGLEVIRQPLKLSASGFETFDFPSSEVAPSGDYTATLQLIGEKQRRTDLGSVSFKVRDFEPDRMKVSLSLHDTPVLGWIPPDQVVAKVTAMHLFGAPAAGRRVTAKMSLSPTLAAFDRYPDYRFRLNDSLEEASSEDLAETT

SEQ ID NO: 12144 - protein, 179 aa, Zea mays
  Coding DNA Sequence Number=SeqID_5516
  Subcellular localization annotation: CTP_CleavageSite=60; ConfidenceScore=5.74e-01
NAGAHISAPATDTLSNHGHPLSSSSQARLKPACHSSANFVPAGYGLSSRFFPSRNAWLPSCQAAPAAGCSVVIQRALGLGLLDQPHELGFTLNANNLREMSLSSGDQAALRFHVQQAALPTCLELGNDVGDVLQRRNRGMNGETERPPCYRVVECANHANFTEDEPAPVRAGYKHGRLN

SEQ ID NO: 12145 - protein, 179 aa, Zea mays; identical to SEQ ID NO: 12144
  Coding DNA Sequence Number=SeqID_5517
  Subcellular localization annotation: CTP_CleavageSite=60; ConfidenceScore=5.74e-01

SEQ ID NO: 12146 - protein, 120 aa, Zea mays
  misc_feature (120)..(120): Xaa can be any naturally occurring amino acid
  Coding DNA Sequence Number=SeqID_5518
  Gene Ontology: Mol. function=monooxygenase activity
  Homolog annotation: Hit_ID=Q4KK44; Match level="QueryCoverage=97%, HitCoverage=25%, E-value=2e-61, Identity=98%"; Hit description =Monooxygenase, NtaA/SnaA/SoxA family
MAKKKILLNAFNMNCIGHINHGLWTHPRDTSTQYKTLEYWTELAQLLERGLFDGLFIADIVGVYDVYQNSVDVPLKESIQLPVNDPLLLVSAMAAVTKNLGFGLTANLTYEPPYLFARRX

SEQ ID NO: 12147 - protein, 209 aa, Zea mays
  misc_feature (6)..(9): Xaa can be any naturally occurring amino acid
  misc_feature (11)..(12): Xaa can be any naturally occurring amino acid
  Coding DNA Sequence Number=SeqID_5519
  Gene Ontology: Mol. function=amino-acid N-acetyltransferase activity; Cellular component=cytoplasm; Biological process=amino acid biosynthetic process
  Homolog annotation: Hit_ID=Q3K7U0; Match level="QueryCoverage=99%, HitCoverage=51%, E-value=1e-103, Identity=91%"; Hit description =Arginine biosynthesis bifunctional protein argJ [Includes: Glutamate N-acetyltransferase ...
  Homolog annotation: Hit description=(EC 2.3.1.35) (Ornithine acetyltransferase) (Ornithine transacetylase) (OATase); Amino-acid acetyltransferase (EC 2.3.1.1) (N-acetylglutamate synthase) (AGS)] [Contains: Arginine ...
  Homolog annotation: Hit description=biosynthesis bifunctional protein argJ alpha chain; Arginine biosynthesis bifunctional protein argJ beta chain]
  Pfam annotation: Domain name=ArgJ; Domain location=2-209; Score=23.3; E_value=2.8e-18; Accession=PF01960.9; Description=ArgJ family
MPKVSXXXXQXXMLDGANKSFNRITIDGDTSTNDCCMLIATGQADLPEITSSNGAYFAALKQAVFEVCMDVAQAIVRDGEGATKFVTVEVNGGGNHQECLDVGYTVAHSPLIKTALFASDPNWGRILAAVGRAGVPNLDVSKIDVFLGEVCIASRGARAETYTEAQGSAVMQQEEITIRIELGRGECSETIWTTDLSHEYVKINAEYRT

SEQ ID NO: 12148 - protein, 76 aa, Zea mays
  Coding DNA Sequence Number=SeqID_5520
  Gene Ontology: Mol. function=transposase activity; Biological process= transposition, DNA-mediated
  Homolog annotation: Hit_ID=Q9F130; Match level="QueryCoverage=100%, HitCoverage=50%, E-value=2e-28, Identity=81%"; Hit description =Transposase subunit
LHDGTRNPGVFWCREKRGPEEPQNHALGRSRGGLATKIHMLCDANGVPLNFLLSGGQASDITYAQPLLDNAYIPRL

SEQ ID NO: 12149 - protein, 76 aa, Zea mays; identical to SEQ ID NO: 12148
  Coding DNA Sequence Number=SeqID_5521
  Gene Ontology: Mol. function=transposase activity; Biological process= transposition, DNA-mediated
  Homolog annotation: Hit_ID=Q9F130; Match level="QueryCoverage=100%, HitCoverage=50%, E-value=2e-28, Identity=81%"; Hit description =Transposase subunit

SEQ ID NO: 12150 - protein, 95 aa, Zea mays
  Coding DNA Sequence Number=SeqID_5522
  Homolog annotation: Hit_ID=Q3KFB1; Match level="QueryCoverage=100%, HitCoverage=24%, E-value=1e-47, Identity=96%"; Hit description =Putative uncharacterized protein
TALGFGMSAREMDLDYQPFPLSTLYDPEHPGGTAFLSFVNAWIELAGMLNELSRSMGQPDFYPFVLPPAVIAKLHFIHLVIQQEGGRADEVLQAQ

SEQ ID NO: 12151 - protein, 143 aa, Zea mays
  misc_feature (112)..(112): Xaa can be any naturally occurring amino acid
  misc_feature (118)..(119): Xaa can be any naturally occurring amino acid
  misc_feature (121)..(123): Xaa can be any naturally occurring amino acid
  misc_feature (125)..(125): Xaa can be any naturally occurring amino acid
  misc_feature (129)..(143): Xaa can be any naturally occurring amino acid
  Coding DNA Sequence Number=SeqID_5523
  Gene Ontology: Mol. function=transporter activity; Cellular component= membrane; Biological process=transport
  Homolog annotation: Hit_ID=Q3KIS1; Match level="QueryCoverage=89%, HitCoverage=38%, E-value=1e-36, Identity=62%"; Hit description =Transport system permease protein precursor
  Pfam annotation: Domain name=FecCD; Domain location=16-134; Score= -194.0; E_value=0.015; Accession=PF01032.9; Description=FecCD transport family
MITRRYALLLSALGALLLISCVVSLGFGSARVPVDVVWRILLHKAFGMGEVDWSAGQEHIVWLIRVPRMLLGALVGAGLALIGAVLQAVTRNPLADPHLLGVTSGATLGAVXVVLHVXXVXXXLXLPIXXXXXXXXXXXXXXX

SEQ ID NO: 12152 - protein, 249 aa, Zea mays
  misc_feature (6)..(7): Xaa can be any naturally occurring amino acid
  misc_feature (9)..(15): Xaa can be any naturally occurring amino acid
  misc_feature (17)..(19): Xaa can be any naturally occurring amino acid
  misc_feature (21)..(23): Xaa can be any naturally occurring amino acid
  misc_feature (249)..(249): Xaa can be any naturally occurring amino acid
  Coding DNA Sequence Number=SeqID_5524
  Gene Ontology: Mol. function=transporter activity; Cellular component= integral to membrane; Biological process=transport
  Homolog annotation: Hit_ID=Q4K5P9; Match level="QueryCoverage=93%, HitCoverage=56%, E-value=1e-98, Identity=81%"; Hit description =Transporter, putative
AEALIXXVXXXXXXXHXXXRXXXRKVAAICQTVQALIALSLAIGGLTGNVTREMIFILAFLLGAARSFEMPTTQALLPSIVPTALFPRAVASSQSAQQLATIVAPALGGLLYAFGSVWVYGPTVVLYLIACVLTLNLPARQTPLNKAKATMDSLLAGIRFIRSRPDILGAISLDLFAVLLGGATALLPVFAKDILLTGPWGLGLLRSAPAVGALLMSLWLARFAVDRHVGRIMFTAVGVFGVATIAFGX

SEQ ID NO: 12153 - protein, 61 aa, Zea mays
  Coding DNA Sequence Number=SeqID_5525
  Gene Ontology: Mol. function=L-serine ammonia-lyase activity; Biological process=gluconeogenesis
  Homolog annotation: Hit_ID=Q3KHU3; Match level="QueryCoverage=98%, HitCoverage=13%, E-value=7e-27, Identity=98%"; Hit description=L -serine ammonia-lyase
LSAMEWVNLFALAVNEENAAGGRMVTAPTNGAAGIIPAVLHYYMKFNPDASDDDVVNFFLA

SEQ ID NO: 12154 - protein, 61 aa, Zea mays; identical to SEQ ID NO: 12153
  Coding DNA Sequence Number=SeqID_5526
  Gene Ontology: Mol. function=L-serine ammonia-lyase activity; Biological process=gluconeogenesis
  Homolog annotation: Hit_ID=Q3KHU3; Match level="QueryCoverage=98%, HitCoverage=13%, E-value=7e-27, Identity=98%"; Hit description=L -serine ammonia-lyase

SEQ ID NO: 12155 - protein, 265 aa, Zea mays
  misc_feature (253)..(254): Xaa can be any naturally occurring amino acid
  misc_feature (261)..(261): Xaa can be any naturally occurring amino acid
  misc_feature (265)..(265): Xaa can be any naturally occurring amino acid
  Coding DNA Sequence Number=SeqID_5527
  Gene Ontology: Mol. function=ribonuclease activity
  Homolog annotation: Hit_ID=A9I1V4; Match level="QueryCoverage=99%, HitCoverage=41%, E-value=1e-120, Identity=80%"; Hit description=Rnb protein
  Pfam annotation: Domain name=RNB; Domain location=1-219; Score=46.5; E_value=3e-15; Accession=PF00773.9; Description=RNB-like protein
VYMPGDKIPMQPDNVIKAFSLDAGREVPVLSLYVTANPETGEVIESDTRLERVVVRENLRHNMLDAQVTEESLNDTSTDMPYGHWLRPLWKLAQALSAQRENVRGKPENNSRVEYSFYLDGDPDDPDTPVRLVPRQRNAPLDRMVAEYMILANNLWGGLLNQHGVPGIYRSQQAGRVRMSTQALPHEAIGVPQYAWSTSPLRRYVDLVNQWQLIAAVEHGVSARLVAPFKPRDADLFAIIGAFDAQYAAWAEXXSAMERYXCLRX

SEQ ID NO: 12156 - protein, 192 aa, Zea mays
  misc_feature (171)..(176): Xaa can be any naturally occurring amino acid
  misc_feature (184)..(186): Xaa can be any naturally occurring amino acid
  misc_feature (189)..(191): Xaa can be any naturally occurring amino acid
  Coding DNA Sequence Number=SeqID_5528
  Gene Ontology: Mol. function=transporter activity; Cellular component= integral to membrane; Biological process=transport
  Homolog annotation: Hit_ID=Q4KIS8; Match level="QueryCoverage=97%, HitCoverage=45%, E-value=2e-79, Identity=78%"; Hit description =Multidrug resistance transporter, Bcr/CflA family
  Pfam annotation: Domain name=MFS_1; Domain location=9-192; Score= -20.2; E_value=0.088; Accession=PF07690.6; Description=Major Facilitator Superfamily
MNLRIILILGALSAFAPLAIDFYLPGFPAMAVAFGTDEKHIQLTLAVYFTGLAIGQLIYGPLADRFGRRGPLLSGVTLFTLASFACAYAPSLEWLIGARFVQALGGCAGMVISRAVVSDKCDAVGSAKVFSQLMLVTGLAPILAPLAGGVMVGIWGWQSIFLALTAFSVMXXXXXXVGLPESFXXXQPXXXP

SEQ ID NO: 12157 - protein, 98 aa, Zea mays
  Coding DNA Sequence Number=SeqID_5529
  Gene Ontology: Mol. function=exonuclease activity
  Homolog annotation: Hit_ID=Q5H1P1; Match level="QueryCoverage=97%, HitCoverage=26%, E-value=1e-33, Identity=72%"; Hit description=MRNA 3'-end processing factor
MADIVQLRPEGLYCAAGGFYIDPWCPVDVAVLTHGHGDHARVGMGCYHTSAEGLPILQWRLREQDYRVHAYGEPFTLGRARVSLHSAGHVLGSAQVRI

SEQ ID NO: 12158 - protein, 60 aa, Zea mays
  misc_feature (60)..(60): Xaa can be any naturally occurring amino acid
  Coding DNA Sequence Number=SeqID_5530
  Gene Ontology: Mol. function=oxidoreductase activity; Biological process=metabolic process
  Homolog annotation: Hit_ID=Q3KDE4; Match level="QueryCoverage=98%, HitCoverage=24%, E-value=1e-20, Identity=89%"; Hit description=Short- chain dehydrogenase/reductase SDR
RLIAAKGAQVVLGARRTERLDKLVREIQAEGGSASASALDVTDLESMQAFVAFAKAQHGX

SEQ ID NO: 12159 - protein, 60 aa, Zea mays; identical to SEQ ID NO: 12158
  misc_feature (60)..(60): Xaa can be any naturally occurring amino acid
  Coding DNA Sequence Number=SeqID_5531
  Gene Ontology: Mol. function=oxidoreductase activity; Biological process=metabolic process
  Homolog annotation: Hit_ID=Q3KDE4; Match level="QueryCoverage=98%, HitCoverage=24%, E-value=1e-20, Identity=89%"; Hit description=Short- chain dehydrogenase/reductase SDR

SEQ ID NO: 12160 - protein, 220 aa, Zea mays
  misc_feature (191)..(193): Xaa can be any naturally occurring amino acid
  misc_feature (196)..(198): Xaa can be any naturally occurring amino acid
  misc_feature (202)..(203): Xaa can be any naturally occurring amino acid
  misc_feature (206)..(207): Xaa can be any naturally occurring amino acid
  misc_feature (209)..(219): Xaa can be any naturally occurring amino acid
  Coding DNA Sequence Number=SeqID_5532
  Gene Ontology: Mol. function=glutamate-ammonia ligase activity; Biological process=nitrogen compound metabolic process
  Homolog annotation: Hit_ID=A1FDE9; Match level="QueryCoverage=89%, HitCoverage=43%, E-value=1e-101, Identity=89%"; Hit description =Glutamate--ammonia ligase
MDVRKHSPEAFMSNNLDQLTDWLKDHKITEVECMIGDLTGITRGKISPTNKFIAEKGMRLPESVLLQTVTGDYVEDDIYYELLDPADIDMICRPDENAVYLVPWAIEPTAQVIHDTYDKQGNPIELSPRNVLKKVLKLYADKGWQPIVAPEMEFYLTKRCEDPDFPLQPPIGRSGRPETGRQSFSIEAANXXXPLXXXVYDXXELXXLXXXXXXXXXXXK

SEQ ID NO: 12161 - protein, 89 aa, Zea mays
  misc_feature (83)..(89): Xaa can be any naturally occurring amino acid
  Coding DNA Sequence Number=SeqID_5533
VNWVFRATVMAIPLSELANVIFCYYCVLSTDFQAIPALFQLVAHTLNSRQHLRLGQQRIRKLVFLQLNQAVTHFSTQFTTDLXXXXXXX

SEQ ID NO: 12162 - protein, 268 aa, Zea mays
  misc_feature (205)..(205): Xaa can be any naturally occurring amino acid
  misc_feature (252)..(253): Xaa can be any naturally occurring amino acid
  Coding DNA Sequence Number=SeqID_5535
  Homolog annotation: Hit_ID=Q4KKE8; Match level="QueryCoverage=100%, HitCoverage=77%, E-value=1e-145, Identity=94%"; Hit description=ABC transporter, periplasmic binding protein
  Pfam annotation: Domain name=NMT1; Domain location=1-199; Score= -74.5; E_value=0.0062; Accession=PF09084.1; Description=NMT1THI5 like
WTQLSGGAAVNDALLSGSIDIAGAGVGPLLTIWDRTHGKQNVKAVASLGNFPYYLVSNNPKVKTIADFTEKDRIAVPAVGVSVQSRFLQYAAAKQWGDKEFNRLDKYTVAVPHPDATAALIAGGTELTGHFSNPPFQEQALTNPNVHVVLNSYDILGPNSPTVLFATEKFRNDNPKTYKAFVEALTEAAQFAQNDKGAAADTYIXVTKAKIDRAELLKIIENPQFEFSVTPKNTYPLAEFLYRVGAIKNKPXXWKDYFFQDTKPLQGS

SEQ ID NO: 12163 - protein, 107 aa, Zea mays
  misc_feature (107)..(107): Xaa can be any naturally occurring amino acid
  Coding DNA Sequence Number=SeqID_5536
  Gene Ontology: Mol. function=metallopeptidase activity; Cellular component=extracellular region; Biological process=proteolysis
  Homolog annotation: Hit_ID=Q3KIR7; Match level="QueryCoverage=98%, HitCoverage=22%, E-value=1e-47, Identity=80%"; Hit description =Membrane protein, putative
LFWRDLHAVAGFWGAAFLLVMLLSGMTWTGFWGKQYAELWNKFPAAMWNNVPQSDQQARSLNTASQQTVPWAMENTPMPMSGEHAEHMKHAGMSQGPAAPSIRLQQX

SEQ ID NO: 12164 - protein, 282 aa, Zea mays
  misc_feature (246)..(247): Xaa can be any naturally occurring amino acid
  misc_feature (254)..(254): Xaa can be any naturally occurring amino acid
  misc_feature (260)..(264): Xaa can be any naturally occurring amino acid
  misc_feature (267)..(278): Xaa can be any naturally occurring amino acid
  Coding DNA Sequence Number=SeqID_5537
  Gene Ontology: Mol. function=transferase activity, transferring phosphorus-containing groups; Cellular component=integral to membrane; Biological process=two-component signal transduction system (phosphorelay)
  Homolog annotation: Hit_ID=Q4K8D2; Match level="QueryCoverage=91%, HitCoverage=22%, E-value=1e-131, Identity=93%"; Hit description =Sensor protein
  Pfam annotation: Domain name=HisKA; Domain location=193-260; Score =44.5; E_value=3.7e-10; Accession=PF00512.15; Description=His Kinase A (phosphoacceptor) domain
  Pfam annotation: Domain name=PAS; Domain location=33-135; Score=12.0; E_value=0.031; Accession=PF00989.14; Description=PAS domain
  Pfam annotation: Domain name=PAS_4; Domain location=39-150; Score =13.8; E_value=0.0092; Accession=PF08448.1; Description=PAS fold
  Pfam module annotation: Pfam domain module=HisKA::PAS::PAS_4; Domain location=193-260::33-135::39-150
AVVKAAIEGREMQLEDVVRIADEASEVLQFNRALLQGAIENITQGISVVDQSLRLVAWNRRYLELFNYPEGLISVGRPIADIIRYNAERGLCGPGEAEVHVARRLHWMRQGRAHTSERLFPNGRVIELIGNPMPGGGFVMSFTDITAFREAEQALTEANEGLEQRVTERTHELSQLNVALTDAKGVAETASQSKTRFLAAVSHDLMQPLNAARLFSAALSHQNDGMSPDARQLVQHLDSSLRSAEXXISDLLDXSRLENXXXXXQRXXXXXXXXXXXXGGKG

SEQ ID NO: 12165 - protein, 289 aa, Zea mays
  misc_feature (285)..(289): Xaa can be any naturally occurring amino acid
  Coding DNA Sequence Number=SeqID_5538
  Homolog annotation: Hit_ID=Q3KIL0; Match level="QueryCoverage=98%, HitCoverage=50%, E-value=1e-109, Identity=69%"; Hit description =Putative uncharacterized protein precursor
KLAAKLLGERPLTRKTFERYTTLMGRIPGVTLQAQVPPPGTTDGGTHMQIQASRKPFTTSMSLDEDNRSGTQALLAATSNSQTSMGEQLSLSGLFPPGKDDEHYYRLGYSQFINAEGSQLVLNAERYRADPNSNVQLDGGFELKPHQAIDRYSIGLSHPLIASPTESLTLGTRLYAVDQTTRYQLVGYPLRFDVETDLRALAFEGDWRKSDDRQLRILSAGLYQGINGLGARTHSDIEGTQPDLEFFRLRLSGVQSNKFFDHWQGVASGAFYWSNDTLPDSERAXXXXX

SEQ ID NO: 12166 - protein, 287 aa, Zea mays
  misc_feature (261)..(262): Xaa can be any naturally occurring amino acid
  misc_feature (274)..(276): Xaa can be any naturally occurring amino acid
  misc_feature (279)..(282): Xaa can be any naturally occurring amino acid
  misc_feature (286)..(286): Xaa can be any naturally occurring amino acid
  Coding DNA Sequence Number=SeqID_5539
  Gene Ontology: Mol. function=4 iron, 4 sulfur cluster binding; Cellular component=formate dehydrogenase complex; Biological process= electron transport
  Homolog annotation: Hit_ID=Q3KJN3; Match level="QueryCoverage=98%, HitCoverage=36%, E-value=1e-145, Identity=86%"; Hit description =Oxidoreductase alpha (Molybdopterin) subunit
  Pfam annotation: Domain name=Molybdopterin; Domain location=24-273; Score=-96.4; E_value=0.0015; Accession=PF00384.12; Description =Molybdopterin oxidoreductase
AFFAKHSVSALLEQSDYWLEYQGRLTEPMSYDAETDRYKPISWESAFDLIGKHLNALPNPDMAEFYTSGRASNEAAYLYQLFVRAYGTNNFPDCSNMCHEASGVALAQSVGVGKGTVTFDDFEHADAIFVWGQNPGTNHPRMLEPLREAVKRGAQVVCINPLKERGLERFQHPQHPLEMLTNGDKPTNTAYFRPALGGDMAILRGMAKFLLLWERQAQAEGKEAVFDHDFLNEHTANVLDYLGKIDDTSWDEIVEQSGLTXXEIEQAARMYAKXXXVIXXXXMGIXI

SEQ ID NO: 12167 - protein, 208 aa, Zea mays
  misc_feature (5)..(6): Xaa can be any naturally occurring amino acid
  misc_feature (8)..(10): Xaa can be any naturally occurring amino acid
  misc_feature (39)..(39): Xaa can be any naturally occurring amino acid
  Coding DNA Sequence Number=SeqID_5540
  Gene Ontology: Mol. function=ATPase activity, coupled to transmembrane movement of substances; Cellular component=membrane; Biological process=transport
  Homolog annotation: Hit_ID=Q2L0U6; Match level="QueryCoverage=97%, HitCoverage=53%, E-value=2e-78, Identity=75%"; Hit description=ABC transporter, permease protein precursor
  Pfam annotation: Domain name=ABC2_membrane; Domain location=1-170; Score=42.2; E_value=1.9e-09; Accession=PF01061.14; Description=ABC-2 type transporter
KKGGXXQXXXGSLMEIINNVTMLSIILTGAALIREREHXTIEHLLVMPVTPTEIMLAKVWSMGLVVLVSAALSLTFVVRGLLQVPVEGSVALFLAGVALHLFATTSMGIFMATLARSMPQFGMLLVLVLLPLQMLSGGTTPRESMPDFVQNIMLAAPTTHFVELGQAILFRGAGLSVVWQPFLALALIGSVLFAFSLTRFRKTLSQMA

SEQ ID NO: 12168 - protein, 270 aa, Zea mays
  misc_feature (241)..(241): Xaa can be any naturally occurring amino acid
  misc_feature (246)..(247): Xaa can be any naturally occurring amino acid
  misc_feature (249)..(250): Xaa can be any naturally occurring amino acid
  misc_feature (254)..(254): Xaa can be any naturally occurring amino acid
  misc_feature (259)..(261): Xaa can be any naturally occurring amino acid
  misc_feature (266)..(266): Xaa can be any naturally occurring amino acid
  Coding DNA Sequence Number=SeqID_5541
  Gene Ontology: Mol. function=DNA binding; Cellular component =cytoplasm; Biological process=DNA recombination
  Homolog annotation: Hit_ID=Q3KCC4; Match level="QueryCoverage=94%, HitCoverage=86%, E-value=1e-117, Identity=83%"; Hit description =Phage integrase
SPLTESTRNPLTLYLTRLAPSSQLTMRYVLQDAADRLGFEDINLEDIDWHLLQPEHVMALVAALREDGYAPNTSSLYVNAVRGVMNEAWRMSLISQDHLLKMRSVKAMAGTRLSQGRNLRRTLIRELMEVCAADPRPQGLRDAAVIGILYGSGMRKSESVNIELGQVNFDERSLQVTGKGNKQLIKYAPAWAFAKLEAWLEFRRSQLKPGEQDDRFLFNRIRRGSHITRERITKHAIYYIXRQRGXXVXXKIMXHDFRXXXITRVXPKPW

SEQ ID NO: 12169 - protein, 56 aa, Zea mays
  Coding DNA Sequence Number=SeqID_5542
  Gene Ontology: Mol. function=FAD binding; Cellular component =cytoplasm; Biological process=tRNA processing
  Homolog annotation: Hit_ID=Q7WRF1; Match level="QueryCoverage=100%, HitCoverage=8%, E-value=2e-23, Identity=98%"; Hit description=tRNA uridine 5-carboxymethylaminomethyl modification enzyme gidA
YDAVTSLSFEVRQKLKTHRPETIGQAARISGVTPAAISLLLIHLKRLHYGSRKQAA

SEQ ID NO: 12170 - protein, 56 aa, Zea mays; identical to SEQ ID NO: 12169
  Coding DNA Sequence Number=SeqID_5543
  Gene Ontology: Mol. function=FAD binding; Cellular component =cytoplasm; Biological process=tRNA processing
  Homolog annotation: Hit_ID=Q7WRF1; Match level="QueryCoverage=100%, HitCoverage=8%, E-value=2e-23, Identity=98%"; Hit description=tRNA uridine 5-carboxymethylaminomethyl modification enzyme gidA

SEQ ID NO: 12171 - protein, 199 aa, Zea mays
  Coding DNA Sequence Number=SeqID_5544
  Gene Ontology: Mol. function=protein-glutamate methylesterase activity; Cellular component=cytoplasm; Biological process=two -component signal transduction system (phosphorelay)
  Homolog annotation: Hit_ID=Q2KV65; Match level="QueryCoverage=100%, HitCoverage=57%, E-value=1e-55, Identity=57%"; Hit description =Chemotaxis response regulator protein-glutamate methylesterase 1
  Pfam annotation: Domain name=CheB_methylest; Domain location=74-199; Score=26.2; E_value=3e-13; Accession=PF01339.8; Description=CheB methylesterase
VARHTARVFDAMGYGALDAADTPVVGSADLRSAAAPLLRKIRNIGWLIGRYGSNRTALSPVARTAPQADPSQGLLVIGASAGGPSTLAQLLRDIPLSFPAGIVLVQHVDASFAAGMADWLNDQIALPVRLVREGERPAPGQVLLAGTDDHLHLLADGTLRYTENPKESLYRPSIDVFFHSVAQHWRGLVVGVLLTGMGQ

SEQ ID NO: 12172 - protein, 93 aa, Zea mays
  misc_feature (5)..(7): Xaa can be any naturally occurring amino acid
  Coding DNA Sequence Number=SeqID_5545
  Gene Ontology: Mol. function=hydrolase activity, acting on carbon -nitrogen (but not peptide) bonds; Cellular component=cellular _component; Biological process=nitrogen compound metabolic process
  Homolog annotation: Hit_ID=Q3KI19; Match level="QueryCoverage=92%, HitCoverage=30%, E-value=3e-40, Identity=95%"; Hit description =Nitrilase/cyanide hydratase and apolipoprotein N-acyltransferase
VREIXXXVADARGRYRESDDYAHGSQVVVADTPVGRLGLTVCYDLRFPELYSELRAAGAELITAPSAFTAVTGAAHWDVLIRARAIETQCYLL

SEQ ID NO: 12173 - protein, 164 aa, Zea mays
  Coding DNA Sequence Number=SeqID_5546
  Gene Ontology: Mol. function=transcription factor activity; Biological process=regulation of transcription, DNA-dependent
  Homolog annotation: Hit_ID=A1FCU8; Match level="QueryCoverage=81%, HitCoverage=43%, E-value=2e-59, Identity=87%"; Hit description =Transcriptional regulator, LysR family
  Pfam annotation: Domain name=HTH_1; Domain location=37-96; Score =84.8; E_value=2.8e-22; Accession=PF00126.17; Description=Bacterial regulatory helix-turn-helix protein, lysR family
MSCASIGRIPGCGSQIKLAAIRTTGRGNSMQVDRANLADFVLFLAIARHKSFSRAGQEVGISASALSHAIKGLETRLGVRLLNRTTRSVTLTAAGEELHSVISVPMDEIGQAMEALNRFRDEPTGRIRLNTLSDAADLLLGPVLPVFNDRYPEIQIDLTVTNLI

SEQ ID NO: 12174 - protein, 105 aa, Zea mays
  Coding DNA Sequence Number=SeqID_5547
  Gene Ontology: Mol. function=transcription factor activity; Biological process=regulation of transcription, DNA-dependent
  Homolog annotation: Hit_ID=Q3KC50; Match level="QueryCoverage=100%, HitCoverage=35%, E-value=7e-36, Identity=74%"; Hit description =Transcriptional regulator, LysR family
  Pfam annotation: Domain name=HTH_1; Domain location=2-30; Score=17.1; E_value=0.023; Accession=PF00126.17; Description=Bacterial regulatory helix-turn-helix protein, lysR family
SIALKRLETRLGIRLLARSTRSMRLTEEGRRYLDSVRVALEALSEGEQAIKQQGQSLSGLLQLAAPSDFGRNVLLGWLDEFKLEHPNVRLQLLLNDSNADLFRET

SEQ ID NO: 12175 - protein, 51 aa, Zea mays
  Coding DNA Sequence Number=SeqID_5548
  Gene Ontology: Mol. function=transporter activity; Cellular component= integral to membrane; Biological process=transport
  Homolog annotation: Hit_ID=Q3K827; Match level="QueryCoverage=100%, HitCoverage=10%, E-value=3e-16, Identity=82%"; Hit description =General substrate transporter
VFSSLLIGVILEHLGTPGVLAFIASSMLIVMITISWFGPRTRNLALENIAH

SEQ ID NO: 12176 - protein, 51 aa, Zea mays; identical to SEQ ID NO: 12175
  Coding DNA Sequence Number=SeqID_5549
  Gene Ontology: Mol. function=transporter activity; Cellular component= integral to membrane; Biological process=transport
  Homolog annotation: Hit_ID=Q3K827; Match level="QueryCoverage=100%, HitCoverage=10%, E-value=3e-16, Identity=82%"; Hit description =General substrate transporter

SEQ ID NO: 12177 - protein, 266 aa, Zea mays
  misc_feature (1)..(1): Xaa can be any naturally occurring amino acid
  misc_feature (257)..(259): Xaa can be any naturally occurring amino acid
  misc_feature (262)..(266): Xaa can be any naturally occurring amino acid
  Coding DNA Sequence Number=SeqID_5550
  Homolog annotation: Hit_ID=Q3KGH0; Match level="QueryCoverage=95%, HitCoverage=61%, E-value=1e-110, Identity=75%"; Hit description =Putative uncharacterized protein precursor
XDYHVKLLPQSDQAEVRLSLSQGSAVRSLNFDLGRDGDYSDFKADGQWQVMPGNTPGASRGLWQPSADKASLTYRVRLTHARKKGVYEARMTPSWALFRGEDLVPTARLDQQDGIELVSRLVFELPAGWKSVETSWPRIGKNKFRIDNVSRLFDRPTGWMLAGTLGSRRMRLGETEITVASPKGQGMHRMDVLTLLTFVWPQVQAAFPRHPAKLLVVGASDPMRRGAYSARDSIYLNSRTPLVSENGSSPLIREVVXXXRSXXXXX

SEQ ID NO: 12178 - protein, 274 aa, Zea mays
  misc_feature (200)..(201): Xaa can be any naturally occurring amino acid
  misc_feature (245)..(246): Xaa can be any naturally occurring amino acid
  misc_feature (265)..(266): Xaa can be any naturally occurring amino acid
  Coding DNA Sequence Number=SeqID_5551
  Gene Ontology: Mol. function=siderophore-iron transmembrane transporter activity; Cellular component=cell outer membrane; Biological process=siderophore transport
  Homolog annotation: Hit_ID=Q4KE35; Match level="QueryCoverage=100%, HitCoverage=33%, E-value=1e-125, Identity=78%"; Hit description =Outer membrane ferripyoverdine receptor
  Pfam annotation: Domain name=Plug; Domain location=1-79; Score=15.8; E_value=0.024; Accession=PF07715.5; Description=TonB-dependent Receptor Plug Domain
DVMRHTPGITVSAFDTDRTNYYARGFSINNFQYDGIPSTARNVAYSAGNTLSDMAIYDRVEVLKGATGLLTGAGSLGATINLVRKKPTADFQGHASLGAGSWDNYRSELDVSGPMTESGNVRGRAVAAYQDKRSFMDRYSRKSPVYYGIMEFDLSPDTMLTVGGDYQDSLPTASSWSGSFPLINANGDRNSVKRSFNNAXXWSSWEQYTRTAFAMLEHDLGNGWVTKLQLDHKINGYHALMGSIXXDEPRADGTAKITSGKYTGXXVSDSADLY

SEQ ID NO: 12179 - protein, 150 aa, Zea mays
  misc_feature (51)..(51): Xaa can be any naturally occurring amino acid
  misc_feature (123)..(123): Xaa can be any naturally occurring amino acid
  Coding DNA Sequence Number=SeqID_5552
  Gene Ontology: Mol. function=indole-3-glycerol-phosphate synthase activity; Cellular component=cytosol; Biological process=aromatic amino acid family biosynthetic process
  Homolog annotation: Hit_ID=Q4K503; Match level="QueryCoverage=100%, HitCoverage=53%, E-value=4e-60, Identity=82%"; Hit description =Indole-3-glycerol phosphate synthase
  Pfam annotation: Domain name=IGPS; Domain location=1-135; Score=64.3; E_value=4.1e-16; Accession=PF00218.12; Description=Indole-3-glycerol phosphate synthase
YQIVEARALGADCVLLIVSALDDVKMAELAAVAKSVGLDVLVEVHDGDELXERALKTLDTPLVGVNNRNLHTFEVSLENTLDLLPRIPRDRLVITESGIVNRADVELMEISGVYSFLVGETFXRAENPGAELQRLFFPERGVAVSGSTLD

SEQ ID NO: 12180 - protein, 144 aa, Zea mays
  Coding DNA Sequence Number=SeqID_5553
  Gene Ontology: Mol. function=protein disulfide oxidoreductase activity; Cellular component=chloroplast; Biological process=cell redox homeostasis
  Homolog annotation: Hit_ID=Q3KJ69; Match level="QueryCoverage=100%, HitCoverage=100%, E-value=2e-71, Identity=88%"; Hit description =Thioredoxin-like
  Pfam annotation: Domain name=Thioredoxin; Domain location=40-142; Score=94.0; E_value=4.6e-25; Accession=PF00085.10; Description =Thioredoxin
MSDSLVIPCPHCNGLNRIPNERLGDAPKCGRCKQPVLLSKPFELKQGDYASQIKGDLPLLVDVWAEWCGPCKSFAPVFEQAAGQLAGKCRLAKLDSEANQQLSAQLGIRSIPSLILFKNGREVARQSGAFPLPQLMSWLRSQGV

SEQ ID NO: 12181 - protein, 175 aa, Zea mays
  misc_feature (175)..(175): Xaa can be any naturally occurring amino acid
  Coding DNA Sequence Number=SeqID_5554
  Gene Ontology: Mol. function=sulfuric ester hydrolase activity; Cellular component=integral to membrane; Biological process =metabolic process
  Homolog annotation: Hit_ID=Q3K7L8; Match level="QueryCoverage=98%, HitCoverage=26%, E-value=5e-87, Identity=90%"; Hit description =Sulfatase
  Pfam annotation: Domain name=Sulfatase; Domain location=2-174; Score=- 21.8; E_value=0.00021; Accession=PF00884.13; Description=Sulfatase
GYFDNMNAFFSGNGYRVVDQSSVPEAEISFKNAWGMADEDLYKQTLKLADADYAKQQPFLLQLMTTSNHRPYTYPAGRIDIKSGDGRDGAVKYTDHAIGQFLEAARQKPWFDNTIFIFVADHTAGSAGKEDLPMVNYQIPLFIYAPKLVDAGENAKLASQIDLAPTLLGLLNLSX

SEQ ID NO: 12182 - protein, 170 aa, Zea mays
  Coding DNA Sequence Number=SeqID_5555
  Gene Ontology: Mol. function=cobyrinic acid a,c-diamide synthase activity; Cellular component=membrane; Biological process=cobalamin biosynthetic process
  Homolog annotation: Hit_ID=Q2KYR9; Match level="QueryCoverage=100%, HitCoverage=46%, E-value=5e-57, Identity=65%"; Hit description =Putative amidase
  Pfam annotation: Domain name=CbiA; Domain location=61-170; Score= -30.8; E_value=0.02; Accession=PF01656.13; Description=Cobyrinic acid a,c-diamide synthase
VAVALELGYPADAVRDQVSEIAVAALAAAGAPGAQVSVSWKVAAHAVQKGLKPLPNVRNIIAVASGKGGVGKSTTAVNLALALAAEGAKVGLLDADIYGPSVPTMLGVSGRPESLDNKSMEPLTGHGLQANSIGFLIDADSPAIWRGPMVTQALEQLLRQTNWRDLDYLI

SEQ ID NO: 12183 - protein, 310 aa, Zea mays
  misc_feature (1)..(1): Xaa can be any naturally occurring amino acid
  misc_feature (252)..(256): Xaa can be any naturally occurring amino acid
  misc_feature (269)..(270): Xaa can be any naturally occurring amino acid
  misc_feature (272)..(272): Xaa can be any naturally occurring amino acid
  misc_feature (278)..(280): Xaa can be any naturally occurring amino acid
  misc_feature (282)..(283): Xaa can be any naturally occurring amino acid
  misc_feature (286)..(307): Xaa can be any naturally occurring amino acid
  Coding DNA Sequence Number=SeqID_5556
  Gene Ontology: Mol. function=oxidoreductase activity; Cellular component=formate dehydrogenase complex; Biological process=electron transport
  Homolog annotation: Hit_ID=Q3K7J2; Match level="QueryCoverage=91%, HitCoverage=41%, E-value=1e-130, Identity=80%"; Hit description =Molybdopterin oxidoreductase
XVASTSGGHFNRWQSRVSGRPEYGGELPVSALAEEMLTEGEGQIRALVTVAGNPVLSTPNGRQLEQALDGLEFMVSIDLYINETTRYADLILPSTSALENDHYDTTFNMFAVRNVTRFNRAILPKPDGALHDWEIFVGLAQAFAAKTGNTLKPTMPPAQMIDFGLRAGPYGDTLSIAALADYPHGLDLGPLKPNLAGRMKTANGHLQAAPPVILADLARFAAQPVPGLNELLLIGRRHVRSNNSWMHNYHRXXXXXPRHQLLMHPDDLXXRXLSDGQXXXVXXRIXXXXXXXXXXXXXXXXXXXXXXFFF

SEQ ID NO: 12184 - protein, 97 aa, Zea mays
  Coding DNA Sequence Number=SeqID_5557
DVPMDEVLRDPTGYVVIGAEHPALGRVYWAYFDESEVNAPDYYGLTLDINRASWAPVGWRTGEYLMGGRGETDLDTWQARRFINTLLDEYRLDTEYR

SEQ ID NO: 12185 - protein, 184 aa, Zea mays
  misc_feature (140)..(142): Xaa can be any naturally occurring amino acid
  misc_feature (145)..(145): Xaa can be any naturally occurring amino acid
  misc_feature (147)..(147): Xaa can be any naturally occurring amino acid
  misc_feature (152)..(153): Xaa can be any naturally occurring amino acid
  misc_feature (157)..(160): Xaa can be any naturally occurring amino acid
  misc_feature (163)..(164): Xaa can be any naturally occurring amino acid
  misc_feature (169)..(180): Xaa can be any naturally occurring amino acid
  Coding DNA Sequence Number=SeqID_5559
  Gene Ontology: Mol. function=oxidoreductase activity, acting on the CH-CH group of donors; Cellular component=mitochondrial matrix; Biological process=electron transport
  Homolog annotation: Hit_ID=Q4KDC8; Match level="QueryCoverage=91%, HitCoverage=43%, E-value=2e-60, Identity=72%"; Hit description=Acyl -CoA dehydrogenase family protein
  Pfam annotation: Domain name=Acyl-CoA_dh_M; Domain location=121-173; Score=-2.5; E_value=0.1; Accession=PF02770.9; Description=Acyl-CoA dehydrogenase, middle domain
  Pfam annotation: Domain name=Acyl-CoA_dh_N; Domain location=6-116; Score=67.4; E_value=4.6e-17; Accession=PF02771.7; Description=Acyl -CoA dehydrogenase, N-terminal domain
  Pfam module annotation: Pfam domain module=Acyl-CoA_dh_M::Acyl-CoA_dh_ N; Domain location=121-173::6-116
MNPNDNEELNAIREGVRALCAEFDAAYWRKVDEEKSFPEAFVKALTDAGWLSAMIPEAYGGSGLGLAEASVILEEVNRCGGNSGTVHGQMYNMFTLLRHGSEAQKSFYLPKLASGELRLQSMAVTEPTTGTDTTKIKTTXXXKRXDXYVITXXKSGXXXXQHXXLMILXXXXXXXXXXXXKNKF

SEQ ID NO: 12186 - protein, 63 aa, Zea mays
  Coding DNA Sequence Number=SeqID_5560
  Gene Ontology: Mol. function=xylose isomerase activity; Cellular component=cytoplasm; Biological process=carbohydrate metabolic process
  Homolog annotation: Hit_ID=Q48J73; Match level="QueryCoverage=100%, HitCoverage=14%, E-value=6e-26, Identity=87%"; Hit description =Xylose isomerase
ELERHQEETGIQLLWGTANCFSNPRFAAGAASNPNPEVFAYAAAQVFSAMNATHRLKGSSYVL

SEQ ID NO: 12187 - protein, 63 aa, Zea mays; identical to SEQ ID NO: 12186
  Coding DNA Sequence Number=SeqID_5561
  Gene Ontology: Mol. function=xylose isomerase activity; Cellular component=cytoplasm; Biological process=carbohydrate metabolic process
  Homolog annotation: Hit_ID=Q48J73; Match level="QueryCoverage=100%, HitCoverage=14%, E-value=6e-26, Identity=87%"; Hit description =Xylose isomerase

SEQ ID NO: 12188 - protein, 58 aa, Zea mays
  Coding DNA Sequence Number=SeqID_5562
  Gene Ontology: Mol. function=transcription activator activity; Biological process=regulation of transcription, DNA-dependent
  Homolog annotation: Hit_ID=Q4KH39; Match level="QueryCoverage=100%, HitCoverage=19%, E-value=1e-14, Identity=67%"; Hit description=Pca regulon regulatory protein PcaR
  Pfam annotation: Domain name=IclR; Domain location=1-58; Score=-18.6; E_value=0.0079; Accession=PF01614.9; Description=Bacterial transcriptional regulator
LPAYCTSMGRILLAALDDASLQDYLDHADLQTKTSRTLTTPQALLECLQEVRQQGWCI

SEQ ID NO: 12189 - protein, 58 aa, Zea mays; identical to SEQ ID NO: 12188
  Coding DNA Sequence Number=SeqID_5563
  Gene Ontology: Mol. function=transcription activator activity; Biological process=regulation of transcription, DNA-dependent
  Homolog annotation: Hit_ID=Q4KH39; Match level="QueryCoverage=100%, HitCoverage=19%, E-value=1e-14, Identity=67%"; Hit description=Pca regulon regulatory protein PcaR
  Pfam annotation: Domain name=IclR; Domain location=1-58; Score=-18.6; E_value=0.0079; Accession=PF01614.9; Description=Bacterial transcriptional regulator

SEQ ID NO: 12190 - protein, 183 aa, Zea mays
  misc_feature (5)..(19): Xaa can be any naturally occurring amino acid
  misc_feature (22)..(28): Xaa can be any naturally occurring amino acid
  misc_feature (35)..(36): Xaa can be any naturally occurring amino acid
  misc_feature (43)..(43): Xaa can be any naturally occurring amino acid
  misc_feature (66)..(67): Xaa can be any naturally occurring amino acid
  misc_feature (183)..(183): Xaa can be any naturally occurring amino acid
  Coding DNA Sequence Number=SeqID_5564
  Gene Ontology: Mol. function=DNA-directed DNA polymerase activity; Cellular component=intracellular; Biological process=nucleobase, nucleoside, nucleotide and nucleic acid metabolic process
  Homolog annotation: Hit_ID=Q9F193; Match level="QueryCoverage=89%, HitCoverage=17%, E-value=3e-71, Identity=84%"; Hit description=DNA polymerase I
  Pfam annotation: Domain name=DNA_pol_A; Domain location=1-183; Score=- 61.3; E_value=8.1e-11; Accession=PF00476.11; Description=DNA polymerase family A
QGRRXXXXXXXXXXXXXXXKLXXXXXXXPKVLMQXXSMSKLKXSYTDRLPEQIIPRTGRVHTSYHXXVAATGRLSSSDPNLQNIPVRTAEGRRIRQAFVAPKGYKLLAADYSQIELRIMAHLSKDAGLLNAFRDDLDVHTATAAEVFKVELAEVTSNQRRSAKAINFGLIYGMGAQKLGKDIX

SEQ ID NO: 12191 - protein, 158 aa, Zea mays
  misc_feature (158)..(158): Xaa can be any naturally occurring amino acid
  Coding DNA Sequence Number=SeqID_5565
  Gene Ontology: Mol. function=sequence-specific DNA binding; Cellular component=excinuclease repair complex; Biological process=response to DNA damage stimulus
  Homolog annotation: Hit_ID=P32966; Match level="QueryCoverage=99%, HitCoverage=25%, E-value=4e-78, Identity=91%"; Hit description =UvrABC system protein C
  Pfam annotation: Domain name=UVR; Domain location=111-146; Score =52.3; E_value=1.7e-12; Accession=PF02151.9; Description=UvrBuvrC motif
NILLRDDKSYPYVFLSDGDFPRLSIHRGAKKQKGKYFGPYPSAGAIRESLSLLQKAFFVRQCEDSFYKNRNRPCLQYQIKRCKAPCVGLVEPSEYAEDVRHSVMFLEGRSNALADELSGAMEQAASTLDFERAAELRDQISLLRRVQDQQSMEGGTGX

SEQ ID NO: 12192 - protein, 225 aa, Zea mays
  misc_feature (29)..(29): Xaa can be any naturally occurring amino acid
  Coding DNA Sequence Number=SeqID_5566
  Gene Ontology: Mol. function=transferase activity, transferring phosphorus-containing groups; Cellular component=membrane; Biological process=regulation of transcription, DNA-dependent
  Homolog annotation: Hit_ID=Q4K656; Match level="QueryCoverage=99%, HitCoverage=30%, E-value=7e-63, Identity=53%"; Hit description =Sensor protein
  Pfam annotation: Domain name=HisKA; Domain location=124-195; Score =63.6; E_value=6.8e-16; Accession=PF00512.15; Description=His Kinase A (phosphoacceptor) domain
RGQGKGVVHSHQLSVDFPPAAAYQAHASXLLAFCLPKPVDNAMMWFRPEVKSTVEWSGQPVKHQEPGSTTLSPRLSFDLWKQQVDGKALYWSLSELLAVESLRRNALEHDLARQVQREHEAVRARDELVAVVSHDLRSPLTILLMQCGMMRSLVPADGSKANRRLATAIETMQNATSRMNTLLEDLMDISRIEAGRYSVSLQSLDVAATQEQICSMWQPLAAAKG

SEQ ID NO: 12193 - protein, 62 aa, Zea mays
  misc_feature (1)..(1): Xaa can be any naturally occurring amino acid
  Coding DNA Sequence Number=SeqID_5567
  Gene Ontology: Mol. function=serine-type peptidase activity; Cellular component=integral to membrane; Biological process=proteolysis
  Homolog annotation: Hit_ID=Q7W5J5; Match level="QueryCoverage=98%, HitCoverage=20%, E-value=2e-25, Identity=86%"; Hit description =Signal peptidase I
XIKRVVGLPGDEIAYLDKKLYVNGQLVPHERAGDYFEPDRVSYIAQYKEKLGEVSHNILLDE

SEQ ID NO: 12194 - protein, 62 aa, Zea mays; identical to SEQ ID NO: 12193
  misc_feature (1)..(1): Xaa can be any naturally occurring amino acid
  Coding DNA Sequence Number=SeqID_5568
  Gene Ontology: Mol. function=serine-type peptidase activity; Cellular component=integral to membrane; Biological process=proteolysis
  Homolog annotation: Hit_ID=Q7W5J5; Match level="QueryCoverage=98%, HitCoverage=20%, E-value=2e-25, Identity=86%"; Hit description =Signal peptidase I

SEQ ID NO: 12195 - protein, 151 aa, Zea mays
  Coding DNA Sequence Number=SeqID_5569
  Gene Ontology: Mol. function=nucleotide binding; Cellular component =plasma membrane; Biological process=intracellular protein transport across a membrane
  Homolog annotation: Hit_ID=Q7WFT1; Match level="QueryCoverage=99%, HitCoverage=16%, E-value=2e-66, Identity=80%"; Hit description =Protein translocase subunit secA
  Pfam annotation: Domain name=SEC-C; Domain location=131-151; Score =50.3; E_value=6.7e-12; Accession=PF02810.6; Description=SEC-C motif
  Pfam annotation: Domain name=SecA_SW; Domain location=2-78; Score= -2.6; E_value=9.5e-10; Accession=PF07516.3; Description=SecA Wing and Scaffold domain
  Pfam module annotation: Pfam domain module=SEC-C::SecA_SW; Domain location=131-151::2-78
VGTESWSQFERSIMLQAIDTHWREHLSALDYLRQGIHLRGYAQKNPKQEYKREAFELFSGMLDRIRDDVVRVLMTVRVQSSEQVEQAEAEAAQSHVQNVQYHHSDYDEALAQSAEDTGAQPVRNVLPKVGRNDPCPCGSGKKYKQCHGKLV

SEQ ID NO: 12196 - protein, 54 aa, Zea mays
  Coding DNA Sequence Number=SeqID_5570
  Gene Ontology: Mol. function=carbon-nitrogen ligase activity, with glutamine as amido-N-donor
  Homolog annotation: Hit_ID=Q4KGZ3; Match level="QueryCoverage=100%, HitCoverage=11%, E-value=2e-18, Identity=85%"; Hit description =Amidase family protein
ELDGAILITPTVAHVAPALAPLESDFELFVSTNLATLRLTMPGSLLDMPGVSLP

SEQ ID NO: 12197 - protein, 54 aa, Zea mays; identical to SEQ ID NO: 12196
  Coding DNA Sequence Number=SeqID_5571
  Gene Ontology: Mol. function=carbon-nitrogen ligase activity, with glutamine as amido-N-donor
  Homolog annotation: Hit_ID=Q4KGZ3; Match level="QueryCoverage=100%, HitCoverage=11%, E-value=2e-18, Identity=85%"; Hit description =Amidase family protein

SEQ ID NO: 12198 - protein, 302 aa, Zea mays
  misc_feature (1)..(9): Xaa can be any naturally occurring amino acid
  misc_feature (11)..(13): Xaa can be any naturally occurring amino acid
  misc_feature (15)..(15): Xaa can be any naturally occurring amino acid
  misc_feature (19)..(24): Xaa can be any naturally occurring amino acid
  misc_feature (39)..(39): Xaa can be any naturally occurring amino acid
  misc_feature (44)..(45): Xaa can be any naturally occurring amino acid
  Coding DNA Sequence Number=SeqID_5572
  Gene Ontology: Mol. function=transcription regulator activity; Biological process=regulation of transcription, DNA-dependent
  Homolog annotation: Hit_ID=P52326; Match level="QueryCoverage=97%, HitCoverage=47%, E-value=5e-94, Identity=65%"; Hit description=RNA polymerase sigma factor rpoD
  Pfam annotation: Domain name=Sigma70_ner; Domain location=128-302; Score=314.7; E_value=1.7e-91; Accession=PF04546.3; Description=Sigma- 70, non-essential region
  Pfam annotation: Domain name=Sigma70_r1_1; Domain location=3-72; Score=14.0; E_value=0.0014; Accession=PF03979.4; Description=Sigma -70 factor, region 1.1
  Pfam annotation: Domain name=Sigma70_r1_2; Domain location=86-122; Score=58.3; E_value=2.7e-14; Accession=PF00140.10; Description=Sigma- 70 factor, region 1.2
  Pfam module annotation: Pfam domain module=Sigma70_ner::Sigma70_r1 _1::Sigma70_r1_2; Domain location=128-302::3-72::86-122
XXXXXXXXXQXXXTXAEVXXXXXXGYSDPEQVEDIIRMXNDMGXXVHESAPDADALMLADADTDEAAAEEAAAALAAVETDIGRTTDPVRMYMREMGTVELLTREGEIEIAKRIEEGIREVMGAIAHFPGTVDHILSEYTRVTTEGGRLSDVLSGYIDPDDGIAPPAAEVPPPIDAKAAKADDDTDDEEAEASTDDEEEVESGPDPIIAAQRFGAVSDQMELARKALKKHGRGSKQATAELLALAELFMPIKLVPKQFEGLVERVRSALERLRAQERAIMQLCVRDARMPRADFLRQFPGNE

SEQ ID NO: 12199 - protein, 238 aa, Zea mays
  misc_feature (189)..(189): Xaa can be any naturally occurring amino acid
  misc_feature (200)..(201): Xaa can be any naturally occurring amino acid
  misc_feature (203)..(204): Xaa can be any naturally occurring amino acid
  misc_feature (207)..(207): Xaa can be any naturally occurring amino acid
  misc_feature (212)..(215): Xaa can be any naturally occurring amino acid
  misc_feature (218)..(238): Xaa can be any naturally occurring amino acid
  Coding DNA Sequence Number=SeqID_5573
  Gene Ontology: Mol. function=alpha-methylacyl-CoA racemase activity; Biological process=metabolic process
  Homolog annotation: Hit_ID=Q6FBN5; Match level="QueryCoverage=91%, HitCoverage=53%, E-value=2e-93, Identity=75%"; Hit description=L -carnitine dehydrogenase
  Pfam annotation: Domain name=CoA_transf_3; Domain location=76-236; Score=102.4; E_value=1.4e-27; Accession=PF02515.7; Description=CoA -transferase family III
MGALTGLRVLDLSRVLAGPWCGQVLADLGAEVIKIERPQSGDDTRGWGPPWMKTDTGESSGQASYYQSTNRGKLSVAIDLATSEGQELVRALAASSDVLIENYKAGSLARYGLDYATLAEINPRLVYCSITGFGQTGPRAEEPGYDFIIQGIGGLMSITGERDDLPGGGPQKVGVAFSDLMTGLYSTVXIQAALLSRERXXVXXHIXMALLXXXXATXXXXXXXXXXXXXXXXXXXXX

SEQ ID NO: 12200 - protein, 248 aa, Zea mays
  Coding DNA Sequence Number=SeqID_5574
  Gene Ontology: Mol. function=protein transporter activity; Cellular component=membrane; Biological process=protein secretion
  Homolog annotation: Hit_ID=A6V352; Match level="QueryCoverage=99%, HitCoverage=63%, E-value=6e-61, Identity=53%"; Hit description =Multidrug resistance protein A
  Pfam annotation: Domain name=HlyD; Domain location=3-248; Score=66.3; E_value=1.1e-16; Accession=PF00529.10; Description=HlyD family secretion protein
TAQQASLQTLDAQMGEQQQRIAQAKAALSSGEAEARRAGLDYQRYRELVAQQVASAQHLETVSASQAKAQAALAQARAQVARQQAQLQVLQARRQQAQAQIVEHQARIGEAQANLALAGNALKDTEIRAPFDGVVGQRKVRRQQYVMPGLPLLAVVPVEQAYVIANYKETQLQHMAPGQSVEIAVDSFAGAQWHGKVESIAPGSGAVFALLPPDNATGNFTKIVQRFPVKIRLEPGESRVLPGMSVIA

SEQ ID NO: 12201 - protein, 209 aa, Zea mays
  misc_feature (157)..(158): Xaa can be any naturally occurring amino acid
  misc_feature (172)..(172): Xaa can be any naturally occurring amino acid
  misc_feature (175)..(175): Xaa can be any naturally occurring amino acid
  misc_feature (178)..(181): Xaa can be any naturally occurring amino acid
  misc_feature (183)..(184): Xaa can be any naturally occurring amino acid
  misc_feature (191)..(191): Xaa can be any naturally occurring amino acid
  misc_feature (194)..(195): Xaa can be any naturally occurring amino acid
  misc_feature (197)..(197): Xaa can be any naturally occurring amino acid
  misc_feature (202)..(204): Xaa can be any naturally occurring amino acid
  misc_feature (206)..(207): Xaa can be any naturally occurring amino acid
  Coding DNA Sequence Number=SeqID_5575
  Gene Ontology: Mol. function=peptidase activity; Cellular component =integral to membrane; Biological process=proteolysis
  Homolog annotation: Hit_ID=Q3KD19; Match level="QueryCoverage=100%, HitCoverage=92%, E-value=5e-77, Identity=69%"; Hit description =Peptidase C39, bacteriocin processing precursor
  Pfam annotation: Domain name=Peptidase_C39; Domain location=48-185; Score=15.6; E_value=2.1e-06; Accession=PF03412.6; Description =Peptidase C39 family
MRIIALTLLLLLTGPTWAGQMAIAAMPGGGVIFKKVESIRERKFANLVEQKTDFSCGAAALATILRQAYWMDVDEDHIIKGMLVNADQDLVRTQGFSMLDMKRYLESIGMRARGYRINADTLLTVKIPVVVLLEIRGYKHFVVMQRADKDWVYIGDXXLGHKRYAKDDFVKXWNXIVXXXXGXXYDKTNVXLDXXTXLTAKXXXNXXGP

SEQ ID NO: 12202 - protein, 218 aa, Zea mays
  Coding DNA Sequence Number=SeqID_5576
  Subcellular localization annotation: CTP_CleavageSite=2; ConfidenceScore=5.02e-01
PRAGRRPGRSAGCRRSGRGVRLMALIKRLRPSDSATQAPPAHAPVASNNASRQDTKLSLLQLEAIRVFRTLKGRSWKAELNNCWSRSSYPGLGTQHAAVLQQLRNEFGPEWLQKFSVSQQQDALYKAAQEALQVEELLRHDSNATSEQISRVKDDRKTAEATAMLWERGDDRSFSADGPSVRLSMSDEAPAASSSPALPSSPPPIEEPIDPLEAAAEP

SEQ ID NO: 12203 - protein, 130 aa, Zea mays
  Coding DNA Sequence Number=SeqID_5578
  Gene Ontology: Mol. function=transcription factor activity; Biological process=regulation of transcription, DNA-dependent
  Homolog annotation: Hit_ID=Q98HN8; Match level="QueryCoverage=100%, HitCoverage=42%, E-value=4e-44, Identity=70%"; Hit description =Transcriptional regulator
  Pfam annotation: Domain name=HTH_1; Domain location=9-63; Score=61.2; E_value=3.6e-15; Accession=PF00126.17; Description=Bacterial regulatory helix-turn-helix protein, lysR family
MDRLSGLLPFVRSAELGGFAAAGRDLDLSPSAVGKAVARLEQDLHVRLFQRSTRRMQLTEEGRLFYERCKRILEDLDEAHDMLSQTLREPRGRLRVSAPLVSYHFLLPVLPAFAARYPGIELDMDFNDRI

SEQ ID NO: 12204 - protein, 249 aa, Zea mays
  misc_feature (86)..(86): Xaa can be any naturally occurring amino acid
  Coding DNA Sequence Number=SeqID_5579
  Gene Ontology: Mol. function=transporter activity; Cellular component= outer membrane-bounded periplasmic space; Biological process=transport
  Homolog annotation: Hit_ID=Q7W9R4; Match level="QueryCoverage=69%, HitCoverage=43%, E-value=1e-74, Identity=79%"; Hit description =Putative polyamine transport protein
RTPDGIDVRRATWNACAWSKWRGRTASASGSNCATATGPPGGLAYSLEAGGATGPIRAQLRQIALNLPVKLGRSSLKGFMIPPFGXSCNLRHIAGGLVMKLRAGMRWALGTMLIAAATSAAVAQNKVVNVYNWAEYTAPDTISGFEKETGIKVRYDVYDSNDTLQAKLLAGKSGYDVVVPSTHYASRQIEAGLFQKLDKSKIPNWKYLDPDVMALVAAVDPGNEYAIPWGYGTNGLGYNVTKVKQIMGD

SEQ ID NO: 12205 - protein, 181 aa, Zea mays
  misc_feature (177)..(178): Xaa can be any naturally occurring amino acid
  misc_feature (181)..(181): Xaa can be any naturally occurring amino acid
  Coding DNA Sequence Number=SeqID_5580
  Gene Ontology: Mol. function=D-serine ammonia-lyase activity; Biological process=D-amino acid metabolic process
  Homolog annotation: Hit_ID=A0H8X8; Match level="QueryCoverage=97%, HitCoverage=39%, E-value=7e-51, Identity=60%"; Hit description=D -serine ammonia-lyase
DERSASLFLGYAAAALRLREQIAQAGIVVDAEHPLFVYLPCGVGGAPGGIAFGLSLLYGAHAHCFFAEPVQSPCFLLRMMAGHGQLPGVPVPPSVYDIGLTNQTEADGLAVPRASDLAYAAVGQSLAGVYTVADDTLYGDLARLHDSEGLRIEPSAAAGFSGPRQLLGSLAGQQWLXXRGX

SEQ ID NO: 12206 - protein, 122 aa, Zea mays
  Coding DNA Sequence Number=SeqID_5581
  Gene Ontology: Mol. function=binding
  Homolog annotation: Hit_ID=Q3KHU9; Match level="QueryCoverage=100%, HitCoverage=45%, E-value=4e-54, Identity=84%"; Hit description =Putative uncharacterized protein
LYPNDCRDLLTRQYGPNLKLQADHLHTAEPRSILQRLSRNLRQLHLSNDDHLAALVDAERVLELGNASAADYLARASLYQRLDCPNAERFDLEHALMLSEDPIQRLRLTERLGHLPPNSVVH

SEQ ID NO: 12207 - protein, 224 aa, Zea mays
  misc_feature (214)..(214): Xaa can be any naturally occurring amino acid
  Coding DNA Sequence Number=SeqID_5582
  Homolog annotation: Hit_ID=Q4KCS9; Match level="QueryCoverage=95%, HitCoverage=67%, E-value=1e-79, Identity=70%"; Hit description =Putative uncharacterized protein
MSMFFGSVRSFKSAVAAELGALAAWMVFNAGDRVGGLVFNDEHIDSVAPLRSRKRVETLCSRIVRQNAALSAGNPDHEADGQLDKVLQRCLALTGHDHLICIISDFAGAGDRTLQLMRQLSAHNDVVALQVYDPLALNVPDTGHLMVTQGQLQVELAVQKRQVRQPLGDFLGGRLKDVASLLRRSQVPLLMISTALPAVDQLRDELGRRNGARXMCRASNNSRS

SEQ ID NO: 12208 - protein, 233 aa, Zea mays
  misc_feature (219)..(220): Xaa can be any naturally occurring amino acid
  misc_feature (227)..(230): Xaa can be any naturally occurring amino acid
  misc_feature (233)..(233): Xaa can be any naturally occurring amino acid
  Coding DNA Sequence Number=SeqID_5583
  Gene Ontology: Mol. function=acyltransferase activity; Cellular component=cytoplasm; Biological process=aromatic amino acid family biosynthetic process
  Homolog annotation: Hit_ID=Q3KJR6; Match level="QueryCoverage=87%, HitCoverage=66%, E-value=5e-97, Identity=87%"; Hit description =Serine O-acetyltransferase
  Subcellular localization annotation: CTP_CleavageSite=42; ConfidenceScore=5.00e-01
VISIALLVLKDAQVPCRKVVGISSGVKTVSERSSHWQLQTIVSQLRSARDQWRTRNGRVSGEQGGRELPSREAVAQILEALCGALFPMRLGPVDLREESEDFYVGHTLDVALNALLAQARLELRYAARQGGQDDSEVDAHAIHLIQDFALALPALRSLLDTDVLAAYHGDPAARSVDEVLLCYPGILAVIHHRLAHHLYRAGLPLLARISAEIAHSATXXDIHPGAXXXXSFX

SEQ ID NO: 12209 - protein, 233 aa, Zea mays
  misc_feature (1)..(1): Xaa can be any naturally occurring amino acid
  Coding DNA Sequence Number=SeqID_5584
  Gene Ontology: Mol. function=iron ion binding; Cellular component =integral to membrane; Biological process=response to stimulus
  Homolog annotation: Hit_ID=Q3KBJ1; Match level="QueryCoverage=92%, HitCoverage=68%, E-value=7e-75, Identity=67%"; Hit description =Putative FecR
  Pfam annotation: Domain name=FecR; Domain location=28-121; Score =146.5; E_value=7.4e-41; Accession=PF04773.4; Description=FecR protein
XFVAGSLGVVALAALFLGRRQGWLVDTGELSTGTGERKHFTLDDGSLLTLNAQSRAIARFDAHQRVLELREGELLVDVAKDPARPFVVQTRHGQIRALGTRFLVQRDEASTRLVMLHSRVEVVTQDGARQIVEAGQSMRFDEQHTFGLGPLKGDEAGWSQGRLEVHDRSLSEVIDSLRSYRHGILRLNPNVAQLRLSGIYPLDDTDRTLQLLENSLPIRVTYHSAYWVSIEAR

SEQ ID NO: 12210 - protein, 147 aa, Zea mays
  Coding DNA Sequence Number=SeqID_5585
  Gene Ontology: Mol. function=pyridoxal phosphate binding; Cellular component=nucleus; Biological process=amino acid metabolic process
  Homolog annotation: Hit_ID=Q3K5K7; Match level="QueryCoverage=100%, HitCoverage=42%, E-value=4e-78, Identity=94%"; Hit description=L -threonine aldolase
VLCFGGTKNGMAVGEAILFFNHKLAEDFDYRCKQAGQLASKMRFLSAPWVGLLENDAWLKHARHANHCAQLLSSLVADIPGVELMFPVQANGVFLQLSEPAIAALTAKGWRFYTFIGKGGARFMCAWDTEEERVRELAADIREVMSA

SEQ ID NO: 12211 - protein, 56 aa, Zea mays
  Coding DNA Sequence Number=SeqID_5586
  Gene Ontology: Mol. function=nucleoside-triphosphatase activity; Cellular component=exodeoxyribonuclease V complex
  Homolog annotation: Hit_ID=Q8L1Z1; Match level="QueryCoverage=100%, HitCoverage=8%, E-value=2e-12, Identity=69%"; Hit description =Exonuclease V alpha subunit RecD
  Subcellular localization annotation: CTP_CleavageSite=37; ConfidenceScore=5.15e-01
WQKLACALATRGAFSIVTGGPGTGKTTTVVRLLALLQAPAVESGSALRIRLAAPTG

SEQ ID NO: 12212 - protein, 56 aa, Zea mays; identical to SEQ ID NO: 12211
  Coding DNA Sequence Number=SeqID_5587
  Gene Ontology: Mol. function=nucleoside-triphosphatase activity; Cellular component=exodeoxyribonuclease V complex
  Homolog annotation: Hit_ID=Q8L1Z1; Match level="QueryCoverage=100%, HitCoverage=8%, E-value=2e-12, Identity=69%"; Hit description =Exonuclease V alpha subunit RecD
  Subcellular localization annotation: CTP_CleavageSite=37; ConfidenceScore=5.15e-01

SEQ ID NO: 12213 - protein, 140 aa, Zea mays
  Coding DNA Sequence Number=SeqID_5588
  Homolog annotation: Hit_ID=A3L8B3; Match level="QueryCoverage=97%, HitCoverage=23%, E-value=3e-21, Identity=39%"; Hit description =Putative uncharacterized protein
MLLLRTLVLEQSGHDAPVNGALLCGFAVAQIASNFLAYSLDEETEPGSSRVYIAALRKKSDRYFLGAIDSKEDLQTATHVFKQILTLAAAAGTKSANTGEAQIPYHFIDLKGCKLPPARPEDHHSLTIKKSLVMKVITLG

SEQ ID NO: 12214 - protein, 140 aa, Zea mays; identical to SEQ ID NO: 12213
  Coding DNA Sequence Number=SeqID_5589
  Homolog annotation: Hit_ID=A3L8B3; Match level="QueryCoverage=97%, HitCoverage=23%, E-value=3e-21, Identity=39%"; Hit description =Putative uncharacterized protein

SEQ ID NO: 12215 - protein, 170 aa, Zea mays
  Coding DNA Sequence Number=SeqID_5590
  Homolog annotation: Hit_ID=Q4KKD6; Match level="QueryCoverage=87%, HitCoverage=27%, E-value=2e-42, Identity=56%"; Hit description =Membrane protein, putative
LSPRLPLAGAALLVLFVGVEWVGVKTNATVDEHDQFNVVVEFVNRNYQEDDRIVISDMLWYLPYVYYDETDAQLQLFTPPTASGKSTRPNAYGFGTLVDQDGGRIYLDRLSALPAETQRVWLISGTEPPDEFAPLPTGWRQLSQQDGGGARARLFVLCNAPAGVHREGCD

SEQ ID NO: 12216 - protein, 289 aa, Zea mays
  misc_feature (2)..(2): Xaa can be any naturally occurring amino acid
  misc_feature (12)..(15): Xaa can be any naturally occurring amino acid
  misc_feature (26)..(27): Xaa can be any naturally occurring amino acid
  Coding DNA Sequence Number=SeqID_5591
  Gene Ontology: Mol. function=signal transducer activity; Cellular component=membrane; Biological process=signal transduction
  Homolog annotation: Hit_ID=Q3K4Q2; Match level="QueryCoverage=100%, HitCoverage=43%, E-value=1e-125, Identity=78%"; Hit description =Chemotaxis sensory transducer precursor
  Pfam annotation: Domain name=HAMP; Domain location=223-289; Score =63.9; E_value=5.5e-16; Accession=PF00672.15; Description=HAMP domain
PXQPVTVAGVQXXXXYLGEEVLNNNXXEVDEFKQMSGGVATLFVRSGEDFVRVSTSLTKQDGSRAIGTALDHQHPAYQRLLGGQGYVGRAVLFDRSYMTQYSPVRDASGKVIAVLFVGFDYTDAQNAQFDNLKRFRIGQTGSLALLDEQKHWLVPPAGVQALDQSIPVMLDLAAKPGKGRFWSDKNEDFYSVAVPFEGGPWSVVASMPKAEIRAVTWSVGIRLAIGSLLAMLLAVGAAVWLLRSKLQPLGDLVRQAEALGAGDLSARLNVSSHDEIGQLARSFNQMGEA

SEQ ID NO: 12217 - protein, 124 aa, Zea mays
  misc_feature (14)..(16): Xaa can be any naturally occurring amino acid
  misc_feature (18)..(19): Xaa can be any naturally occurring amino acid
  misc_feature (35)..(36): Xaa can be any naturally occurring amino acid
  Coding DNA Sequence Number=SeqID_5592
  Gene Ontology: Mol. function=hydroxymethylbilane synthase activity; Cellular component=chloroplast; Biological process=tetrapyrrole biosynthetic process
  Homolog annotation: Hit_ID=Q4K3X3; Match level="QueryCoverage=94%, HitCoverage=37%, E-value=1e-41, Identity=71%"; Hit description =Porphobilinogen deaminase
  Pfam annotation: Domain name=Porphobil_deamC; Domain location=36-109; Score=109.7; E_value=8.7e-30; Accession=PF03900.6; Description =Porphobilinogen deaminase, C-terminal domain
NFFSQLAGQGAVGXXXRXXDSEIHALLKPLDHQDXXVRVTAERALNKHLNGGCQVPIACYAVLEGENLWLRGLVGDPSGGLLLTAEIRGPQSEATSLGIKVAEELLEKGAGAILQAVYGEAGPQ

SEQ ID NO: 12218 - protein, 133 aa, Zea mays
  misc_feature (92)..(92): Xaa can be any naturally occurring amino acid
  misc_feature (105)..(105): Xaa can be any naturally occurring amino acid
  misc_feature (110)..(110): Xaa can be any naturally occurring amino acid
  misc_feature (119)..(122): Xaa can be any naturally occurring amino acid
  misc_feature (125)..(132): Xaa can be any naturally occurring amino acid
  Coding DNA Sequence Number=SeqID_5593
  Gene Ontology: Mol. function=transporter activity; Cellular component= integral to membrane; Biological process=transport
  Homolog annotation: Hit_ID=A1FBT1; Match level="QueryCoverage=93%, HitCoverage=28%, E-value=2e-53, Identity=86%"; Hit description=Major facilitator superfamily MFS_1
MQTAKQGVSRTRQVVAAVIGNALEWYDFIVYGFLASIIARQFFPSEDEYASLLMALATFGVGFFMRPVGGILLGMYSDRKGRKAAMQLIIRXMTVSIALIAFAPXYAAIXMGAPMLIVXXXXLQXXXXXXXXS

SEQ ID NO: 12219 - protein, 183 aa, Zea mays
  misc_feature (4)..(4): Xaa can be any naturally occurring amino acid
  misc_feature (8)..(8): Xaa can be any naturally occurring amino acid
  misc_feature (27)..(27): Xaa can be any naturally occurring amino acid
  misc_feature (34)..(34): Xaa can be any naturally occurring amino acid
  misc_feature (38)..(38): Xaa can be any naturally occurring amino acid
  misc_feature (43)..(43): Xaa can be any naturally occurring amino acid
  misc_feature (47)..(47): Xaa can be any naturally occurring amino acid
  misc_feature (51)..(51): Xaa can be any naturally occurring amino acid
  misc_feature (61)..(61): Xaa can be any naturally occurring amino acid
  misc_feature (111)..(111): Xaa can be any naturally occurring amino acid
  misc_feature (133)..(133): Xaa can be any naturally occurring amino acid
  misc_feature (145)..(145): Xaa can be any naturally occurring amino acid
  misc_feature (147)..(148): Xaa can be any naturally occurring amino acid
  misc_feature (152)..(152): Xaa can be any naturally occurring amino acid
  misc_feature (165)..(165): Xaa can be any naturally occurring amino acid
  misc_feature (167)..(167): Xaa can be any naturally occurring amino acid
  misc_feature (169)..(170): Xaa can be any naturally occurring amino acid
  misc_feature (177)..(177): Xaa can be any naturally occurring amino acid
  misc_feature (180)..(180): Xaa can be any naturally occurring amino acid
  misc_feature (182)..(183): Xaa can be any naturally occurring amino acid
  Coding DNA Sequence Number=SeqID_5018
SLIXQSQXTVKHREAAPAPKPDRAKRXAPQPRIXPAAXMAPKXEKKXAGEXARRRRSPRPXKAEKGSGQGKKPKAEKRPPRGAGPGAGEGQERARRKPRKKRGGPTRSTFXSRWVQGRCTPTSGILVPRPCPXHEFPSSTTFFEXFXXGEAXQARPLQQEAHHPXSXEXXELRPLRXLPXEXX

SEQ ID NO: 12220 - protein, 149 aa, Zea mays
  misc_feature (12)..(12): Xaa can be any naturally occurring amino acid
  misc_feature (19)..(19): Xaa can be any naturally occurring amino acid
  misc_feature (27)..(27): Xaa can be any naturally occurring amino acid
  misc_feature (33)..(33): Xaa can be any naturally occurring amino acid
  misc_feature (39)..(39): Xaa can be any naturally occurring amino acid
  misc_feature (42)..(42): Xaa can be any naturally occurring amino acid
  misc_feature (49)..(49): Xaa can be any naturally occurring amino acid
  misc_feature (51)..(51): Xaa can be any naturally occurring amino acid
  misc_feature (77)..(78): Xaa can be any naturally occurring amino acid
  misc_feature (91)..(91): Xaa can be any naturally occurring amino acid
  misc_feature (96)..(96): Xaa can be any naturally occurring amino acid
  misc_feature (100)..(102): Xaa can be any naturally occurring amino acid
  misc_feature (108)..(110): Xaa can be any naturally occurring amino acid
  misc_feature (112)..(112): Xaa can be any naturally occurring amino acid
  misc_feature (115)..(117): Xaa can be any naturally occurring amino acid
  misc_feature (119)..(120): Xaa can be any naturally occurring amino acid
  misc_feature (122)..(123): Xaa can be any naturally occurring amino acid
  misc_feature (126)..(127): Xaa can be any naturally occurring amino acid
  misc_feature (130)..(131): Xaa can be any naturally occurring amino acid
  misc_feature (134)..(134): Xaa can be any naturally occurring amino acid
  misc_feature (136)..(136): Xaa can be any naturally occurring amino acid
  misc_feature (138)..(139): Xaa can be any naturally occurring amino acid
  misc_feature (141)..(149): Xaa can be any naturally occurring amino acid
  Coding DNA Sequence Number=SeqID_5020
  Gene Ontology: Mol. function=small conjugating protein ligase activity; Cellular component=cytosol; Biological process=regulation of protein metabolic process
  Homolog annotation: Hit_ID=A2ZW67; Match level="QueryCoverage=71%, HitCoverage=22%, E-value=1e-25, Identity=68%"; Hit description =Ubiquitin carrier protein
  Pfam annotation: Domain name=UQ_con; Domain location=5-130; Score= -17.1; E_value=0.0006; Accession=PF00179.16; Description=Ubiquitin -conjugating enzyme
MASKRIQKELKXLQKDPPXRWQVQGPXVGEDMXFHWQKXIMXGPSDSPXFXGGEVFLVTIHFPPDYPFNPPKGGISXXLRWFHPNINSNGXSICLXILRXXXGSPALXXXPXGAXXXIXXPXXTDXXPRXXPLXPXIXXMXXXXXXXXX

SEQ ID NO: 12221 - protein, 154 aa, Zea mays
  misc_feature (7)..(7): Xaa can be any naturally occurring amino acid
  misc_feature (10)..(10): Xaa can be any naturally occurring amino acid
  misc_feature (22)..(22): Xaa can be any naturally occurring amino acid
  misc_feature (28)..(28): Xaa can be any naturally occurring amino acid
  misc_feature (37)..(37): Xaa can be any naturally occurring amino acid
  misc_feature (47)..(48): Xaa can be any naturally occurring amino acid
  misc_feature (50)..(55): Xaa can be any naturally occurring amino acid
  misc_feature (57)..(59): Xaa can be any naturally occurring amino acid
  misc_feature (62)..(64): Xaa can be any naturally occurring amino acid
  misc_feature (66)..(66): Xaa can be any naturally occurring amino acid
  misc_feature (72)..(75): Xaa can be any naturally occurring amino acid
  misc_feature (77)..(79): Xaa can be any naturally occurring amino acid
  misc_feature (81)..(81): Xaa can be any naturally occurring amino acid
  misc_feature (84)..(84): Xaa can be any naturally occurring amino acid
  misc_feature (87)..(87): Xaa can be any naturally occurring amino acid
  misc_feature (89)..(89): Xaa can be any naturally occurring amino acid
  misc_feature (91)..(91): Xaa can be any naturally occurring amino acid
  misc_feature (94)..(94): Xaa can be any naturally occurring amino acid
  misc_feature (99)..(100): Xaa can be any naturally occurring amino acid
  misc_feature (102)..(102): Xaa can be any naturally occurring amino acid
  misc_feature (106)..(106): Xaa can be any naturally occurring amino acid
  misc_feature (108)..(109): Xaa can be any naturally occurring amino acid
  misc_feature (113)..(113): Xaa can be any naturally occurring amino acid
  misc_feature (115)..(117): Xaa can be any naturally occurring amino acid
  misc_feature (119)..(120): Xaa can be any naturally occurring amino acid
  misc_feature (123)..(123): Xaa can be any naturally occurring amino acid
  misc_feature (125)..(125): Xaa can be any naturally occurring amino acid
  misc_feature (127)..(133): Xaa can be any naturally occurring amino acid
  misc_feature (136)..(154): Xaa can be any naturally occurring amino acid
  Coding DNA Sequence Number=SeqID_5021
KSASLAXEFXSINPKMNDSRAXPSLAEXPSPRPEVRXFRHRDARHWXXFXXXXXXAXXXIGXXXDXIRWGAXXXXIXXXSXSFXEKXSXLXHVXGLQRXXGXEEIXLXXSKSXGXXXHXXPPXIXPXXXXXXXEGXXXXXXXXXXXXXXXXXXX

SEQ ID NO: 12222 - protein, 148 aa, Zea mays
  misc_feature (18)..(18): Xaa can be any naturally occurring amino acid
  misc_feature (21)..(21): Xaa can be any naturally occurring amino acid
  misc_feature (29)..(31): Xaa can be any naturally occurring amino acid
  misc_feature (35)..(35): Xaa can be any naturally occurring amino acid
  misc_feature (43)..(43): Xaa can be any naturally occurring amino acid
  misc_feature (45)..(45): Xaa can be any naturally occurring amino acid
  misc_feature (51)..(53): Xaa can be any naturally occurring amino acid
  misc_feature (55)..(55): Xaa can be any naturally occurring amino acid
  misc_feature (59)..(59): Xaa can be any naturally occurring amino acid
  misc_feature (64)..(64): Xaa can be any naturally occurring amino acid
  misc_feature (81)..(81): Xaa can be any naturally occurring amino acid
  misc_feature (93)..(93): Xaa can be any naturally occurring amino acid
  misc_feature (102)..(102): Xaa can be any naturally occurring amino acid
  misc_feature (105)..(105): Xaa can be any naturally occurring amino acid
  misc_feature (112)..(112): Xaa can be any naturally occurring amino acid
  misc_feature (116)..(116): Xaa can be any naturally occurring amino acid
  misc_feature (120)..(120): Xaa can be any naturally occurring amino acid
  misc_feature (129)..(129): Xaa can be any naturally occurring amino acid
  misc_feature (148)..(148): Xaa can be any naturally occurring amino acid
  Coding DNA Sequence Number=SeqID_5023
  Gene Ontology: Mol. function=nutrient reservoir activity
  Homolog annotation: Hit_ID=P04704; Match level="QueryCoverage=81%, HitCoverage=50%, E-value=6e-18, Identity=51%"; Hit description=Zein -alpha ZG99 precursor
MGRASSCHMDSSGGFRLXMLXGLSGSGAXXXIFPXCSGAPIAXLXPPDLSXXXSXSVCXNPILXPYRIQQAIAAGILPLSXPLFLQQSSALLXQLPLEHLLXQNXRAQQLRXLVLXDLAXYSQQHQVLXFNQLAALNSGAYLQQQLLX

SEQ ID NO: 12223 - protein, 139 aa, Zea mays
  misc_feature (13)..(13): Xaa can be any naturally occurring amino acid
  misc_feature (29)..(29): Xaa can be any naturally occurring amino acid
  misc_feature (40)..(40): Xaa can be any naturally occurring amino acid
  misc_feature (48)..(48): Xaa can be any naturally occurring amino acid
  misc_feature (87)..(87): Xaa can be any naturally occurring amino acid
  misc_feature (94)..(94): Xaa can be any naturally occurring amino acid
  misc_feature (109)..(110): Xaa can be any naturally occurring amino acid
  misc_feature (120)..(120): Xaa can be any naturally occurring amino acid
  Coding DNA Sequence Number=SeqID_5024
  Homolog annotation: Hit_ID=Q6Z756; Match level="QueryCoverage=100%, HitCoverage=98%, E-value=1e-27, Identity=61%"; Hit description =Erwinia induced protein 2
MALGSWVVLGYAXAGAEAIMLLLLTLPGXLEGLRRGWISXVVRSALKXMEWSVVPFCLFLLMESYWKYETRPTCDDEHACTPSEHLXHQKPNHXKSQRNALLIAAALLXXYWIPLLRHPXFVVRARARCKQRVDKLRKR

SEQ ID NO: 12224 - protein, 67 aa, Zea mays
  misc_feature (18)..(18): Xaa can be any naturally occurring amino acid
  misc_feature (22)..(22): Xaa can be any naturally occurring amino acid
  misc_feature (25)..(25): Xaa can be any naturally occurring amino acid
  misc_feature (29)..(31): Xaa can be any naturally occurring amino acid
  misc_feature (36)..(37): Xaa can be any naturally occurring amino acid
  misc_feature (42)..(42): Xaa can be any naturally occurring amino acid
  misc_feature (45)..(45): Xaa can be any naturally occurring amino acid
  Coding DNA Sequence Number=SeqID_5025
  Gene Ontology: Mol. function=structural constituent of ribosome; Cellular component=ribonucleoprotein complex; Biological process =translation
  Homolog annotation: Hit_ID=Q7XYD4; Match level="QueryCoverage=80%, HitCoverage=42%, E-value=8e-16, Identity=75%"; Hit description =Ubiquitin/ribosomal fusion protein
  Pfam annotation: Domain name=Ribosomal_L40e; Domain location=15-66; Score=81.0; E_value=3.8e-21; Accession=PF01020.8; Description =Ribosomal L40e family
YAELADCLKTGRVGIIEXSLQXLAXKYNXXXMICRXXYVRLXPRXVNCRKNKCGHSNQLRAKKKIKN

SEQ ID NO: 12225 - protein, 114 aa, Zea mays
  misc_feature (88)..(90): Xaa can be any naturally occurring amino acid
  misc_feature (113)..(113): Xaa can be any naturally occurring amino acid
  Coding DNA Sequence Number=SeqID_5026
  Subcellular localization annotation: CTP_CleavageSite=54; ConfidenceScore=5.47e-01
TQTPAKRKRTAKSSVLRLLTVRATPSHPGSLSTAFAAQHGAPGGDVLPPLGPLRAGREGSVKDSAVSWVFFSRMASSWRPLLWVYATXXXGFWTEATASFTLHHLLCPFPSLXL

SEQ ID NO: 12226 - protein, 108 aa, Zea mays
  misc_feature (10)..(11): Xaa can be any naturally occurring amino acid
  misc_feature (14)..(14): Xaa can be any naturally occurring amino acid
  misc_feature (23)..(23): Xaa can be any naturally occurring amino acid
  misc_feature (46)..(46): Xaa can be any naturally occurring amino acid
  misc_feature (55)..(55): Xaa can be any naturally occurring amino acid
  misc_feature (69)..(69): Xaa can be any naturally occurring amino acid
  misc_feature (73)..(73): Xaa can be any naturally occurring amino acid
  misc_feature (78)..(78): Xaa can be any naturally occurring amino acid
  misc_feature (87)..(87): Xaa can be any naturally occurring amino acid
  misc_feature (92)..(92): Xaa can be any naturally occurring amino acid
  misc_feature (100)..(100): Xaa can be any naturally occurring amino acid
  Coding DNA Sequence Number=SeqID_5028
  Gene Ontology: Mol. function=nutrient reservoir activity; Cellular component=vacuole
  Homolog annotation: Hit_ID=P08031; Match level="QueryCoverage=90%, HitCoverage=53%, E-value=5e-31, Identity=66%"; Hit description=Zein -beta precursor
  Subcellular localization annotation: CTP_CleavageSite=64; ConfidenceScore=5.20e-01
SSRLRYMPPXXYLXPHQQPQAWXYPTQPPQLSPCQQFGSCGVGSVXSPFLGQCVXFLRHQCSPAATSYXSSQXQALQXQCCHQIRQXEPLHXLQATYGVXLGSRSSPA

SEQ ID NO: 12227 - protein, 102 aa, Zea mays
  misc_feature (75)..(79): Xaa can be any naturally occurring amino acid
  misc_feature (84)..(90): Xaa can be any naturally occurring amino acid
  misc_feature (92)..(93): Xaa can be any naturally occurring amino acid
  misc_feature (95)..(99): Xaa can be any naturally occurring amino acid
  misc_feature (101)..(102): Xaa can be any naturally occurring amino acid
  Coding DNA Sequence Number=SeqID_5029
HQLINKDKSIDDRSTSYKFLVSNHRSQQHASGNSIKASAQCDLLVLLWNYRKHAAVSNDWTQETCNWYSYHRLTXXXXXKKKKXXXXXXXGXXEXXXXXVXX

SEQ ID NO: 12228 - protein, 124 aa, Zea mays
  misc_feature (7)..(7): Xaa can be any naturally occurring amino acid
  misc_feature (9)..(10): Xaa can be any naturally occurring amino acid
  misc_feature (14)..(15): Xaa can be any naturally occurring amino acid
  misc_feature (27)..(27): Xaa can be any naturally occurring amino acid
  misc_feature (34)..(34): Xaa can be any naturally occurring amino acid
  misc_feature (39)..(39): Xaa can be any naturally occurring amino acid
  misc_feature (45)..(45): Xaa can be any naturally occurring amino acid
  misc_feature (58)..(59): Xaa can be any naturally occurring amino acid
  misc_feature (65)..(65): Xaa can be any naturally occurring amino acid
  misc_feature (69)..(70): Xaa can be any naturally occurring amino acid
  misc_feature (73)..(73): Xaa can be any naturally occurring amino acid
  misc_feature (77)..(77): Xaa can be any naturally occurring amino acid
  misc_feature (80)..(81): Xaa can be any naturally occurring amino acid
  misc_feature (84)..(84): Xaa can be any naturally occurring amino acid
  misc_feature (86)..(86): Xaa can be any naturally occurring amino acid
  misc_feature (94)..(94): Xaa can be any naturally occurring amino acid
  misc_feature (97)..(97): Xaa can be any naturally occurring amino acid
  misc_feature (112)..(113): Xaa can be any naturally occurring amino acid
  misc_feature (115)..(116): Xaa can be any naturally occurring amino acid
  misc_feature (118)..(118): Xaa can be any naturally occurring amino acid
  misc_feature (123)..(123): Xaa can be any naturally occurring amino acid
  Coding DNA Sequence Number=SeqID_5031
  Subcellular localization annotation: CTP_CleavageSite=35; ConfidenceScore=5.19e-01
SDSGVRXPXXATSXXHSATRSAVTKLXMHDDRPXSAAQXSDGAVXSSLSTWNGGLPTXXLLQRRXRGGXXRYXGGGXLDXXERXEXAEVGGVAXQEXGGGRARRLGGESAEXXEXXEXGGHRXS

SEQ ID NO: 12229 - protein, 155 aa, Zea mays
  misc_feature (13)..(16): Xaa can be any naturally occurring amino acid
  misc_feature (18)..(20): Xaa can be any naturally occurring amino acid
  misc_feature (22)..(22): Xaa can be any naturally occurring amino acid
  misc_feature (24)..(35): Xaa can be any naturally occurring amino acid
  misc_feature (38)..(38): Xaa can be any naturally occurring amino acid
  misc_feature (44)..(44): Xaa can be any naturally occurring amino acid
  misc_feature (50)..(50): Xaa can be any naturally occurring amino acid
  misc_feature (54)..(54): Xaa can be any naturally occurring amino acid
  misc_feature (58)..(58): Xaa can be any naturally occurring amino acid
  misc_feature (70)..(70): Xaa can be any naturally occurring amino acid
  misc_feature (74)..(76): Xaa can be any naturally occurring amino acid
  misc_feature (80)..(80): Xaa can be any naturally occurring amino acid
  misc_feature (83)..(83): Xaa can be any naturally occurring amino acid
  misc_feature (86)..(87): Xaa can be any naturally occurring amino acid
  misc_feature (93)..(94): Xaa can be any naturally occurring amino acid
  misc_feature (104)..(104): Xaa can be any naturally occurring amino acid
  misc_feature (108)..(108): Xaa can be any naturally occurring amino acid
  misc_feature (119)..(119): Xaa can be any naturally occurring amino acid
  misc_feature (127)..(127): Xaa can be any naturally occurring amino acid
  misc_feature (130)..(130): Xaa can be any naturally occurring amino acid
  misc_feature (133)..(133): Xaa can be any naturally occurring amino acid
  misc_feature (144)..(144): Xaa can be any naturally occurring amino acid
  misc_feature (149)..(149): Xaa can be any naturally occurring amino acid
  Coding DNA Sequence Number=SeqID_5033
  Gene Ontology: Mol. function=nutrient reservoir activity
  Homolog annotation: Hit_ID=P06678; Match level="QueryCoverage=75%, HitCoverage=47%, E-value=3e-09, Identity=42%"; Hit description=Zein -alpha 19D1 precursor
RYARDYLCQARFXXXXRXXXSXCXXXXXXXXXXXXHDXSPVTAXRRFEYXTIPXYRLXEAFAASILRSVXLTVXXXYALXQQXSLXXLYLRRXXAQQLRQQLLXTIDXVVAAKLAAYLXQQQFLPFXQLXGVXNPAAYLQAQQXLLPFXQLVRSP

SEQ ID NO: 12230 - protein, 100 aa, Zea mays
  misc_feature (21)..(21): Xaa can be any naturally occurring amino acid
  misc_feature (37)..(38): Xaa can be any naturally occurring amino acid
  misc_feature (44)..(44): Xaa can be any naturally occurring amino acid
  misc_feature (49)..(49): Xaa can be any naturally occurring amino acid
  misc_feature (51)..(51): Xaa can be any naturally occurring amino acid
  misc_feature (53)..(53): Xaa can be any naturally occurring amino acid
  misc_feature (55)..(56): Xaa can be any naturally occurring amino acid
  misc_feature (59)..(59): Xaa can be any naturally occurring amino acid
  misc_feature (61)..(61): Xaa can be any naturally occurring amino acid
  misc_feature (63)..(63): Xaa can be any naturally occurring amino acid
  misc_feature (67)..(67): Xaa can be any naturally occurring amino acid
  misc_feature (69)..(70): Xaa can be any naturally occurring amino acid
  misc_feature (72)..(73): Xaa can be any naturally occurring amino acid
  misc_feature (81)..(82): Xaa can be any naturally occurring amino acid
  misc_feature (89)..(89): Xaa can be any naturally occurring amino acid
  misc_feature (91)..(93): Xaa can be any naturally occurring amino acid
  misc_feature (96)..(97): Xaa can be any naturally occurring amino acid
  Coding DNA Sequence Number=SeqID_5034
SPPWRFLGAFLASATNGGSLXPQWLTCSQVPLINPGXXHQLLSXGLSKXPXGXGXXGYXKXIXGEGXLXXPXXPGWEKKIXXGILINLXRXXXWPXXTRL

SEQ ID NO: 12231 - protein, 154 aa, Zea mays
  misc_feature (1)..(5): Xaa can be any naturally occurring amino acid
  misc_feature (7)..(9): Xaa can be any naturally occurring amino acid
  misc_feature (12)..(13): Xaa can be any naturally occurring amino acid
  misc_feature (16)..(19): Xaa can be any naturally occurring amino acid
  misc_feature (23)..(25): Xaa can be any naturally occurring amino acid
  misc_feature (29)..(30): Xaa can be any naturally occurring amino acid
  misc_feature (32)..(32): Xaa can be any naturally occurring amino acid
  misc_feature (34)..(37): Xaa can be any naturally occurring amino acid
  misc_feature (40)..(40): Xaa can be any naturally occurring amino acid
  misc_feature (43)..(46): Xaa can be any naturally occurring amino acid
  misc_feature (48)..(48): Xaa can be any naturally occurring amino acid
  misc_feature (50)..(51): Xaa can be any naturally occurring amino acid
  misc_feature (54)..(55): Xaa can be any naturally occurring amino acid
  misc_feature (63)..(63): Xaa can be any naturally occurring amino acid
  misc_feature (66)..(66): Xaa can be any naturally occurring amino acid
  misc_feature (71)..(73): Xaa can be any naturally occurring amino acid
  misc_feature (75)..(75): Xaa can be any naturally occurring amino acid
  misc_feature (77)..(79): Xaa can be any naturally occurring amino acid
  misc_feature (81)..(84): Xaa can be any naturally occurring amino acid
  misc_feature (86)..(86): Xaa can be any naturally occurring amino acid
  misc_feature (88)..(92): Xaa can be any naturally occurring amino acid
  misc_feature (94)..(94): Xaa can be any naturally occurring amino acid
  misc_feature (96)..(97): Xaa can be any naturally occurring amino acid
  misc_feature (105)..(105): Xaa can be any naturally occurring amino acid
  misc_feature (123)..(123): Xaa can be any naturally occurring amino acid
  misc_feature (125)..(125): Xaa can be any naturally occurring amino acid
  misc_feature (154)..(154): Xaa can be any naturally occurring amino acid
  Coding DNA Sequence Number=SeqID_5036
XXXXXEXXXKGXXRGXXXXRAGXXXRRAXXGXEXXXXREXGRXXXXGXKXXKKXXRGEKKRGXGGXGGEKXXXGXGXXXGXXXXRXAXXXXXDXLXXKLNLRVFXFTTNRSEDLFDIGTGWGXFXAQSGEQLGGDNLHSSWWRSRWRRKANSFX

SEQ ID NO: 12232 - protein, 133 aa, Zea mays
  Coding DNA Sequence Number=SeqID_5038
  Gene Ontology: Mol. function=structural constituent of ribosome; Cellular component=ribonucleoprotein complex; Biological process =translation
  Homolog annotation: Hit_ID=Q9LR33; Match level="QueryCoverage=100%, HitCoverage=91%, E-value=3e-72, Identity=93%"; Hit description=60S ribosomal protein L27a-2
  Pfam annotation: Domain name=L15; Domain location=107-133; Score =15.7; E_value=0.037; Accession=PF00256.13; Description=Ribosomal protein L15
MTTRFKKNRKKRGHVSAGHGRVGKHRKHPGGRGNAGGMHHHRILFDKYHPGYFGKVGMRYFHKLRNKFFCPIVNLDRLWSLVPEDVKAKATKDKVPLIDVTQHGFFKVLGKGHLPENKPFVVKAKLISKTAEK

SEQ ID NO: 12233 - protein, 154 aa, Zea mays
  misc_feature (3)..(6): Xaa can be any naturally occurring amino acid
  misc_feature (9)..(9): Xaa can be any naturally occurring amino acid
  misc_feature (11)..(11): Xaa can be any naturally occurring amino acid
  misc_feature (13)..(13): Xaa can be any naturally occurring amino acid
  misc_feature (16)..(16): Xaa can be any naturally occurring amino acid
  misc_feature (20)..(21): Xaa can be any naturally occurring amino acid
  misc_feature (46)..(48): Xaa can be any naturally occurring amino acid
  misc_feature (50)..(59): Xaa can be any naturally occurring amino acid
  misc_feature (61)..(62): Xaa can be any naturally occurring amino acid
  misc_feature (66)..(66): Xaa can be any naturally occurring amino acid
  misc_feature (68)..(68): Xaa can be any naturally occurring amino acid
  misc_feature (70)..(75): Xaa can be any naturally occurring amino acid
  misc_feature (77)..(86): Xaa can be any naturally occurring amino acid
  misc_feature (88)..(90): Xaa can be any naturally occurring amino acid
  misc_feature (93)..(95): Xaa can be any naturally occurring amino acid
  misc_feature (101)..(104): Xaa can be any naturally occurring amino acid
  misc_feature (106)..(107): Xaa can be any naturally occurring amino acid
  misc_feature (111)..(113): Xaa can be any naturally occurring amino acid
  misc_feature (115)..(115): Xaa can be any naturally occurring amino acid
  misc_feature (117)..(118): Xaa can be any naturally occurring amino acid
  misc_feature (120)..(122): Xaa can be any naturally occurring amino acid
  misc_feature (125)..(126): Xaa can be any naturally occurring amino acid
  misc_feature (129)..(135): Xaa can be any naturally occurring amino acid
  misc_feature (137)..(138): Xaa can be any naturally occurring amino acid
  misc_feature (140)..(140): Xaa can be any naturally occurring amino acid
  misc_feature (142)..(145): Xaa can be any naturally occurring amino acid
  misc_feature (148)..(154): Xaa can be any naturally occurring amino acid
  Coding DNA Sequence Number=SeqID_5039
TDXXXXRGXSXTXGYXRSTXXQDSMASQSIFAPAVGSLLLAGRCGXXXEXXXXXXXXXXSXXLRYXGXPXXXXXXSXXXXXXXXXXFXXXSVXXXGPLFFXXXXPXXPFFXXXLXPXXFXXXRVXXPPXXXXXXXIXXSXPXXXXPPXXXXXXX

SEQ ID NO: 12234 - protein, 151 aa, Zea mays
  misc_feature (1)..(8): Xaa can be any naturally occurring amino acid
  misc_feature (12)..(15): Xaa can be any naturally occurring amino acid
  misc_feature (19)..(20): Xaa can be any naturally occurring amino acid
  misc_feature (24)..(26): Xaa can be any naturally occurring amino acid
  misc_feature (29)..(30): Xaa can be any naturally occurring amino acid
  misc_feature (32)..(32): Xaa can be any naturally occurring amino acid
  misc_feature (34)..(38): Xaa can be any naturally occurring amino acid
  misc_feature (40)..(42): Xaa can be any naturally occurring amino acid
  misc_feature (47)..(47): Xaa can be any naturally occurring amino acid
  misc_feature (49)..(49): Xaa can be any naturally occurring amino acid
  misc_feature (51)..(52): Xaa can be any naturally occurring amino acid
  misc_feature (54)..(55): Xaa can be any naturally occurring amino acid
  misc_feature (58)..(60): Xaa can be any naturally occurring amino acid
  misc_feature (62)..(62): Xaa can be any naturally occurring amino acid
  misc_feature (67)..(68): Xaa can be any naturally occurring amino acid
  misc_feature (71)..(71): Xaa can be any naturally occurring amino acid
  misc_feature (76)..(76): Xaa can be any naturally occurring amino acid
  misc_feature (82)..(82): Xaa can be any naturally occurring amino acid
  misc_feature (98)..(98): Xaa can be any naturally occurring amino acid
  misc_feature (111)..(111): Xaa can be any naturally occurring amino acid
  misc_feature (114)..(114): Xaa can be any naturally occurring amino acid
  misc_feature (116)..(116): Xaa can be any naturally occurring amino acid
  misc_feature (118)..(120): Xaa can be any naturally occurring amino acid
  misc_feature (122)..(124): Xaa can be any naturally occurring amino acid
  misc_feature (133)..(133): Xaa can be any naturally occurring amino acid
  misc_feature (135)..(135): Xaa can be any naturally occurring amino acid
  misc_feature (141)..(142): Xaa can be any naturally occurring amino acid
  misc_feature (145)..(145): Xaa can be any naturally occurring amino acid
  misc_feature (149)..(149): Xaa can be any naturally occurring amino acid
  misc_feature (151)..(151): Xaa can be any naturally occurring amino acid
  Coding DNA Sequence Number=SeqID_5041
XXXXXXXXITFXXXXVQKXXIDTXXXLLXXLXLXXXXXSXXXTHTTXEXAXXSXXRRXXXRXRWICXXRLXCHLRXHLTPAXHLPTSTMLTTATQPPXGSELIPSHTHAPXQQXHXSXXXVXXXLRTMRELAXAXCSCVEXXQGXVSLXTX

SEQ ID NO: 12235 - protein, 170 aa, Zea mays
  misc_feature (21)..(21): Xaa can be any naturally occurring amino acid
  Coding DNA Sequence Number=SeqID_5043
  Gene Ontology: Mol. function=RNA-directed DNA polymerase activity; Cellular component=chromatin; Biological process=chromatin assembly or disassembly
  Homolog annotation: Hit_ID=Q53PP0; Match level="QueryCoverage=79%, HitCoverage=10%, E-value=8e-31, Identity=50%"; Hit description =Retrotransposon protein, putative, unclassified
RPYRYPPAIKDEIERQVLQTXIIQHSDSPFFSSALLVKKKDESWQFCVDFRHLNAIAVKSTYPVPVIEELLDELGQASLFTSLDLTAGYHQILLQPEDTAVRSSLSTFADEGLPQFIPSLDTTDVGASGTGFDPFFTFHDKSSTINFMLDYFFPIFNYLGSKLKDLTDSN

SEQ ID NO: 12236 - protein, 133 aa, Zea mays
  misc_feature (112)..(112): Xaa can be any naturally occurring amino acid
  Coding DNA Sequence Number=SeqID_5044
  Gene Ontology: Mol. function=DNA binding; Cellular component=nucleus; Biological process=regulation of transcription
  Homolog annotation: Hit_ID=Q96463; Match level="QueryCoverage=39%, HitCoverage=16%, E-value=2e-14, Identity=73%"; Hit description=Myb4 transcription factor
IARWSAIAARLPGRTDNEIKNVWHTHLKKRLDPTKQEQQQHGTTPTTGVGKKHRPAAAAKRGGDGARKATADADAVVVPAPATAAPASPERSAASSSVTESSMTEQEHGNTXSSPAFPQGESFTTSSSDAHPV

SEQ ID NO: 12237 - protein, 157 aa, Zea mays
  misc_feature (142)..(154): Xaa can be any naturally occurring amino acid
  Coding DNA Sequence Number=SeqID_5045
  Subcellular localization annotation: CTP_CleavageSite=23; ConfidenceScore=5.47e-01
EKTCSASSQSESSIYIHQISTVRSVRRASSLFPPALLPLFSLSRRNLPFLDQFIRSSLLHRFNDPSCSWITAFAGAGWCSGATSQIFGADNPVSSYISPAEVVVDPTSAFVASGLPKRIFSRIVVAKRVGLSSPIRVVPNRXXXXXXXXXXXXXLTC

SEQ ID NO: 12238 - protein, 81 aa, Zea mays
  Coding DNA Sequence Number=SeqID_5047
SWIEFEAAISAIYIAPSCQCSPNSYIVHPCAVHLRYYSLAMLFISITIHRVYCSPTILFTDDTVHHLVTRFLDRWDRGTRT

SEQ ID NO: 12239 - protein, 241 aa, Zea mays
  misc_feature (213)..(213): Xaa can be any naturally occurring amino acid
  Coding DNA Sequence Number=SeqID_5049
  Homolog annotation: Hit_ID=Q6Z5M6; Match level="QueryCoverage=77%, HitCoverage=14%, E-value=3e-68, Identity=70%"; Hit description =Transducin / WD-40 repeat protein-like
  Subcellular localization annotation: CTP_CleavageSite=3; ConfidenceScore=5.04e-01
MTSPSENPNPNPNTPFEIGKLFRPTNPMPNATPNPIFPGVAGGPAPSGPYSYPPVTPPFHRGPYIHYPQDPHAMTRPVVSFPMPNPNLNPNPNANPNAVAPGPNPGARLMQLLGNSGPTQFETAVSMPPPTSEFAQLQLLPAMPSAPPARMLSSTSSKVPRGRLLGTGERAVHDVDSRLPGEAQPPQLEVTPITKYTSDPGLVLGRQIAVNRXYIVYGLKLGNIRVLNINTALRSLLHGHT

SEQ ID NO: 12240 - protein, 61 aa, Zea mays
  Coding DNA Sequence Number=SeqID_5050
MTRAGTLGERKNIQAGFFSLICNAPSMRTEEAGEIYLSKKNVLNCSTQPGEKSICSKQDMS

SEQ ID NO: 12241 - protein, 54 aa, Zea mays
  Coding DNA Sequence Number=SeqID_5052
VDLCILLFFAHSLQLDAQTYGQLTEAIIEILILFKISNLSQIILKTCCTCKTNN

SEQ ID NO: 12242 - protein, 56 aa, Zea mays
  Coding DNA Sequence Number=SeqID_5054
  Gene Ontology: Mol. function=phosphopyruvate hydratase activity; Cellular component=phosphopyruvate hydratase complex; Biological process=glycolysis
  Homolog annotation: Hit_ID=A7PGJ9; Match level="QueryCoverage=94%, HitCoverage=11%, E-value=1e-22, Identity=96%"; Hit description =Enolase
MVTVYHVLKGIIKAKYGQDACNVGDEGGFAPNVQDNREGLVLLMDAIEKAGYTGMV

SEQ ID NO: 12243 - protein, 24 aa, Zea mays
  Coding DNA Sequence Number=SeqID_5055
PGSLVIRTCIILRPDNHETPWSNI

SEQ ID NO: 12244 - protein, 99 aa, Zea mays
  Coding DNA Sequence Number=SeqID_5057
  Gene Ontology: Mol. function=nucleic acid binding; Cellular component= nucleus; Biological process=jasmonic acid mediated signaling pathway
  Homolog annotation: Hit_ID=A2Y6P7; Match level="QueryCoverage=100%, HitCoverage=40%, E-value=1e-37, Identity=74%"; Hit description =Putative uncharacterized protein
MVSRENLHLVLDPASLGAPWADPSAAEIPPQLLAALGEYLSSARGDVETEADDEFMMHEFKVRRCARARSHDWTACPYAHPGEAARRRDPPPGAYAGEP

SEQ ID NO: 12245 - protein, 73 aa, Zea mays
  Coding DNA Sequence Number=SeqID_5058
RDRHASPTPQEHQSHIPSISTVRLERPEQKKIIREAATQVCSLISLVLLLAAGTHSTRKGPVQEALLLGFFFF

SEQ ID NO: 12246 - protein, 97 aa, Zea mays
  Coding DNA Sequence Number=SeqID_5060
  Subcellular localization annotation: CTP_CleavageSite=74; ConfidenceScore=5.31e-01
LFRLSGYATVYRYGEDPSKLTGNGPSAQTSSGKTSLGPSKARLTKNSFPNSQHKQMLFEVNFDQLIPLNNRICRVSLSLSLSLSLSLSLSPPLPPSF

SEQ ID NO: 12247 - protein, 92 aa, Zea mays
  misc_feature (24)..(24): Xaa can be any naturally occurring amino acid
  misc_feature (46)..(47): Xaa can be any naturally occurring amino acid
  Coding DNA Sequence Number=SeqID_5062
  Homolog annotation: Hit_ID=A2WQY6; Match level="QueryCoverage=71%, HitCoverage=4%, E-value=5e-15, Identity=60%"; Hit description =Putative uncharacterized protein
MEPDSATTRLALLALLLLAAPAAXASAGRVGDGLLRHGDFETHPAXXFEEPASGAEGASSIPGWNNKGTFKVLSKGQHQGGMVLICPPEKLF

SEQ ID NO: 12248 - protein, 92 aa, Zea mays; identical to SEQ ID NO: 12247
  misc_feature (24)..(24): Xaa can be any naturally occurring amino acid
  misc_feature (46)..(47): Xaa can be any naturally occurring amino acid
  Coding DNA Sequence Number=SeqID_5063
  Homolog annotation: Hit_ID=A2WQY6; Match level="QueryCoverage=71%, HitCoverage=4%, E-value=5e-15, Identity=60%"; Hit description =Putative uncharacterized protein

SEQ ID NO: 12249 - protein, 329 aa, Zea mays
  misc_feature (1)..(188): Xaa can be any naturally occurring amino acid
  misc_feature (269)..(271): Xaa can be any naturally occurring amino acid
  misc_feature (277)..(279): Xaa can be any naturally occurring amino acid
  misc_feature (281)..(282): Xaa can be any naturally occurring amino acid
  misc_feature (285)..(289): Xaa can be any naturally occurring amino acid
  misc_feature (291)..(309): Xaa can be any naturally occurring amino acid
  Coding DNA Sequence Number=SeqID_5064
  Gene Ontology: Mol. function=transferase activity
  Homolog annotation: Hit_ID=Q5N724; Match level="QueryCoverage=31%, HitCoverage=19%, E-value=6e-40, Identity=82%"; Hit description =Putative ceramide glucosyltransferase
XXXXXXXXXXXXXXXXXXXXXXXXXXXXXXXXXXXXXXXXXXXXXXXXXXXXXXXXXXXXXXXXXXXXXXXXXXXXXXXXXXXXXXXXXXXXXXXXXXXXXXXXXXXXXXXXXXXXXXXXXXXXXXXXXXXXXXXXXXXXXXXXXXXXXXXXXXXXXXXXXXXXXXXXXXXXXXXXXXXXXXXXXXXXTSLYGGPLEFLFVVESKDDPAYRAVSRLIVEYKDKLDAKVVVAGFSTTCSQKIHNQLIGVEKMHKDSKYVLFLDDDVRLHXXXVGALTXXXEXXPEXXXXXGXXXXXXXXXXXXXXXXXXXCLVRWDLQLVGRLSSCGVAV

SEQ ID NO: 12250 - protein, 180 aa, Zea mays
  Coding DNA Sequence Number=SeqID_5065
  Subcellular localization annotation: CTP_CleavageSite=67; ConfidenceScore=5.16e-01
QASKREPPTRASRQRRLNSEPTDRPTVPFRSPHHGGAAGTGAHGAGRPTSRRRRRGDSSRRQATSTRTGEGGRRFVTGPYHLHHPFGGERTASPKRDHSVYMGRNRVRGATGFHFGMRPFPGLKGALRNQGKDPFPPIQEKGGLAKELGRVNQENPEKACKTFNGRGPWEATPQAVILWP

SEQ ID NO: 12251 - protein, 156 aa, Zea mays
  Coding DNA Sequence Number=SeqID_52
  Gene Ontology: Cellular component=ribosome
  Homolog annotation: Hit_ID=A9PFR6; Match level="QueryCoverage=87%, HitCoverage=81%, E-value=2e-35, Identity=58%"; Hit description =Putative uncharacterized protein
MGQGEEDKSKGFADEAGTHHQYGTFQGVSNYPPPRPQNSPPVTGFPQPSAPPRVYDSAPPHYAHGYQTVPVHGIAEGRPVHVRQRRLPCCGIGLGWFLFIVGFFLGAIPWYVGMFIMIVGRRIDHREKPGYIACTIAAILATIAVILGVTKGAEDW

SEQ ID NO: 12252 - protein, 224 aa, Zea mays
  Coding DNA Sequence Number=SeqID_53
  Gene Ontology: Mol. function=translation elongation factor activity; Cellular component=eukaryotic translation elongation factor 1 complex; Biological process=translational elongation
  Homolog annotation: Hit_ID=Q9SCX3; Match level="QueryCoverage=100%, HitCoverage=100%, E-value=1e-84, Identity=72%"; Hit description =Elongation factor 1-beta 2
  Pfam annotation: Domain name=EF1_GNE; Domain location=135-224; Score =147.5; E_value=3.7e-41; Accession=PF00736.9; Description=EF-1 guanine nucleotide exchange doma
  Pfam annotation: Domain name=Ribosomal_60s; Domain location=33-106; Score=-10.0; E_value=0.066; Accession=PF00428.9; Description=60s Acidic ribosomal protein
  Pfam module annotation: Pfam domain module=EF1_GNE::Ribosomal_60s; Domain location=135-224::33-106
MAITFSDLHTEEGLKSVEEHLAGKTYISGDQLSVDDVKVYAAVSVKPSDAFPNASRWFDCVASHLAKSFPGKAVGVSIGGSAAAAPAQAEAPAAAAADDDDDMDLFGDETEEEKKAAEEREAAKKDTKKPKESGKSSVLMEVKPWDDETDMKKLEECVRAVEMPGLLWGASKLVPVGYGIKKLTIMLTIVDDLVSPDNLIEDYLTCEPNNEYIQSVDIVAFNKI

SEQ ID NO: 12253 - protein, 191 aa, Zea mays
  Coding DNA Sequence Number=SeqID_54
  Gene Ontology: Cellular component=integral to membrane; Biological process=photosynthesis, light harvesting
  Homolog annotation: Hit_ID=O23325; Match level="QueryCoverage=99%, HitCoverage=60%, E-value=2e-75, Identity=79%"; Hit description=Light induced protein like
  Pfam annotation: Domain name=Chloroa_b-bind; Domain location=71-184; Score=-41.8; E_value=0.027; Accession=PF00504.12; Description =Chlorophyll A-B binding protein
  Subcellular localization annotation: CTP_CleavageSite=41; ConfidenceScore=5.54e-01
MATASFSMLSVFAAPSGGLGSRNIRNTNQVFSNRNPLVGVRCMAQDDPIKEESPLPSTSATPPQTPLYSPPPLSKPKVSTKFGDLLAFSGPAPERINGRLAMVGFVAAIAVELLKGENVFAQISDGGVGWFLGTTALLTLASMIPLFKGIRAESKSKGFMTSDAELWNGRFAMLGLVALAFTEYVKGGTLV

SEQ ID NO: 12254 - protein, 181 aa, Zea mays
  Coding DNA Sequence Number=SeqID_55
  Gene Ontology: Mol. function=protein binding; Cellular component =ribonucleoprotein complex; Biological process=translation
  Homolog annotation: Hit_ID=Q2V3E9; Match level="QueryCoverage=53%, HitCoverage=64%, E-value=3e-47, Identity=95%"; Hit description =Uncharacterized protein At4g25740.2
  Pfam annotation: Domain name=S10_plectin; Domain location=3-99; Score= 250.6; E_value=3.3e-72; Accession=PF03501.5; Description=PlectinS10 domain
MIISETNRREICKYLFKEGVLFAKKDFNLPKHPLIESVPNLQVIKLMQSFKSKEYVRETFAWMHYYWFLTNEGIEFLRTYLNLPSDVVPATLKKSAKPIGRPFGGPPGDRPRGPPRFDGDRPRYGDRDGYRGGQRGGDVGGEKGGAPADYQPSFQGGGGRPGFGRGAGGFSAAAPSGSGLP

SEQ ID NO: 12255 - protein, 216 aa, Zea mays
  Coding DNA Sequence Number=SeqID_56
  Gene Ontology: Mol. function=oxidoreductase activity; Cellular component=chloroplast thylakoid membrane; Biological process =electron transport
  Homolog annotation: Hit_ID=Q9LU86; Match level="QueryCoverage=90%, HitCoverage=90%, E-value=2e-93, Identity=86%"; Hit description =Peroxiredoxin Q, chloroplast precursor
  Pfam annotation: Domain name=AhpC-TSA; Domain location=71-195; Score =188.2; E_value=2e-53; Accession=PF00578.11; Description=AhpCTSA family
  Pfam annotation: Domain name=Redoxin; Domain location=70-213; Score =102.8; E_value=1.1e-27; Accession=PF08534.1; Description=Redoxin
  Pfam module annotation: Pfam domain module=AhpC-TSA::Redoxin; Domain location=71-195::70-213
  Subcellular localization annotation: CTP_CleavageSite=68; ConfidenceScore=5.91e-01
MASSSSFFTFSSQTTLHSHLHRNTFLTKTQFPVPTKSSESNFFGLRLSPSTSRSPLSPCSFKSSIFAKVNKGQSAPDFTLKDQNGKPVSLKKYKGKPVVVYFYPADETPGCTKQACAFRDSYEKFKKAGAEVIGISGDDSASHKAFASKYKLPYTLLSDEGNRVRKDWGVPGDLFGALPGRQTYVLDKNGVVQLIYNNQFQPEKHIDETLKFLKAA

SEQ ID NO: 12256 - protein, 158 aa, Zea mays
  Coding DNA Sequence Number=SeqID_57
  Homolog annotation: Hit_ID=A7QGQ3; Match level="QueryCoverage=93%, HitCoverage=94%, E-value=1e-54, Identity=74%"; Hit description =Chromosome chr12 scaffold_93, whole genome shotgun sequence
MEEEIGGREDRWKGSLENITEMASNLDSLQKLLLKKAVFVEEDTFARASLVSEQGRAIKVLEQRVQTLERELDAAITAAAHARSEKRHAESSQKAAESRAQEVTKELENTTKVFKLHMEELRGMQEQISKRDNEIKLLESIIQTLGGKERLGKSGVSG

SEQ ID NO: 12257 - protein, 152 aa, Zea mays
  Coding DNA Sequence Number=SeqID_58
  Gene Ontology: Mol. function=superoxide dismutase activity; Cellular component=cytoplasm; Biological process=superoxide metabolic process
  Homolog annotation: Hit_ID=P24704; Match level="QueryCoverage=100%, HitCoverage=100%, E-value=8e-74, Identity=88%"; Hit description =Superoxide dismutase [Cu-Zn]
  Pfam annotation: Domain name=Sod_Cu; Domain location=1-152; Score =334.1; E_value=2.5e-97; Accession=PF00080.10; Description=Copperzinc superoxide dismutase (SODC)
MGKGVAVLNSSEGVKGTIFFTQEGDGVTTVTGTVSGLKPGLHGFHVHALGDTTNGCMSTGPHFNPDGKQHGAPEDANRHAGDLGNIIVGDDGTATFTITDCQIPLSGPNSIVGRAVVVHADPDDLGKGGHELSLATGNAGGRVACGIIGLQG

SEQ ID NO: 12258 - protein, 127 aa, Zea mays
  Coding DNA Sequence Number=SeqID_59
  Gene Ontology: Mol. function=metal ion binding; Biological process =metal ion transport
  Homolog annotation: Hit_ID=O82089; Match level="QueryCoverage=100%, HitCoverage=100%, E-value=1e-35, Identity=66%"; Hit description =Copper homeostasis factor
  Pfam annotation: Domain name=HMA; Domain location=5-66; Score=61.5; E_ value=2.9e-15; Accession=PF00403.16; Description=Heavy-metal -associated domain
MSQTVVLKVGMSCQGCVGAVNRVLGKMEGVESFDIDIKEQKVTVKGNVEPEAVFQTVSKTGKKTSYWPVEAEAEPKAEAEPKAEAVTETKTEAETKTEAETKIEAKVDAKADVEPKLAEAETKPSEV

SEQ ID NO: 12259 - protein, 139 aa, Zea mays
  Coding DNA Sequence Number=SeqID_60
  Gene Ontology: Cellular component=chloroplast thylakoid membrane
  Homolog annotation: Hit_ID=Q9SUY2; Match level="QueryCoverage=85%, HitCoverage=82%, E-value=2e-37, Identity=66%"; Hit description =Putative uncharacterized protein F4F15.340
  Subcellular localization annotation: CTP_CleavageSite=79; ConfidenceScore=5.15e-01
MAEQPQQQRESDSSPPQLKLPSFVVNLFPFLQPKSPSPANGADGAPKPAGGVSKDKETQNSTVSFPYNPPKSTEPLKLEAEPSSGSTSNSLVIWQVYALGGFLVLKWAWARWNERNQTSDKKEDDDADGDDQAPHPEDD

SEQ ID NO: 12260 - protein, 125 aa, Zea mays
  Coding DNA Sequence Number=SeqID_61
QVFTTSSQSPMERLLPRSEYCLIHFSIVVALSQGTHLTVNDICFLSSASFILNNPTGALLVQDAVTTFTALDHIPCLECVLSSAISAQIADRLRLLRIHRGREGVGFSKLGFVRGCSVGRRLCEY

SEQ ID NO: 12261 - protein, 168 aa, Zea mays
  Coding DNA Sequence Number=SeqID_62
  Gene Ontology: Cellular component=integral to membrane
  Homolog annotation: Hit_ID=Q9ZV66; Match level="QueryCoverage=100%, HitCoverage=100%, E-value=2e-67, Identity=74%"; Hit description =Expressed protein
MGAFGKLIDAILFLYFALMVFIAPLFDAQTVLPKEIYPAILTDLNRNYIADFGDYLLAEEPHFLVGLIWHELVLLWPLSIANVYAILAGKSWFATTCLLYGASVVTSMSAVLGEMLGSGKASQKLLMMYVPFMGIGILATLRGLVSRSTKSTGSVDKRSAVKPRRKLA

SEQ ID NO: 12262 - protein, 345 aa, Zea mays
  Coding DNA Sequence Number=SeqID_63
  Gene Ontology: Mol. function=sulfotransferase activity; Cellular component=cytoplasm; Biological process=amine metabolic process
  Homolog annotation: Hit_ID=Q2RAR0; Match level="QueryCoverage=97%, HitCoverage=97%, E-value=1e-121, Identity=63%"; Hit description =Sulfotransferase domain containing protein
  Pfam annotation: Domain name=Sulfotransfer_1; Domain location=74-332; Score=269.9; E_value=5.1e-78; Accession=PF00685.17; Description =Sulfotransferase domain
MATVFPRDAGVSTPEADEAKKIYDEARRVVSTYETVPSPSGTLQDYCRHPSGWCITLPIMVSSMVAEQHFEARGTDVLLVTMPKSGTTWIKALLYAAAHRTDDTSSSILRQLASHNSHQLVPFLEAQVYTKDQIPDLSSLPAPRLFATHIPAESLPPSVVASGCKVVYLCRDPKDCFVSLWHFMNKFTPWDIDEAHGRFCEGVSLYGPFWEHVLSYWRWHVDRPGQVLFLTYEELSADPLGQLRRLAEFIGRPFTPGEQEAGVDREIAEACAMKSMVNQEVNQSRTTEIVEMPIPNGIFFRRGVVGDWTNYLTPEMAGRIDEITKSKFEGSGLMLPKTISEISKI

SEQ ID NO: 12263 - protein, 148 aa, Zea mays
  Coding DNA Sequence Number=SeqID_64
  Gene Ontology: Mol. function=2 iron, 2 sulfur cluster binding; Cellular component=chloroplast; Biological process=electron transport
  Homolog annotation: Hit_ID=P16972; Match level="QueryCoverage=100%, HitCoverage=100%, E-value=3e-53, Identity=74%"; Hit description =Ferredoxin-2, chloroplast precursor
  Pfam annotation: Domain name=Fer2; Domain location=60-135; Score =121.7; E_value=2.2e-33; Accession=PF00111.17; Description=2Fe-2S iron-sulfur cluster binding domain
  Subcellular localization annotation: CTP_CleavageSite=52; ConfidenceScore=5.61e-01
MASTAISSVIVGTSFLRRQTSPISLRSLPLANTQTLFGLKSGTARGGRVTAMATYKVKFITPEGEQEVECDDDVYVLDAAEEAGIDLPYSCRAGSCSSCAGKVVSGFVDQSDQSFLDDDQIAAGFVLTCAAYPTSDVTIETHREDDIV

SEQ ID NO: 12264 - protein, 210 aa, Zea mays
  Coding DNA Sequence Number=SeqID_65
  Gene Ontology: Mol. function=phosphopantothenoylcysteine decarboxylase activity; Cellular component=cytoplasm; Biological process=response to stress
  Homolog annotation: Hit_ID=Q9SWE5; Match level="QueryCoverage=94%, HitCoverage=94%, E-value=1e-108, Identity=94%"; Hit description =Phosphopantothenoylcysteine decarboxylase
  Pfam annotation: Domain name=Flavoprotein; Domain location=20-140; Score=170.1; E_value=5.7e-48; Accession=PF02441.9; Description =Flavoprotein
MENGKRDRDDMEVQPSPRKPRVLLAASGSVAAIKFGNLCHCFTEWAEVRAVVSKSSLHFLDKLSLPPEVTLYTDEEEWSSWNKIGDPVLHIELRRWADVMVIAPLSANTLAKIAGGMCDNLLTCIIRAWDYSKPLFVAPAMNTLMWNNPFTERHLLSLDELGITLIPPIKKRLACGDYGNGAMAEPSLIYSTVRLFWESQGHQQSGGGTS

SEQ ID NO: 12265 - protein, 112 aa, Zea mays
  Coding DNA Sequence Number=SeqID_66
  Gene Ontology: Mol. function=peptidyl-prolyl cis-trans isomerase activity; Cellular component=cytoplasm; Biological process=protein folding
  Homolog annotation: Hit_ID=Q8LGG0; Match level="QueryCoverage=100%, HitCoverage=100%, E-value=1e-56, Identity=92%"; Hit description =Peptidyl-prolyl isomerase FKBP12
  Pfam annotation: Domain name=FKBP_C; Domain location=11-109; Score =123.2; E_value=7.7e-34; Accession=PF00254.18; Description=FKBP-type peptidyl-prolyl cis-trans isomeras
MGVEKQVIRPGTGAKPAPGQTVTVHCTGFGKGGDLSQQFWSTKDAGQKPFSFQIGKGAVIKGWDEGVMGMQIGEVARLRCSPDYAYGPGGFPAWGIQPNSVLDFEIEVLSVQ

SEQ ID NO: 12266 - protein, 158 aa, Zea mays
  Coding DNA Sequence Number=SeqID_67
  Gene Ontology: Mol. function=enzyme inhibitor activity; Cellular component=cell wall; Biological process=response to stress
  Homolog annotation: Hit_ID=Q9M328; Match level="QueryCoverage=100%, HitCoverage=98%, E-value=6e-74, Identity=87%"; Hit description =Putative uncharacterized protein F5K20_290
  Pfam annotation: Domain name=Usp; Domain location=4-157; Score=75.5; E_value=1.8e-19; Accession=PF00582.16; Description=Universal stress protein family
MPKDRKIGIAMDFSESSKNALRWAIDNLADKGDTFYIIHALPTSEAGPRNSLWLKSGSPLIPLVEFREPETMEKYGVQIDIPVLDMLDTGSRQKEIHVVTKLYWGDAREKLVDAVKSLKLDSIVMGSRGLSALQRIIMGSVSSFVIQHAPCPVTVVKD

SEQ ID NO: 12267 - protein, 141 aa, Zea mays
  Coding DNA Sequence Number=SeqID_68
  Gene Ontology: Mol. function=catalytic activity; Cellular component =protein complex; Biological process=metabolic process
  Homolog annotation: Hit_ID=A7PAL6; Match level="QueryCoverage=100%, HitCoverage=100%, E-value=3e-56, Identity=73%"; Hit description =Chromosome chr14 scaffold_9, whole genome shotgun sequence
  Pfam annotation: Domain name=UMP1; Domain location=3-132; Score =214.6; E_value=2.4e-61; Accession=PF05348.2; Description=Proteasome maturation factor UMP1
MESPKKIAHEIGGVKRDALRFGLNGVKSDIVGSHPLESSYESEKRSHEAMKRTIIGHTYGTALPLKMDMDRQILSRFQRPAGPIPSSMLGLEVYTGAIDDFGFEDYLNDPRDSETVRPVDFHHEMEVRLGMSKGPVAPSFI

SEQ ID NO: 12268 - protein, 134 aa, Zea mays
  Coding DNA Sequence Number=SeqID_664
KRQWGQGETADAVPQLRHRSESARRPGLGTPMPGEKLRSTCVDLPQARDVGMDGLGHGVPLPVRVSPRCRNPDVDRSRLNPPPEMARCSTASSGPSGSCCAAKRKGEQKKLLGRASLGVALIFWRRRYNKGIQS

SEQ ID NO: 12269 - protein, 94 aa, Zea mays
  misc_feature (13)..(13): Xaa can be any naturally occurring amino acid
  misc_feature (17)..(17): Xaa can be any naturally occurring amino acid
  misc_feature (22)..(22): Xaa can be any naturally occurring amino acid
  Coding DNA Sequence Number=SeqID_666
  Subcellular localization annotation: CTP_CleavageSite=13; ConfidenceScore=5.28e-01
TTCSSPKMPVRVXQSTXTGWRXAFLAVRREISRPVRMQSPLQGHGRLPRTLAHVVGTQGSLFAILASYSYFAFSLPTSSRFFAEVNSESLLPHI

SEQ ID NO: 12270 - protein, 77 aa, Zea mays
  misc_feature (51)..(51): Xaa can be any naturally occurring amino acid
  Coding DNA Sequence Number=SeqID_668
  Gene Ontology: Mol. function=nucleoside-triphosphatase activity; Cellular component=protein complex; Biological process=protein catabolic process
  Homolog annotation: Hit_ID=Q9SEI4; Match level="QueryCoverage=71%, HitCoverage=13%, E-value=3e-17, Identity=78%"; Hit description=26S protease regulatory subunit 6B homolog
ARLQKMDGFDQTVNVKVVMATNRADTLDPTLVRLGRLDRKVEFPLPDWWHXRLVFQMMKFPWIASGIAIKVFFISCK

SEQ ID NO: 12271 - protein, 169 aa, Zea mays
  misc_feature (15)..(15): Xaa can be any naturally occurring amino acid
  misc_feature (34)..(34): Xaa can be any naturally occurring amino acid
  misc_feature (53)..(54): Xaa can be any naturally occurring amino acid
  misc_feature (88)..(88): Xaa can be any naturally occurring amino acid
  misc_feature (142)..(142): Xaa can be any naturally occurring amino acid
  Coding DNA Sequence Number=SeqID_669
QVEFIINISIARAFXQEPATIGQSEETEELSKIXLENKDIQLDINIREESRSXXQQGNFDTEGTSSSEAFLLGTVASEKMLEKLKHKXGRCEPALEKAIVELEHGINGLKYFVCLDPRLQVCSATDTRRIKETLPWYMPVAXMDKRRLVLYNFMSGLKVVFDRERKVFC

SEQ ID NO: 12272 - protein, 159 aa, Zea mays
  misc_feature (65)..(65): Xaa can be any naturally occurring amino acid
  misc_feature (116)..(116): Xaa can be any naturally occurring amino acid
  Coding DNA Sequence Number=SeqID_670
  Homolog annotation: Hit_ID=Q9AV83; Match level="QueryCoverage=93%, HitCoverage=78%, E-value=5e-58, Identity=74%"; Hit description =Putative uncharacterized protein OSJNBa0006L06.2
MSLLQRIQIKYIEDGDEIRKYFAAFHLLDDFPAAVIVDDFADFFSDRSCQQRYGIARARDLAMVXRALALCHNAIGHANAKLGTLGYCNLLLSDVHQGDTPRLLFIYQRWVNSIYXIRGDGNGSYILQNLGSSETGSKKARKAKYSIALQYLVLEETST

SEQ ID NO: 12273 - protein, 90 aa, Zea mays
  Coding DNA Sequence Number=SeqID_671
ERQSINKDDLINKILEENKQPAKCIGTSHHHHFSRFGFRLSMMFLLQFGVRKSHPFLASNKCKCLADLQFFICFYNHRESALIISDPEIQ

SEQ ID NO: 12274 - protein, 112 aa, Zea mays
  Coding DNA Sequence Number=SeqID_673
QDKIHWLWSSCQCDKFSLLDGAFSLLLSWTPVELYNFRGKHLPQTLHANNEFSLFVIGHGTCFFDIRLLYASIFSWLIRKSFSSYSSGSWTQTTAMSVSMRVGTPTPAAGSC

SEQ ID NO: 12275 - protein, 193 aa, Zea mays
  misc_feature (5)..(5): Xaa can be any naturally occurring amino acid
  misc_feature (17)..(17): Xaa can be any naturally occurring amino acid
  misc_feature (30)..(30): Xaa can be any naturally occurring amino acid
  misc_feature (36)..(36): Xaa can be any naturally occurring amino acid
  misc_feature (193)..(193): Xaa can be any naturally occurring amino acid
  Coding DNA Sequence Number=SeqID_675
  Subcellular localization annotation: CTP_CleavageSite=98; ConfidenceScore=5.85e-01
FTPSXSTCSSTATSSGXTSTYGSSNTTNDXTGSSTXNARIGTGSSIDVATSSCISSYATTNFGTSGDTSTHGSTGTCLGRLDVGLVNLRARLPLQRVLQNEDRGVKRHGEVEAAATSREATIRLGVERGRGCLLDRGRRSRLSMACERSPPALLRTSPSTRQCTRKRNGVVGGQLVQSAVVKVAAAAVCVWSX

SEQ ID NO: 12276 - protein, 175 aa, Zea mays
  Coding DNA Sequence Number=SeqID_677
NLFMTALANRTFGGTALGLLFLAAVRMAALGEGRQDGPELPSRTPPKGIPWASSTGRGGLGERGEAEWDSLLWCARGRRTAGEEADGLRGRLREVCQAEQRDGEEKNTATQRPGNGGGRVWTTPEAGSSLLSDHGTMRGSFHTFFVASPDSTCLGNLHKTSSQCQWLNTDQRLQR

SEQ ID NO: 12277 - protein, 119 aa, Zea mays
  Coding DNA Sequence Number=SeqID_679
  Subcellular localization annotation: CTP_CleavageSite=21; ConfidenceScore=5.23e-01
DSTRTTSTDPPTTYARTNKARAAAAMALSATNLNTLKALLCAVFILSTTVDIVVARGHCEPTAAVVVPAGAGRRMLGAAASSAAAVSMPRLTRPAAAAAAATYSESKRASPSGPDPQHH

SEQ ID NO: 12278 - protein, 180 aa, Zea mays; identical to SEQ ID NO: 12250
  Coding DNA Sequence Number=SeqID_5066
  Subcellular localization annotation: CTP_CleavageSite=67; ConfidenceScore=5.16e-01

SEQ ID NO: 12279 - protein, 90 aa, Zea mays
  Coding DNA Sequence Number=SeqID_5068
AGGRGGACRGLRKATAMGDSSGSVSVDVERIFFGGKEHRVRTRHGSLLSVSGKKGLLAIFVYFLSFCVLHSWLCIHMAVNLSCNNWTHDA

SEQ ID NO: 12280 - protein, 167 aa, Zea mays
  misc_feature (133)..(134): Xaa can be any naturally occurring amino acid
  Coding DNA Sequence Number=SeqID_5070
  Gene Ontology: Mol. function=aspartic-type endopeptidase activity; Biological process=DNA integration
  Homolog annotation: Hit_ID=Q8H6I0; Match level="QueryCoverage=100%, HitCoverage=9%, E-value=3e-40, Identity=54%"; Hit description =Putative gag-pol polyprotein
MSGDHAKKEMETGEKPTTSHGSTSSEESRTKRREKKKSSSNKGKEKKSSSHHKEKKEKSSSHKPHRSGDKQKRMRKVVYYETDTSSTSTSDSDAPSVTSKRQERKKFSKIPLHYSRISKHAPLLSVPLGKPPXXDGEDYARWSDLMRFHLTSLHKSIWDVVEFGAQV

SEQ ID NO: 12281 - protein, 117 aa, Zea mays
  misc_feature (10)..(10): Xaa can be any naturally occurring amino acid
  Coding DNA Sequence Number=SeqID_5071
  Gene Ontology: Mol. function=protein serine/threonine kinase activity; Cellular component=plasma membrane; Biological process =protein amino acid phosphorylation
  Homolog annotation: Hit_ID=A7P8W1; Match level="QueryCoverage=58%, HitCoverage=7%, E-value=1e-22, Identity=73%"; Hit description =Chromosome chr3 scaffold_8, whole genome shotgun sequence
ARGGMQWKRXGLIEKIMDPTLAGTVNPESLAKFAETAEKCLAEFGSDRISMGDVLWNLEYALQLQDANPPEGGDSDGNSDGATAEGGAIVPAGGAVPDASTAAAGELFQQLADMKGR

SEQ ID NO: 12282 - protein, 165 aa, Zea mays
  misc_feature (1)..(4): Xaa can be any naturally occurring amino acid
  misc_feature (6)..(7): Xaa can be any naturally occurring amino acid
  misc_feature (9)..(12): Xaa can be any naturally occurring amino acid
  misc_feature (16)..(18): Xaa can be any naturally occurring amino acid
  misc_feature (20)..(23): Xaa can be any naturally occurring amino acid
  misc_feature (25)..(27): Xaa can be any naturally occurring amino acid
  misc_feature (31)..(37): Xaa can be any naturally occurring amino acid
  misc_feature (41)..(41): Xaa can be any naturally occurring amino acid
  misc_feature (44)..(45): Xaa can be any naturally occurring amino acid
  misc_feature (49)..(50): Xaa can be any naturally occurring amino acid
  misc_feature (52)..(52): Xaa can be any naturally occurring amino acid
  misc_feature (56)..(56): Xaa can be any naturally occurring amino acid
  misc_feature (58)..(59): Xaa can be any naturally occurring amino acid
  misc_feature (67)..(67): Xaa can be any naturally occurring amino acid
  misc_feature (69)..(70): Xaa can be any naturally occurring amino acid
  misc_feature (73)..(73): Xaa can be any naturally occurring amino acid
  misc_feature (77)..(78): Xaa can be any naturally occurring amino acid
  misc_feature (80)..(80): Xaa can be any naturally occurring amino acid
  misc_feature (102)..(102): Xaa can be any naturally occurring amino acid
  misc_feature (137)..(137): Xaa can be any naturally occurring amino acid
  misc_feature (139)..(139): Xaa can be any naturally occurring amino acid
  Coding DNA Sequence Number=SeqID_5072
XXXXSXXTXXXXGRRXXXGXXXXKXXXCCHXXXXXXXGRFXVQXXARLXXRXVPVXPXXQGGTAGNXNXXQEXPRRXXQXARGGGGAQNAGIRSAHHAANNXRTMIYVGATFFFCCCPLPSALRCTPTYIIGEEARXVXKLGIFSFNLIQIISAIYVMTCICMCV

SEQ ID NO: 12283 - protein, 122 aa, Zea mays
  Coding DNA Sequence Number=SeqID_5074
  Homolog annotation: Hit_ID=Q761Y6; Match level="QueryCoverage=51%, HitCoverage=40%, E-value=2e-12, Identity=57%"; Hit description=BRI1 -KD interacting protein 128
LFGINFREEDGEGAAQRQEPQQKELFWAPAPLTTKSWADVEDDYYYYFATTASPRPIWGTAGEPAKEEDDVDDVVRAALQEVLKTLFEIMLFEDVGNQCRLRRPILSLIMTSEQVPSLIILF

SEQ ID NO: 12284 - protein, 142 aa, Zea mays
  misc_feature (87)..(87): Xaa can be any naturally occurring amino acid
  misc_feature (91)..(100): Xaa can be any naturally occurring amino acid
  misc_feature (104)..(105): Xaa can be any naturally occurring amino acid
  Coding DNA Sequence Number=SeqID_5075
SLGPRELLLLNQTGTKLPRKGHHTIGASCLGYNSVLITRTSEKEKKQSKRKSSKEHGKSLSLITKALGLNWRESDHQKVSRIESLKXPSVXXXXXXXXXXRTVXXPHAGLSGAPGNSSPAASSRWHSEKDHRTVRCQLFSNG

SEQ ID NO: 12285 - protein, 140 aa, Zea mays
  misc_feature (67)..(75): Xaa can be any naturally occurring amino acid
  misc_feature (77)..(83): Xaa can be any naturally occurring amino acid
  misc_feature (87)..(87): Xaa can be any naturally occurring amino acid
  misc_feature (89)..(89): Xaa can be any naturally occurring amino acid
  misc_feature (91)..(92): Xaa can be any naturally occurring amino acid
  misc_feature (94)..(95): Xaa can be any naturally occurring amino acid
  misc_feature (100)..(102): Xaa can be any naturally occurring amino acid
  misc_feature (104)..(105): Xaa can be any naturally occurring amino acid
  misc_feature (108)..(110): Xaa can be any naturally occurring amino acid
  misc_feature (112)..(114): Xaa can be any naturally occurring amino acid
  misc_feature (116)..(116): Xaa can be any naturally occurring amino acid
  misc_feature (118)..(123): Xaa can be any naturally occurring amino acid
  misc_feature (125)..(125): Xaa can be any naturally occurring amino acid
  misc_feature (127)..(128): Xaa can be any naturally occurring amino acid
  misc_feature (130)..(130): Xaa can be any naturally occurring amino acid
  misc_feature (134)..(135): Xaa can be any naturally occurring amino acid
  misc_feature (137)..(137): Xaa can be any naturally occurring amino acid
  Coding DNA Sequence Number=SeqID_5077
  Subcellular localization annotation: CTP_CleavageSite=38; ConfidenceScore=5.28e-01
FYWLSWSYGPAIMVEQFANGQKQQPQTIGPQRTKTSVRKQNTSKTSGRLSRVGPTFDQLFAKYMKKXXXXXXXXXYXXXXXXXDPVXNXFXXLXXSPILXXXPXXPPXXXLXXXIXSXXXXXXKXPXXFXILLXXTXPLT

SEQ ID NO: 12286 - protein, 197 aa, Zea mays
  Coding DNA Sequence Number=SeqID_5079
  Subcellular localization annotation: CTP_CleavageSite=73; ConfidenceScore=5.35e-01
VLPPPTQTLARTLLPPPFPARGPASEMRALPPGRRDGTGGRRRRPTSGWVAVPRPHARYRRRPVTQTAPAAPCAMTDAHPLLVPHPFPRPPVRSLRATRAAACLPHTPPRLRPVGPRASRVGRRFPPLTTRTVPLPPDSFPSPRFSSIAARVGRPPAFPPLSYPAPFSLPPPLPLPLHPVLLPSSLAPPRPLPPHLT

SEQ ID NO: 12287 - protein, 156 aa, Zea mays
  misc_feature (69)..(69): Xaa can be any naturally occurring amino acid
  misc_feature (74)..(74): Xaa can be any naturally occurring amino acid
  Coding DNA Sequence Number=SeqID_5081
QNPRHPPFLGVGASRGTARLPLPFSFLSSPEDLIHHRGLAGKNQGYIDNKQTKVPPEPRKEGSHRPSAXEGDVXTARAPGRGVAWRVGASRVTLRRVAIVICNKYLISTLGLSSLPTNADELATLMGGLLHGLYGWRKRLALSRAQAGTNGRDVNL

SEQ ID NO: 12288 - protein, 67 aa, Zea mays
  Coding DNA Sequence Number=SeqID_5082
  Gene Ontology: Mol. function=sugar:hydrogen symporter activity; Cellular component=integral to membrane; Biological process =carbohydrate transport
  Homolog annotation: Hit_ID=Q2QPX6; Match level="QueryCoverage=82%, HitCoverage=83%, E-value=3e-23, Identity=96%"; Hit description =Ribosome associated membrane protein RAMP4 containing protein, expressed
  Pfam annotation: Domain name=RAMP4; Domain location=1-59; Score=89.8; E_value=8.9e-24; Accession=PF06624.2; Description=Ribosome associated membrane protein RAMP4
MTTSRRLADRKSAKFQKNITKRGSVPETTVKKSNDYPVGPIVLGFFIFVVIGSCKHRTKPLLASLLF

SEQ ID NO: 12289 - protein, 160 aa, Zea mays
  misc_feature (57)..(57): Xaa can be any naturally occurring amino acid
  misc_feature (117)..(117): Xaa can be any naturally occurring amino acid
  misc_feature (149)..(149): Xaa can be any naturally occurring amino acid
  misc_feature (155)..(155): Xaa can be any naturally occurring amino acid
  Coding DNA Sequence Number=SeqID_5083
  Gene Ontology: Mol. function=aspartic-type endopeptidase activity; Cellular component=small subunit processome; Biological process=DNA integration
  Homolog annotation: Hit_ID=Q8S474; Match level="QueryCoverage=94%, HitCoverage=18%, E-value=4e-71, Identity=87%"; Hit description =Putative pol protein
  Pfam annotation: Domain name=rve; Domain location=4-128; Score=61.1; E_value=3.9e-15; Accession=PF00665.16; Description=Integrase core domain
MAQGHISLSQTQETLKGFLRRAQNEFGLRIKKIRSDNGMEFRNSQIEGFIEEEGQMXIKHEFSSPYTSQQNGVVERKNRTLLDMARTMLDEYKTPDRFWAETINIACYSINRLYLHXILKNTSYELLTGKKPNVSYFRVFGSKCFILVXKRKKSXFAPKL

SEQ ID NO: 12290 - protein, 434 aa, Zea mays
  misc_feature (399)..(400): Xaa can be any naturally occurring amino acid
  misc_feature (404)..(404): Xaa can be any naturally occurring amino acid
  misc_feature (409)..(416): Xaa can be any naturally occurring amino acid
  misc_feature (419)..(420): Xaa can be any naturally occurring amino acid
  misc_feature (423)..(434): Xaa can be any naturally occurring amino acid
  Coding DNA Sequence Number=SeqID_5084
  Gene Ontology: Mol. function=phosphotransferase activity, alcohol group as acceptor; Cellular component=chromosome; Biological process= response to DNA damage stimulus
  Homolog annotation: Hit_ID=A2WJR0; Match level="QueryCoverage=96%, HitCoverage=15%, E-value=1e-164, Identity=70%"; Hit description =Putative uncharacterized protein
  Pfam annotation: Domain name=FAT; Domain location=23-375; Score= -76.8; E_value=0.053; Accession=PF02259.13; Description=FAT domain
NSARGLQNGDSEEFHAKLCQTKMDLVLALSNTSKESTKYIHSTILKLQILDHATMVWDLRWNLNPNQTSKSPVTKEFSHISTVPKGIQLELLDKEWNLIMFQAERNLDLFEPFLAFRRALLKILGCEEHLVKHLFQSASALRKGLRFSLAAAALYELKELCFHRDESTMTNTYLLARLEDAKLLRAQGQHDMAISLGKYILQKLSDKKNLSDVYRLVGKWLAETRSSNSRTIIEDYLRPSIDLSEFEKSTDKRYMSRQCRTHFHLAHYTYSLFRSYEERLSSNEWQAALRLRKYKTRELEILIKRLRSSSKGVKTDYSVKIQELQKQLALDREEAEKIQDDRDNFLNLALQGYQRSIVVGGKYDLQVVFRLVSLWFSLFSRDQVVKAMLKTTKEVQTYXXIPLXYQIAXXXXXXXXAQXXFNXXXXXXXXXXXX

SEQ ID NO: 12291 - protein, 137 aa, Zea mays
  misc_feature (37)..(37): Xaa can be any naturally occurring amino acid
  misc_feature (40)..(41): Xaa can be any naturally occurring amino acid
  misc_feature (77)..(77): Xaa can be any naturally occurring amino acid
  Coding DNA Sequence Number=SeqID_5085
  Gene Ontology: Mol. function=methyltransferase activity; Cellular component=nematocyst; Biological process=pathogenesis
  Homolog annotation: Hit_ID=A3BA69; Match level="QueryCoverage=98%, HitCoverage=29%, E-value=5e-20, Identity=42%"; Hit description =Putative uncharacterized protein
MPMRIERDLHMAIGNGETSYTKNSRIQEKAMFQMKSXLEXXTRAERGILDPYCSSIGPPTEGLFSGDWHHILAIAKXHDRRHDYPQLQFFLNDLPGNDFNNLFLLIQQVNKSMARNHKGEAAEALPPCYISGLSGSF

SEQ ID NO: 12292 - protein, 182 aa, Zea mays
  Coding DNA Sequence Number=SeqID_5086
  Gene Ontology: Mol. function=metal ion binding; Cellular component =cytoplasm; Biological process=response to osmotic stress
  Homolog annotation: Hit_ID=A2X8C1; Match level="QueryCoverage=59%, HitCoverage=55%, E-value=1e-35, Identity=66%"; Hit description =Putative uncharacterized protein
  Pfam annotation: Domain name=PHD; Domain location=97-143; Score=-2.5; E_value=0.026; Accession=PF00628.19; Description=PHD-finger
  Pfam annotation: Domain name=zf-C3HC4; Domain location=98-140; Score =38.9; E_value=1.9e-08; Accession=PF00097.15; Description=Zinc finger, C3HC4 type (RING finger)
  Pfam module annotation: Pfam domain module=PHD::zf-C3HC4; Domain location=97-143::98-140
MGLHEGYSELVLPKQLLHLLLLLGYVRRFLLWAFDAVGLGDLLDLGDDHQAPPPPQQPQPQHRRAEFRAAMPAMVIEEALPVARFDELEARVVVGGDCAVCLGGIGGGDEVRRLGNCRHAFHRACLDRWMEHDQRTCPLCRAPLVPGALWPADASDLDFSYLGAPVPSPTLLRPHELLLLAG

SEQ ID NO: 12293 - protein, 79 aa, Zea mays
  Coding DNA Sequence Number=SeqID_5087
YQQKKWNSELYICQNQEDVLAWRAYIFICSWPCDHLVEERAFIISRWVVVLRLYRFWHLHPDLKTNWGMEQPYQWGGIL

SEQ ID NO: 12294 - protein, 100 aa, Zea mays
  misc_feature (31)..(31): Xaa can be any naturally occurring amino acid
  Coding DNA Sequence Number=SeqID_5089
SKASIWFVDPGRLRSLTTRLARRAYSHAVAXHRLRGIDRSSASEQEQASSSRERVGGPWPTSMRCRFTLRSSPCRRWPLGSCRRSSSRSCCGLQPGAAAG

SEQ ID NO: 12295 - protein, 102 aa, Zea mays
  Coding DNA Sequence Number=SeqID_5091
  Subcellular localization annotation: CTP_CleavageSite=48; ConfidenceScore=5.81e-01
YHYKISSTTLIKLNLSSGKRRNTSSNLMSSCPPSIKLNFSSNQNRTRSCFYFSSRRHVPKTTLHCFKYLEGVLGSLLPIGYPTILLANQVSQSLNCNRNTNT

SEQ ID NO: 12296 - protein, 109 aa, Zea mays
  misc_feature (56)..(56): Xaa can be any naturally occurring amino acid
  misc_feature (72)..(72): Xaa can be any naturally occurring amino acid
  Coding DNA Sequence Number=SeqID_5093
  Gene Ontology: Mol. function=oxidoreductase activity; Biological process=electron transport
  Homolog annotation: Hit_ID=Q9FVM9; Match level="QueryCoverage=55%, HitCoverage=11%, E-value=1e-10, Identity=55%"; Hit description =Cytochrome P450
MDLALLEKALLGLFAAAVVAIAVAKLSGKRYRLPPGPPGAPVVGNWLQVGDDLNHXNLMAMAKRFGDIFLLXHGRSATLVVVDPGASSPAVFCFRILPSFSLPYLNIRS

SEQ ID NO: 12297 - protein, 168 aa, Zea mays
  misc_feature (73)..(73): Xaa can be any naturally occurring amino acid
  misc_feature (89)..(89): Xaa can be any naturally occurring amino acid
  Coding DNA Sequence Number=SeqID_5094
GPRFFLSFFQEDPNSRIMPVGDAFRGQEYASSICSGVLPLFLRLFMFLSHSPNTSRFIAAIIASRYNTDQRLXLPAQLNSNKSTIYTIXVEKLLKAFNLITDRHKTKKSRIRNEKRQNDPRVSSGDVTRGRSRTEENEFLHLSPILSLLLPLKAPLQDPTLSSGDSPR

SEQ ID NO: 12298 - protein, 115 aa, Zea mays
  Coding DNA Sequence Number=SeqID_5096
  Subcellular localization annotation: CTP_CleavageSite=42; ConfidenceScore=5.21e-01
RAWYNIQESTSISDGDLRLFRSTSLIPSDRSRKFNRTCTSTRQRTENNDVTEGDGCASTNNLDQIEGEQCVYPTVQQPHTRHVTLRTYFVPYITFACMHADASTTATYTGTVRLL

SEQ ID NO: 12299 - protein, 72 aa, Zea mays
  Coding DNA Sequence Number=SeqID_5098
  Gene Ontology: Mol. function=nucleoside-triphosphatase activity; Cellular component=integral to membrane; Biological process=response to nematode
  Homolog annotation: Hit_ID=A2WWR6; Match level="QueryCoverage=65%, HitCoverage=6%, E-value=1e-15, Identity=82%"; Hit description =Putative uncharacterized protein
MAAAGPGLYSEIGKKARDLLYKDYHTDRGVLHQAAVTQLGKWECLLVTMAWGFLFRILFYFSLVLGSKNKRR

SEQ ID NO: 12300 - protein, 159 aa, Zea mays
  misc_feature (59)..(159): Xaa can be any naturally occurring amino acid
  Coding DNA Sequence Number=SeqID_5099
SFGIFVFFQFYIFPCGTHEAEIDRVLSGQCIFGAQIFVTKKKKKKKKKKKKKKKKKKKXXXXXXXXXXXXXXXXXXXXXXXXXXXXXXXXXXXXXXXXXXXXXXXXXXXXXXXXXXXXXXXXXXXXXXXXXXXXXXXXXXXXXXXXXXXXXXXXXXXXX

SEQ ID NO: 12301 - protein, 56 aa, Zea mays
  misc_feature (4)..(4): Xaa can be any naturally occurring amino acid
  Coding DNA Sequence Number=SeqID_5100
ACPXTRRRRWCRPRGCCRCPFLCNTAGVVSIAVPVRHRPARSGVVCFCCACVAGDV

SEQ ID NO: 12302 - protein, 200 aa, Zea mays
  misc_feature (200)..(200): Xaa can be any naturally occurring amino acid
  Coding DNA Sequence Number=SeqID_5102
  Homolog annotation: Hit_ID=A3BET3; Match level="QueryCoverage=98%, HitCoverage=26%, E-value=9e-37, Identity=47%"; Hit description =Putative uncharacterized protein
KRNYDAEPAHHTEKVEIQLVQKDIQSVADAHHTIDENSRKQQPYVSDEKEHLQKPVSPVDTNRTQKDVQKLNRRAVRHLEKELMEAVELDLNGLPKNGFGAVRFPEAEGNKTVQLNVKPNEAVRDFHIEKENDEVLHCSRLPGGSEHNGGHADSGLRAQGLENQGHPVSPLSGNTRKKAPYTKLNAVNIKNPTEKQANNX

SEQ ID NO: 12303 - protein, 125 aa, Zea mays
  Coding DNA Sequence Number=SeqID_5103
  Subcellular localization annotation: CTP_CleavageSite=98; ConfidenceScore=5.46e-01
TSPIHGTIYCFPIPRLLCSLTHLRPPLRVPLPVRRFPRFIARSSGGDGACARSPNQLTTRARPSLMPSSLRRPPRRRSRSESSRYWPSGRGIQHRQAVANSAAEAGLGVPEVAKFYYFLAGEQFT

SEQ ID NO: 12304 - protein, 178 aa, Zea mays
  misc_feature (76)..(76): Xaa can be any naturally occurring amino acid
  Coding DNA Sequence Number=SeqID_5104
  Subcellular localization annotation: CTP_CleavageSite=55; ConfidenceScore=5.52e-01
WLPPRCSGTPAPGASSPTLLSAPLRYMYLLRYPMRPRRRQRRPSRHRRPGPSWARSMATFTRTKPHGERRHHWGTXDHGKTTPHCCHLPRSWPRARGGPKAVAFPTRSTGLPGRKKARGITIATAHRRRNENRLKGIMASPVGWSRSRPKIMSKNMIHWSCSKGGRGGKFSWAGPNTP

SEQ ID NO: 12305 - protein, 108 aa, Zea mays
  Coding DNA Sequence Number=SeqID_5106
  Gene Ontology: Mol. function=hydrolase activity; Cellular component =cytoplasmic membrane-bound vesicle; Biological process=biological _process
  Homolog annotation: Hit_ID=Q5JLP6; Match level="QueryCoverage=80%, HitCoverage=29%, E-value=3e-16, Identity=48%"; Hit description =Putative S-formylglutathione hydrolase
  Subcellular localization annotation: CTP_CleavageSite=35; ConfidenceScore=5.52e-01
FFFPFPTAAALEQLSSSKMFDGFNLRFRRQSATLGCAMTFSIYLPPSPVSNLPVLYWLSGLTCTEDNFIIKSGAQHAAAAHGIALVAPDTSPLIFCMMDSFDGTILGL

SEQ ID NO: 12306 - protein, 327 aa, Zea mays
  misc_feature (164)..(164): Xaa can be any naturally occurring amino acid
  Coding DNA Sequence Number=SeqID_5107
  Gene Ontology: Mol. function=catalytic activity; Cellular component =nucleus; Biological process=metabolic process
  Homolog annotation: Hit_ID=Q8GVW4; Match level="QueryCoverage=99%, HitCoverage=90%, E-value=1e-148, Identity=42%"; Hit description =Selenium-binding protein-like
  Pfam annotation: Domain name=PPR; Domain location=134-168; Score =19.8; E_value=0.01; Accession=PF01535.11; Description=PPR repeat
  Pfam annotation: Domain name=PPR; Domain location=99-133; Score=32.5; E_value=1.5e-06; Accession=PF01535.11; Description=PPR repeat
  Pfam module annotation: Pfam domain module=PPR::PPR; Domain location =134-168::99-133
RSMLTGYSHHGLSSDALKFFRCMRAENIRTDEFGLSAALRSCSDLAVLRLGRQVHSLVVQSGFASNDFVSSSLIFMYSKCGVLGDARKSFEEADKSSSVPWNSMMFGYAQHGQAQTVTDLFNEMLDLEVPLDHVTFVALITAYSHGGLVDEGSEILNTMETRYXFPMRMEHYACGVDLYGRAGQLDKAKELIESMPFQPDAIVWMTLLGACRIHGNMELASDVARHLFVAEPRQHSTYVLLSSMYSGLGMWSDRATVQKVMRNRALSKIPGWSWIEVKNEVHSFNADDRSHPRMVEIFDMLRMLLQVAPRLCSSGGEEIPMTISSET

SEQ ID NO: 12307 - protein, 120 aa, Zea mays
  Coding DNA Sequence Number=SeqID_5108
  Subcellular localization annotation: CTP_CleavageSite=49; ConfidenceScore=5.53e-01
NKSEIPLPCCLGLSAIAGCAAGSGSRRRGRLRRPRALHSPAVFLRSRPSATKPSASSHAFAASMFTRSSAAFLLQYASCTCRRFASLSIRVVPEIHFLNPKVRYFEGLRLSRPSKCMMLK

SEQ ID NO: 12308 - protein, 251 aa, Zea mays
  misc_feature (31)..(31): Xaa can be any naturally occurring amino acid
  misc_feature (48)..(48): Xaa can be any naturally occurring amino acid
  misc_feature (52)..(53): Xaa can be any naturally occurring amino acid
  misc_feature (61)..(62): Xaa can be any naturally occurring amino acid
  misc_feature (73)..(73): Xaa can be any naturally occurring amino acid
  misc_feature (75)..(75): Xaa can be any naturally occurring amino acid
  misc_feature (96)..(96): Xaa can be any naturally occurring amino acid
  misc_feature (105)..(105): Xaa can be any naturally occurring amino acid
  Coding DNA Sequence Number=SeqID_5110
  Gene Ontology: Mol. function=oxidoreductase activity; Cellular component=peroxisome; Biological process=electron transport
  Homolog annotation: Hit_ID=O49506; Match level="QueryCoverage=58%, HitCoverage=38%, E-value=1e-53, Identity=73%"; Hit description =Glycolate oxidase - like protein
  Pfam annotation: Domain name=FMN_dh; Domain location=14-246; Score =1.2; E_value=3.8e-14; Accession=PF01070.8; Description=FMN-dependent dehydrogenase
MELITNVTEYEKLAKERLPKMVYDYYASGAXDQWTLKENREAFSRILXWDRXXPRVLIDVXXIDMATNILGFXIXMPIMIAPSAVQKMGHPDGELXKMRATASAXTIMTLSSWSTSSVEEVNLVGLGIRFFQLYVSKDRNIVLQLVKRAEGRYITKITSTSSVGVVLLDSSAIKADAVQMVEGIFALDLVHIKQQWPPSIFESLDSCLVNLITGSALNVMVQQLLVSVGFPSNALVLKIPIQCVVDALHKK

SEQ ID NO: 12309 - protein, 78 aa, Zea mays
  Coding DNA Sequence Number=SeqID_5111
HFSRTYTRVCKSRFWLEQGHHLPTEEAAHQGHHLPTEEAAPTYRHIRVVAIPGLTLVAALATRVKEATPTSSEHDPEY

SEQ ID NO: 12310 - protein, 238 aa, Zea mays
  misc_feature (13)..(13): Xaa can be any naturally occurring amino acid
  Coding DNA Sequence Number=SeqID_5113
  Gene Ontology: Mol. function=oxidoreductase activity; Cellular component=cytoplasm; Biological process=metabolic process
  Homolog annotation: Hit_ID=Q41767; Match level="QueryCoverage=98%, HitCoverage=61%, E-value=1e-106, Identity=82%"; Hit description=Adh2- N protein
  Pfam annotation: Domain name=ADH_N; Domain location=66-163; Score =12.7; E_value=8.9e-05; Accession=PF08240.2; Description=Alcohol dehydrogenase GroES-like doma
MATAGKVIKCRAXRGVGGRQTAVHRGGGGSAAAGHGGAYQDPLHRALPHRRLLLGGQGANPGVPEDLRTRSGSIVESVGEGVTELVPGDHVLPVFTGECKDCAHCKSEESNLCDLLRINVDRGVMIGDGQSRFTINGKPIFHFVGTSTFSEYTVIHVGCLAKINPEAPLDKVCVLSCGISTGLGATLNVAKPKKGSTVAIFGLGAVGLAAMEGARMAGASRIIGVDLNPAKYEQGTIV

SEQ ID NO: 12311 - protein, 103 aa, Zea mays
  Coding DNA Sequence Number=SeqID_5114
  Subcellular localization annotation: CTP_CleavageSite=47; ConfidenceScore=5.78e-01
SAAISRPHNSHPTSCSPSGRGAVPRSPSLMSKPSASRPCIKIAIRFRASRNRRSRVGDQVIWFFEFYEARDPEHLFGEGCLWCNLCSSKEEGVEADLQEFQDF

SEQ ID NO: 12312 - protein, 84 aa, Zea mays
  Coding DNA Sequence Number=SeqID_5116
  Subcellular localization annotation: CTP_CleavageSite=39; ConfidenceScore=5.12e-01
QNRRSRRASLRSHLAGVLHNTPAPSPWQIAICFRAPRSRRSSVGDQVIKLSEFYEAEDPEYRFGEGCLWCNLCSGKEEGVEANL

SEQ ID NO: 12313 - protein, 215 aa, Zea mays
  Coding DNA Sequence Number=SeqID_5118
  Gene Ontology: Mol. function=structural constituent of ribosome; Cellular component=ribonucleoprotein complex; Biological process =translation
  Homolog annotation: Hit_ID=A2X358; Match level="QueryCoverage=48%, HitCoverage=49%, E-value=6e-46, Identity=89%"; Hit description=50S ribosomal protein L21
  Pfam annotation: Domain name=Ribosomal_L21p; Domain location=95-191; Score=160.7; E_value=3.9e-45; Accession=PF00829.11; Description =Ribosomal prokaryotic L21 protein
  Subcellular localization annotation: CTP_CleavageSite=49; ConfidenceScore=5.56e-01
MRPLPAAAMATATLPLRLLPSKTLTLSTLPSLRRSLSVAALEPRRWRLRAAAEEAPEAVEVEFVEPETEAEEKPAVPEPIEAQLAAAGAGKDADIFAVVMIGSRQYIVMPGRYIYTQRLKGANVNDQIILNKVLLVSTREKAYIGMPVVTNAAVHAVVEEQGRDDKVIVFKYKKKKKYQRKLGHRQPNTRLRITGISGYEEYPADPILDPAAALS

SEQ ID NO: 12314 - protein, 134 aa, Zea mays
  misc_feature (108)..(109): Xaa can be any naturally occurring amino acid
  misc_feature (130)..(133): Xaa can be any naturally occurring amino acid
  Coding DNA Sequence Number=SeqID_5119
  Subcellular localization annotation: CTP_CleavageSite=30; ConfidenceScore=5.18e-01
GSYAQVHSTLLVANIHRKFGFSKSSRYMYRCHNVKYPVKPDSSTTRLPGTCQCSPQAPFLLCIWIADQFRDLVLLHLHYLFLLLLQFFILFLQFLNFGFQLHCISPDXXRRCPRPHTRCHAAPVAGRTRXXXXR

SEQ ID NO: 12315 - protein, 121 aa, Zea mays
  Coding DNA Sequence Number=SeqID_5121
DVFGFRSSRMRRGRHRSLDFLGSRRHKKQTPVLTSLTRDSHPNIINIVAAPFNPSFYIRLNTPLMLEINNNYIKVAQGEQSNPRPLLQKFRGNQQSHTYIRASTRTHAPCSRNLGLTSRPA

SEQ ID NO: 12316 - protein, 175 aa, Zea mays
  Coding DNA Sequence Number=SeqID_5123
  Subcellular localization annotation: CTP_CleavageSite=58; ConfidenceScore=5.79e-01
WISAPSPRSVPGSATAGTSIAPCLSQPNCLALNSGAPSREPACSSLLFQSSSIPSSFSVAHLVGRNPDPLLPALGQRYFSTSLAGFYHWLMYHRFQHRRGCREILYHKSATMIYELADALVLIPGAQICLLILKDSRASVCKIELITGYTCCRVEALKDTSEARKLVSWRTGERG

SEQ ID NO: 12317 - protein, 180 aa, Zea mays
  Coding DNA Sequence Number=SeqID_5125
CSNPHCSRRGWRRGRSGEFSARATPRELIAGVAASASNFRHRATIPLPWSSDRARLAWNEPCAAEAPARSRSRSRTRHATPADEEEAGAIRRRNAGRLAGSSCEISCPRRPDAALGVWVGTLTGIRLVERDRNAESSLAHSHLDGSAVVAGGATDDGHGGGSTCSRASKTAMPEIATPST

SEQ ID NO: 12318 - protein, 137 aa, Zea mays
  Coding DNA Sequence Number=SeqID_5127
  Subcellular localization annotation: CTP_CleavageSite=60; ConfidenceScore=5.02e-01
RLYRHLFRLLCARASANHGDLSRVFVILPNRHCKFFYRFLCALTSGRPRLCFFVLVFFSYASTLVSSRIPYFISPFPTRGRSKASTRPSSDTVVFLLPLSFLFTKIPFWLPMFSPTALARCIHFSTSSASVSTRFLL

SEQ ID NO: 12319 - protein, 132 aa, Zea mays
  misc_feature (1)..(3): Xaa can be any naturally occurring amino acid
  Coding DNA Sequence Number=SeqID_5129
XXXCSNDFMASSKNPKQTFEQHDSIIKGKRRFNLLSNLQEKYEKDKEVTLQKEKSTKFKNNHDTRDTTSAVIERPQSIDITTIDTSINGWKATKHLIYRGQVWEIVDRKSTIRPLHKKLSTTRRRKWLPHKE

SEQ ID NO: 12320 - protein, 111 aa, Zea mays
  Coding DNA Sequence Number=SeqID_5130
  Gene Ontology: Mol. function=hydrolase activity
  Homolog annotation: Hit_ID=A6N1Q6; Match level="QueryCoverage=75%, HitCoverage=31%, E-value=1e-34, Identity=82%"; Hit description =Pyrimidine-specific ribonucleoside hydrolase riha
LTDADREKLEQCDSKYARYLCKLMGVYFDYHRDAYFIKGAYLHDPTTVIAAVNPSLLTYTEGVVRVQTVGITKGLTVFDNTKKREDTCLPSHCGSACTASRRHCTDPPQPR

SEQ ID NO: 12321 - protein, 357 aa, Zea mays
  misc_feature (235)..(237): Xaa can be any naturally occurring amino acid
  misc_feature (243)..(243): Xaa can be any naturally occurring amino acid
  misc_feature (248)..(251): Xaa can be any naturally occurring amino acid
  misc_feature (253)..(253): Xaa can be any naturally occurring amino acid
  misc_feature (256)..(260): Xaa can be any naturally occurring amino acid
  misc_feature (263)..(266): Xaa can be any naturally occurring amino acid
  misc_feature (268)..(268): Xaa can be any naturally occurring amino acid
  misc_feature (271)..(296): Xaa can be any naturally occurring amino acid
  misc_feature (298)..(306): Xaa can be any naturally occurring amino acid
  misc_feature (320)..(321): Xaa can be any naturally occurring amino acid
  misc_feature (328)..(330): Xaa can be any naturally occurring amino acid
  misc_feature (339)..(339): Xaa can be any naturally occurring amino acid
  misc_feature (342)..(343): Xaa can be any naturally occurring amino acid
  Coding DNA Sequence Number=SeqID_5131
  Homolog annotation: Hit_ID=A2ZU93; Match level="QueryCoverage=99%, HitCoverage=100%, E-value=2e-57, Identity=43%"; Hit description =Putative uncharacterized protein
MAMEGYDREFWQFGDQLRLQTATFSGLSLGDSIWSPADNTAPRARNADLFSPSPAPDNNSAGFAAAKMNGNGLNGPGLIGSGKLAFGATTTSKADRYNNVSLPDAKPYANANANGMYGAKPNNTNMNNGFGLNKMAAGGGGYGNFNGGNEGVKSYFNKSIGRPASNNSSSNNFNGYGGKKGAADGKKKHAKNERGDNNHGAASEKRFKTLPASEALPRNEPIGGYIFVCNNDTMXXXLKRQLXGLPSXXXXSXRAXXXXXPLXXXXYXTHXXXXXXXXXXXXXXXXXXXXXXXXXXCXXXXXXXXXVRVATRKIYDPLEXXALRPILXXXDGPKFRLEXSVXXTLALLDIFADKDDA

SEQ ID NO: 12322 - protein, 258 aa, Zea mays
  Coding DNA Sequence Number=SeqID_5132
  Gene Ontology: Mol. function=transcription regulator activity; Cellular component=nucleus; Biological process=regulation of transcription
  Homolog annotation: Hit_ID=A7P9L7; Match level="QueryCoverage=21%, HitCoverage=19%, E-value=2e-17, Identity=78%"; Hit description =Chromosome chr3 scaffold_8, whole genome shotgun sequence
  Pfam annotation: Domain name=HLH; Domain location=12-62; Score=45.9; E_value=1.4e-10; Accession=PF00010.16; Description=Helix-loop-helix DNA-binding domain
TRGNAAAVEDVDHDLHIFTERERRKKMKNMFSTLHALLPQLPDKADKATIVGEAVTYIKTLEGTVQKLEKLKLERKRALAAQQQLMAGAGSNRASSARHPAPAPSSPSSSSREADMVHGWHAQQAAANKALAAEAGAGGSSSAAASLPRGAVPFPAPAAGFQTWSGQNVVVSVASNEAYINLHSPRQPAGTLTKALFVLERHRIDVVTTTISTQDGFHMYGIHARVNSASASARFPENLCAEDRFKLAVSEMLQLINI

SEQ ID NO: 12323 - protein, 189 aa, Zea mays
  Coding DNA Sequence Number=SeqID_5133
  Gene Ontology: Mol. function=nucleotide binding; Cellular component =cytoskeleton; Biological process=cell division
  Homolog annotation: Hit_ID=Q6I614; Match level="QueryCoverage=100%, HitCoverage=35%, E-value=3e-88, Identity=87%"; Hit description =Putative dynamin
  Pfam annotation: Domain name=Dynamin_N; Domain location=37-189; Score= 210.3; E_value=4.6e-60; Accession=PF00350.13; Description=Dynamin family
  Pfam annotation: Domain name=MMR_HSR1; Domain location=35-185; Score=- 8.2; E_value=0.006; Accession=PF01926.13; Description=GTPase of unknown function
  Pfam module annotation: Pfam domain module=Dynamin_N::MMR_HSR1; Domain location=37-189::35-185
MENLISLVNKLQRACTALGDHGEESALPTLWDSLPSIAVVGGQSSGKSSVLESVVGKDFLPRGSGIVTRRPLVLQLHRIDGDREYAEFMHVPRKRFTDFAMVRKEIADETDRQTGHGKGISSVPIHLSIFSPYVVNLTLIDLPGLTKVAVEGQPESIVQEIENMVRSFIEKPNCIILAVSPANQDLATS

SEQ ID NO: 12324 - protein, 172 aa, Zea mays
  misc_feature (3)..(5): Xaa can be any naturally occurring amino acid
  misc_feature (10)..(10): Xaa can be any naturally occurring amino acid
  misc_feature (16)..(16): Xaa can be any naturally occurring amino acid
  misc_feature (21)..(21): Xaa can be any naturally occurring amino acid
  misc_feature (28)..(31): Xaa can be any naturally occurring amino acid
  misc_feature (58)..(59): Xaa can be any naturally occurring amino acid
  misc_feature (77)..(78): Xaa can be any naturally occurring amino acid
  misc_feature (110)..(114): Xaa can be any naturally occurring amino acid
  misc_feature (118)..(119): Xaa can be any naturally occurring amino acid
  misc_feature (121)..(124): Xaa can be any naturally occurring amino acid
  misc_feature (126)..(126): Xaa can be any naturally occurring amino acid
  misc_feature (129)..(133): Xaa can be any naturally occurring amino acid
  misc_feature (136)..(137): Xaa can be any naturally occurring amino acid
  misc_feature (139)..(172): Xaa can be any naturally occurring amino acid
  Coding DNA Sequence Number=SeqID_5134
HVXXXPNVRXWVFGGXCNHAXIPRTLTXXXXGASIFLLMKTCLDPGHIFATFFFKERXXSPGRLKCNSHSNIFVYIXXEDHPKKKKKKKKKKKKKKKKKKKKKKKKKKKXXXXXKKKXXKXXXXKXKKXXXXXKKXXGXXXXXXXXXXXXXXXXXXXXXXXXXXXXXXXXXX

SEQ ID NO: 12325 - protein, 101 aa, Zea mays
  Coding DNA Sequence Number=SeqID_5136
HEGDQVMDQETDRRFDFRHRLQPPSHAHCSIGGPSEKPWLRLIDPFIPTPHRAIRPTEPRALKPYYLLPQSPPSHWRTPKQRRMTNRKWSKLLWIKLLINY

SEQ ID NO: 12326 - protein, 89 aa, Zea mays
  Coding DNA Sequence Number=SeqID_5138
  Subcellular localization annotation: CTP_CleavageSite=61; ConfidenceScore=5.19e-01
FFCAKKVRNPLVSWPLAVAASFQIWGRKSGTEIRVEKIRGIARPSNTSATSPVQPLSRSMNAERYSGSRRNADALRSGLLNKREMQSAD

SEQ ID NO: 12327 - protein, 137 aa, Zea mays
  Coding DNA Sequence Number=SeqID_5140
  Gene Ontology: Mol. function=transposase activity; Cellular component= membrane; Biological process=transposition, DNA-mediated
  Homolog annotation: Hit_ID=Q5KQG8; Match level="QueryCoverage=96%, HitCoverage=17%, E-value=1e-49, Identity=70%"; Hit description =Putative uncharacterized protein OSJNBb0086G17.7
FIGSHLPEWHRGMEPNTPKEKFNRVHSSIRNVIERSFGVLKMKWQILYKMPGYSTLTQKKIIAATMVIHNFIHEHASEDEDFANFDRDPNFVAPIPERSNKYAVSQHASDGSPLESSFVPMDAFRDSLATSIALAWN

SEQ ID NO: 12328 - protein, 188 aa, Zea mays
  misc_feature (48)..(188): Xaa can be any naturally occurring amino acid
  Coding DNA Sequence Number=SeqID_5141
  Subcellular localization annotation: CTP_CleavageSite=31; ConfidenceScore=5.47e-01
GSLFFPQSSPPTQPPTKTEFISNKYQQSHCRSYNARKSLILRNQLNNXXXXXXXXXXXXXXXXXXXXXXXXXXXXXXXXXXXXXXXXXXXXXXXXXXXXXXXXXXXXXXXXXXXXXXXXXXXXXXXXXXXXXXXXXXXXXXXXXXXXXXXXXXXXXXXXXXXXXXXXXXXXXXXXXXXXXXXXXXXXX

SEQ ID NO: 12329 - protein, 147 aa, Zea mays
  misc_feature (18)..(18): Xaa can be any naturally occurring amino acid
  misc_feature (61)..(61): Xaa can be any naturally occurring amino acid
  misc_feature (85)..(85): Xaa can be any naturally occurring amino acid
  misc_feature (98)..(98): Xaa can be any naturally occurring amino acid
  misc_feature (113)..(113): Xaa can be any naturally occurring amino acid
  Coding DNA Sequence Number=SeqID_5143
  Gene Ontology: Mol. function=binding
  Homolog annotation: Hit_ID=A2XAH3; Match level="QueryCoverage=95%, HitCoverage=12%, E-value=1e-49, Identity=77%"; Hit description =Putative uncharacterized protein
FNTDSSATTSNRIQDVQXVLICAQRLGARNARAGQLLTKELEEFRASTSADSMTKHQSRYXVLQVIKYVTNHPDNRWGLGVGDAXQGDYPFSHHKLTXFHFSEASAAQDRKLXRGLIHKALPGSLWRPNPQSIFSYQPQGGNWVLLP

SEQ ID NO: 12330 - protein, 168 aa, Zea mays
  Coding DNA Sequence Number=SeqID_5144
  Gene Ontology: Mol. function=transferase activity, transferring glycosyl groups; Biological process=regulation of transcription, DNA- dependent
  Homolog annotation: Hit_ID=Q9F4I7; Match level="QueryCoverage=100%, HitCoverage=100%, E-value=5e-83, Identity=91%"; Hit description =Bifunctional protein pyrR [Includes: Pyrimidine operon regulatory protein; Uracil ...
  Homolog annotation: Hit description=phosphoribosyltransferase (EC 2.4.2.9) (UPRTase)]
  Pfam annotation: Domain name=Pribosyltran; Domain location=4-133; Score=36.0; E_value=1.3e-07; Accession=PF00156.17; Description =Phosphoribosyl transferase domain
MSLPNPADLISQMAIRLKAHLEHRAISEPRFIGIRTGGVWVAQALLEELGSDSPLGTLDVSFYRDDFSQNGLHPQVRPSALPFEIEGQHLVLIDDVLMSGRTIRAAMNELFDYGRPASVTLVCLLDLDAGELPISPDVVGATLSLEAHQRVKLSGPTPLELELQDLAL

SEQ ID NO: 12331 - protein, 194 aa, Zea mays
  misc_feature (1)..(55): Xaa can be any naturally occurring amino acid
  misc_feature (58)..(80): Xaa can be any naturally occurring amino acid
  misc_feature (84)..(89): Xaa can be any naturally occurring amino acid
  misc_feature (92)..(95): Xaa can be any naturally occurring amino acid
  Coding DNA Sequence Number=SeqID_5145
XXXXXXXXXXXXXXXXXXXXXXXXXXXXXXXXXXXXXXXXXXXXXXXXXXXXXXXFPXXXXXXXXXXXXXXXXXXXXXXXNVKXXXXXXMQXXXXLTVATESPPSESAQGTDPPASRYVCEPVPKGDRPLWSSICLPTIKTWRSLSSPPCHQRLWHCVTQMLMHNRRIQNEAGLLTTPRFISSESTYCCYEYHG

SEQ ID NO: 12332 - protein, 194 aa, Zea mays; identical to SEQ ID NO: 12331
  misc_feature (1)..(55): Xaa can be any naturally occurring amino acid
  misc_feature (58)..(80): Xaa can be any naturally occurring amino acid
  misc_feature (84)..(89): Xaa can be any naturally occurring amino acid
  misc_feature (92)..(95): Xaa can be any naturally occurring amino acid
  Coding DNA Sequence Number=SeqID_5146

SEQ ID NO: 12333 - protein, 76 aa, Zea mays
  Coding DNA Sequence Number=SeqID_5148
HEDLCSLQPPQTDAERAYRLPRHEAVHCALHACHAIPLSSHVSFCLVWQALRFSERWKLPLILTLKLCFLFFQISL

SEQ ID NO: 12334 - protein, 51 aa, Zea mays
  Coding DNA Sequence Number=SeqID_5150
  Subcellular localization annotation: CTP_CleavageSite=40; ConfidenceScore=5.24e-01
KKRINKRLVLQPYQRQRRPCRRPPGFPGRKPRAPPRPWRRVSSLASPMARS

SEQ ID NO: 12335 - protein, 177 aa, Zea mays
  misc_feature (142)..(143): Xaa can be any naturally occurring amino acid
  misc_feature (147)..(152): Xaa can be any naturally occurring amino acid
  misc_feature (154)..(177): Xaa can be any naturally occurring amino acid
  Coding DNA Sequence Number=SeqID_5152
  Subcellular localization annotation: CTP_CleavageSite=70; ConfidenceScore=5.16e-01
EFLEGLPLFGEGKALQFQLTFLIPFPIPFACFFSPRRRRLGASQPPHFPSSCPLIPRRASQPARNNPLLRAATRRGGQATSLSTPPAGSCRLIPPGFDSAVRRRRRSGRGSYRPAVHAAGDGVPAPVRNAAENIGFHNFARXXSWPXXXXXXDXXXXXXXXXXXXXXXXXXXXXXXX

SEQ ID NO: 12336 - protein, 77 aa, Zea mays
  misc_feature (43)..(43): Xaa can be any naturally occurring amino acid
  Coding DNA Sequence Number=SeqID_5153
  Gene Ontology: Mol. function=protein serine/threonine kinase activity; Biological process=protein amino acid phosphorylation
  Homolog annotation: Hit_ID=Q69U57; Match level="QueryCoverage=72%, HitCoverage=28%, E-value=1e-11, Identity=63%"; Hit description =Serine/threonine protein kinase-like
LAFFGLKYNSGRRDFGTIKLLGLRLDIPGSVHPRLTKLIRRCXDKDPDACLTFAEITIELQDSLHHIEAPKGASRRS

SEQ ID NO: 12337 - protein, 163 aa, Zea mays
  Coding DNA Sequence Number=SeqID_5154
  Subcellular localization annotation: CTP_CleavageSite=19; ConfidenceScore=5.77e-01
LLAYLSPPSRGTHHPQPPSCRTRGGSTRPRGSGTPARAPPGAPQPRALAGHAPQSCALAALSRSALRVAVSPPTPGAGIAGCPPCRRRETPCPCCSCPSVEPPRTAPFPGCRRTSAGVPPPSPVRRATAAPPPQAPLLCSTASVLRGAISPVHAEARAGRLFQ

SEQ ID NO: 12338 - protein, 214 aa, Zea mays
  misc_feature (1)..(54): Xaa can be any naturally occurring amino acid
  Coding DNA Sequence Number=SeqID_5156
XXXXXXXXXXXXXXXXXXXXXXXXXXXXXXXXXXXXXXXXXXXXXXXXXXXXXXAASHPQLGGRARCCSPCALCSSRSCPASLLAGRILCVARIAFRYSCVSCREAPCSVRLHRVVVRAKLLAVDIKSVTRVLGMVKRCVCWCPNSSDQWRLIPCRAVSLRTSSCSLSRLPSNHRSRSTHQSYLGRSSISYSSWSSRQQSLSELASSLTDRSVP

SEQ ID NO: 12339 - protein, 215 aa, Zea mays
  Coding DNA Sequence Number=SeqID_5158
  Homolog annotation: Hit_ID=A3AS81; Match level="QueryCoverage=92%, HitCoverage=100%, E-value=3e-50, Identity=46%"; Hit description =Putative uncharacterized protein
MSPFGAVITPETLKYMSKYQGREITQVDCAREAMRLIHAEDKNLKAEDSAWELKKKFGNGVSTMVLVYNATGASLSLVDDGKDWMGSVYSSPIPDTFHNGQWIAFLHVKPGSLAQGSQAARVFRGRDVDGRTRDFVVAWYIPWDNIPTRAYTEIGSENYFKTRWSSVKTSLGHSRRVTRAKDENCASTVSIGGYTTAFCIAVLQHQFEPLPEERE

SEQ ID NO: 12340 - protein, 158 aa, Zea mays
  Coding DNA Sequence Number=SeqID_5159
FKVLLSGEERTWAVGGWSRACGCPGEKSKPTVMGASLRFTPICPVWRNPPPKGGLGSFSFHLLSGRARKARVENIDNVSTGDCEMGRTLWASRGTGFAHLVPVVGAVGRHAAGRREGEEDEERRGRGRRGRHRSRRAALTREAGTRVWGGRGDAGGEI

SEQ ID NO: 12341 - protein, 198 aa, Zea mays
  misc_feature (7)..(7): Xaa can be any naturally occurring amino acid
  Coding DNA Sequence Number=SeqID_5161
  Gene Ontology: Mol. function=nucleic acid binding; Cellular component= nucleus; Biological process=regulation of transcription, DNA-dependent
  Homolog annotation: Hit_ID=Q10LF6; Match level="QueryCoverage=100%, HitCoverage=13%, E-value=2e-64, Identity=67%"; Hit description =Transcriptional activator, putative, expressed
IRTRQLXRDMLIFWKRVDKEQYELRKKEEREAAEALKREEELREAKRQQQRLNFLLSQTELYSHFMQNKAGGSAPPDEEDVPDEDEEEDPEEAQLKREALRAAQHAVSQQKMKTNAFDSEIVRLRQTSDSALPTDDSSSMDPSKIDLLHPSTMPEKSSVQTPELFKGVLKEYQLKGLQWLVNCYEQGLNGILADEMGL

SEQ ID NO: 12342 - protein, 116 aa, Zea mays
  Coding DNA Sequence Number=SeqID_5162
QVAPRATSLPAAGTQIEKERETEREREGKRRDQNKSEDGRTPPRDQCRGGDGRPPRRLGLQGPAEQQRPSPGRAALPRRAPLSITPSRALSGRYSYSGKQPTTPLSITPATAPMSH

SEQ ID NO: 12343 - protein, 76 aa, Zea mays
  misc_feature (22)..(22): Xaa can be any naturally occurring amino acid
  misc_feature (24)..(24): Xaa can be any naturally occurring amino acid
  Coding DNA Sequence Number=SeqID_5164
  Subcellular localization annotation: CTP_CleavageSite=31; ConfidenceScore=5.12e-01
ERGRRGWGLRNTAIQEGIASSXQXAGSPAPRAGRRRRRHCFGSVRFLPPRVRRRRACIFAVTILFPKLPTLIILCD

SEQ ID NO: 12344 - protein, 90 aa, Zea mays
  Coding DNA Sequence Number=SeqID_5166
  Gene Ontology: Mol. function=nucleic acid binding; Biological process= regulation of transcription
  Homolog annotation: Hit_ID=Q69XQ3; Match level="QueryCoverage=53%, HitCoverage=16%, E-value=7e-12, Identity=68%"; Hit description=KH domain-containing protein / zinc finger protein-like
  Subcellular localization annotation: CTP_CleavageSite=52; ConfidenceScore=5.02e-01
MDTGRKRTAPEGANGAGGPKRARESETTGVGSKSKPCTKFFSTAGCPFGATRSAEKFGDSGFGGRSGGGGGFGDSGFGGQSGGGGGFGDS

SEQ ID NO: 12345 - protein, 311 aa, Zea mays
  misc_feature (49)..(49): Xaa can be any naturally occurring amino acid
  misc_feature (85)..(86): Xaa can be any naturally occurring amino acid
  misc_feature (89)..(91): Xaa can be any naturally occurring amino acid
  misc_feature (94)..(101): Xaa can be any naturally occurring amino acid
  misc_feature (103)..(105): Xaa can be any naturally occurring amino acid
  misc_feature (107)..(111): Xaa can be any naturally occurring amino acid
  misc_feature (113)..(120): Xaa can be any naturally occurring amino acid
  misc_feature (122)..(125): Xaa can be any naturally occurring amino acid
  misc_feature (127)..(131): Xaa can be any naturally occurring amino acid
  misc_feature (133)..(135): Xaa can be any naturally occurring amino acid
  misc_feature (137)..(139): Xaa can be any naturally occurring amino acid
  misc_feature (141)..(142): Xaa can be any naturally occurring amino acid
  misc_feature (145)..(149): Xaa can be any naturally occurring amino acid
  misc_feature (151)..(156): Xaa can be any naturally occurring amino acid
  misc_feature (158)..(160): Xaa can be any naturally occurring amino acid
  misc_feature (162)..(164): Xaa can be any naturally occurring amino acid
  misc_feature (167)..(172): Xaa can be any naturally occurring amino acid
  misc_feature (175)..(176): Xaa can be any naturally occurring amino acid
  misc_feature (181)..(184): Xaa can be any naturally occurring amino acid
  misc_feature (187)..(194): Xaa can be any naturally occurring amino acid
  misc_feature (197)..(198): Xaa can be any naturally occurring amino acid
  misc_feature (200)..(202): Xaa can be any naturally occurring amino acid
  misc_feature (204)..(209): Xaa can be any naturally occurring amino acid
  misc_feature (286)..(286): Xaa can be any naturally occurring amino acid
  misc_feature (292)..(292): Xaa can be any naturally occurring amino acid
  Coding DNA Sequence Number=SeqID_5167
  Homolog annotation: Hit_ID=A3C6J4; Match level="QueryCoverage=15%, HitCoverage=12%, E-value=5e-16, Identity=83%"; Hit description =Putative uncharacterized protein
MAETVDDKISYFQAVTGISDTDLCTEILAAHNWDLQLAVSSITAPSPSXGSGDRLLELPPSAAEAADFVAEFERECGAGRGPRFXXDSXXXCSXXXXXXXXDXXXDXXXXXLXXXXXXXXLXXXXRXXXXXEXXXLXXXRXXIRXXXXXVXXXXXXAXXXSXXXPFXXXXXXGFXXNQRIXXXXQQXXXXXXXXPEXXDXXXLXXXXXXELLLQVEWPKSRKEMTEDLQRIVEASATSLVAMRITAEERLNNQRLREEQDAAYRAALEADQARERERLEELKRREXEAAEAXKKRKEEGGNCTQGHPQKNT

SEQ ID NO: 12346 - protein, 50 aa, Zea mays
  Coding DNA Sequence Number=SeqID_5168
KVSMCDIAYLISILLCYPLKLFMFMRCIYKLNSEVTLCSDESPNDFGKNH

SEQ ID NO: 12347 - protein, 101 aa, Zea mays
  misc_feature (69)..(69): Xaa can be any naturally occurring amino acid
  Coding DNA Sequence Number=SeqID_5170
  Gene Ontology: Mol. function=transferase activity; Cellular component= cytoplasm; Biological process=glycolysis
  Homolog annotation: Hit_ID=Q1WM15; Match level="QueryCoverage=74%, HitCoverage=16%, E-value=1e-22, Identity=70%"; Hit description =Hexokinase-8
  Pfam annotation: Domain name=Hexokinase_2; Domain location=1-99; Score=-122.8; E_value=0.0015; Accession=PF03727.6; Description =Hexokinase
PCLLNGAAHPPILEYDQELDKESLNPGEQIYEKLTSGMYLGEIVRRVLLKISLFCAIFGDTEHTKPQTXLSFPHISAMHHDVFSRHIGNLGDSPAGACDPH

SEQ ID NO: 12348 - protein, 164 aa, Zea mays
  misc_feature (1)..(1): Xaa can be any naturally occurring amino acid
  misc_feature (5)..(5): Xaa can be any naturally occurring amino acid
  misc_feature (21)..(21): Xaa can be any naturally occurring amino acid
  misc_feature (29)..(29): Xaa can be any naturally occurring amino acid
  misc_feature (31)..(31): Xaa can be any naturally occurring amino acid
  misc_feature (46)..(46): Xaa can be any naturally occurring amino acid
  misc_feature (53)..(55): Xaa can be any naturally occurring amino acid
  misc_feature (57)..(57): Xaa can be any naturally occurring amino acid
  misc_feature (59)..(62): Xaa can be any naturally occurring amino acid
  misc_feature (66)..(66): Xaa can be any naturally occurring amino acid
  misc_feature (68)..(72): Xaa can be any naturally occurring amino acid
  misc_feature (83)..(83): Xaa can be any naturally occurring amino acid
  misc_feature (91)..(91): Xaa can be any naturally occurring amino acid
  misc_feature (104)..(105): Xaa can be any naturally occurring amino acid
  misc_feature (109)..(109): Xaa can be any naturally occurring amino acid
  Coding DNA Sequence Number=SeqID_5171
XSLPXSSPPVVAKDGEVKKPXFLLPVRWXPXDREAKMVLWGHWGGXDPWSDRXXXKXGXXXXASTXLXXXXXAMALASSGTRXSRDSPSSXFFDFATLTPRTPXXGWWXPSHHSSLQLSQGTPQLPNLTLIHLVRLKLERYLLVVVKTRNMPVARVCCLIASGC

SEQ ID NO: 12349 - protein, 76 aa, Zea mays
  Coding DNA Sequence Number=SeqID_5173
SIQGAFHGYSIKQYIYHGYKEICSWIQSCDGTSQVIRPTYSCPCPSISVLQLCYRNYSLKLLILKRKRPRIRHIIL

SEQ ID NO: 12350 - protein, 149 aa, Zea mays
  misc_feature (1)..(24): Xaa can be any naturally occurring amino acid
  Coding DNA Sequence Number=SeqID_5175
XXXXXXXXXXXXXXXXXXXXXXXXAGRRVQVSAVCRSCRTTDDDDWVVPDCDKLGVPRKVQRPCTRCRRDELILIESVILKMTIDDIYGRRAHVVAAAPPRIIEPITTMLAGPVWAVRAHGRSARPASRYKPMRWIPAFLCIYVGRYEP

SEQ ID NO: 12351 - protein, 182 aa, Zea mays
  misc_feature (67)..(67): Xaa can be any naturally occurring amino acid
  misc_feature (81)..(81): Xaa can be any naturally occurring amino acid
  Coding DNA Sequence Number=SeqID_5177
  Subcellular localization annotation: CTP_CleavageSite=25; ConfidenceScore=5.80e-01
MEKLPSVSPPFPFKAASRSRQEAPRAQRRRSPPPWRRWPAPCGARTAGSRPPPSSSGSSALASGRGXLVMAFLSWLAWSYXPRPFVAGRENPGESGPPPRESSTGVPRGFPGGDKLRTLGAGVWRKNFGGGKGPARQKRGAPWGGKTPSFGPPKENTSFAPFWVYTGGGGPPFRGGVPRAPV

SEQ ID NO: 12352 - protein, 204 aa, Zea mays
  misc_feature (88)..(88): Xaa can be any naturally occurring amino acid
  misc_feature (94)..(95): Xaa can be any naturally occurring amino acid
  misc_feature (97)..(98): Xaa can be any naturally occurring amino acid
  misc_feature (103)..(104): Xaa can be any naturally occurring amino acid
  misc_feature (106)..(107): Xaa can be any naturally occurring amino acid
  Coding DNA Sequence Number=SeqID_5178
  Gene Ontology: Cellular component=intracellular; Biological process =signal transduction
  Homolog annotation: Hit_ID=Q10NV4; Match level="QueryCoverage=92%, HitCoverage=31%, E-value=9e-72, Identity=70%"; Hit description=PH domain containing protein, expressed
  Pfam annotation: Domain name=PH; Domain location=54-160; Score=64.2; E_value=4.4e-16; Accession=PF00169.19; Description=PH domain
MSASEFRIPYQQVSPSQPAENVNQFKTCRCGEGDPNSTSETGDSPPASCPNCQVLKSGHLLLSSKGIGWTSWKKRWFVLTRASLVFFXSDPNVXXPXXAEPIXXLXXIDLNNTASMIIKEERKLITVVFPDGRDGRTFTLKAETTEDLNEWRSALENALAQAPSVVNTAGQLPVVSTDITEPVEAAVEQLHSSRDAIFSNSGTM

SEQ ID NO: 12353 - protein, 94 aa, Zea mays
  Coding DNA Sequence Number=SeqID_5179
MSGYPKYEIRTVIREDIRISEIRRISVISYPYPISELYYPNSNPKSENSADILKKLSNRIISLFERSDGRIISVPFTPLLISNGLFRTNYGDRS

SEQ ID NO: 12354 - protein, 120 aa, Zea mays
  Coding DNA Sequence Number=SeqID_5181
FLPHVHALLNRCLLLRPCNHDSHTSSPKRRYPSAFYLVALKTYSEIIGVNILRTFDQRGYPTVAPHGISKFITSSGRVINGGLMPKVQKTSSLRSLTKTNSLKYNNKQQQQSLFVPSTLG

SEQ ID NO: 12355 - protein, 161 aa, Zea mays
  misc_feature (16)..(16): Xaa can be any naturally occurring amino acid
  misc_feature (41)..(41): Xaa can be any naturally occurring amino acid
  misc_feature (63)..(63): Xaa can be any naturally occurring amino acid
  misc_feature (82)..(82): Xaa can be any naturally occurring amino acid
  Coding DNA Sequence Number=SeqID_5183
  Gene Ontology: Mol. function=ribonuclease H activity; Biological process=regulation of epidermal cell division
  Homolog annotation: Hit_ID=Q6YXH6; Match level="QueryCoverage=95%, HitCoverage=80%, E-value=3e-61, Identity=77%"; Hit description=FH protein interacting protein FIP1-like
  Pfam annotation: Domain name=GRAM; Domain location=36-100; Score =31.7; E_value=2.7e-06; Accession=PF02893.10; Description=GRAM domain
SQLISWAVRTAPSIAXAAVGRIAQGTKVLAEGGHDRIFRQXFSAPPDEQLRKSYACYLSTAAXPVMGVLYLSTARVAFCSDXPLSYEASGGDRTECTHYKVRFLSTAAGCDPSANKTKPAEKFVQLVSVDSHEFWFMGFVNYDGAVAHLQEALSGFRNLQA

SEQ ID NO: 12356 - protein, 227 aa, Zea mays
  misc_feature (216)..(217): Xaa can be any naturally occurring amino acid
  Coding DNA Sequence Number=SeqID_5184
ERLDYAEQTARACARGSSRNQGMEQRKLRNSLARRGRKPRRTQQGDSAQERGKQGSEASSTASRAGAGCGMGERAEGRGHELGRTEGSYMEVARSGDFEGGTSGESRRTPGLRPLMGRGSSGAGKPAGEDAMGMREVRAQRGLELKGDRRWARQPGDRAPWASAGSFCTAESREEDKREQEMNAARDKNGAKKIHRGGGISFHERRQDFSTERERXXITNVCTDPGR

SEQ ID NO: 12357 - protein, 105 aa, Zea mays
  misc_feature (1)..(2): Xaa can be any naturally occurring amino acid
  misc_feature (4)..(5): Xaa can be any naturally occurring amino acid
  misc_feature (8)..(16): Xaa can be any naturally occurring amino acid
  Coding DNA Sequence Number=SeqID_5186
  Subcellular localization annotation: CTP_CleavageSite=59; ConfidenceScore=5.94e-01
XXFXXFFXXXXXXXXXFFFFFFFFFFFFFFFFFFFFFFFFFFFFFFFFFFFFFFFFFFCCKRRRRRAHGISPGNNNNQREVTELYQEALKFSVWSLKVRTPSVSF

SEQ ID NO: 12358 - protein, 75 aa, Zea mays
  misc_feature (21)..(21): Xaa can be any naturally occurring amino acid
  Coding DNA Sequence Number=SeqID_5188
  Gene Ontology: Mol. function=phosphoethanolamine N-methyltransferase activity; Cellular component=cytoplasm; Biological process=metabolic process
  Homolog annotation: Hit_ID=A2ZWU4; Match level="QueryCoverage=100%, HitCoverage=14%, E-value=5e-28, Identity=78%"; Hit description =Putative uncharacterized protein
QMLKNAGFSHVIAEDRTDQFXSVLQKELDKFEKNKDDFLSEFAQEDYDDIVNGWKAKLQRSSAGEQRWGLFVATK

SEQ ID NO: 12359 - protein, 72 aa, Zea mays
  Coding DNA Sequence Number=SeqID_5189
WPRAKLVAASSLPLMSCSGWKSLAVRASDNQESPCTNLYYSKELTTWNIIIQLRYTLQIYPLKSIVIDNTQH

SEQ ID NO: 12360 - protein, 54 aa, Zea mays
  Coding DNA Sequence Number=SeqID_5191
FGLPPRFALSLQPLHSAAARLSDRRENGMSIALGGVSSSRGYERRENNNYCVLT

SEQ ID NO: 12361 - protein, 176 aa, Zea mays
  Coding DNA Sequence Number=SeqID_5193
  Subcellular localization annotation: CTP_CleavageSite=61; ConfidenceScore=5.19e-01
RSLSCRSCSVCLPKSQPRCRRWMCPLIRSPQAGSLSRLPSGPWACPGPALQSPQRAGARVRAGGARPHRRPGVVLSPPPQRDPNVSPPPLPGRVGASSPGPKPGRLSTMANWGNAADFAKAKSAPPNLKKKSPPPPEKKNPGGWAPKKGGPKIPRGGKIFLGHPLSTKNWGVFPPV

SEQ ID NO: 12362 - protein, 176 aa, Zea mays; identical to SEQ ID NO: 12361
  Coding DNA Sequence Number=SeqID_5194
  Subcellular localization annotation: CTP_CleavageSite=61; ConfidenceScore=5.19e-01

SEQ ID NO: 12363 - protein, 94 aa, Zea mays
  misc_feature (45)..(45): Xaa can be any naturally occurring amino acid
  Coding DNA Sequence Number=SeqID_5196
  Gene Ontology: Mol. function=transposase activity; Biological process= transposition, DNA-mediated
  Homolog annotation: Hit_ID=Q9XEP4; Match level="QueryCoverage=94%, HitCoverage=9%, E-value=4e-19, Identity=54%"; Hit description =Putative uncharacterized protein
MFRMSKHVFESLHDVLTSTCHMSSIEALAMFLWIIGAPQSIRQLXNRFERSKDTTSREFEEVLHCVYKMSDDIIKPKDPKFSIVYLRVQAPDSN

SEQ ID NO: 12364 - protein, 200 aa, Zea mays
  Coding DNA Sequence Number=SeqID_5197
WRVARRYRQVSLLSDPTLIGFVDWTWIDDFSGSNVSGCGTIRTSRSLHTNWIRPVLILIADLACVLFGVSRPDFRSRRKGPALVTEILVEGLRFSYGSFIVFRLMSSYWCEDRNRTYYKLVCTSLEMLLAGSAGATEFWKLIEVLTGPVYQEKIVGIYIPKLLLYWFVFSFCALQFFVSYIGAGGFLQQDYMDGWGWRRV

SEQ ID NO: 12365 - protein, 48 aa, Zea mays
  Coding DNA Sequence Number=SeqID_5199
ALHPVGTTLSFFTFYLGDILALCPYRNDFGAKPCIPLGKTLGDFSPFT

SEQ ID NO: 12366 - protein, 110 aa, Zea mays
  misc_feature (43)..(43): Xaa can be any naturally occurring amino acid
  misc_feature (91)..(91): Xaa can be any naturally occurring amino acid
  Coding DNA Sequence Number=SeqID_5201
  Gene Ontology: Mol. function=nucleic acid binding; Biological process= DNA integration
  Homolog annotation: Hit_ID=A0EVH4; Match level="QueryCoverage=79%, HitCoverage=10%, E-value=5e-21, Identity=60%"; Hit description=Opie3 gag protein
YFRVLQIGHFIANCPDNDSDQEQGKNGKRENKKVYKKAKGEAXLGKEWDSNCSSSDSDDEGLAATAFNKSSLFPNERHTCLMAKEKKVSTXSTITYASSSDDESSDDEVD

SEQ ID NO: 12367 - protein, 58 aa, Zea mays
  Coding DNA Sequence Number=SeqID_5202
KQWFSLLNTFFVSPFCNVYFPYPTHLYFYILKSIFFFFFFLGLLASISISCEKSLTHG

SEQ ID NO: 12368 - protein, 246 aa, Zea mays
  Coding DNA Sequence Number=SeqID_5204
QIDGRDGEGGRQGRPATAWRRHAFFSDRSTLCPRASPPVSLVPSQIHQLLTYVNDPRYLCSCTLCTSSSTRNRPPSPLCKRDSASRCIYLPDDTFFSYSRSRAFGRITDVYYVPACCSCSSHQPSGPPRRGEPRRLDRPEGRDGGAPRTPGRGLTARRGQARQASADRGRRGGPGGRPGGQGSARPAGPPGQTSTGWCRGPSRAAWGHHGAHGRGRTRTDGPREAARLQRTSLHGNPNQQQGSSFV

SEQ ID NO: 12369 - protein, 246 aa, Zea mays; identical to SEQ ID NO: 12368
  Coding DNA Sequence Number=SeqID_5205

SEQ ID NO: 12370 - protein, 175 aa, Zea mays
  misc_feature (97)..(97): Xaa can be any naturally occurring amino acid
  misc_feature (123)..(123): Xaa can be any naturally occurring amino acid
  Coding DNA Sequence Number=SeqID_5206
  Gene Ontology: Mol. function=aspartic-type endopeptidase activity; Cellular component=chromatin; Biological process=chromatin assembly or disassembly
  Homolog annotation: Hit_ID=Q8SA91; Match level="QueryCoverage=88%, HitCoverage=6%, E-value=8e-30, Identity=43%"; Hit description =Putative gag-pol polyprotein
KLGEIPRGRPIDDKLLASRAYRRARGLCQRCAEKWSRDHKCPATVPLNAILQVWDLIRDEDQEVTEETHPVDTEQLFLAISKEASLGIEAPWQCVLXGEVQNKPLLILVDSGSSHSFISGRLXRKLDGLSGILAPVHVKVANCEVLSCSLQLLHDSWLIKGYSFISQKKKKKKKK

SEQ ID NO: 12371 - protein, 175 aa, Zea mays; identical to SEQ ID NO: 12370
  misc_feature (97)..(97): Xaa can be any naturally occurring amino acid
  misc_feature (123)..(123): Xaa can be any naturally occurring amino acid
  Coding DNA Sequence Number=SeqID_5207
  Gene Ontology: Mol. function=aspartic-type endopeptidase activity; Cellular component=chromatin; Biological process=chromatin assembly or disassembly
  Homolog annotation: Hit_ID=Q8SA91; Match level="QueryCoverage=88%, HitCoverage=6%, E-value=8e-30, Identity=43%"; Hit description =Putative gag-pol polyprotein

SEQ ID NO: 12372 - protein, 112 aa, Zea mays
  Coding DNA Sequence Number=SeqID_5208
  Homolog annotation: Hit_ID=A2X3K9; Match level="QueryCoverage=64%, HitCoverage=9%, E-value=2e-11, Identity=45%"; Hit description =Putative uncharacterized protein
  Pfam annotation: Domain name=BURP; Domain location=1-109; Score= -75.1; E_value=0.00088; Accession=PF03181.6; Description=BURP domain
KKDAARYTVAPNGVARIGKAGDAMVPCHLMAYPYMVHYCHRSVDVEALRVELMGLGDDHAAAASHAIAIAMCHANTTSWDARYFQMLNATRGEEICHFMPHNYVLWLPAAAL

SEQ ID NO: 12373 - protein, 112 aa, Zea mays; identical to SEQ ID NO: 12372
  Coding DNA Sequence Number=SeqID_5209
  Homolog annotation: Hit_ID=A2X3K9; Match level="QueryCoverage=64%, HitCoverage=9%, E-value=2e-11, Identity=45%"; Hit description =Putative uncharacterized protein
  Pfam annotation: Domain name=BURP; Domain location=1-109; Score= -75.1; E_value=0.00088; Accession=PF03181.6; Description=BURP domain

SEQ ID NO: 12374 - protein, 266 aa, Zea mays
  misc_feature (193)..(194): Xaa can be any naturally occurring amino acid
  misc_feature (221)..(221): Xaa can be any naturally occurring amino acid
  misc_feature (223)..(224): Xaa can be any naturally occurring amino acid
  misc_feature (232)..(247): Xaa can be any naturally occurring amino acid
  misc_feature (249)..(266): Xaa can be any naturally occurring amino acid
  Coding DNA Sequence Number=SeqID_5210
  Homolog annotation: Hit_ID=A3AMI2; Match level="QueryCoverage=14%, HitCoverage=10%, E-value=5e-08, Identity=78%"; Hit description =Putative uncharacterized protein
  Subcellular localization annotation: CTP_CleavageSite=23; ConfidenceScore=5.57e-01
SSRSSSPASISLTAARCSSFFPCASRTSSLLAPRPELLLHRTPGSGPGSTAFFPGELPALDPLRAPPQLVPIFLAALKSRFVGVWSSRGRARAVPARVFSHGAWLDLPAALEIIVIMEEERRGFDGPPTMAPETSLISSLVMEEGHIYSLAAKGDTLYTGESGISPACAPAPWGRKMEAYLMRSARASSSPAXXKRRRREEYARRRLPTGTVNSDRTLILXYXXLSAVSYPXXXXXXXXXXXXXXXXHXXXXXXXXXXXXXXXXXX

SEQ ID NO: 12375 - protein, 101 aa, Zea mays
  misc_feature (27)..(27): Xaa can be any naturally occurring amino acid
  misc_feature (35)..(35): Xaa can be any naturally occurring amino acid
  misc_feature (40)..(40): Xaa can be any naturally occurring amino acid
  misc_feature (63)..(63): Xaa can be any naturally occurring amino acid
  misc_feature (78)..(78): Xaa can be any naturally occurring amino acid
  misc_feature (86)..(86): Xaa can be any naturally occurring amino acid
  misc_feature (92)..(93): Xaa can be any naturally occurring amino acid
  misc_feature (96)..(96): Xaa can be any naturally occurring amino acid
  misc_feature (101)..(101): Xaa can be any naturally occurring amino acid
  Coding DNA Sequence Number=SeqID_5211
WVPKYPPLKGDNCKGGLADLTWDRSVXRLPSGPGXFADGXFGEKGLQHWPPLVGPNGRLNGRXSKLLMGAGGYPLLGXNPKRGGIXRPPGKXXPGXPGPKX

SEQ ID NO: 12376 - protein, 138 aa, Zea mays
  misc_feature (2)..(2): Xaa can be any naturally occurring amino acid
  misc_feature (6)..(6): Xaa can be any naturally occurring amino acid
  misc_feature (8)..(8): Xaa can be any naturally occurring amino acid
  misc_feature (11)..(12): Xaa can be any naturally occurring amino acid
  misc_feature (15)..(15): Xaa can be any naturally occurring amino acid
  misc_feature (17)..(17): Xaa can be any naturally occurring amino acid
  misc_feature (19)..(20): Xaa can be any naturally occurring amino acid
  misc_feature (23)..(23): Xaa can be any naturally occurring amino acid
  misc_feature (31)..(31): Xaa can be any naturally occurring amino acid
  misc_feature (33)..(35): Xaa can be any naturally occurring amino acid
  misc_feature (41)..(41): Xaa can be any naturally occurring amino acid
  misc_feature (50)..(50): Xaa can be any naturally occurring amino acid
  misc_feature (52)..(54): Xaa can be any naturally occurring amino acid
  misc_feature (57)..(58): Xaa can be any naturally occurring amino acid
  misc_feature (61)..(61): Xaa can be any naturally occurring amino acid
  misc_feature (64)..(64): Xaa can be any naturally occurring amino acid
  misc_feature (67)..(67): Xaa can be any naturally occurring amino acid
  misc_feature (69)..(70): Xaa can be any naturally occurring amino acid
  misc_feature (73)..(74): Xaa can be any naturally occurring amino acid
  misc_feature (76)..(77): Xaa can be any naturally occurring amino acid
  misc_feature (80)..(81): Xaa can be any naturally occurring amino acid
  misc_feature (84)..(138): Xaa can be any naturally occurring amino acid
  Coding DNA Sequence Number=SeqID_5213
SXHLNXYXRVXXDRXSXHXXSAXGGLPTCWXMXXXKHSEYXSFTTPIFLXSXXXKNXXSRXRAXPPXEXXGKXXNXXLKXXPRXXXXXXXXXXXXXXXXXXXXXXXXXXXXXXXXXXXXXXXXXXXXXXXXXXXXXXX

SEQ ID NO: 12377 - protein, 50 aa, Zea mays
  Coding DNA Sequence Number=SeqID_5215
PCQFHCHKQGAECPHRQPFVTDDAGDLGEPAAAAGRESSLPRRAHESKWL

SEQ ID NO: 12378 - protein, 50 aa, Zea mays; identical to SEQ ID NO: 12377
  Coding DNA Sequence Number=SeqID_5216

SEQ ID NO: 12379 - protein, 138 aa, Zea mays
  misc_feature (1)..(1): Xaa can be any naturally occurring amino acid
  Coding DNA Sequence Number=SeqID_5217
  Subcellular localization annotation: CTP_CleavageSite=63; ConfidenceScore=5.33e-01
XGRGRRACLVLGGPGTSSASFSCTDHRLTWYSAPNPCSISMAWTAPYRPRSASTFGAQRAGVRAAQHLPLVCSAPAMACGRSSSALLWPLLPWYKPLFHDAPHHRVLIPCEGREKSGVYSWLACGSGHQFRPNCALAC

SEQ ID NO: 12380 - protein, 143 aa, Zea mays
  Coding DNA Sequence Number=SeqID_5219
  Gene Ontology: Mol. function=nutrient reservoir activity; Cellular component=membrane
  Homolog annotation: Hit_ID=P04706; Match level="QueryCoverage=99%, HitCoverage=63%, E-value=3e-36, Identity=57%"; Hit description =Glutelin-2 precursor
PQCHYLIKRPGLKLIPQPHPCRCQQPHPSRCQLQGPWGVGSPPILGQWVEFLRHQCTRRGTPYCSPQSQGLGQQFSHQFRQVDPHPGSQGFLGLVLQSILQQHPQSGQFGGLLGAQIAQQLRGMWVLQHPIPSPYVVAGGVPP

SEQ ID NO: 12381 - protein, 112 aa, Zea mays
  misc_feature (1)..(47): Xaa can be any naturally occurring amino acid
  Coding DNA Sequence Number=SeqID_5220
XXXXXXXXXXXXXXXXXXXXXXXXXXXXXXXXXXXXXXXXXXXXXXXPHTTCPAAHVAYARAAYRATHPRPWMLEQEVDRKRFHLIRPMIRERKAKSKNSSWKCGFWPDLTN

SEQ ID NO: 12382 - protein, 136 aa, Zea mays
  misc_feature (9)..(9): Xaa can be any naturally occurring amino acid
  misc_feature (23)..(23): Xaa can be any naturally occurring amino acid
  misc_feature (29)..(29): Xaa can be any naturally occurring amino acid
  misc_feature (51)..(51): Xaa can be any naturally occurring amino acid
  misc_feature (63)..(63): Xaa can be any naturally occurring amino acid
  misc_feature (67)..(67): Xaa can be any naturally occurring amino acid
  misc_feature (78)..(78): Xaa can be any naturally occurring amino acid
  misc_feature (102)..(102): Xaa can be any naturally occurring amino acid
  misc_feature (106)..(106): Xaa can be any naturally occurring amino acid
  misc_feature (114)..(114): Xaa can be any naturally occurring amino acid
  misc_feature (124)..(124): Xaa can be any naturally occurring amino acid
  misc_feature (134)..(134): Xaa can be any naturally occurring amino acid
  Coding DNA Sequence Number=SeqID_5222
IWGNNILLXKKKNWEKLAFIPVXNGTRLXPVEVTFCSSGQLTCHLLLLSFXGGIFHLFPFLKXIGMXGKPYQFLWQEXLSFGISQKAWGFNQRLGTPMELPXQVMXKSWGNFMXAMGIPPKGPXKGDPDGAFFXFP

SEQ ID NO: 12383 - protein, 145 aa, Zea mays
  misc_feature (7)..(7): Xaa can be any naturally occurring amino acid
  misc_feature (14)..(16): Xaa can be any naturally occurring amino acid
  misc_feature (18)..(19): Xaa can be any naturally occurring amino acid
  misc_feature (25)..(25): Xaa can be any naturally occurring amino acid
  misc_feature (29)..(31): Xaa can be any naturally occurring amino acid
  misc_feature (33)..(33): Xaa can be any naturally occurring amino acid
  misc_feature (36)..(38): Xaa can be any naturally occurring amino acid
  misc_feature (40)..(48): Xaa can be any naturally occurring amino acid
  misc_feature (50)..(50): Xaa can be any naturally occurring amino acid
  misc_feature (53)..(53): Xaa can be any naturally occurring amino acid
  misc_feature (56)..(58): Xaa can be any naturally occurring amino acid
  misc_feature (60)..(61): Xaa can be any naturally occurring amino acid
  misc_feature (63)..(65): Xaa can be any naturally occurring amino acid
  misc_feature (68)..(70): Xaa can be any naturally occurring amino acid
  misc_feature (73)..(75): Xaa can be any naturally occurring amino acid
  misc_feature (78)..(78): Xaa can be any naturally occurring amino acid
  misc_feature (82)..(82): Xaa can be any naturally occurring amino acid
  misc_feature (84)..(85): Xaa can be any naturally occurring amino acid
  misc_feature (87)..(93): Xaa can be any naturally occurring amino acid
  misc_feature (95)..(98): Xaa can be any naturally occurring amino acid
  misc_feature (101)..(101): Xaa can be any naturally occurring amino acid
  misc_feature (103)..(107): Xaa can be any naturally occurring amino acid
  misc_feature (109)..(110): Xaa can be any naturally occurring amino acid
  misc_feature (113)..(116): Xaa can be any naturally occurring amino acid
  misc_feature (120)..(120): Xaa can be any naturally occurring amino acid
  misc_feature (122)..(122): Xaa can be any naturally occurring amino acid
  misc_feature (125)..(130): Xaa can be any naturally occurring amino acid
  misc_feature (133)..(138): Xaa can be any naturally occurring amino acid
  misc_feature (141)..(142): Xaa can be any naturally occurring amino acid
  Coding DNA Sequence Number=SeqID_5224
  Subcellular localization annotation: CTP_CleavageSite=21; ConfidenceScore=5.22e-01
QLCSSLXVFQPVAXXXNXXCCLFAXPRPXXXPXATXXXPXXXXXXXXXLXSPXFPXXXTXXFXXXPAXXXSAXXXPHXPLLXSXXPXXXXXXXTXXXXPSXLXXXXXVXXLFXXXXSKTXAXLTXXXXXXCLXXXXXXSPXXPYS

SEQ ID NO: 12384 - protein, 241 aa, Zea mays
  misc_feature (230)..(230): Xaa can be any naturally occurring amino acid
  Coding DNA Sequence Number=SeqID_681
  Subcellular localization annotation: CTP_CleavageSite=81; ConfidenceScore=5.77e-01
VAAGRAPSCFSLPLTFPPSHGAQSSFRTREASLQVAPTTLQHPTVGFSSSFSSAVASMLAKPISHGRLGILLVCSWPDFLRTSSPPAFISLRVSCPWLGPSSALPFAMAPVARMSSPPLSWRSALPISMAARGPLSSPSPQARRDPQLPLSSSCPAPCALQNPLCRALLPVAASSSSDSTQLAPAHVARVSLTPALSFQLTTPAVQWKHGGRDGRGLAGCRSPICLGQRXDAPSQQLVGEL

SEQ ID NO: 12385 - protein, 80 aa, Zea mays
  Coding DNA Sequence Number=SeqID_683
  Gene Ontology: Mol. function=pyruvate dehydrogenase (acetyl -transferring) activity; Cellular component=mitochondrial matrix; Biological process=metabolic process
  Homolog annotation: Hit_ID=A7PHN1; Match level="QueryCoverage=55%, HitCoverage=13%, E-value=5e-14, Identity=88%"; Hit description =Chromosome chr17 scaffold_16, whole genome shotgun sequence
MLANKFLNCTLLYIQAIDHIINSAAKSNYMSAGQIYVHIVFTGPNGAAVGVGAQHSQSKGILGADPRRRRPTSFQVLKPS

SEQ ID NO: 12386 - protein, 140 aa, Zea mays
  Coding DNA Sequence Number=SeqID_684
  Subcellular localization annotation: CTP_CleavageSite=65; ConfidenceScore=5.76e-01
QTPSSALSQPFRSKLQMPSSALSQLGRSKRPPVTRPAVPPQLLRATVQPPEGRLGGSLPAGQPPHAAVRDQPEKKLATPLRVASLSAGPHSPHAAALHLLSTAEDALLPAFTPYIPIMLYIYIYLSKTDLFLCINMMKTH

SEQ ID NO: 12387 - protein, 84 aa, Zea mays
  Coding DNA Sequence Number=SeqID_686
KIKCKQKIEKRKREKTPPNHDLGGSTGNNRFFIFSCADIVQANSGCCAVESSSFSSTARIMLGPINTTSTDHFKVWESKKHNKA

SEQ ID NO: 12388 - protein, 95 aa, Zea mays
  Coding DNA Sequence Number=SeqID_688
  Gene Ontology: Mol. function=unfolded protein binding; Cellular component=endoplasmic reticulum lumen; Biological process=protein folding
  Homolog annotation: Hit_ID=Q5Z9N8; Match level="QueryCoverage=100%, HitCoverage=11%, E-value=3e-23, Identity=63%"; Hit description=Heat shock protein 90
IIKELRDKVAQDNESEELKQTARLVYQTALMESGFNLPDPKEFASSIYKSVHKSLDLSPDAAVEEEDEAEEQPEVEEKEPAAKEGSEPSFDKDEL

SEQ ID NO: 12389 - protein, 107 aa, Zea mays
  Coding DNA Sequence Number=SeqID_689
  Gene Ontology: Mol. function=oxidoreductase activity; Cellular component=cytoplasm; Biological process=metabolic process
  Homolog annotation: Hit_ID=A1CGI7; Match level="QueryCoverage=100%, HitCoverage=44%, E-value=1e-29, Identity=57%"; Hit description=DJ -1/PfpI family protein
GVVSSVCHGPAIFAGVTDEATGELLIKGKRITGFTDEGEEVLGVMGQLKSWNKELVQELAARVGATYERSAGPWDDFHIVDGRLVTGQNPASATSTAKAAIEVFESL

SEQ ID NO: 12390 - protein, 253 aa, Zea mays
  Coding DNA Sequence Number=SeqID_690
  Gene Ontology: Mol. function=oxidoreductase activity; Biological process=metabolic process
  Homolog annotation: Hit_ID=A2QUW9; Match level="QueryCoverage=98%, HitCoverage=77%, E-value=4e-27, Identity=31%"; Hit description =Contig An10c0020, complete genome
TSIELVKRGVKTLVMGVRNVSQGEVLKAELLSLNDQVTIHVLELHLDRFGSVVAFCGQVASVTDELDVAVLNAGVGGYDFRVSESGHENIMQVNVYSNTLLAVELLPLLERTAKAKSRPSRLTWVGSFVQMGHGFTKKPLLPGDSIISQLDDVSRFDKSRYQDSKLLTTLVAERLAEHIDKNLVLLNEVSPGPVLTNFGSTYPAYFRIALSIAGHFINKEKQLAEGVRKYMHAFSVLGQESHGQYISDYKITP

SEQ ID NO: 12391 - protein, 196 aa, Zea mays
  Coding DNA Sequence Number=SeqID_691
  Gene Ontology: Mol. function=hydrolase activity; Biological process =metabolic process
  Homolog annotation: Hit_ID=Q8XSM9; Match level="QueryCoverage=88%, HitCoverage=91%, E-value=1e-33, Identity=45%"; Hit description =Probable hydrolase protein
  Pfam annotation: Domain name=Isochorismatase; Domain location=12-192; Score=49.6; E_value=1.1e-11; Accession=PF00857.11; Description =Isochorismatase family
MAGSLHSDPAKMSKTALLVMDYQAGILSRLPLPPNHMQLLAKTIDAARAHVKIIYVTVAFRPGHPEVSASNATFSAAAKTNSFVSGSPETQIDPAIAPKEGDILIEKKRVSAFAGSGLDLVLKGLGIETLVLAGISTGGVVLSTVCEAADKDFGVVVLKDLCADGDEKLHNGLINKIFSKRGEILEAEEWLEKLKA

SEQ ID NO: 12392 - protein, 120 aa, Zea mays
  Coding DNA Sequence Number=SeqID_692
LNWVGLGLRERERPAAEQHRYKSPAYTFFQKCLLCIRRCLTQLFAKDITLDEKQELDEVLQREWPWMAHSRSSKEVGFCYLFFYQWPWISLRSSPSTIQLQHPPKEVVHTCLYEDPKFLT

SEQ ID NO: 12393 - protein, 152 aa, Zea mays
  Coding DNA Sequence Number=SeqID_693
HVILEYCAVDSQSTIHISSCYVCRFLQAIASHHPSPLAQANSPSRPYQLFHIIAPFWTILSGSIASLLLTTVVPLCRLTLRTCHHSSRTIAGASLYLTVGRTHLAGLRSGSVSNASHTISLCVGKLLARKTFAQVLCSYKRWSSLMPYVSAY

SEQ ID NO: 12394 - protein, 126 aa, Zea mays
  misc_feature (39)..(39): Xaa can be any naturally occurring amino acid
  misc_feature (99)..(99): Xaa can be any naturally occurring amino acid
  Coding DNA Sequence Number=SeqID_695
  Gene Ontology: Mol. function=microtubule binding; Cellular component =phragmoplast
  Homolog annotation: Hit_ID=A9P9G8; Match level="QueryCoverage=76%, HitCoverage=38%, E-value=9e-15, Identity=43%"; Hit description =Putative uncharacterized protein
RHPIYWTHITSCNKQNSENIDVNNLVEGRPLENLEFIEXYCDSMNGGIMIENYSPIERRSKGCKERGSKGSNNPSKSSQTNRLSGAESADGGPIVGKVXTLFLKEHYIEQIQKLFEKAVCKVFTAT

SEQ ID NO: 12395 - protein, 89 aa, Zea mays
  Coding DNA Sequence Number=SeqID_696
  Homolog annotation: Hit_ID=Q10N70; Match level="QueryCoverage=58%, HitCoverage=4%, E-value=7e-09, Identity=55%"; Hit description =Expressed protein
CDVKTCQSLPEMGESHAFRNMEEMDFFYVFDMLVALGIHAHNEDDLLDNCYLLQCPLGVYSGSSIHMIQMVISFSGTKYVYILLGFGQK

SEQ ID NO: 12396 - protein, 130 aa, Zea mays
  Coding DNA Sequence Number=SeqID_697
RKPGLPKLCWWTLVVDGCGAVQSQCLTGAAVVKVCPQQATDMHQASHRPALLFLATAFLRILAFSYPATRVATSSDLTRTTTPNHCCFSGIWPNSRNEPNRRHCAMDDSERRTAKRSRFDQTEPEPKRAS

SEQ ID NO: 12397 - protein, 199 aa, Zea mays
  misc_feature (84)..(84): Xaa can be any naturally occurring amino acid
  misc_feature (108)..(108): Xaa can be any naturally occurring amino acid
  misc_feature (114)..(114): Xaa can be any naturally occurring amino acid
  misc_feature (137)..(137): Xaa can be any naturally occurring amino acid
  misc_feature (158)..(158): Xaa can be any naturally occurring amino acid
  misc_feature (167)..(167): Xaa can be any naturally occurring amino acid
  misc_feature (199)..(199): Xaa can be any naturally occurring amino acid
  Coding DNA Sequence Number=SeqID_5226
  Gene Ontology: Mol. function=oxidoreductase activity; Cellular component=chloroplast; Biological process=skeletal development
  Homolog annotation: Hit_ID=Q6ER94; Match level="QueryCoverage=90%, HitCoverage=68%, E-value=2e-40, Identity=54%"; Hit description=2-Cys peroxiredoxin BAS1, chloroplast precursor
  Pfam annotation: Domain name=AhpC-TSA; Domain location=87-198; Score =6.2; E_value=0.00042; Accession=PF00578.11; Description=AhpCTSA family
  Subcellular localization annotation: CTP_CleavageSite=77; ConfidenceScore=5.85e-01
TNPKPQSTPSPPHPLRAAMACSFSAAITVSSAPTPAARPLAAAPQSVCIARSAVATTARPLRLAASGSARATRLVARASVVDDXPLVGNKGARLRRPELCPNQKFINXKLSDYXGKKYRHFWSFYPWNFTFVCPTEXTAFSDRYEDFEKLTLRVLGVXIDRVFSPPXWLQTNRMPGGLGDLKYPLVSDGNKSFSKAFGX

SEQ ID NO: 12398 - protein, 117 aa, Zea mays
  misc_feature (20)..(20): Xaa can be any naturally occurring amino acid
  misc_feature (46)..(46): Xaa can be any naturally occurring amino acid
  misc_feature (89)..(89): Xaa can be any naturally occurring amino acid
  Coding DNA Sequence Number=SeqID_5227
  Gene Ontology: Mol. function=structural constituent of ribosome; Cellular component=ribonucleoprotein complex; Biological process =translation
  Homolog annotation: Hit_ID=A2XGJ3; Match level="QueryCoverage=95%, HitCoverage=56%, E-value=1e-30, Identity=66%"; Hit description =Ribosomal protein L18
  Pfam annotation: Domain name=Ribosomal_L18e; Domain location=4-118; Score=68.2; E_value=2.7e-17; Accession=PF00828.9; Description =Eukaryotic ribosomal protein L18
RCCRKTERTAPKSDDVYLPXKLLLKLYRFNAVILKRYFISKTNRPXPLSLHRLISFMEGGDENQIAVIVGNVTDDKRVYEVSAMKVAAXLRFTETARARILSAGDECLAFDHCPLSG

SEQ ID NO: 12399 - protein, 117 aa, Zea mays; identical to SEQ ID NO: 12398
  misc_feature (20)..(20): Xaa can be any naturally occurring amino acid
  misc_feature (46)..(46): Xaa can be any naturally occurring amino acid
  misc_feature (89)..(89): Xaa can be any naturally occurring amino acid
  Coding DNA Sequence Number=SeqID_5228
  Gene Ontology: Mol. function=structural constituent of ribosome; Cellular component=ribonucleoprotein complex; Biological process =translation
  Homolog annotation: Hit_ID=A2XGJ3; Match level="QueryCoverage=95%, HitCoverage=56%, E-value=1e-30, Identity=66%"; Hit description =Ribosomal protein L18
  Pfam annotation: Domain name=Ribosomal_L18e; Domain location=4-118; Score=68.2; E_value=2.7e-17; Accession=PF00828.9; Description =Eukaryotic ribosomal protein L18

SEQ ID NO: 12400 - protein, 188 aa, Zea mays
  misc_feature (43)..(43): Xaa can be any naturally occurring amino acid
  misc_feature (58)..(58): Xaa can be any naturally occurring amino acid
  misc_feature (62)..(62): Xaa can be any naturally occurring amino acid
  misc_feature (74)..(74): Xaa can be any naturally occurring amino acid
  misc_feature (76)..(76): Xaa can be any naturally occurring amino acid
  misc_feature (80)..(80): Xaa can be any naturally occurring amino acid
  misc_feature (83)..(83): Xaa can be any naturally occurring amino acid
  misc_feature (85)..(85): Xaa can be any naturally occurring amino acid
  misc_feature (96)..(96): Xaa can be any naturally occurring amino acid
  misc_feature (124)..(188): Xaa can be any naturally occurring amino acid
  Coding DNA Sequence Number=SeqID_5229
  Subcellular localization annotation: CTP_CleavageSite=45; ConfidenceScore=5.73e-01
VTSPSTMAVAPTPSWWLACRASQPRSGTPTRFFSPVALRGRQXSRASTLLYRKEWVTXWIMXMEWGNPYGGDPXEXCLAXEKXAXLKRRVTLARLXMAPRNTDPSAMQFSCAPGGLAHHSNQTXXXXXXXXXXXXXXXXXXXXXXXXXXXXXXXXXXXXXXXXXXXXXXXXXXXXXXXXXXXXXXXXX

SEQ ID NO: 12401 - protein, 180 aa, Zea mays
  misc_feature (1)..(1): Xaa can be any naturally occurring amino acid
  misc_feature (5)..(10): Xaa can be any naturally occurring amino acid
  misc_feature (28)..(28): Xaa can be any naturally occurring amino acid
  misc_feature (52)..(52): Xaa can be any naturally occurring amino acid
  misc_feature (86)..(86): Xaa can be any naturally occurring amino acid
  misc_feature (98)..(98): Xaa can be any naturally occurring amino acid
  misc_feature (112)..(112): Xaa can be any naturally occurring amino acid
  misc_feature (119)..(119): Xaa can be any naturally occurring amino acid
  misc_feature (127)..(127): Xaa can be any naturally occurring amino acid
  misc_feature (134)..(134): Xaa can be any naturally occurring amino acid
  misc_feature (139)..(139): Xaa can be any naturally occurring amino acid
  misc_feature (146)..(146): Xaa can be any naturally occurring amino acid
  misc_feature (157)..(157): Xaa can be any naturally occurring amino acid
  misc_feature (164)..(164): Xaa can be any naturally occurring amino acid
  misc_feature (172)..(173): Xaa can be any naturally occurring amino acid
  Coding DNA Sequence Number=SeqID_5231
XRERXXXXXXSPPPPPRLLLSLFPSLKXPFLVVVILVVVIVINLCVPSVAHXPRLGPHLPFRFGSGCARSEAYFGLCGFSPCPSLXSGIRPADRKETXGGIITYQIRENSLXKFGDQAXGWDETLRXDFTAWKXVKQAXIQGSPGXKAPWFKNPWGXKNNEPVXCLGKKGLXXKGLGNIL

SEQ ID NO: 12402 - protein, 149 aa, Zea mays
  Coding DNA Sequence Number=SeqID_5233
ELCALSLLSLMGTSKCFLFMRILILTTMAISAAMNATIIGTLVTKRDYKFAELMRLPDTFLMLFVLLCFDFSIYLSFKILWSARTSVDQKICSQVLLESGHGYKVGNKRNPLTDHLLGELEDTTKNTGIGRDPVMDSECETTFTKQSWS

SEQ ID NO: 12403 - protein, 172 aa, Zea mays
  misc_feature (16)..(16): Xaa can be any naturally occurring amino acid
  misc_feature (48)..(48): Xaa can be any naturally occurring amino acid
  misc_feature (50)..(50): Xaa can be any naturally occurring amino acid
  misc_feature (53)..(54): Xaa can be any naturally occurring amino acid
  misc_feature (56)..(57): Xaa can be any naturally occurring amino acid
  misc_feature (59)..(60): Xaa can be any naturally occurring amino acid
  misc_feature (62)..(63): Xaa can be any naturally occurring amino acid
  misc_feature (65)..(68): Xaa can be any naturally occurring amino acid
  misc_feature (70)..(70): Xaa can be any naturally occurring amino acid
  misc_feature (73)..(75): Xaa can be any naturally occurring amino acid
  misc_feature (77)..(77): Xaa can be any naturally occurring amino acid
  misc_feature (79)..(79): Xaa can be any naturally occurring amino acid
  misc_feature (81)..(86): Xaa can be any naturally occurring amino acid
  misc_feature (88)..(91): Xaa can be any naturally occurring amino acid
  misc_feature (93)..(95): Xaa can be any naturally occurring amino acid
  misc_feature (97)..(98): Xaa can be any naturally occurring amino acid
  misc_feature (102)..(103): Xaa can be any naturally occurring amino acid
  misc_feature (105)..(108): Xaa can be any naturally occurring amino acid
  misc_feature (115)..(117): Xaa can be any naturally occurring amino acid
  misc_feature (119)..(122): Xaa can be any naturally occurring amino acid
  misc_feature (125)..(130): Xaa can be any naturally occurring amino acid
  misc_feature (132)..(132): Xaa can be any naturally occurring amino acid
  misc_feature (134)..(136): Xaa can be any naturally occurring amino acid
  misc_feature (138)..(141): Xaa can be any naturally occurring amino acid
  misc_feature (143)..(148): Xaa can be any naturally occurring amino acid
  misc_feature (152)..(160): Xaa can be any naturally occurring amino acid
  misc_feature (167)..(169): Xaa can be any naturally occurring amino acid
  Coding DNA Sequence Number=SeqID_5235
HYPPPPVPPLPPRQPXPSFLVGENWKREDNSDPPILFLRRKAWVKPGXHXFDXXNXXPXXGXXSXXXXLXQPXXXGXCXKXXXXXXPXXXXAXXXKXXGWLXXVXXXXVEVADYXXXRXXXXITXXXXXXVXFXXXYXXXXIXXXXXXLFFXXXXXXXXXGFWCVFXXXFGL

SEQ ID NO: 12404 - protein, 117 aa, Zea mays
  Coding DNA Sequence Number=SeqID_5237
PCFLHRPMPEGDSRRLEAPGDPGRSVSGRSGDQFRQGSLIGADSRKKSASSEGQRIHDFGADEQASVDSEIQQLEVVEPELFEGEEQVVEEEPPNTEAFALFQVPSPSQLSSAKDRC

SEQ ID NO: 12405 - protein, 109 aa, Zea mays
  misc_feature (27)..(27): Xaa can be any naturally occurring amino acid
  Coding DNA Sequence Number=SeqID_5239
  Gene Ontology: Mol. function=transferase activity; Biological process= flavonoid biosynthetic process
  Homolog annotation: Hit_ID=A2X747; Match level="QueryCoverage=95%, HitCoverage=23%, E-value=2e-29, Identity=66%"; Hit description =Putative uncharacterized protein
MAITARRSTMVRPARETPRQRLWNSQXLTSVVPRFHTPSVYFYRRDGPVPDAEGFFDGERMPRALAEALVPVYPMAGPLPRDGDRRLQIHCNAEAVVFLQAHAPESLWR

SEQ ID NO: 12406 - protein, 109 aa, Zea mays; identical to SEQ ID NO: 12405
  misc_feature (27)..(27): Xaa can be any naturally occurring amino acid
  Coding DNA Sequence Number=SeqID_5240
  Gene Ontology: Mol. function=transferase activity; Biological process= flavonoid biosynthetic process
  Homolog annotation: Hit_ID=A2X747; Match level="QueryCoverage=95%, HitCoverage=23%, E-value=2e-29, Identity=66%"; Hit description =Putative uncharacterized protein

SEQ ID NO: 12407 - protein, 84 aa, Zea mays
  Coding DNA Sequence Number=SeqID_5241
  Subcellular localization annotation: CTP_CleavageSite=42; ConfidenceScore=5.36e-01
HVSCLDTVTHSLYLARWPAPMTPSPCARPVSPARGPAGSRPRSGGPKSPRPAKPKFHFPFFPFHNFIYTCILIFYEEIMVEALF

SEQ ID NO: 12408 - protein, 96 aa, Zea mays
  Coding DNA Sequence Number=SeqID_5242
PPLNKFLKNKSIHLMSYSSGIVNLETSLPRNLNLSSNWSIELGKGEKKIENKKEKDQNRCLGRLPPFWPTSPFLPARSKPSPRVPAPWLTDVWARV

SEQ ID NO: 12409 - protein, 181 aa, Zea mays
  misc_feature (1)..(67): Xaa can be any naturally occurring amino acid
  misc_feature (70)..(71): Xaa can be any naturally occurring amino acid
  Coding DNA Sequence Number=SeqID_5244
XXXXXXXXXXXXXXXXXXXXXXXXXXXXXXXXXXXXXXXXXXXXXXXXXXXXXXXXXXXXXXXXXXXEKXXKKNLFFVFFFFSREPFPPRVPEIPPLGVYPGGFFLERWVLWPPRIKVGNPPNPVMGFPGQGGVNQAFWTRTQMPGAPPYPTAEVSCFSIQERQQVSAPKGFGPEVSSPRS

SEQ ID NO: 12410 - protein, 146 aa, Zea mays
  Coding DNA Sequence Number=SeqID_5246
  Gene Ontology: Mol. function=aspartic-type endopeptidase activity; Cellular component=cytoplasm; Biological process=DNA integration
  Homolog annotation: Hit_ID=Q2QXP9; Match level="QueryCoverage=94%, HitCoverage=9%, E-value=9e-38, Identity=53%"; Hit description =Retrotransposon protein, putative, unclassified
ARGCSAVRCSQLTCLLPLVRAACFAVRLLAPSQRPGEKSTGRKIGTGVRHNGLWFISHEESALKATVEGDVKEILLHHRRLGHISFENLSRLYPMMFKGVDKSRLVCDACELGKHTRSTYPSVGLRSCEPFILIHSDVWGQKKKKK

SEQ ID NO: 12411 - protein, 67 aa, Zea mays
  misc_feature (50)..(50): Xaa can be any naturally occurring amino acid
  Coding DNA Sequence Number=SeqID_5247
YSITESMNFATVTRSVIRRSTCMTCYVLPPFLFICRWIVQFCTIQRQIKXNGGSMTYEGEGERERER

SEQ ID NO: 12412 - protein, 125 aa, Zea mays
  Coding DNA Sequence Number=SeqID_5249
  Subcellular localization annotation: CTP_CleavageSite=70; ConfidenceScore=5.32e-01
WPTSFIPASHVSGVHAKIFGIDPFIPVHRLFLSQLLPFDAPTAHFRRRCRFTTPGRATAVRVALLLLAACAVARTCANRRCSPPRRQLLLARASALPPTHPPRLCFLSPAKPRPPLAAGRLVMYL

SEQ ID NO: 12413 - protein, 93 aa, Zea mays
  Coding DNA Sequence Number=SeqID_5251
  Subcellular localization annotation: CTP_CleavageSite=53; ConfidenceScore=5.20e-01
QYTYGWNPLVEPFSYLKTVSPNSIHNSWNCSPKFGTVLTLRQLQRVTTFNPCVAGEIREYCCIRLVEMFVPVLSIHRYDLRFVVNRRFSSRLR

SEQ ID NO: 12414 - protein, 320 aa, Zea mays
  misc_feature (67)..(67): Xaa can be any naturally occurring amino acid
  misc_feature (96)..(96): Xaa can be any naturally occurring amino acid
  misc_feature (138)..(138): Xaa can be any naturally occurring amino acid
  misc_feature (180)..(180): Xaa can be any naturally occurring amino acid
  misc_feature (225)..(225): Xaa can be any naturally occurring amino acid
  misc_feature (238)..(238): Xaa can be any naturally occurring amino acid
  Coding DNA Sequence Number=SeqID_5253
  Homolog annotation: Hit_ID=Q75GU4; Match level="QueryCoverage=96%, HitCoverage=66%, E-value=9e-88, Identity=59%"; Hit description =Expressed protein
  Subcellular localization annotation: CTP_CleavageSite=15; ConfidenceScore=5.10e-01
AASSSGTFVDLHISSASLLPGRDFAALLSDRWPTAASGHLSLAVVAPPSCPRPFNGHIEVIRLLHTXDFASAIRSPGDALDLLPAALLLLVDACVXACIRFLEAVSWSEDKEARVINLARLLPADEAADLLARVSPLXPLAAGLSSAAGVAGRSPSEAMLHGQIHSAIHDHPVHAATKAXDYPSRDCVHKVLDEAFQSRLDTVMEFMGKYASPDFRVAVGSDERXYRLNLQSAVLNTXNVKHLYWLIERMVDLRVTDNAVTPWSDQAALATDLQKLLNVADMRRNMMPGLPMLVTRCTLRLANSVITGETLVPRQVILVC

SEQ ID NO: 12415 - protein, 147 aa, Zea mays
  misc_feature (1)..(2): Xaa can be any naturally occurring amino acid
  Coding DNA Sequence Number=SeqID_5254
  Subcellular localization annotation: CTP_CleavageSite=63; ConfidenceScore=5.40e-01
XXIIQVALHCPASWSGFVSFRFGWVFTGTARRRPRWPTGVPWWWRWCCSCCCRRACCCSCRPRAGASWSSATSRPAAPPSSSTPSSSSPSPPSSSSPSECTSPRTSRLAIAGGTGIFLRYSLPVYTYMLSTYALPPSLYQHPCCVHT

SEQ ID NO: 12416 - protein, 53 aa, Zea mays
  Coding DNA Sequence Number=SeqID_5256
IPMCHLHCLPARNRLIRRYHYRKLHMLLQGLYQKTLTQRFLREDRKENHQRGL

SEQ ID NO: 12417 - protein, 95 aa, Zea mays
  misc_feature (12)..(12): Xaa can be any naturally occurring amino acid
  Coding DNA Sequence Number=SeqID_5258
  Subcellular localization annotation: CTP_CleavageSite=82; ConfidenceScore=5.25e-01
SRSRTSFFFFFXKNSNIDFGKLIHPVESNSQQTSSRPHVAFHDLASLFIGCGEAFSSTSAPFRSRRTRTLSKLLCRHTGLPRPSSIWHGGANSRP

SEQ ID NO: 12418 - protein, 69 aa, Zea mays
  Coding DNA Sequence Number=SeqID_5260
  Subcellular localization annotation: CTP_CleavageSite=63; ConfidenceScore=5.08e-01
FFFFFFDEQIIPITFGVLHLLHFCLICTRRSGSSPAPPSISLAAGGLASVRFRWLWLRSHGVSSGAQAA

SEQ ID NO: 12419 - protein, 116 aa, Zea mays
  misc_feature (1)..(2): Xaa can be any naturally occurring amino acid
  misc_feature (31)..(31): Xaa can be any naturally occurring amino acid
  misc_feature (57)..(57): Xaa can be any naturally occurring amino acid
  misc_feature (70)..(70): Xaa can be any naturally occurring amino acid
  misc_feature (74)..(74): Xaa can be any naturally occurring amino acid
  misc_feature (90)..(90): Xaa can be any naturally occurring amino acid
  misc_feature (93)..(93): Xaa can be any naturally occurring amino acid
  misc_feature (99)..(99): Xaa can be any naturally occurring amino acid
  misc_feature (113)..(113): Xaa can be any naturally occurring amino acid
  Coding DNA Sequence Number=SeqID_5262
  Subcellular localization annotation: CTP_CleavageSite=53; ConfidenceScore=5.35e-01
XXPPIPLPSWPPPSHLLLSQALAATHQTLAXPHPSPPPMVPFVAARISVAWCKSSTXFGGERKGGKKGEXPRGXTSGSYLRNLPQLSGKXSKXKGGCYXLGLHPIPGFGDAKXPLW

SEQ ID NO: 12420 - protein, 88 aa, Zea mays
  Coding DNA Sequence Number=SeqID_5264
ARCIYESIYTMLLLFFHHIYLEMLKADVFPYLKNVKLYRNVTVQESKCKPTTQMIFWLVICYCIFSSMVIDIFTYLLNVHTLDYNNLS

SEQ ID NO: 12421 - protein, 56 aa, Zea mays
  Coding DNA Sequence Number=SeqID_5266
DLAPHSEAAGPSARGVQSILLHHKELSRASISIRLLGVHVYTHVLHWVRPPSLLIL

SEQ ID NO: 12422 - protein, 81 aa, Zea mays
  misc_feature (10)..(11): Xaa can be any naturally occurring amino acid
  misc_feature (14)..(15): Xaa can be any naturally occurring amino acid
  misc_feature (17)..(18): Xaa can be any naturally occurring amino acid
  misc_feature (20)..(21): Xaa can be any naturally occurring amino acid
  misc_feature (27)..(28): Xaa can be any naturally occurring amino acid
  Coding DNA Sequence Number=SeqID_5268
HNCMYTLTCXXGRXXAXXLXXSAENHXXSIQGGTNSHRGLLELAQHIAEQGPDDRCYLRTLVQIICSCGRRLRIDTLIRSQ

SEQ ID NO: 12423 - protein, 147 aa, Zea mays
  misc_feature (147)..(147): Xaa can be any naturally occurring amino acid
  Coding DNA Sequence Number=SeqID_5270
  Gene Ontology: Mol. function=metal ion binding; Cellular component =intracellular; Biological process=DNA repair
  Homolog annotation: Hit_ID=A7Q1A3; Match level="QueryCoverage=97%, HitCoverage=15%, E-value=2e-26, Identity=40%"; Hit description =Chromosome chr10 scaffold_43, whole genome shotgun sequence
  Pfam annotation: Domain name=BRCT; Domain location=59-139; Score =39.1; E_value=1.6e-08; Accession=PF00533.16; Description=BRCA1 C Terminus (BRCT) domain
  Subcellular localization annotation: CTP_CleavageSite=69; ConfidenceScore=5.14e-01
CPGCCWALPHFLPRGPSRRPPWWPRGPSGFKNKSHRKLARKSPSEVNTSQSHGNKWAWPSGSPQKWVLCCSALSAAEKGIVSELAKIAGVPISTSWSPNVTHVIASTNMSGSCKRTLKFLMAILNGKWVISMDWVKTCMELMEPADX

SEQ ID NO: 12424 - protein, 131 aa, Zea mays
  misc_feature (1)..(3): Xaa can be any naturally occurring amino acid
  misc_feature (5)..(6): Xaa can be any naturally occurring amino acid
  Coding DNA Sequence Number=SeqID_5271
  Subcellular localization annotation: CTP_CleavageSite=51; ConfidenceScore=5.87e-01
XXXHXXATLFPPPHTPTPCSTQAHTSTRIVRSFFDRSIVLRSFVPCSWFVRSSVRPFVRSFVRSFVQIIFFLLLCCRNSDRSFIVPIHRSSFVHSPYSSFFQIIFVLPLCCRNSDRSFVRSFDRSSVRSSK

SEQ ID NO: 12425 - protein, 75 aa, Zea mays
  misc_feature (38)..(38): Xaa can be any naturally occurring amino acid
  Coding DNA Sequence Number=SeqID_5273
  Homolog annotation: Hit_ID=A7PQZ3; Match level="QueryCoverage=100%, HitCoverage=100%, E-value=2e-19, Identity=66%"; Hit description =Chromosome chr6 scaffold_25, whole genome shotgun sequence
MARSDSCLARVGAGIAIGGAVGGAVGACYGTFEAISYXIPGLLKIRYIGQTTVGSAAIFGLFLGAGSLIHCGKSY

SEQ ID NO: 12426 - protein, 72 aa, Zea mays
  misc_feature (1)..(2): Xaa can be any naturally occurring amino acid
  misc_feature (4)..(9): Xaa can be any naturally occurring amino acid
  misc_feature (12)..(12): Xaa can be any naturally occurring amino acid
  misc_feature (14)..(17): Xaa can be any naturally occurring amino acid
  misc_feature (19)..(33): Xaa can be any naturally occurring amino acid
  Coding DNA Sequence Number=SeqID_5274
XXPXXXXXXFDXWXXXXIXXXXXXXXXXXXXXXIWTILDHRNIFVFDSIHPCLARTLLLLVSKEIQLWVCWD

SEQ ID NO: 12427 - protein, 92 aa, Zea mays
  Coding DNA Sequence Number=SeqID_5276
SRIEHGGHAEARNFHHHLKFGSRVMIQLRRFFKPSPTKQKNTAFLSEVIKKTKFQTERDFLPQNSGEIADNPNVSESPRGRTKITDFPKRTE

SEQ ID NO: 12428 - protein, 145 aa, Zea mays
  Coding DNA Sequence Number=SeqID_5278
  Gene Ontology: Mol. function=structural constituent of ribosome; Cellular component=ribonucleoprotein complex; Biological process =translation
  Homolog annotation: Hit_ID=Q873W8; Match level="QueryCoverage=100%, HitCoverage=100%, E-value=5e-76, Identity=95%"; Hit description=40S ribosomal protein S23
  Pfam annotation: Domain name=Ribosomal_S12; Domain location=10-144; Score=255.3; E_value=1.3e-73; Accession=PF00164.15; Description =Ribosomal protein S12
MGKGKPRGLNAARKLRNHRREGRWADLHYKKRLLGTAFKSSPFGGSSHAKGIVLEKVGVEAKQPNSAIRKCVRVQLIKNGKKVTAFVPNDGCLNFVDENDEVLLAGFGRKGKAKGDIPGVRFKVVKVSGVGLSALWKEKKEKPRS

SEQ ID NO: 12429 - protein, 63 aa, Zea mays
  Coding DNA Sequence Number=SeqID_5279
PKTFGKLILHCFFSKTVTIGSMVPFHQSPLKNILKGTPNHESFPTSISDVQVAQIVCHLPVHV

SEQ ID NO: 12430 - protein, 236 aa, Zea mays
  misc_feature (236)..(236): Xaa can be any naturally occurring amino acid
  Coding DNA Sequence Number=SeqID_5281
  Gene Ontology: Mol. function=nucleic acid binding; Biological process= DNA integration
  Homolog annotation: Hit_ID=A2Z2R8; Match level="QueryCoverage=91%, HitCoverage=48%, E-value=6e-47, Identity=47%"; Hit description =Putative uncharacterized protein
MQDPPPTGETPDSGPIAPMCNPKGSPSQQDDDSRGGEVMRSLDDLPEDICRRIHARMSLQNAARLACASHTFWRSWRCYPNLDLRQRILGLNGDHISKIDHILQNHSGVGMKKLRIELFDCDKVDSCYINSWLRIAVTAGIEELTLYLPATAEDEAYYSFPCSLLFNGSENSIRYLDIGICAFRPTAGLGRWRSLAILFLSNVLIADDELEGLLYNCAALEHLGLLNCPEIVCLKX

SEQ ID NO: 12431 - protein, 247 aa, Zea mays
  misc_feature (220)..(220): Xaa can be any naturally occurring amino acid
  misc_feature (226)..(226): Xaa can be any naturally occurring amino acid
  misc_feature (245)..(247): Xaa can be any naturally occurring amino acid
  Coding DNA Sequence Number=SeqID_5282
  Gene Ontology: Cellular component=extracellular region; Biological process=sexual reproduction
  Homolog annotation: Hit_ID=Q6QF97; Match level="QueryCoverage=98%, HitCoverage=89%, E-value=1e-123, Identity=86%"; Hit description =Expansin EXPB8
  Pfam annotation: Domain name=DPBB_1; Domain location=79-160; Score =116.1; E_value=1e-31; Accession=PF03330.8; Description=Rare lipoprotein A (RlpA)-like double-psi
  Pfam annotation: Domain name=Pollen_allerg_1; Domain location=172 -247; Score=81.3; E_value=3.1e-21; Accession=PF01357.11; Description =Pollen allergen
  Pfam module annotation: Pfam domain module=DPBB_1::Pollen_allerg_1; Domain location=79-160::172-247
MAGVYTNDIAIVLVALLSVLVTSVCSAPNYDTSAARSYNSGWLPAKATWYGAPTGAGPNDNGGACGFKNVNQYPFSSMTSCGNEPLFDGGAGCGSCYKIRCVAANNPSCSDQPRRVVITDMNYYPVARYHFDLSGTAFGAMAKNGLNDKLRHAGIIDMQFRRVRCNFPGMKVTFHVQRGSNPNYLAVLVEYANVDGTVVRMELMQTRNGRPTGSWEPMRXSWGSIXRMDTSRPLQGPFSMRITSXXX

SEQ ID NO: 12432 - protein, 225 aa, Zea mays
  misc_feature (186)..(186): Xaa can be any naturally occurring amino acid
  misc_feature (204)..(205): Xaa can be any naturally occurring amino acid
  misc_feature (207)..(207): Xaa can be any naturally occurring amino acid
  misc_feature (211)..(211): Xaa can be any naturally occurring amino acid
  misc_feature (214)..(217): Xaa can be any naturally occurring amino acid
  Coding DNA Sequence Number=SeqID_5283
  Gene Ontology: Mol. function=nucleic acid binding; Cellular component= nucleus; Biological process=mRNA processing
  Homolog annotation: Hit_ID=Q10LL4; Match level="QueryCoverage=94%, HitCoverage=87%, E-value=4e-99, Identity=82%"; Hit description=Pre -mRNA splicing factor SF2, putative, expressed
  Pfam annotation: Domain name=RRM_1; Domain location=120-187; Score =29.4; E_value=1.3e-05; Accession=PF00076.12; Description=RNA recognition motif. (a.k.a. RRM, RBD, or
  Pfam annotation: Domain name=RRM_1; Domain location=9-77; Score=83.0; E_value=9.9e-22; Accession=PF00076.12; Description=RNA recognition motif. (a.k.a. RRM, RBD, or
  Pfam module annotation: Pfam domain module=RRM_1::RRM_1; Domain location=120-187::9-77
MSRRWSRTIYVGNLPGDIREREVEDLFYKYGRIVDIDLKVPPRPPGYAFVEFEDPRDAEDACAGRDGYNFDGNRLRVEPAHGGRGSGGPSHDRSSSFGGGGGGGGGGGRRGVSRHTDYRVLVTGLPSSASWQDLKDHMRRAGDVCFAEVYHEGGGTLGIVDYTNYDDMKYAIKKLDDTEFKNAFSXGYIRVKEYDGKCGRSYSXXRXPSRXRSXXXXQNLPWKIF

SEQ ID NO: 12433 - protein, 251 aa, Zea mays
  misc_feature (236)..(236): Xaa can be any naturally occurring amino acid
  misc_feature (238)..(238): Xaa can be any naturally occurring amino acid
  Coding DNA Sequence Number=SeqID_5284
  Gene Ontology: Mol. function=transferase activity, transferring glycosyl groups; Biological process=metabolic process
  Homolog annotation: Hit_ID=A2XM58; Match level="QueryCoverage=85%, HitCoverage=47%, E-value=4e-83, Identity=71%"; Hit description =Putative uncharacterized protein
MAAAPATQPRVMVLPFPAQGHVIPLMELSRKLAGHGLAVDFVNTEFNHDLVMEAMAEKGAIPDGIHMLTVPDGLGPGDDHADIGKFVKDLPAAMSGRLEEMIRSRKIKWVIVDVSMSWALQVATTAGARVASFSTYSAAVFALRMNLPKLIQDGVLDESGDVKGQEQIKMMPPIDASEIPWVSLASTSAPERRRNNIENVLKTNLSMPLAEVVILNTSLELEPDALALLPNALPLXPXLVAPTSRPAGHFL

SEQ ID NO: 12434 - protein, 206 aa, Zea mays
  misc_feature (183)..(183): Xaa can be any naturally occurring amino acid
  misc_feature (200)..(200): Xaa can be any naturally occurring amino acid
  Coding DNA Sequence Number=SeqID_5285
  Gene Ontology: Mol. function=calcium ion binding; Biological process =response to abscisic acid stimulus
  Homolog annotation: Hit_ID=Q6Q7Y1; Match level="QueryCoverage=73%, HitCoverage=72%, E-value=3e-54, Identity=67%"; Hit description =Putative ABA-induced protein
  Pfam annotation: Domain name=Caleosin; Domain location=67-204; Score =181.7; E_value=1.9e-51; Accession=PF05042.4; Description=Caleosin related protein
  Subcellular localization annotation: CTP_CleavageSite=51; ConfidenceScore=5.12e-01
SHSRFPLPAPPWHHHYRHIQLIFTSRFPAPRSPAGRNHPSINPWAPNPRARQGAKQQAKEESMADVYSGHELTPLQKHAAFFDTNRDGIIYPSETYQGLRAIGCGVVLSAAGTVFINGFLASKTVPANVKPPAFKFPIYVKTIQQSKHGSDTDVYDTQGRFVPEKFEEIFKKHAHTRPDALTXKSLGEMLKANRDPKDFXTGGRRR

SEQ ID NO: 12435 - protein, 169 aa, Zea mays
  misc_feature (1)..(135): Xaa can be any naturally occurring amino acid
  Coding DNA Sequence Number=SeqID_5286
XXXXXXXXXXXXXXXXXXXXXXXXXXXXXXXXXXXXXXXXXXXXXXXXXXXXXXXXXXXXXXXXXXXXXXXXXXXXXXXXXXXXXXXXXXXXXXXXXXXXXXXXXXXXXXXXXXXXXXXXXXXXXXXXXXXXXXXDGAAAAYGNRGMEEPCLVNIYTTHTILGETKFIP

SEQ ID NO: 12436 - protein, 167 aa, Zea mays
  Coding DNA Sequence Number=SeqID_5288
  Gene Ontology: Mol. function=peptidase activity; Cellular component =chloroplast thylakoid membrane; Biological process=lipid transport
  Homolog annotation: Hit_ID=Q42474; Match level="QueryCoverage=85%, HitCoverage=100%, E-value=3e-18, Identity=39%"; Hit description=Root- specific protein
  Pfam annotation: Domain name=Tryp_alpha_amyl; Domain location=84-165; Score=76.5; E_value=8.4e-20; Accession=PF00234.12; Description =Protease inhibitorseed storageLTP f
  Subcellular localization annotation: CTP_CleavageSite=39; ConfidenceScore=5.09e-01
QAHLAQPQPSTLLLATCFISIAMAPSKVALFLALNLVLMAAAHGCGSYCGNTPAIPVPTPPMAMPPPVIPVPTPPTTGGGSGPCSINTLKLKACANVLNLLKLNLGVPASEDCCPLLSGLADLEAAVCLCTAINANVLGIKLNVPVDLVLLLNQCGKTCPADFTCPS

SEQ ID NO: 12437 - protein, 167 aa, Zea mays; identical to SEQ ID NO: 12436
  Coding DNA Sequence Number=SeqID_5289
  Gene Ontology: Mol. function=peptidase activity; Cellular component =chloroplast thylakoid membrane; Biological process=lipid transport
  Homolog annotation: Hit_ID=Q42474; Match level="QueryCoverage=85%, HitCoverage=100%, E-value=3e-18, Identity=39%"; Hit description=Root- specific protein
  Pfam annotation: Domain name=Tryp_alpha_amyl; Domain location=84-165; Score=76.5; E_value=8.4e-20; Accession=PF00234.12; Description =Protease inhibitorseed storageLTP f
  Subcellular localization annotation: CTP_CleavageSite=39; ConfidenceScore=5.09e-01

SEQ ID NO: 12438 - protein, 142 aa, Zea mays
  misc_feature (62)..(63): Xaa can be any naturally occurring amino acid
  misc_feature (142)..(142): Xaa can be any naturally occurring amino acid
  Coding DNA Sequence Number=SeqID_5290
  Gene Ontology: Mol. function=DNA-directed DNA polymerase activity; Cellular component=nucleus; Biological process=DNA replication
  Homolog annotation: Hit_ID=Q9LRE5; Match level="QueryCoverage=99%, HitCoverage=32%, E-value=5e-70, Identity=89%"; Hit description=DNA polymerase delta small subunit
MERKQADYSNLDERYTIQGERYQGQQYSHIYYTRLHHMRTLLHVLVPSRKPHLPVTTVLGLXXGKDCVLVGTLYKHMKLKPSILDEYSKERSAIPLVKPHNFMHSDDNLILEDESGRVALAGAIPPAAYVTGVVVALHGKEX

SEQ ID NO: 12439 - protein, 234 aa, Zea mays
  misc_feature (212)..(212): Xaa can be any naturally occurring amino acid
  misc_feature (220)..(220): Xaa can be any naturally occurring amino acid
  misc_feature (227)..(229): Xaa can be any naturally occurring amino acid
  misc_feature (231)..(232): Xaa can be any naturally occurring amino acid
  Coding DNA Sequence Number=SeqID_5291
  Gene Ontology: Mol. function=oxidoreductase activity; Cellular component=extracellular region; Biological process=response to oxidative stress
  Homolog annotation: Hit_ID=O49866; Match level="QueryCoverage=85%, HitCoverage=58%, E-value=4e-78, Identity=72%"; Hit description =Peroxidase precursor
  Pfam annotation: Domain name=peroxidase; Domain location=48-228; Score=191.1; E_value=2.8e-54; Accession=PF00141.13; Description =Peroxidase
MASRAAAAAVVILALVCAAQPSLSAATAAGGLSPDFHATTCPSLQQIVAFHVGEAFKNDSGVAPALIRILFHDCFPQGCDASVLIEGPGTEQDEIPNKTLRRVALDLIDRIRMRVHSACSRTVSCADITVLATRESLVLAGGPRFDVALGRRDSFFPASKDQVGLLPAPFHPVDTLIKSFGDRGLNVADLVSLSGAHTFGVAHCGAFRDRFXPVFDTSPXIDPKFAXXXRXXCH

SEQ ID NO: 12440 - protein, 111 aa, Zea mays
  Coding DNA Sequence Number=SeqID_5292
KNLGYTIDGRVRIDGMQHLLLTNTTSLLDWWLLSHKHLISCTIWKERNSRVFANLLWWLVERCAFKERTGSRRDILFDLALLRGMLVRFVQRKDTLHFLVFWGEKSIPVRI

SEQ ID NO: 12441 - protein, 193 aa, Zea mays
  misc_feature (137)..(137): Xaa can be any naturally occurring amino acid
  misc_feature (165)..(165): Xaa can be any naturally occurring amino acid
  Coding DNA Sequence Number=SeqID_5294
  Gene Ontology: Mol. function=ATPase activity; Cellular component =chromosome; Biological process=chromosome organization and biogenesis
  Homolog annotation: Hit_ID=A2X1A0; Match level="QueryCoverage=79%, HitCoverage=74%, E-value=3e-58, Identity=74%"; Hit description =Putative uncharacterized protein
  Pfam annotation: Domain name=OTU; Domain location=39-149; Score=80.5; E_value=5.3e-21; Accession=PF02338.9; Description=OTU-like cysteine protease
  Subcellular localization annotation: CTP_CleavageSite=22; ConfidenceScore=5.29e-01
QNPACPCHPTPPHASLLTVSCRSSRPGGWDSVVVRRVIPSDNRCLFNAVGYVMEHNRNKASELRQVIAATVAGDPEKFNEVFLGKPNEAYCAWILDPGKWGGAIELSILSEYYGRGIPAYDIQPTRWVLYGQEKKFXEGPMPFNEGLHYDALHWAPGEGAPEKFXQKIFPQKQGRSLGPQKRLPPPLWGGGPK

SEQ ID NO: 12442 - protein, 275 aa, Zea mays
  misc_feature (1)..(12): Xaa can be any naturally occurring amino acid
  Coding DNA Sequence Number=SeqID_5295
  Homolog annotation: Hit_ID=A2X0I0; Match level="QueryCoverage=44%, HitCoverage=34%, E-value=1e-19, Identity=48%"; Hit description =Putative uncharacterized protein
  Subcellular localization annotation: CTP_CleavageSite=76; ConfidenceScore=5.41e-01
XXXXXXXXXXXXNALRPLSPAFPNPIRGGIGGDTTTTGKLRPFSVSLPVPSPPLQTRPNRAADFAAPPPPAPPPISAEQPLGFRFARAGARDRVRALTGGRLRRPGAQSAAPPPCFLARQEPFPGKDTAMEGQMFGGGKWGSSPYPGPNANINASNENQFLFDAKAAPQQLQLFGSNSVGTSGYYNYNGNDNPYVMNQPRKTSNCTADEKKLKLQMSLNNFHAGDADRLACTGNSSVVSTGLKLSYEDNEHNSSFTSGTGSMSSLTSRHLLVMIL

SEQ ID NO: 12443 - protein, 275 aa, Zea mays; identical to SEQ ID NO: 12442
  misc_feature (1)..(12): Xaa can be any naturally occurring amino acid
  Coding DNA Sequence Number=SeqID_5296
  Homolog annotation: Hit_ID=A2X0I0; Match level="QueryCoverage=44%, HitCoverage=34%, E-value=1e-19, Identity=48%"; Hit description =Putative uncharacterized protein
  Subcellular localization annotation: CTP_CleavageSite=76; ConfidenceScore=5.41e-01

SEQ ID NO: 12444 - protein, 206 aa, Zea mays
  misc_feature (191)..(191): Xaa can be any naturally occurring amino acid
  Coding DNA Sequence Number=SeqID_5297
  Gene Ontology: Mol. function=nutrient reservoir activity; Cellular component=extracellular region; Biological process=cell wall organization and biogenesis
  Homolog annotation: Hit_ID=O49000; Match level="QueryCoverage=96%, HitCoverage=92%, E-value=2e-85, Identity=79%"; Hit description =Germin-like protein 4
  Pfam annotation: Domain name=Cupin_1; Domain location=61-202; Score =134.5; E_value=3e-37; Accession=PF00190.13; Description=Cupin
  Pfam annotation: Domain name=Cupin_2; Domain location=96-171; Score =46.9; E_value=7.3e-11; Accession=PF07883.2; Description=Cupin domain
  Pfam module annotation: Pfam domain module=Cupin_1::Cupin_2; Domain location=61-202::96-171
MARLQLYAIAACAVLLALAAPSLAGDPDMLQDVCVADLASPIKINGFPCKANITADDFFFAGLKKAGNTNNPAGSIVTAANVQSFPGVNTLGVSMARIDYAVGGQNPPHTHPRATEIIFVTKGTLEVGFITTANKLFTRFVTVGEVFVFPRGLVHFQQNRGHRPASVIAAFNSQLQGTQAIATTLFAATPXVPTDVVGKEPRGNQW

SEQ ID NO: 12445 - protein, 204 aa, Zea mays
  misc_feature (1)..(3): Xaa can be any naturally occurring amino acid
  Coding DNA Sequence Number=SeqID_5298
  Homolog annotation: Hit_ID=A2X5E1; Match level="QueryCoverage=73%, HitCoverage=83%, E-value=8e-26, Identity=52%"; Hit description =Putative uncharacterized protein
XXXSEIPHATCRLTKTLPGSSSTSRRDGMDEDRFRRCSSKTARRRLRSLLVLAADYLKYLFTNRRRLLHKVARRTHAVVSSYHGKSNKRLPPYCPPRALMEHEFSCSDSPSPAFLAAKRLQSRLKRGAAASAAVSSCFGATVGASYGSPPATQEDDVVEEEDEADGSACYELEPDVDYRAEEFINMFYEQLRAQNFPPVLQRSP

SEQ ID NO: 12446 - protein, 98 aa, Zea mays
  misc_feature (1)..(3): Xaa can be any naturally occurring amino acid
  misc_feature (7)..(11): Xaa can be any naturally occurring amino acid
  misc_feature (15)..(19): Xaa can be any naturally occurring amino acid
  misc_feature (21)..(22): Xaa can be any naturally occurring amino acid
  misc_feature (25)..(28): Xaa can be any naturally occurring amino acid
  misc_feature (31)..(41): Xaa can be any naturally occurring amino acid
  misc_feature (43)..(46): Xaa can be any naturally occurring amino acid
  misc_feature (54)..(56): Xaa can be any naturally occurring amino acid
  Coding DNA Sequence Number=SeqID_5299
XXXFFFXXXXXVVKXXXXXPXXLFXXXXKDXXXXXXXXXXXTXXXXETMSWTAXXXYKDQNEKQHPSRIIHEISVLFNLLLIFDLLQNHACDQHRQHL

SEQ ID NO: 12447 - protein, 233 aa, Zea mays
  misc_feature (207)..(208): Xaa can be any naturally occurring amino acid
  misc_feature (211)..(213): Xaa can be any naturally occurring amino acid
  Coding DNA Sequence Number=SeqID_5301
  Homolog annotation: Hit_ID=A9NVP4; Match level="QueryCoverage=90%, HitCoverage=79%, E-value=2e-70, Identity=59%"; Hit description =Putative uncharacterized protein
ALTAMARAKAPRRKPPQAVSRRLLGFCGLSFAAALYVGIDYLRYLSPTWHNRLQPVLWAALALAAAARAPFYRHWDVELRAVLPFLGSIVFMLSAFLIEMISVRFVSVLMGLQWHGSAAPLPDTGQWVLLALNEKLPGSVVDLLRAHVITLHHYLMLFMMLGFSVLFDCIKAPGLGIATRYMFTMAVGRLLRTATFVGTILPSARPXXAAXXXQIPGHPHPWAQKNIMSMLFG

SEQ ID NO: 12448 - protein, 177 aa, Zea mays
  misc_feature (168)..(169): Xaa can be any naturally occurring amino acid
  misc_feature (174)..(177): Xaa can be any naturally occurring amino acid
  Coding DNA Sequence Number=SeqID_5302
  Gene Ontology: Mol. function=molecular_function; Cellular component =cytoplasm; Biological process=vesicle docking during exocytosis
  Homolog annotation: Hit_ID=Q851W1; Match level="QueryCoverage=97%, HitCoverage=28%, E-value=5e-45, Identity=58%"; Hit description=SEC1 family transport protein SLY1
MALSLRKKQLDLITRMLHLNQQQPSPDGGGGEDDEEAYKILVMDGPCISLLSPVLRVGDLRKHGVTLHLNIDKARQQVADAPAVYLVRPTPANADRIAADAAAGLYASFHVNFSTSLPRPVLDRLAAATAASRSAHRVARVADQYLDFVCLEDGLFSLAQPRAYVALXXPAAGXXXX

SEQ ID NO: 12449 - protein, 216 aa, Zea mays
  misc_feature (181)..(182): Xaa can be any naturally occurring amino acid
  misc_feature (188)..(190): Xaa can be any naturally occurring amino acid
  misc_feature (192)..(192): Xaa can be any naturally occurring amino acid
  misc_feature (201)..(203): Xaa can be any naturally occurring amino acid
  misc_feature (209)..(211): Xaa can be any naturally occurring amino acid
  Coding DNA Sequence Number=SeqID_5303
  Gene Ontology: Mol. function=hydrolase activity, acting on carbon -nitrogen (but not peptide) bonds, in cyclic amides; Cellular component=mitochondrion; Biological process=pyrimidine base biosynthetic process
  Homolog annotation: Hit_ID=Q8VXS9; Match level="QueryCoverage=71%, HitCoverage=44%, E-value=7e-62, Identity=75%"; Hit description =Dihydroorotase
  Subcellular localization annotation: CTP_CleavageSite=42; ConfidenceScore=5.57e-01
MQFAITTAVSANPHLKPLVSFPRPSPPHRVRVHPPCHRLNTRASVMASSSPLELTITRPDDWHLHLRDGDVMAAVLPHSARHFERAIVMPNLKPPVTTTARAIAYRDEILKALPPGSSFVPLMTLYLTDRTSPEEIKIARKSGVVFAVKLYPAGATTNSQDGVTDILGKCLPVLEEMVKQXXPLLVHXXXYXPHVDTFDRXXXFIEKNXXXNSLEL

SEQ ID NO: 12450 - protein, 239 aa, Zea mays
  misc_feature (214)..(215): Xaa can be any naturally occurring amino acid
  misc_feature (218)..(219): Xaa can be any naturally occurring amino acid
  misc_feature (223)..(224): Xaa can be any naturally occurring amino acid
  misc_feature (227)..(228): Xaa can be any naturally occurring amino acid
  misc_feature (232)..(235): Xaa can be any naturally occurring amino acid
  misc_feature (238)..(238): Xaa can be any naturally occurring amino acid
  Coding DNA Sequence Number=SeqID_5304
  Gene Ontology: Mol. function=sulfotransferase activity; Cellular component=cytoplasm
  Homolog annotation: Hit_ID=A2ZT88; Match level="QueryCoverage=98%, HitCoverage=32%, E-value=4e-68, Identity=54%"; Hit description =Putative uncharacterized protein
  Pfam annotation: Domain name=Sulfotransfer_1; Domain location=74-237; Score=-26.8; E_value=2.8e-06; Accession=PF00685.17; Description =Sulfotransferase domain
MSSSSSTPAFPPQEGDAETNEELYGQFTELASSWPCSGGLSRAKLLYRHEKGWYSTLPPMVGAMVADARFAARPSDIVVATMPKSGTTWMKALLYSTVHRREHTPGGPGHPFNSLGPHDCVRHLEYQLYTRNRVPDLDGLPDPRLLATHVPLASLPRSVAASGCRIVYVCRDPKDTLVSTWSFVNKFRAEDGLEPIPVEAAAGYFCDGVSASGXXWDXXLGYXXAHXXNPEXXXXFRXP

SEQ ID NO: 12451 - protein, 86 aa, Zea mays
  Coding DNA Sequence Number=SeqID_5305
  Homolog annotation: Hit_ID=Q9XGD9; Match level="QueryCoverage=87%, HitCoverage=96%, E-value=4e-07, Identity=44%"; Hit description=BETL3 protein precursor
MASSIKICTRIVYLAAALFLVLGTMPTFPSCQAGGCCPGRIKEQCYGTSGPCVNDVCAAYCQIKGHKSEGAYCVKRNNGQDCCCVL

SEQ ID NO: 12452 - protein, 131 aa, Zea mays
  misc_feature (65)..(65): Xaa can be any naturally occurring amino acid
  misc_feature (81)..(81): Xaa can be any naturally occurring amino acid
  Coding DNA Sequence Number=SeqID_4730
  Gene Ontology: Mol. function=nucleic acid binding
  Homolog annotation: Hit_ID=Q6ZKI2; Match level="QueryCoverage=99%, HitCoverage=86%, E-value=8e-21, Identity=47%"; Hit description =Putative RNA recognition motif (RRM)-containing protein
GFGPRRSPAPTPSLGRSVHLPPNLFSFPGIRQAWLPPDGLGRIFCIVWGKLSTLGVVTDRVAGFXSRGLALVRYVWLKDAXKGIEGMDGRFLDGWVIFGGYAGSSPPLQMGGATLQAQQSWGTRSGSWGSQ

SEQ ID NO: 12453 - protein, 98 aa, Zea mays
  Coding DNA Sequence Number=SeqID_4731
HSGCTGCRHFHRVLSVDGHNRELQQFDSLLVRSSHHMWFCDLAEIGGRAIHGVDGRRQISSYSSGDGYGATLSGSYVQHAHLWPMDSSMIWQRQYPLR

SEQ ID NO: 12454 - protein, 181 aa, Zea mays
  misc_feature (78)..(78): Xaa can be any naturally occurring amino acid
  misc_feature (108)..(108): Xaa can be any naturally occurring amino acid
  Coding DNA Sequence Number=SeqID_4733
  Gene Ontology: Mol. function=electron carrier activity; Cellular component=mitochondrial respiratory chain; Biological process =electron transport
  Homolog annotation: Hit_ID=A4Q7Q9; Match level="QueryCoverage=66%, HitCoverage=39%, E-value=5e-46, Identity=75%"; Hit description =Cytochrome c, monohaem
  Pfam annotation: Domain name=Cytochrom_C1; Domain location=19-171; Score=40.7; E_value=2.5e-15; Accession=PF02167.6; Description =Cytochrome C1 family
MDLSTITSASPRCLLPPHEVVSLEFPKAGPGCRQLMTIITLFLLKYVEPFRSIQNNELVVYNHASDVFALLTGYHDSXSAVRIRKGLHYNPYFPGGVATMPITLNDGXVEYEDGTPATEAQMGKDVVSFLSWAAEPEMEERKLMGVKWIFLLSLALLQAAYYRRMRWSVLKSRKLVLDVVN

SEQ ID NO: 12455 - protein, 364 aa, Zea mays
  misc_feature (36)..(36): Xaa can be any naturally occurring amino acid
  misc_feature (47)..(47): Xaa can be any naturally occurring amino acid
  misc_feature (60)..(60): Xaa can be any naturally occurring amino acid
  misc_feature (130)..(130): Xaa can be any naturally occurring amino acid
  misc_feature (195)..(195): Xaa can be any naturally occurring amino acid
  misc_feature (204)..(204): Xaa can be any naturally occurring amino acid
  misc_feature (220)..(220): Xaa can be any naturally occurring amino acid
  misc_feature (268)..(268): Xaa can be any naturally occurring amino acid
  misc_feature (334)..(334): Xaa can be any naturally occurring amino acid
  Coding DNA Sequence Number=SeqID_4734
  Gene Ontology: Mol. function=RNA-directed DNA polymerase activity; Cellular component=integral to membrane; Biological process=RNA -dependent DNA replication
  Homolog annotation: Hit_ID=Q8LJX1; Match level="QueryCoverage=99%, HitCoverage=18%, E-value=4e-69, Identity=36%"; Hit description =Putative reverse transcriptase
TYQKNFKKSHHIDWLVLGDFNLYRTSHDRNRAGADXSEMFIFNDATXLKGKRFTWTIKKXPPLLERLYWFFTSTSGNLTSINTDVTTLAMEMSDHVPCLSNISTHIPKRHTFIFENYWLKREDFMQHVNXAGILEDNTQMLLKIFLQIKFKNLRRVLKEWKKTHSNLKENFANIKLILSLLNFLQEFGDFTPVEXNFRSLVENXLVSLLQEHKIYWKQRXALKWLILGDTNTKSFHAQAKYRRNLIIQLLDDQENAVDTRNEKAKLIXLSFSKRLGTNTFPGLNFDMNLFINDQVDLSSLLESYNKKKIDVIIKTLPSNKVSGPNGFNTDSIKXKCWPIICEDVYRLCESFYSEHVFLKEVQTT

SEQ ID NO: 12456 - protein, 102 aa, Zea mays
  misc_feature (92)..(92): Xaa can be any naturally occurring amino acid
  Coding DNA Sequence Number=SeqID_4735
  Homolog annotation: Hit_ID=Q5NKP3; Match level="QueryCoverage=89%, HitCoverage=39%, E-value=5e-26, Identity=64%"; Hit description =Putative uncharacterized protein 9C20.7
PSYILRWQEALMLASLIDDEKKLGDCQFDLWKQSYVTACVAVYDKLRLSRATTACCPSPSRGISWLSPTSATLGLFWAPHPTTVSSRRSAHXHLKPNLPLEE

SEQ ID NO: 12457 - protein, 226 aa, Zea mays
  Coding DNA Sequence Number=SeqID_4736
RPTGESAVKYKGPCPGVCGVGRGRPRCPVFFLGDGPLAGFALGFPPCLLGAFPAKKGQVGPGGSRVRAEVVYHAQQAASGFKLGKGFGAGAQEVAFVAGVGGAAEGVAFDVAQQVVMDVRVARHLGWSLFLLLRLRLRVFCWGLVGSHAVSRLDGWNGGAGEYIGCVVWATSLGATGRAAVEYGTLYFLHFSFPIFILFSFHIIFSDYLFYVKINRRNMNCLLHIL

SEQ ID NO: 12458 - protein, 192 aa, Zea mays
  misc_feature (1)..(129): Xaa can be any naturally occurring amino acid
  misc_feature (168)..(168): Xaa can be any naturally occurring amino acid
  Coding DNA Sequence Number=SeqID_4738
XXXXXXXXXXXXXXXXXXXXXXXXXXXXXXXXXXXXXXXXXXXXXXXXXXXXXXXXXXXXXXXXXXXXXXXXXXXXXXXXXXXXXXXXXXXXXXXXXXXXXXXXXXXXXXXXXXXXXXXXXXXXXXXXXIPTWIPETFLLLYGNPPTTRIASPNKLGFANFKRCSPGXMAPNSKNSLVQLVPSNFLPGCFCA

SEQ ID NO: 12459 - protein, 83 aa, Zea mays
  Coding DNA Sequence Number=SeqID_4740
LSIIHSNTMSVAGFLLFQGPSPMIVRYVYAVLFLLANLCAWLMRENRISYYISQRGNARCHGDRGCLAPGVTVTRAVSRLRVC

SEQ ID NO: 12460 - protein, 139 aa, Zea mays
  misc_feature (34)..(34): Xaa can be any naturally occurring amino acid
  misc_feature (62)..(62): Xaa can be any naturally occurring amino acid
  misc_feature (72)..(72): Xaa can be any naturally occurring amino acid
  misc_feature (74)..(74): Xaa can be any naturally occurring amino acid
  misc_feature (76)..(76): Xaa can be any naturally occurring amino acid
  misc_feature (86)..(86): Xaa can be any naturally occurring amino acid
  misc_feature (94)..(94): Xaa can be any naturally occurring amino acid
  misc_feature (99)..(99): Xaa can be any naturally occurring amino acid
  misc_feature (116)..(116): Xaa can be any naturally occurring amino acid
  misc_feature (122)..(122): Xaa can be any naturally occurring amino acid
  misc_feature (124)..(124): Xaa can be any naturally occurring amino acid
  misc_feature (134)..(134): Xaa can be any naturally occurring amino acid
  misc_feature (136)..(139): Xaa can be any naturally occurring amino acid
  Coding DNA Sequence Number=SeqID_4742
  Subcellular localization annotation: CTP_CleavageSite=45; ConfidenceScore=5.18e-01
VFSSMLGEVFFSYITFGAGFPASFLPLIPPFSPXLTPIIPAPRLAASALGLAERHPRSRRHXVPSPISSLTXSXGXAHSTGEPGPXNPPRSVPXPAHQXTQSPFTTGYHTPLHPPXPAVPLXPXTLGLHITPRXPXXXX

SEQ ID NO: 12461 - protein, 225 aa, Zea mays
  misc_feature (68)..(68): Xaa can be any naturally occurring amino acid
  misc_feature (77)..(77): Xaa can be any naturally occurring amino acid
  misc_feature (108)..(108): Xaa can be any naturally occurring amino acid
  Coding DNA Sequence Number=SeqID_4744
  Homolog annotation: Hit_ID=Q109A5; Match level="QueryCoverage=43%, HitCoverage=66%, E-value=1e-14, Identity=47%"; Hit description =Putative uncharacterized protein
MDVVMIRNLGKDQQGLGKGLGVEEEQQGRHNRKEIKSDSAATPSRFSGPVCTKIDAQDASGLRLRQNXYGWKDKEIXNQPNWVHHKIRLESTGIGKTSQRSESVPALXGGFWSFGTCIFVEPITDAPRACLTLVSLLIRRRILAERRIVRYAETLVSSGVRAWGRLELGSRLTGLFPVVGRFGARAGQCVGDGVRLCATVPAGCWWGRHRMVGARRRVVETGGCQ

SEQ ID NO: 12462 - protein, 555 aa, Zea mays
  misc_feature (39)..(39): Xaa can be any naturally occurring amino acid
  misc_feature (126)..(126): Xaa can be any naturally occurring amino acid
  misc_feature (149)..(149): Xaa can be any naturally occurring amino acid
  misc_feature (206)..(206): Xaa can be any naturally occurring amino acid
  misc_feature (210)..(210): Xaa can be any naturally occurring amino acid
  misc_feature (239)..(239): Xaa can be any naturally occurring amino acid
  misc_feature (286)..(286): Xaa can be any naturally occurring amino acid
  misc_feature (357)..(357): Xaa can be any naturally occurring amino acid
  misc_feature (461)..(461): Xaa can be any naturally occurring amino acid
  misc_feature (478)..(478): Xaa can be any naturally occurring amino acid
  misc_feature (482)..(482): Xaa can be any naturally occurring amino acid
  Coding DNA Sequence Number=SeqID_4745
  Gene Ontology: Mol. function=aspartic-type endopeptidase activity; Cellular component=chromatin; Biological process=chromatin assembly or disassembly
  Homolog annotation: Hit_ID=Q2QSK7; Match level="QueryCoverage=97%, HitCoverage=53%, E-value=3e-87, Identity=34%"; Hit description =Retrotransposon protein, putative, LINE subclass
PPARPQGRQQSIKPDDPLSSMLFILVMDVLNLLIQKSFXEGLLQPLSSRSLQHRISLYVDDVVMFLKHVASNVNLVLDIIRLFGHASGLRINVQKSSVYPIRCGDEDLNCAQNHLPCPISVFPCNXKYLGLPLSVRKLSRVHFQAILDXGVVSLLQCWKAELMTRASRATYVQFVMTTKMIYASLALDLPAWAIKVIDKLRKGFLXKRKXEAKVGHCLLDWPKVTRPKDLGGLGISDLXNLSWALQAWWPWLQKIDPSRPWSSFPIHVCLEVRTLVGVVVVTQIGXRWFNGNCIQDFAPALLGLVPRRLTDSLKVQDALPGFKWMASLRGALSVRVIVEFLDLCEALEGRVLQPGVXDQQIWKFAASCSFSTSSAYRALFQGSVEFGPSDRVWKSWAPRKCKFFIWLIEHDKCWTIDRLDRQGLDHPERCLLCDQTAESINHLLVECIFAKQFWFELLKIXAGKASVPNRMTIPSSHXWMSXSCSSRVIEAARKDFNSLVILGAWIIWKHRNRCVFDGCNPSLVVDLQAAREEALLWSLSEIKALSFLLIDELWI

SEQ ID NO: 12463 - protein, 95 aa, Zea mays
  Coding DNA Sequence Number=SeqID_4746
  Gene Ontology: Mol. function=aspartic-type endopeptidase activity; Biological process=DNA integration
  Homolog annotation: Hit_ID=Q7XBC6; Match level="QueryCoverage=67%, HitCoverage=3%, E-value=5e-26, Identity=89%"; Hit description =Putative copia-type pol polyprotein
  Pfam annotation: Domain name=RVT_2; Domain location=1-82; Score= -180.7; E_value=0.0089; Accession=PF07727.4; Description=Reverse transcriptase (RNA-dependent
LILARTLANDLFVCQIYIDDIIFGSTNESTYEEFSRIMTQKFEMSMMGELKYFLGFQVKQLQEGTGGGLGPCARRSGPWRGSRGLGVASRFPVYR

SEQ ID NO: 12464 - protein, 160 aa, Zea mays
  misc_feature (28)..(28): Xaa can be any naturally occurring amino acid
  misc_feature (71)..(71): Xaa can be any naturally occurring amino acid
  misc_feature (86)..(86): Xaa can be any naturally occurring amino acid
  misc_feature (101)..(101): Xaa can be any naturally occurring amino acid
  misc_feature (103)..(104): Xaa can be any naturally occurring amino acid
  misc_feature (107)..(108): Xaa can be any naturally occurring amino acid
  misc_feature (112)..(113): Xaa can be any naturally occurring amino acid
  misc_feature (115)..(117): Xaa can be any naturally occurring amino acid
  misc_feature (120)..(123): Xaa can be any naturally occurring amino acid
  misc_feature (125)..(160): Xaa can be any naturally occurring amino acid
  Coding DNA Sequence Number=SeqID_4747
SNSRNPQKSPFPQPYPTESSGGGGGGGXWRRLLNAEWWRWSTSTLDDDDLMAEGWPGPDSSAGPPPRVSVXPSRGDDAPRRTKGRXFPRGPQLLCAPRFAXLXXGGXXRPRXXRXXXTHXXXXRXXXXXXXXXXXXXXXXXXXXXXXXXXXXXXXXXXXX

SEQ ID NO: 12465 - protein, 98 aa, Zea mays
  Coding DNA Sequence Number=SeqID_4749
LKHGILKIYSQLFIINFHMKISEPLRSHFVRMPNIQKWNGATVFLHCSQPNGACSRSLCLVSGLMQVGTSSSHNKPTFGSKCLWVRLVLAITGSRMGM

SEQ ID NO: 12466 - protein, 96 aa, Zea mays
  Coding DNA Sequence Number=SeqID_4751
IVDRCLEEGAQEFLLKPLQLSDLDKLQPYFLKSLDNSCEKESANSSIDSNNDNVINNNSNNSNNNNNNNISKRKAMSPEPHQEERSRPKMKELAVV

SEQ ID NO: 12467 - protein, 467 aa, Zea mays
  misc_feature (187)..(187): Xaa can be any naturally occurring amino acid
  Coding DNA Sequence Number=SeqID_4752
  Gene Ontology: Mol. function=metal ion binding; Cellular component =integral to membrane; Biological process=ubiquitin cycle
  Homolog annotation: Hit_ID=Q84SC7; Match level="QueryCoverage=18%, HitCoverage=19%, E-value=5e-26, Identity=59%"; Hit description=Zinc finger (C3HC4-type RING finger) protein-like
  Pfam annotation: Domain name=zf-C3HC4; Domain location=132-172; Score= 27.0; E_value=6.9e-05; Accession=PF00097.15; Description=Zinc finger, C3HC4 type (RING finger)
  Subcellular localization annotation: CTP_CleavageSite=39; ConfidenceScore=5.22e-01
MAGWTDSTGSGGRGSGGRGFTTPRYTTNSTNDMIHGGTSGGGGGSGRWRGGRSRGWPPPQPHHRYRRVDAVHRDSAPVSLSELQAASSTSSRHRYLTRSISADKSSASGTAGSTDTREPDDKANRSAANFECNVCFDMAAEPVVTRCGHLFCWECLYQWLHVHSHHRECPVCKGQVADDAIIPIYGXRGGPAVSGDNVPPRPTAVRIERTRQQQHQLTIFHPPNVFEFIGLGLAAAARGEHSTEQLLLPTFSHPTVFDDDDGHEWDMDLVNNGIDPLDLITPGTQDLDMDDYDGTIDFDDDDYEYDYHLAGATLFASAGTEASNPSSSQAHAGMINIRDNILGTATSIYHQQEFGYSGVRPHNNRGRRRHRNRARASANHSGADEMVIEDTSHFYLQNGGSSNISAGAAFRPNGGWTGRRGRSNLNSNSGGGSNLNSNSGGGSNMNSNSGGGRGGIQGTRRQRTNYN

SEQ ID NO: 12468 - protein, 155 aa, Zea mays
  misc_feature (91)..(91): Xaa can be any naturally occurring amino acid
  Coding DNA Sequence Number=SeqID_4753
  Gene Ontology: Mol. function=acid-amino acid ligase activity; Cellular component=chloroplast; Biological process=peptidoglycan -based cell wall biogenesis
  Homolog annotation: Hit_ID=A3C729; Match level="QueryCoverage=76%, HitCoverage=15%, E-value=2e-50, Identity=88%"; Hit description =Putative uncharacterized protein
RKVVNIDDPSAPFFAAQGGHDVPVVTYSFENKKADVHTLKYQLSLFETEVLVQTPHGILEISSGLLGRDNIYSILATVADGIAGGAPLEDXIVRGIEEGVAIPGRCAPIDEEQASGVVRHLAWAPHPLAWLLHRVRVLRPRRVVTVGAGRGETNT

SEQ ID NO: 12469 - protein, 79 aa, Zea mays
  misc_feature (44)..(44): Xaa can be any naturally occurring amino acid
  Coding DNA Sequence Number=SeqID_4754
  Gene Ontology: Mol. function=nucleic acid binding; Biological process= DNA integration
  Homolog annotation: Hit_ID=Q8W0X3; Match level="QueryCoverage=97%, HitCoverage=7%, E-value=1e-28, Identity=80%"; Hit description =Putative gag protein
KHLQSIATLNDEVASLNAQLKTCKDDFDKLKFARDAYTIDRHPXIKDGLGFRREAKNLTSQRASILNKEKGKAPMASKI

SEQ ID NO: 12470 - protein, 470 aa, Zea mays
  misc_feature (19)..(19): Xaa can be any naturally occurring amino acid
  misc_feature (106)..(106): Xaa can be any naturally occurring amino acid
  misc_feature (132)..(132): Xaa can be any naturally occurring amino acid
  misc_feature (144)..(144): Xaa can be any naturally occurring amino acid
  misc_feature (167)..(167): Xaa can be any naturally occurring amino acid
  misc_feature (349)..(349): Xaa can be any naturally occurring amino acid
  misc_feature (440)..(440): Xaa can be any naturally occurring amino acid
  Coding DNA Sequence Number=SeqID_4755
  Gene Ontology: Mol. function=zinc ion binding; Cellular component =membrane; Biological process=apoptosis
  Homolog annotation: Hit_ID=Q9ST50; Match level="QueryCoverage=100%, HitCoverage=55%, E-value=0.0, Identity=70%"; Hit description =Transposase related protein
  Pfam annotation: Domain name=MuDR; Domain location=249-416; Score =164.7; E_value=2.5e-46; Accession=PF03108.6; Description=MuDR family transposase
MDTLVTLYHRGSVEEDVYXNVSFDGMKKVTVMFDERPSFSPIISRACEVICCNLNDPSISIEGLLSHVASGKIFQGLIPIGSEDDWVKYVKIVMTVLPLCLDLVVXKLTINHFEAPVELSPQLPNASPCPTXPEEVVAVANAQXAPTEVGISCPVCGDCGASNSVVXPQEIPLTQDHPRGPQLDNVAYLHMPLSSNMDHTCRASNSVDVQIEDGEEPYEAARALDSDDDRPVQELIEQEIEFIIRLCPEHDPTVHEFSSLRHSHGAYAEGRDDELLEAPDNSDSIVIKKGLIFKDLPTLRRWLQEYSVKCKISFKVRHSYAHRRYTVLCEVSDCNWRVCARKQKATGKXIGAHTCAQMELNSKHRQFTSTLIAKRLLVKLKGQPNLKVKSIMTMTWELFGYRIKYGKAWRAKKWAWKMIYGDWEEGYKKFSVLFNAMKAXKNPDMHYEYIPKPNEWRNVRVIFFCAFWCF

SEQ ID NO: 12471 - protein, 267 aa, Zea mays
  misc_feature (60)..(60): Xaa can be any naturally occurring amino acid
  misc_feature (76)..(76): Xaa can be any naturally occurring amino acid
  misc_feature (118)..(118): Xaa can be any naturally occurring amino acid
  misc_feature (135)..(135): Xaa can be any naturally occurring amino acid
  misc_feature (174)..(174): Xaa can be any naturally occurring amino acid
  misc_feature (179)..(179): Xaa can be any naturally occurring amino acid
  misc_feature (216)..(216): Xaa can be any naturally occurring amino acid
  misc_feature (230)..(230): Xaa can be any naturally occurring amino acid
  Coding DNA Sequence Number=SeqID_4756
  Gene Ontology: Mol. function=structural constituent of ribosome; Cellular component=ribosome; Biological process=translation
  Homolog annotation: Hit_ID=Q5W653; Match level="QueryCoverage=88%, HitCoverage=54%, E-value=6e-50, Identity=43%"; Hit description =Putative uncharacterized protein OSJNBb0052F16.9
  Pfam annotation: Domain name=Plant_tran; Domain location=130-240; Score=81.8; E_value=2.2e-21; Accession=PF04827.5; Description=Plant transposon protein
LRMFAYGSVTDSIDEYIKIGNSSLLECLELLCRGVIACCRAEYMRHPTADDHMHQLAKGXGKGFSSTIGSIACMHXKWMNYPIGWRGQFIRGDIRSPTIMLETVASHDLWIWHAFLGXTTLNDNVNVLNLTCLRXEAQNVNFTVNDHEYNQGYYIVDNIYPLCLVFMKTIPLPXLQSSXVFIVCQESKWKNMYMVFVVLKARFHILTTLGRSFFQXVLGVIMCAYIIMHXMIIEDERGGPYEVDDLVQIRLAVFTLRHGLRVSGALP

SEQ ID NO: 12472 - protein, 130 aa, Zea mays
  Coding DNA Sequence Number=SeqID_4757
  Homolog annotation: Hit_ID=Q9AVH2; Match level="QueryCoverage=37%, HitCoverage=15%, E-value=2e-09, Identity=65%"; Hit description =Putative senescence-associated protein
FRQARSLGQGLATRGWRTGGSGQIRPFATYLAPSGFESLAKDSVTPAVGQGAGEGPDWALRPGGQKQWHGPLGREPPNAGRGGRKAKAPVATLDSDLKAFPGNPAHGSFAPLVFKPSAMTNWGNKRFLSY

SEQ ID NO: 12473 - protein, 104 aa, Zea mays
  misc_feature (23)..(23): Xaa can be any naturally occurring amino acid
  misc_feature (31)..(31): Xaa can be any naturally occurring amino acid
  misc_feature (33)..(33): Xaa can be any naturally occurring amino acid
  misc_feature (42)..(42): Xaa can be any naturally occurring amino acid
  misc_feature (54)..(54): Xaa can be any naturally occurring amino acid
  misc_feature (56)..(56): Xaa can be any naturally occurring amino acid
  misc_feature (60)..(60): Xaa can be any naturally occurring amino acid
  misc_feature (64)..(68): Xaa can be any naturally occurring amino acid
  misc_feature (70)..(70): Xaa can be any naturally occurring amino acid
  misc_feature (72)..(72): Xaa can be any naturally occurring amino acid
  misc_feature (75)..(75): Xaa can be any naturally occurring amino acid
  misc_feature (77)..(77): Xaa can be any naturally occurring amino acid
  misc_feature (79)..(79): Xaa can be any naturally occurring amino acid
  misc_feature (81)..(81): Xaa can be any naturally occurring amino acid
  misc_feature (85)..(85): Xaa can be any naturally occurring amino acid
  misc_feature (87)..(90): Xaa can be any naturally occurring amino acid
  misc_feature (92)..(92): Xaa can be any naturally occurring amino acid
  misc_feature (94)..(96): Xaa can be any naturally occurring amino acid
  misc_feature (99)..(99): Xaa can be any naturally occurring amino acid
  Coding DNA Sequence Number=SeqID_4758
LLEATVVVVVVLRFFGDIDSLRXVVAIGHMXVXRSMLTPVRXLYAMPSSTQYGXYXWIFXSPGXXXXXSXPXRIXHXPXRXVPRXPXXXXRXSXXXRVXEQPPR

SEQ ID NO: 12474 - protein, 115 aa, Zea mays
  misc_feature (34)..(115): Xaa can be any naturally occurring amino acid
  Coding DNA Sequence Number=SeqID_4760
PDIYMPLEQAKLDLVLATDSADVRHHGPPHAFAXXXXXXXXXXXXXXXXXXXXXXXXXXXXXXXXXXXXXXXXXXXXXXXXXXXXXXXXXXXXXXXXXXXXXXXXXXXXXXXXXX

SEQ ID NO: 12475 - protein, 135 aa, Zea mays
  Coding DNA Sequence Number=SeqID_4762
  Gene Ontology: Mol. function=UDP-glucose 4-epimerase activity; Cellular component=soluble fraction; Biological process=galactose metabolic process
  Homolog annotation: Hit_ID=Q6ZDJ7; Match level="QueryCoverage=74%, HitCoverage=24%, E-value=7e-46, Identity=86%"; Hit description =Putative UDP-glucose 4-epimerase
ISARGLVGGGGGAVYGSPKNSPCAENFPLTPNNPYGQTKLVVEDICRDIYRADPEWEIIGRRYFNPFGAYPRGYLGEDPRGIPNNLMPYVHQVAGGRRPALTGLGNDYATRDGTGVILMRMMCVIVIFWDTIQID

SEQ ID NO: 12476 - protein, 206 aa, Zea mays
  Coding DNA Sequence Number=SeqID_4763
  Subcellular localization annotation: CTP_CleavageSite=14; ConfidenceScore=5.57e-01
AAPDGARARPQQPRAAAWRPRREALRQSGQVAPGSARARLPTSRGRGGGGRAASRRRSTCPVRARDGLGCSVHERRRAAPRLAAQLPVAGAAALTGYGCAAPRRCSLDDARAPVQRRGTRPRRARGPSGWPAEQPARRAASPASSLAWPRQRAAPAPVAARPVPAWAHRPLARRRLTCVHPPAFPAWRWQSHGQRGRTTQRPARHC

SEQ ID NO: 12477 - protein, 161 aa, Zea mays
  Coding DNA Sequence Number=SeqID_4765
SHPNHRTYLCFHNSQKRSFYSVLLTTLPRTVIATFIEAFLPYRSTRYRRMHTNIRSHPAVLPPHLPTSHIPPGSPPSSCVAHPSLPGPVATRTLTQTLDHPLSAPLRRAPSLPTGAVAPSSSLHNPSECHPPPRLSHCPCPRPHLRHSYNLPHRYYQNIRC

SEQ ID NO: 12478 - protein, 69 aa, Zea mays
  Coding DNA Sequence Number=SeqID_4767
  Gene Ontology: Mol. function=P-P-bond-hydrolysis-driven protein transmembrane transporter activity; Cellular component=endoplasmic reticulum membrane; Biological process=intracellular protein transport across a membrane
  Homolog annotation: Hit_ID=Q9SW34; Match level="QueryCoverage=98%, HitCoverage=98%, E-value=2e-10, Identity=52%"; Hit description =Protein transport protein SEC61 gamma-1 subunit
  Pfam annotation: Domain name=SecE; Domain location=10-66; Score=41.3; E_value=3.5e-09; Accession=PF00584.11; Description=SecESec61-gamma subunits of protein translocation complex
MNAVDFVVDPPRDFAKERVRLVKGCQKLDRKEFTKVEAGTAKGLVVMGLVGFLVKLIFIPIKKIMVGSG

SEQ ID NO: 12479 - protein, 140 aa, Zea mays
  Coding DNA Sequence Number=SeqID_4768
DQCKHERRRKKNRGAHREASREREKKMPEHEVAVSETRHMHPPLCFMLKRRKPRRRLEGVPTQTAQKRFIPSGERCLGNRVEDCVFCRKTTASDGPPREHTTGRALVTGMRLATQSCHLCAIQQMGQFTSHGVGGGGGGP

SEQ ID NO: 12480 - protein, 86 aa, Zea mays
  misc_feature (63)..(63): Xaa can be any naturally occurring amino acid
  Coding DNA Sequence Number=SeqID_4770
  Gene Ontology: Mol. function=aspartic-type endopeptidase activity; Biological process=DNA integration
  Homolog annotation: Hit_ID=Q8S474; Match level="QueryCoverage=87%, HitCoverage=9%, E-value=1e-27, Identity=74%"; Hit description =Putative pol protein
EQYTTLQDTNQSLRSNQKVTHFCEHYSFVSSIEPYRVEDALRDSDWVVAMQEELNNFTRNEVXHLVPRPNQNFVGTEWRTMRNTDK

SEQ ID NO: 12481 - protein, 144 aa, Zea mays
  Coding DNA Sequence Number=SeqID_4771
  Subcellular localization annotation: CTP_CleavageSite=38; ConfidenceScore=5.40e-01
PPHQPPFWALSAPLPSPLLPFHLLGRRLTVRALVRLFRQSAKGGLGDGRLGGVKGEGFSPSLPVVKGRTSESNQGDLIEEPRSCIHAIRKVGSFRSSPPFFLFFFFFFFFFFFFFFFFFFFFFFFFFFFFFFLRIVSHVFRTRG

SEQ ID NO: 12482 - protein, 107 aa, Zea mays
  Coding DNA Sequence Number=SeqID_4773
PKVLQQLQLGSPNLQPYNTGCAYIPHLGFIITNLWHRCITYTTKPPALGGFNSRAQETKHSTYGLKALQKLHLAESSKGRKSNMTSPFFFLDFAFIFPHKRLPSPLE

SEQ ID NO: 12483 - protein, 168 aa, Zea mays
  misc_feature (2)..(2): Xaa can be any naturally occurring amino acid
  misc_feature (5)..(5): Xaa can be any naturally occurring amino acid
  misc_feature (7)..(7): Xaa can be any naturally occurring amino acid
  misc_feature (10)..(17): Xaa can be any naturally occurring amino acid
  misc_feature (19)..(19): Xaa can be any naturally occurring amino acid
  misc_feature (21)..(21): Xaa can be any naturally occurring amino acid
  misc_feature (23)..(23): Xaa can be any naturally occurring amino acid
  misc_feature (25)..(27): Xaa can be any naturally occurring amino acid
  misc_feature (30)..(30): Xaa can be any naturally occurring amino acid
  misc_feature (32)..(34): Xaa can be any naturally occurring amino acid
  misc_feature (36)..(44): Xaa can be any naturally occurring amino acid
  misc_feature (46)..(53): Xaa can be any naturally occurring amino acid
  misc_feature (55)..(56): Xaa can be any naturally occurring amino acid
  misc_feature (58)..(69): Xaa can be any naturally occurring amino acid
  misc_feature (72)..(72): Xaa can be any naturally occurring amino acid
  misc_feature (74)..(76): Xaa can be any naturally occurring amino acid
  misc_feature (79)..(80): Xaa can be any naturally occurring amino acid
  misc_feature (82)..(85): Xaa can be any naturally occurring amino acid
  misc_feature (87)..(87): Xaa can be any naturally occurring amino acid
  misc_feature (89)..(96): Xaa can be any naturally occurring amino acid
  misc_feature (100)..(104): Xaa can be any naturally occurring amino acid
  misc_feature (106)..(106): Xaa can be any naturally occurring amino acid
  misc_feature (108)..(116): Xaa can be any naturally occurring amino acid
  misc_feature (118)..(123): Xaa can be any naturally occurring amino acid
  misc_feature (125)..(126): Xaa can be any naturally occurring amino acid
  misc_feature (129)..(129): Xaa can be any naturally occurring amino acid
  misc_feature (133)..(139): Xaa can be any naturally occurring amino acid
  misc_feature (142)..(142): Xaa can be any naturally occurring amino acid
  misc_feature (147)..(160): Xaa can be any naturally occurring amino acid
  misc_feature (162)..(168): Xaa can be any naturally occurring amino acid
  Coding DNA Sequence Number=SeqID_4774
CXRRXVXLRXXXXXXXXHXSXPXRXXXRPXCXXXGXXXXXXXXXPXXXXXXXXPXXRXXXXXXXXXXXXSRXLXXXRPXXYXXXXAXFXXXXXXXXSRRXXXXXCXHXXXXXXXXXNXXXXXXSXXPAXPPSXXXXXXXRSXFYRTXXXXXXXXXXXXXXIXXXXXXX

SEQ ID NO: 12484 - protein, 110 aa, Zea mays
  misc_feature (1)..(9): Xaa can be any naturally occurring amino acid
  Coding DNA Sequence Number=SeqID_4776
  Subcellular localization annotation: CTP_CleavageSite=26; ConfidenceScore=5.46e-01
XXXXXXXXXRGQQAKLLTGPHPPPCSSPEVSSSTPRLLTAPTPAGGLRQQPALSGPHTTDCSRWLFDCRPEGLHHRRRCRPPSWLLLPGRGRIARGIFWAVGNPKGSLFW

SEQ ID NO: 12485 - protein, 972 aa, Zea mays
  misc_feature (65)..(65): Xaa can be any naturally occurring amino acid
  misc_feature (115)..(115): Xaa can be any naturally occurring amino acid
  misc_feature (147)..(147): Xaa can be any naturally occurring amino acid
  misc_feature (266)..(266): Xaa can be any naturally occurring amino acid
  misc_feature (271)..(271): Xaa can be any naturally occurring amino acid
  misc_feature (293)..(293): Xaa can be any naturally occurring amino acid
  misc_feature (311)..(311): Xaa can be any naturally occurring amino acid
  misc_feature (416)..(416): Xaa can be any naturally occurring amino acid
  misc_feature (423)..(424): Xaa can be any naturally occurring amino acid
  misc_feature (514)..(514): Xaa can be any naturally occurring amino acid
  misc_feature (518)..(518): Xaa can be any naturally occurring amino acid
  misc_feature (552)..(552): Xaa can be any naturally occurring amino acid
  misc_feature (596)..(596): Xaa can be any naturally occurring amino acid
  misc_feature (619)..(619): Xaa can be any naturally occurring amino acid
  misc_feature (697)..(698): Xaa can be any naturally occurring amino acid
  misc_feature (716)..(716): Xaa can be any naturally occurring amino acid
  misc_feature (791)..(791): Xaa can be any naturally occurring amino acid
  misc_feature (806)..(806): Xaa can be any naturally occurring amino acid
  misc_feature (863)..(863): Xaa can be any naturally occurring amino acid
  misc_feature (898)..(898): Xaa can be any naturally occurring amino acid
  misc_feature (940)..(940): Xaa can be any naturally occurring amino acid
  Coding DNA Sequence Number=SeqID_4778
  Gene Ontology: Mol. function=aspartic-type endopeptidase activity; Cellular component=chromatin; Biological process=chromatin assembly or disassembly
  Homolog annotation: Hit_ID=Q8W1D1; Match level="QueryCoverage=99%, HitCoverage=65%, E-value=0.0, Identity=63%"; Hit description=Gag-pol
  Pfam annotation: Domain name=Chromo; Domain location=919-971; Score =21.6; E_value=0.0011; Accession=PF00385.14; Description='chromo' (CHRromatin Organisation MOdifier)
  Pfam annotation: Domain name=RVT_1; Domain location=80-246; Score =91.2; E_value=3.2e-24; Accession=PF00078.17; Description=Reverse transcriptase (RNA-dependent
  Pfam annotation: Domain name=RnaseH; Domain location=337-456; Score= -33.8; E_value=0.059; Accession=PF00075.14; Description=RNase H
  Pfam annotation: Domain name=rve; Domain location=614-771; Score =59.7; E_value=1e-14; Accession=PF00665.16; Description=Integrase core domain
  Pfam module annotation: Pfam domain module=Chromo::RVT_1::RnaseH::rve; Domain location=919-971::80-246::337-456::614-771
ESKEADPLEAIKVVYEFLDVFPKDLPGMSPKRKVDFAIELIAGTVPISKRVYRVSGPELVELKKXIDELSEKGYIRPITSPWAALVLFVEKKDGTKRMCIDYRALNEVTIKNKYXLPRIEDLFDQLRGASVFSKIYLRSGYHQLRIXPLGIPKTTFITKYGLYELSFGLTNVLAFFMNLMNNVFVDYLDKFVVVFINDILIYSQSEEEHVDHLKVVLQRLREHQLYAKLSKCKLWIQEVLYLGHIINKDELAVDPKKVADILNWNXPNDVXGIKSFIGMARYYRQFIEGFSKXARPMTTLLANKVEFKWTXKCQEAFEVLKEKLITTPVLVLPDVHKTFSVYCDASYTGLGCVLMQERRVVAYSSRQLKVHEKNYPTHDLELAAVVHALKTLRHYLYGQKCDVYTDHKSLKHIFTXSELNMRXXRWQELIKDYDIEIHYHPGKAHVVADALRRKSQVNMMIVHPMPYELVKEFDRLNLEFLNNTQGVTVELEPTLELEIKEVQKKDKKINEVRXANSXGRGKDFREDVEGIVWFKDLLCVPNIKSIQELILXEAHEIAYSIHPISEKMYQDRNELHWWYEMKREIAEHVAICDNCXRIKAEHQRSVDMLQSLQIPQWNXDEIRIDFIVGLPHTRASYDSIWVVVDRLTKSAHFIPIKTNYNSAVLAELYMSRIVCLHGVPKKIVLDRGTRFTSHFWXXLHEALGTHLNFSFAYHPXTDDQTDRTNQILEDMLRAYALQDKSGWDKRLSYVEFSYNNNYQASLKMSPFHTLYGRSCRTPLHWDQPRERQVFXPDIFLEAKENIKMVXENMRISQSRQRSYADTRRRELSFEVGDYVYLKVSPIREVKRFGVKVKLAPRFVGSYXILAKHGEVAYQLSLPESLSVVHDVFHVSHLKKCLXVPEDQLPMEGLQVQEDLTYIEKSTQILETAHRVTQRNTIRMXKVRWGHQSKEETTWEREDDLKAKYAELFASQP

SEQ ID NO: 12486 - protein, 300 aa, Zea mays
  misc_feature (102)..(102): Xaa can be any naturally occurring amino acid
  misc_feature (109)..(109): Xaa can be any naturally occurring amino acid
  misc_feature (207)..(207): Xaa can be any naturally occurring amino acid
  Coding DNA Sequence Number=SeqID_4779
  Gene Ontology: Mol. function=ribonuclease H activity; Biological process=DNA integration
  Homolog annotation: Hit_ID=Q7XBD4; Match level="QueryCoverage=86%, HitCoverage=26%, E-value=1e-108, Identity=72%"; Hit description =Cinful1 polyprotein
LKAGLRFPLSKFVVEVLKIFQIFLHQITPEAIIRMRIFVWVVRSQGLEPSAKCFCNMHELLYETKAIGKEQYHNNFGCYGFIARSNASHPVLTFRKRWPGAXMEEWFYXKNDLIKREDIKVIIQRPIWSRFVLRRSKVDINDNVEACQKAFNTMCAFIGTRDLIQEHIAFRVWPLVENWEMPKDTVVEPSEGGLVRLKYTFRFREKXEPDDDWLKCIEATSDELLGTYSRAKDDALSAAFGGRGKKRLNMVFDAIGFVYPGYRYPLRGPGGCACSRGYKRSREREDEPVRQLVLPRDPPA

SEQ ID NO: 12487 - protein, 113 aa, Zea mays
  Coding DNA Sequence Number=SeqID_4780
  Homolog annotation: Hit_ID=A2ZVX0; Match level="QueryCoverage=36%, HitCoverage=11%, E-value=7e-11, Identity=75%"; Hit description =Putative uncharacterized protein
AAQRTGGEDDGQEGAGGIPGGGGVHDNSRPCPVVAFVTGGAWIIGYKAWGALLGRCISECGHSRACALVASRRICLLWVILCLVFCYVYFRLVYLYVLIRVAARLRLTRRPVW

SEQ ID NO: 12488 - protein, 152 aa, Zea mays
  Coding DNA Sequence Number=SeqID_4781
TFVGRGYSPRGEILRRGLPFPKGRPPVAPFSVFFPPPEKKGGGGGLNFRVFGLTGEGLRPKGVFFFFFFFFFFFFFFFFFFFFFFFFFFFFFFFFFFFFRTAKPYSVYNCMSTIYGSMHTFALRRTMMVGSSTAGDEDGQNQAVYSRKHRRR

SEQ ID NO: 12489 - protein, 458 aa, Zea mays
  misc_feature (34)..(34): Xaa can be any naturally occurring amino acid
  misc_feature (96)..(96): Xaa can be any naturally occurring amino acid
  misc_feature (152)..(152): Xaa can be any naturally occurring amino acid
  misc_feature (161)..(161): Xaa can be any naturally occurring amino acid
  misc_feature (172)..(172): Xaa can be any naturally occurring amino acid
  misc_feature (222)..(222): Xaa can be any naturally occurring amino acid
  misc_feature (244)..(244): Xaa can be any naturally occurring amino acid
  misc_feature (301)..(301): Xaa can be any naturally occurring amino acid
  misc_feature (426)..(426): Xaa can be any naturally occurring amino acid
  misc_feature (438)..(438): Xaa can be any naturally occurring amino acid
  Coding DNA Sequence Number=SeqID_4783
  Gene Ontology: Mol. function=nucleic acid binding; Cellular component= chromatin; Biological process=DNA integration
  Homolog annotation: Hit_ID=Q2QSG2; Match level="QueryCoverage=97%, HitCoverage=27%, E-value=1e-135, Identity=57%"; Hit description =Retrotransposon protein, putative, Ty1-copia subclass
  Pfam annotation: Domain name=RVT_2; Domain location=20-276; Score =269.6; E_value=6.4e-78; Accession=PF07727.4; Description=Reverse transcriptase (RNA-dependent
LSLELSSASGELTDPNKRCAMLEEYEVVLVNHTXDLVSHPSGTNVVTGKWVFKHKPKAHGSLDWYKARWVLRGFTQRPRVYYDKTFSPMVKPGAIXIVLTMALSRARPVHQLDVKNAFLHGTLTETVYCSQPVGFVDSTHPYMVCKFNWSLXGPKHAPHTXYSRVATLLLSXSFVEAKAETSMFVFRRGMDNAYLLLYFKRTIHTTSSHDLLWRVISSLQQXFAMKDLGELDHFLVITVERRPXGLFLHQRQYTIDILEHTAMTNCKSCSTPVDIQGTVSINVGPLVANPASCRSLIEALXYLIFTRPDIAYVVHQVCHYMYAPREPHLTATKRILRYLCGTTNFDILLCQSVTINLAIYTDADWGGCPDTYRPTSRFVVFLGNNLGFWFLKRQLDVSHSSGEAEAEYRDVANGVAEAAWLHQLLXGLHCPLTRSTLXLYCDNVSAMCLSEREIGLQR

SEQ ID NO: 12490 - protein, 135 aa, Zea mays
  misc_feature (6)..(6): Xaa can be any naturally occurring amino acid
  misc_feature (12)..(12): Xaa can be any naturally occurring amino acid
  Coding DNA Sequence Number=SeqID_4784
SPCPKXSLPFYXWKKGSASGGFPEKEPQGKGKTSVLPRVESHILVEPGLTGCLVFTMANDMGAVMVPSVITVATPTPGLVSLGIDVGHCNALWEVCILRPSPIGHKCIVGFNVTQFEDFVGHECCGLEGGPGTQS

SEQ ID NO: 12491 - protein, 93 aa, Zea mays
  Coding DNA Sequence Number=SeqID_4786
  Gene Ontology: Mol. function=RNA-directed DNA polymerase activity
  Homolog annotation: Hit_ID=Q8W233; Match level="QueryCoverage=95%, HitCoverage=90%, E-value=8e-34, Identity=70%"; Hit description =Putative non-LTR retroelement reverse transcriptase
QINLGFRKKLLIGVAAMFWSIWLCRNDVAFNFKPIPSILQVLFRGMYWLRLWRLLQKQEAHQEILVVCQSLEMVAMEILAKHGWSSNARLKDA

SEQ ID NO: 12492 - protein, 191 aa, Zea mays
  Coding DNA Sequence Number=SeqID_4787
  Gene Ontology: Mol. function=transcription factor activity; Biological process=regulation of transcription, DNA-dependent
  Homolog annotation: Hit_ID=A9I551; Match level="QueryCoverage=82%, HitCoverage=48%, E-value=6e-30, Identity=48%"; Hit description =Transcriptional regulator, LysR-family
HLALLYDPAPSPQLGYESLFREDLVLVAAADHQPPLPARVAVAGLGAYPLVLPSLPNAIRTLVESICRAQGVRLQVAAEVDAVQTIVELAAQGDAYAILPRSAARGPAAEHALSLSDIVSPRITNNLLLASARHRPATRLGMVTGDLIRHVNLGALEAPDPALVVTPNAPALLRAAVIDVVSSPCRRSLRP

SEQ ID NO: 12493 - protein, 104 aa, Zea mays
  misc_feature (18)..(18): Xaa can be any naturally occurring amino acid
  misc_feature (20)..(20): Xaa can be any naturally occurring amino acid
  misc_feature (22)..(23): Xaa can be any naturally occurring amino acid
  misc_feature (29)..(30): Xaa can be any naturally occurring amino acid
  misc_feature (32)..(32): Xaa can be any naturally occurring amino acid
  misc_feature (38)..(38): Xaa can be any naturally occurring amino acid
  misc_feature (40)..(43): Xaa can be any naturally occurring amino acid
  misc_feature (46)..(47): Xaa can be any naturally occurring amino acid
  misc_feature (49)..(49): Xaa can be any naturally occurring amino acid
  misc_feature (51)..(54): Xaa can be any naturally occurring amino acid
  misc_feature (57)..(57): Xaa can be any naturally occurring amino acid
  misc_feature (74)..(74): Xaa can be any naturally occurring amino acid
  misc_feature (80)..(80): Xaa can be any naturally occurring amino acid
  misc_feature (84)..(86): Xaa can be any naturally occurring amino acid
  misc_feature (88)..(88): Xaa can be any naturally occurring amino acid
  misc_feature (91)..(92): Xaa can be any naturally occurring amino acid
  misc_feature (94)..(96): Xaa can be any naturally occurring amino acid
  misc_feature (98)..(99): Xaa can be any naturally occurring amino acid
  misc_feature (103)..(103): Xaa can be any naturally occurring amino acid
  Coding DNA Sequence Number=SeqID_4788
LCLGSLITRVKEDVLLPXTXLXXQQPPSXXKXKCTRHXLXXXXLRXXQXNXXXXMEXNSCMILSSSSIQSCSSXSRSDFXSGTXXXSXQSXXTXXXRXXGYPXG

SEQ ID NO: 12494 - protein, 197 aa, Zea mays
  Coding DNA Sequence Number=SeqID_4790
MVRKKRTGPGSSGETSGESSGASGQGSSQQPERTQQPGGGRGWVPQQGGRSGGQHQGRDRHYQGRGGPGPHHLGSGAPEYRPREYQGRGGEYQGRGGGRSRGGMPQPYYGGHRGGNVGHNVPPGPSRTVPELHQAPYVQYPAPVVAPSLLGPGSLTQHMAEVSSAWSQQQVKQHLYQAVALHQGGATPRLPVLGMLL

SEQ ID NO: 12495 - protein, 100 aa, Zea mays
  misc_feature (73)..(100): Xaa can be any naturally occurring amino acid
  Coding DNA Sequence Number=SeqID_4791
  Subcellular localization annotation: CTP_CleavageSite=38; ConfidenceScore=5.10e-01
MGHNRSEDTCLHQTDAQGLQPCRTRRVRSLGRRSLTVDSSKLGNGSQSAYLEWQSRRAKKTTSLELVAAPMAXXXXXXXXXXXXXXXXXXXXXXXXXXXX

SEQ ID NO: 12496 - protein, 111 aa, Zea mays
  Coding DNA Sequence Number=SeqID_4793
  Gene Ontology: Mol. function=enzyme inhibitor activity; Cellular component=cell wall; Biological process=response to stress
  Homolog annotation: Hit_ID=Q67XF9; Match level="QueryCoverage=99%, HitCoverage=39%, E-value=1e-20, Identity=52%"; Hit description =Putative uncharacterized protein At4g27320
  Subcellular localization annotation: CTP_CleavageSite=45; ConfidenceScore=5.17e-01
MDPDSDHPHLPTIKIHHPPSPRHSPHHHHHHSSSTPSSAATPTPTAGARRKIGVAIDLSCESAFAVRWAADHYIRPGDAAVLLHVSPTSVLYGARFRIWGKFTGAPVGPPG

SEQ ID NO: 12497 - protein, 102 aa, Zea mays
  misc_feature (38)..(38): Xaa can be any naturally occurring amino acid
  misc_feature (61)..(61): Xaa can be any naturally occurring amino acid
  misc_feature (71)..(71): Xaa can be any naturally occurring amino acid
  misc_feature (76)..(76): Xaa can be any naturally occurring amino acid
  Coding DNA Sequence Number=SeqID_4794
  Homolog annotation: Hit_ID=Q9BUH6; Match level="QueryCoverage=75%, HitCoverage=36%, E-value=4e-16, Identity=61%"; Hit description =Uncharacterized protein C9orf142
  Subcellular localization annotation: CTP_CleavageSite=37; ConfidenceScore=5.15e-01
PTTKGGRCQKAAPQAGGAVTQRPGKKRMWNLERRLASXQKETAFSPRKIPRPTGPHLFLPXTDSQRGDPGXGVRRXRCPGESLINPGCKSKKPTGGVDFDET

SEQ ID NO: 12498 - protein, 173 aa, Zea mays
  misc_feature (8)..(8): Xaa can be any naturally occurring amino acid
  misc_feature (12)..(12): Xaa can be any naturally occurring amino acid
  misc_feature (14)..(16): Xaa can be any naturally occurring amino acid
  misc_feature (21)..(23): Xaa can be any naturally occurring amino acid
  misc_feature (26)..(26): Xaa can be any naturally occurring amino acid
  misc_feature (28)..(28): Xaa can be any naturally occurring amino acid
  misc_feature (34)..(34): Xaa can be any naturally occurring amino acid
  misc_feature (38)..(39): Xaa can be any naturally occurring amino acid
  misc_feature (77)..(77): Xaa can be any naturally occurring amino acid
  misc_feature (79)..(79): Xaa can be any naturally occurring amino acid
  misc_feature (92)..(92): Xaa can be any naturally occurring amino acid
  misc_feature (94)..(94): Xaa can be any naturally occurring amino acid
  misc_feature (114)..(114): Xaa can be any naturally occurring amino acid
  misc_feature (116)..(116): Xaa can be any naturally occurring amino acid
  misc_feature (120)..(120): Xaa can be any naturally occurring amino acid
  misc_feature (122)..(123): Xaa can be any naturally occurring amino acid
  misc_feature (126)..(128): Xaa can be any naturally occurring amino acid
  misc_feature (131)..(131): Xaa can be any naturally occurring amino acid
  misc_feature (133)..(173): Xaa can be any naturally occurring amino acid
  Coding DNA Sequence Number=SeqID_4795
  Subcellular localization annotation: CTP_CleavageSite=56; ConfidenceScore=5.29e-01
RSHIALHXHVVXRXXXRPQHXXXPLXGXAMPFSXSRRXXEGRARKQASKKRADRPRASTRMVRSSKMMVAAALLGLXLXVSTAEARNIKTTXTXKKDDAGGAAADLPALRPPRXRXVPGXSXXSPXXXFLXAXXXXXXXXXXXXXXXXXXXXXXXXXXXXXXXXXXXXXXXXX

SEQ ID NO: 12499 - protein, 132 aa, Zea mays
  misc_feature (130)..(131): Xaa can be any naturally occurring amino acid
  Coding DNA Sequence Number=SeqID_4797
FDSRGGDLSLGHPSSVSLGRDRLTRWRWDVASARPAFASVIGLGAGSGCDAAIIAQQGWNADNEPPFTRFVQIRPHVLPEGSRKVAVHGDLPGQVCSNPRTYGVWHDDKVVMPRRPVMPTPNSHLGVFAXXH

SEQ ID NO: 12500 - protein, 162 aa, Zea mays
  misc_feature (48)..(48): Xaa can be any naturally occurring amino acid
  misc_feature (113)..(113): Xaa can be any naturally occurring amino acid
  misc_feature (137)..(137): Xaa can be any naturally occurring amino acid
  Coding DNA Sequence Number=SeqID_4799
  Gene Ontology: Mol. function=structural constituent of ribosome; Cellular component=ribonucleoprotein complex; Biological process =translation
  Homolog annotation: Hit_ID=Q9AYP4; Match level="QueryCoverage=99%, HitCoverage=90%, E-value=3e-28, Identity=46%"; Hit description=40S ribosomal protein S10
  Pfam annotation: Domain name=S10_plectin; Domain location=2-81; Score= 100.2; E_value=6.6e-27; Accession=PF03501.5; Description=PlectinS10 domain
GGRVVANKVYKLVKHPQIDVPNLLVIKLMQSFKCKEYVRETFWCQYSXWFFTNDGIEHLRKYLNLSSEIVPVTLKKSPKSPGGSFGSGPPGGRPRGPGRFDGDRTRFGDRDGXRGGPRGAPGDSGGDKSGAPNDFQXTFRRPVFGRVADSEFGTVPTYFSME

SEQ ID NO: 12501 - protein, 153 aa, Zea mays
  misc_feature (17)..(17): Xaa can be any naturally occurring amino acid
  misc_feature (22)..(23): Xaa can be any naturally occurring amino acid
  misc_feature (25)..(25): Xaa can be any naturally occurring amino acid
  misc_feature (31)..(31): Xaa can be any naturally occurring amino acid
  misc_feature (39)..(39): Xaa can be any naturally occurring amino acid
  misc_feature (51)..(52): Xaa can be any naturally occurring amino acid
  misc_feature (111)..(111): Xaa can be any naturally occurring amino acid
  misc_feature (130)..(130): Xaa can be any naturally occurring amino acid
  misc_feature (139)..(139): Xaa can be any naturally occurring amino acid
  Coding DNA Sequence Number=SeqID_4800
  Subcellular localization annotation: CTP_CleavageSite=92; ConfidenceScore=5.81e-01
QCSNSRSEQAWSRTNTXSNARXXSXASKGRXSTTGVRTXMGHPAAPATRTXXQASTSSTTGRASAGLTRTASGRTSMGARPLVSRTVPRRPSADSEAARDSGSQDEAASSXASPKEDPPILSPQPKAPIXAKTSAMERXTAASSTYTGEEHAN

SEQ ID NO: 12502 - protein, 151 aa, Zea mays
  misc_feature (1)..(2): Xaa can be any naturally occurring amino acid
  misc_feature (4)..(5): Xaa can be any naturally occurring amino acid
  misc_feature (11)..(12): Xaa can be any naturally occurring amino acid
  misc_feature (14)..(14): Xaa can be any naturally occurring amino acid
  misc_feature (30)..(30): Xaa can be any naturally occurring amino acid
  misc_feature (49)..(49): Xaa can be any naturally occurring amino acid
  misc_feature (51)..(51): Xaa can be any naturally occurring amino acid
  misc_feature (58)..(58): Xaa can be any naturally occurring amino acid
  misc_feature (61)..(61): Xaa can be any naturally occurring amino acid
  misc_feature (69)..(69): Xaa can be any naturally occurring amino acid
  misc_feature (73)..(73): Xaa can be any naturally occurring amino acid
  misc_feature (77)..(78): Xaa can be any naturally occurring amino acid
  misc_feature (82)..(86): Xaa can be any naturally occurring amino acid
  misc_feature (93)..(93): Xaa can be any naturally occurring amino acid
  misc_feature (95)..(95): Xaa can be any naturally occurring amino acid
  misc_feature (101)..(102): Xaa can be any naturally occurring amino acid
  misc_feature (104)..(104): Xaa can be any naturally occurring amino acid
  misc_feature (113)..(113): Xaa can be any naturally occurring amino acid
  misc_feature (122)..(123): Xaa can be any naturally occurring amino acid
  misc_feature (125)..(125): Xaa can be any naturally occurring amino acid
  misc_feature (129)..(130): Xaa can be any naturally occurring amino acid
  misc_feature (134)..(134): Xaa can be any naturally occurring amino acid
  misc_feature (138)..(138): Xaa can be any naturally occurring amino acid
  misc_feature (140)..(140): Xaa can be any naturally occurring amino acid
  misc_feature (148)..(150): Xaa can be any naturally occurring amino acid
  Coding DNA Sequence Number=SeqID_4801
  Subcellular localization annotation: CTP_CleavageSite=94; ConfidenceScore=5.72e-01
XXSXXFQAAGXXGXVSTRSASSCCATLLPXCSASACRFPRRERAPGSIXGXSRRPRRXAPXPLLRRRGXGCRXRPRXXRGTXXXXXTQGRSFXLXRSIGSXXDXGHPLPSACXYEGWWPKAXXGXPISXXVSYXVGVXAXAAGISSNXXXY

SEQ ID NO: 12503 - protein, 98 aa, Zea mays
  Coding DNA Sequence Number=SeqID_4803
LLKDQPRGGGAKLISPATTRPDLFLALGKPGTGPASLEIGTQKKPPRGKTNQSLKNHGPRVTYFRSWDSARGGPLLQWVGAYGLHPCLITPGPLGSGP

SEQ ID NO: 12504 - protein, 51 aa, Zea mays
  Coding DNA Sequence Number=SeqID_4805
ENPLGSPINAPGKHPPFPGGAEKREGPLRKTPLQLGAPQREKGEFPPQNFL

SEQ ID NO: 12505 - protein, 439 aa, Zea mays
  misc_feature (49)..(439): Xaa can be any naturally occurring amino acid
  Coding DNA Sequence Number=SeqID_4807
QVKDHFFLCISLQSKTQSLRRPNVPQDRGNIRNIKDLVTTARPEKKSRXXXXXXXXXXXXXXXXXXXXXXXXXXXXXXXXXXXXXXXXXXXXXXXXXXXXXXXXXXXXXXXXXXXXXXXXXXXXXXXXXXXXXXXXXXXXXXXXXXXXXXXXXXXXXXXXXXXXXXXXXXXXXXXXXXXXXXXXXXXXXXXXXXXXXXXXXXXXXXXXXXXXXXXXXXXXXXXXXXXXXXXXXXXXXXXXXXXXXXXXXXXXXXXXXXXXXXXXXXXXXXXXXXXXXXXXXXXXXXXXXXXXXXXXXXXXXXXXXXXXXXXXXXXXXXXXXXXXXXXXXXXXXXXXXXXXXXXXXXXXXXXXXXXXXXXXXXXXXXXXXXXXXXXXXXXXXXXXXXXXXXXXXXXXXXXXXXXXXXXXXXXXXXXXXXXXXXXXXXXXXXXXXXXXXXX

SEQ ID NO: 12506 - protein, 119 aa, Zea mays
  Coding DNA Sequence Number=SeqID_4809
  Gene Ontology: Mol. function=structural constituent of ribosome; Cellular component=ribonucleoprotein complex; Biological process =translation
  Homolog annotation: Hit_ID=Q9ASV6; Match level="QueryCoverage=78%, HitCoverage=46%, E-value=3e-29, Identity=76%"; Hit description=30S ribosomal protein S20, chloroplast precursor
  Pfam annotation: Domain name=Ribosomal_S20p; Domain location=16-96; Score=24.6; E_value=2.8e-05; Accession=PF01649.8; Description =Ribosomal protein S20
KPMRQLIVCEAAAPTKKADSAAKRARQAEKRRVYNKSKKSEARTRMKKVLEALEGLKKKTDAQADEIVTVEKLIGEAYSAIDKAVKVKALHKNYLWPWARPHPTGPPASPQIARSNRTQ

SEQ ID NO: 12507 - protein, 66 aa, Zea mays
  misc_feature (22)..(22): Xaa can be any naturally occurring amino acid
  Coding DNA Sequence Number=SeqID_698
FAAELPWEFMNHLPRIGPPLPXALMGCPSSNFPSSLLLFDGAARAPETRAKPSIRSLSCMILEGVT

SEQ ID NO: 12508 - protein, 121 aa, Zea mays
  misc_feature (106)..(106): Xaa can be any naturally occurring amino acid
  Coding DNA Sequence Number=SeqID_700
  Gene Ontology: Mol. function=DNA binding; Cellular component=nucleus; Biological process=regulation of transcription
  Homolog annotation: Hit_ID=Q8GRY3; Match level="QueryCoverage=99%, HitCoverage=49%, E-value=3e-11, Identity=38%"; Hit description=Myb13 protein
GTDESAKSSDSREELSLKDDNHHREVPLSTDSSEQSSWPEPGSNVGDQDPELLVNWPSETDLSVDEPWLGFMSNGNELGDVEGTSPWDGTTDWLLDYQDFGMCSSXLGDDSMFHASNGLNF

SEQ ID NO: 12509 - protein, 192 aa, Zea mays
  Coding DNA Sequence Number=SeqID_701
  Homolog annotation: Hit_ID=UPI0000F1D351; Match level="QueryCoverage =83%, HitCoverage=16%, E-value=4e-16, Identity=37%"; Hit description =PREDICTED: similar to zinc finger protein
KKLKEEIKGALRASLIESGVLPATVQNNAAVESISPHVGLTFKQQKELLLLTLNAEMEEEHLKHSLEKDKLNAEMEKEHLKQSLEKEKLGLQQYRLDLIKAGMIVGNAEGSGSSEEPATAQVKGFDVVRNLRLIPKFDEKDPDTFFILFERVADMRGWPEGGALVGAFEQPTQNPMFNAVGLFSQHRKKLTY

SEQ ID NO: 12510 - protein, 124 aa, Zea mays
  misc_feature (8)..(8): Xaa can be any naturally occurring amino acid
  Coding DNA Sequence Number=SeqID_702
GHPLIRLXATERRPPAPQAPSPQPQATAADHRPLLHVSAPAQRTAPQAAPHTALSRAPPLRGSALQACRLQPAAARDLGLSASRCCLLGGCELAGCGWALAAWSPASASLLPAPVLRLTQDAIS

SEQ ID NO: 12511 - protein, 61 aa, Zea mays
  Coding DNA Sequence Number=SeqID_704
TTVTWRSSLILALDQVVYFDIGPSTSLLQVDHPLHHLTSTQLLISASRDQLAYQTKLDLNP

SEQ ID NO: 12512 - protein, 129 aa, Zea mays
  Coding DNA Sequence Number=SeqID_706
  Subcellular localization annotation: CTP_CleavageSite=93; ConfidenceScore=5.33e-01
IIITSNKNKNKNKNFNQPNHQPSIHLSNKHLNKTSTNIKMFGLDAPKITRAQFNGSDPQLQLQQRYAASLKSPATSAISSARVSLDDDASSISSSDEKKAIPSTSNSTEKKQKKRISLFRAANMVLSLK

SEQ ID NO: 12513 - protein, 66 aa, Zea mays
  misc_feature (14)..(14): Xaa can be any naturally occurring amino acid
  Coding DNA Sequence Number=SeqID_708
RDYNYLRTYVPVSXVYNNSGCFNKLLQEKKRKVKDEKLSSQLRLDMTSGIITADYPFITLCCQEGV

SEQ ID NO: 12514 - protein, 223 aa, Zea mays
  Coding DNA Sequence Number=SeqID_709
NLSHTHLFIKKNTTNNLSTSLLKPDWATEILRTYVGAVCSSDKRATKAKRDHRPTAVRSHAQLALVVAASIATGTFFRRATRRPRRRPRRGQHLSGHHLAAKGLVSFLRRFCSHRSSGGGGRLRVAAVAAQQAHQAAGAGAEQELERRRGFFFDHIHHRLLLLGQHTPRGLISIVPAVVRGLSVDALRHRRRDVFALAPTIRRRFLQGDALIHSWEVTRPRPD

SEQ ID NO: 12515 - protein, 163 aa, Zea mays
  Coding DNA Sequence Number=SeqID_711
  Homolog annotation: Hit_ID=A2YZX5; Match level="QueryCoverage=47%, HitCoverage=6%, E-value=5e-14, Identity=54%"; Hit description =Putative uncharacterized protein
  Subcellular localization annotation: CTP_CleavageSite=8; ConfidenceScore=5.14e-01
MQVVYPPRAAQATPPARFLVEGSRSSFLSHTSHDTHRSRGMTGIETLVASAIASQVARKISDFANEEIKLCCNYHDDLEHMKKTLSDIQPRLKRAEDNSFGSDREIVREWLRLMKTVAYDIEDILDEYYYQNPGEQFDEICCIACYGKDRRTGEVIGTGRRRA

SEQ ID NO: 12516 - protein, 154 aa, Zea mays
  Coding DNA Sequence Number=SeqID_712
  Gene Ontology: Mol. function=transferase activity, transferring glycosyl groups; Cellular component=integral to membrane; Biological process=cell wall organization and biogenesis
  Homolog annotation: Hit_ID=A2Z1C8; Match level="QueryCoverage=32%, HitCoverage=4%, E-value=3e-20, Identity=88%"; Hit description =Cellulose synthase A catalytic subunit 9 [UDP-forming]
  Subcellular localization annotation: CTP_CleavageSite=23; ConfidenceScore=5.56e-01
ISSLSLPSLPPGRSRRRLCQRTRLAPARCGRLCQRTRPAPTRRGRPRPLLSPTRPPPAPPAVAALLYGYKNNNLKWLERFAYINTTIYPFALLPLLAYCTLPAVCLLTGKFIMPSVDAVQVTGSSGAACRKRGLLIILRDEIMNLVAEPHMQES

SEQ ID NO: 12517 - protein, 149 aa, Zea mays
  misc_feature (22)..(22): Xaa can be any naturally occurring amino acid
  misc_feature (33)..(34): Xaa can be any naturally occurring amino acid
  misc_feature (36)..(36): Xaa can be any naturally occurring amino acid
  misc_feature (56)..(56): Xaa can be any naturally occurring amino acid
  Coding DNA Sequence Number=SeqID_713
  Gene Ontology: Mol. function=acyltransferase activity
  Homolog annotation: Hit_ID=Q7EYV6; Match level="QueryCoverage=58%, HitCoverage=18%, E-value=1e-26, Identity=67%"; Hit description =Anthocyanin 5-aromatic acyltransferase-like protein
MEEREQREMEMKQQAALPPAMXKFDVTPSPAPXXGXPRALPLTFYDLVFLAIPPVXRLFFYDRADLLDVSDFTLGELPRFRDSLAAALHHFYPLAGKLTCELVDEEAAAPPKGPRDQGAPGGGGGIEGAWSAGWMEQPSREPASQGPPG

SEQ ID NO: 12518 - protein, 241 aa, Zea mays
  misc_feature (120)..(120): Xaa can be any naturally occurring amino acid
  misc_feature (131)..(131): Xaa can be any naturally occurring amino acid
  misc_feature (133)..(133): Xaa can be any naturally occurring amino acid
  misc_feature (136)..(137): Xaa can be any naturally occurring amino acid
  misc_feature (142)..(143): Xaa can be any naturally occurring amino acid
  misc_feature (146)..(146): Xaa can be any naturally occurring amino acid
  misc_feature (157)..(157): Xaa can be any naturally occurring amino acid
  misc_feature (161)..(161): Xaa can be any naturally occurring amino acid
  misc_feature (163)..(165): Xaa can be any naturally occurring amino acid
  misc_feature (172)..(173): Xaa can be any naturally occurring amino acid
  misc_feature (179)..(179): Xaa can be any naturally occurring amino acid
  misc_feature (182)..(182): Xaa can be any naturally occurring amino acid
  misc_feature (194)..(194): Xaa can be any naturally occurring amino acid
  misc_feature (204)..(204): Xaa can be any naturally occurring amino acid
  misc_feature (211)..(211): Xaa can be any naturally occurring amino acid
  misc_feature (240)..(240): Xaa can be any naturally occurring amino acid
  Coding DNA Sequence Number=SeqID_714
  Gene Ontology: Mol. function=peptidase activity; Cellular component =nucleus; Biological process=positive regulation of sister chromatid cohesion
  Homolog annotation: Hit_ID=A2XA24; Match level="QueryCoverage=92%, HitCoverage=10%, E-value=4e-62, Identity=57%"; Hit description =Putative uncharacterized protein
  Subcellular localization annotation: CTP_CleavageSite=88; ConfidenceScore=5.11e-01
MEAAAADLIAALSSPSSFAGLYSRFAAYLQPFTPYLHSSNPNTKPPQKRATKQNKQPPPPDAATLRPLAKRFLPFLGRALHLLPPLVRACPVSGDKGGEAADELLEIYGLLLDCLEAISXCLAGKPYSVLXQXGRXXCCLEXXGHXARASAEAAATXDALXSXXXPPTTSTXXRRGAAXVDXVLLPDPGSAGEXGTDPEVTLLXVELTVCXANCSSKGKVKEPTPYERLISLFKQLKPWXR

SEQ ID NO: 12519 - protein, 87 aa, Zea mays
  Coding DNA Sequence Number=SeqID_4810
  Subcellular localization annotation: CTP_CleavageSite=37; ConfidenceScore=5.21e-01
LRLARAKTTLDFSFLSSDAVVVGVPAPLSGSLLLFVRAFYLPFTHFMGCSWLRLLKRKGDPCFLLNIHSPMAPWPGENLGTCKKQDL

SEQ ID NO: 12520 - protein, 143 aa, Zea mays
  misc_feature (112)..(112): Xaa can be any naturally occurring amino acid
  misc_feature (128)..(132): Xaa can be any naturally occurring amino acid
  misc_feature (134)..(135): Xaa can be any naturally occurring amino acid
  misc_feature (137)..(137): Xaa can be any naturally occurring amino acid
  misc_feature (139)..(141): Xaa can be any naturally occurring amino acid
  Coding DNA Sequence Number=SeqID_4812
  Subcellular localization annotation: CTP_CleavageSite=26; ConfidenceScore=5.41e-01
PDGRRSPHLGPASSIALRSLVLSLPSLSAGSRPLTQLLADDPVPVLARALPLRSSPAPAVFAGAASQRRGLAPAPGTRLLPPVLCCALVAAVAAPYARGSLNASPPARPDQXPPCSSPRSPRAPPPPXXXXXFXXPXPXXXPP

SEQ ID NO: 12521 - protein, 158 aa, Zea mays
  Coding DNA Sequence Number=SeqID_4814
  Gene Ontology: Mol. function=catalytic activity; Cellular component =chloroplast; Biological process=phosphorylation
  Homolog annotation: Hit_ID=A7QP24; Match level="QueryCoverage=68%, HitCoverage=9%, E-value=1e-33, Identity=66%"; Hit description =Chromosome chr1 scaffold_135, whole genome shotgun sequence
MGRNSRQAILVAHTKPLGLSIRQSILFRRDSSGEALEGYSGAGLYDRSPMDEEDEVVLDYATEPLILDRGFRTSILSSIARAGRAIGELYGSPHDVEGVLKDGKLYVVQTGPLDVVTYASIRQLNKHCCPLLWLGHMGVMACIVVCLDVPRVSSYVYV

SEQ ID NO: 12522 - protein, 53 aa, Zea mays
  Coding DNA Sequence Number=SeqID_4815
VVKVRIPVVIHVADPLLYSSYYVLCGLLGFRFSKYLIEVRYLTCNQRKTRRIR

SEQ ID NO: 12523 - protein, 108 aa, Zea mays
  Coding DNA Sequence Number=SeqID_4817
NGLALGHNVLPPDKSGPSLRMLIVAATSSREDALLVLPGLIKEFPGAGASPAARKKSLPPRSSRLDRDLQQGAGAHHTPPPPCYKGRQMVCRSAQTPMPLKFKIQVGT

SEQ ID NO: 12524 - protein, 131 aa, Zea mays
  Coding DNA Sequence Number=SeqID_4819
  Subcellular localization annotation: CTP_CleavageSite=28; ConfidenceScore=5.17e-01
LLFSTKGGRVCFGGTMKRNSACARRGINLMLFSSTNWGGIGLFRKPLFLLAVWGPTSVRCRKWKQLFDLQPGFILTLPVLDFLEQTPAGRASSHLGLPTQRPGNDGSVCQILSTPGPGNVSCFSSQERGSV

SEQ ID NO: 12525 - protein, 344 aa, Zea mays
  misc_feature (1)..(296): Xaa can be any naturally occurring amino acid
  Coding DNA Sequence Number=SeqID_4821
XXXXXXXXXXXXXXXXXXXXXXXXXXXXXXXXXXXXXXXXXXXXXXXXXXXXXXXXXXXXXXXXXXXXXXXXXXXXXXXXXXXXXXXXXXXXXXXXXXXXXXXXXXXXXXXXXXXXXXXXXXXXXXXXXXXXXXXXXXXXXXXXXXXXXXXXXXXXXXXXXXXXXXXXXXXXXXXXXXXXXXXXXXXXXXXXXXXXXXXXXXXXXXXXXXXXXXXXXXXXXXXXXXXXXXXXXXXXXXXXXXXXXXXXXXXXXXXXXXXXXXXXXXXXXXXXXXXXXXXXXXXXXXXXXXXXXXXXLHNLSKTMITFKTREKMMNFHWYLLGIEKSLLYELGIFTLGLIPIGQC

SEQ ID NO: 12526 - protein, 127 aa, Zea mays
  Coding DNA Sequence Number=SeqID_4822
VTILENARPHPHRWICMPQHTRRDQECRGPGPSPRTRLPFTPWRGVARALVQQSGVGCGVTGSAATARQLSGRPHQLKCTARDGGISTAGGVCTQRYTRTHTSAASSPIMSLAHRFLYCHATGRGHP

SEQ ID NO: 12527 - protein, 220 aa, Zea mays
  misc_feature (97)..(97): Xaa can be any naturally occurring amino acid
  Coding DNA Sequence Number=SeqID_4824
  Homolog annotation: Hit_ID=Q8S473; Match level="QueryCoverage=53%, HitCoverage=13%, E-value=4e-15, Identity=44%"; Hit description =Putative RIRE2 orf3
QPPPPPPPHTRHYLKKHRLGTGPPSRALSQLSRWQERVGLPREPSPETPDDDDDDEDDDEEDDMAARLGLSPGLGLGRELSSQPPSGLMPSVPGAGXSRPEERRQSERVPDPSAGAAEATPGSQAKASAPREPPPTPAAHESDPQVPMAVPVPPAPRPFRVVQSKSGRRRCPRKRTSVGSSRGVEIHRDPPPPPRVDSSPREPQQYPWECPSVRGFFHSL

SEQ ID NO: 12528 - protein, 268 aa, Zea mays
  misc_feature (1)..(130): Xaa can be any naturally occurring amino acid
  Coding DNA Sequence Number=SeqID_4825
XXXXXXXXXXXXXXXXXXXXXXXXXXXXXXXXXXXXXXXXXXXXXXXXXXXXXXXXXXXXXXXXXXXXXXXXXXXXXXXXXXXXXXXXXXXXXXXXXXXXXXXXXXXXXXXXXXXXXXXXXXXXXXXXXXAALTTGQGVSRVRARAISQRVGHAGKTHATGARARTLAPSRLDACNPPLPAHPTWARDKHEGRGISTSFSQAASPLRAPSRAAPSALGHAGHSLTLSVQGPQVAEEPDTFYLTHGSSRNPDRPTFCGRPQFNGKLPLN

SEQ ID NO: 12529 - protein, 227 aa, Zea mays
  misc_feature (39)..(39): Xaa can be any naturally occurring amino acid
  misc_feature (99)..(99): Xaa can be any naturally occurring amino acid
  misc_feature (171)..(171): Xaa can be any naturally occurring amino acid
  misc_feature (199)..(199): Xaa can be any naturally occurring amino acid
  misc_feature (227)..(227): Xaa can be any naturally occurring amino acid
  Coding DNA Sequence Number=SeqID_4826
  Gene Ontology: Mol. function=RNA-directed DNA polymerase activity; Cellular component=intracellular; Biological process=RNA-dependent DNA replication
  Homolog annotation: Hit_ID=UPI00005A975E; Match level="QueryCoverage =93%, HitCoverage=12%, E-value=2e-82, Identity=75%"; Hit description =PREDICTED: similar to Retrovirus-related Pol polyprotein from transposon 297
  Pfam annotation: Domain name=RVT_1; Domain location=66-227; Score =8.1; E_value=2.5e-05; Accession=PF00078.17; Description=Reverse transcriptase (RNA-dependent
HIILIDGFEVLHIPRDVAEHSLDIRARARPVKQPLRPIXTKKSARAIGEEIHKLMAAGFIKEVFHPEWLANPMLMKKKGGKWRMCVDYTGLNKACLKGXYPLPRIDQIVDSTAGCETLSFLDAYTGYHQIKMKESNQLATSFITPFWHVLLYYYAHLGLKECRCYIPKGAXTTCSESTFGRTVEAYVDDIVVKTRKASXLLSDLETTFKCLRAKGMKLNPEKCVFGX

SEQ ID NO: 12530 - protein, 139 aa, Zea mays
  Coding DNA Sequence Number=SeqID_4827
  Subcellular localization annotation: CTP_CleavageSite=48; ConfidenceScore=5.35e-01
LAGQRLRSTIQSQLSSHVSPHPLAPPAPDAAFASTLPPPPAPSPPAPRSRLPPPRPLAPLLPRPPAPPRRYPPPPSFAPTPRPSHLFIAYIYQLLYHPPSSPLPTILSLYPTPPSSFFFLSPSFHSTLSLLPLYSLPTL

SEQ ID NO: 12531 - protein, 103 aa, Zea mays
  misc_feature (59)..(59): Xaa can be any naturally occurring amino acid
  Coding DNA Sequence Number=SeqID_4829
KVRLVLGGPWQRTYSLPRHGKGFGITVNEGYKYGSFRVGSRGSVRPCYRQRRVAPYSSXRDIRWGPVEWVWGAESLQQCSRVWGVPSARIENCDLESVCFLGN

SEQ ID NO: 12532 - protein, 176 aa, Zea mays
  Coding DNA Sequence Number=SeqID_4831
  Subcellular localization annotation: CTP_CleavageSite=15; ConfidenceScore=5.22e-01
RFLGLKLFVGPFPPQIFKVFPFLHPFKFPPFHHTGKFPPPLFCNCGRPLSPLSTLSHLSILWHPTPSHPLLGGYYYFPPPRTRVVGAPPSPFVVPGPPPLGGSPPILFFGPGPPGTPFIPAPFPPIPGTWVFGGTPPPLIWGFLGGGGTFGGAFGPVSFPSTFPGFVPPMTFFRAI

SEQ ID NO: 12533 - protein, 69 aa, Zea mays
  Coding DNA Sequence Number=SeqID_4833
NGGNNFILIPFYSVISSLGVHHDMIIQKAAIPTQKKKKKQSLILFVQILRNIRTLFPGKEILHFILDFI

SEQ ID NO: 12534 - protein, 105 aa, Zea mays
  Coding DNA Sequence Number=SeqID_4835
  Subcellular localization annotation: CTP_CleavageSite=79; ConfidenceScore=5.80e-01
RSTLKPRPACLTVSSIVNASLSMRTGLNTVATSASPTVAAAAGSPAGQAVFNQSSTRHPRHLIQLSSEPARQKGVARIRRETAGGLASRARATKNGRNRQEHGGA

SEQ ID NO: 12535 - protein, 184 aa, Zea mays
  misc_feature (86)..(86): Xaa can be any naturally occurring amino acid
  misc_feature (100)..(100): Xaa can be any naturally occurring amino acid
  Coding DNA Sequence Number=SeqID_4837
  Homolog annotation: Hit_ID=Q10LX6; Match level="QueryCoverage=57%, HitCoverage=50%, E-value=2e-32, Identity=67%"; Hit description =Expressed protein
SRLERTLLRGPVIGCYLDRARVTWGAFPRKEGKVRRDPYLFLWWGNRQGSLVGGTYEPSSREAVSREKVAGSTREAQPRNKDFWLXVIEPQIFLGRFPNXPKRIKVPPCRVISSRTASGSRFMKLRLVRVLAVQFDAETLEEALASNPAELKFDKPEKWTAPCPKYEPGWWEAFLPPMSSNGTA

SEQ ID NO: 12536 - protein, 172 aa, Zea mays
  misc_feature (1)..(1): Xaa can be any naturally occurring amino acid
  misc_feature (3)..(3): Xaa can be any naturally occurring amino acid
  misc_feature (6)..(6): Xaa can be any naturally occurring amino acid
  misc_feature (9)..(13): Xaa can be any naturally occurring amino acid
  misc_feature (16)..(22): Xaa can be any naturally occurring amino acid
  misc_feature (24)..(28): Xaa can be any naturally occurring amino acid
  misc_feature (30)..(30): Xaa can be any naturally occurring amino acid
  misc_feature (32)..(41): Xaa can be any naturally occurring amino acid
  misc_feature (43)..(44): Xaa can be any naturally occurring amino acid
  misc_feature (47)..(48): Xaa can be any naturally occurring amino acid
  misc_feature (52)..(60): Xaa can be any naturally occurring amino acid
  misc_feature (62)..(64): Xaa can be any naturally occurring amino acid
  misc_feature (66)..(66): Xaa can be any naturally occurring amino acid
  misc_feature (69)..(69): Xaa can be any naturally occurring amino acid
  misc_feature (73)..(73): Xaa can be any naturally occurring amino acid
  misc_feature (75)..(77): Xaa can be any naturally occurring amino acid
  misc_feature (90)..(90): Xaa can be any naturally occurring amino acid
  misc_feature (96)..(96): Xaa can be any naturally occurring amino acid
  misc_feature (106)..(106): Xaa can be any naturally occurring amino acid
  misc_feature (109)..(109): Xaa can be any naturally occurring amino acid
  misc_feature (111)..(111): Xaa can be any naturally occurring amino acid
  misc_feature (126)..(127): Xaa can be any naturally occurring amino acid
  misc_feature (130)..(130): Xaa can be any naturally occurring amino acid
  misc_feature (134)..(136): Xaa can be any naturally occurring amino acid
  misc_feature (145)..(145): Xaa can be any naturally occurring amino acid
  misc_feature (150)..(150): Xaa can be any naturally occurring amino acid
  misc_feature (153)..(153): Xaa can be any naturally occurring amino acid
  misc_feature (160)..(160): Xaa can be any naturally occurring amino acid
  misc_feature (170)..(170): Xaa can be any naturally occurring amino acid
  Coding DNA Sequence Number=SeqID_4838
XKXKGXNGXXXXXIYXXXXXXXGXXXXXGXKXXXXXXXXXXIXXKAXXPPRXXXXXXXXXKXXXKXRAXDWGXGXXXKSMLLAAIASWTXIGTEDXGFSHTERYHXYKXMXEEAEGYKYPMSIDGXXPLXAGDXXXLHESYTEKXRVPTXVRXFGGTRRXPRGESGLRRXSG

SEQ ID NO: 12537 - protein, 50 aa, Zea mays
  Coding DNA Sequence Number=SeqID_4840
LHTPIPNYKTFGLFRYIAFMHLGIYHCSCTWPFSPCTNRVNATQWLTVFV

SEQ ID NO: 12538 - protein, 181 aa, Zea mays
  Coding DNA Sequence Number=SeqID_4842
GLVRLFLKKKKKKKKKKKKKKQIIKKKTQLSKPLYNPYKYTKHIIKGCAPSRGPNFYLLCASPLLFASYPAHLAHVFALSFHIVRISFTLMLSSRLLSLPFPPPFSSPFPPPSPFPPLSLLQNTSSNSFPTFSRTSLGRFRPRLSSLPSPHYFTFSFPRVSLRHLFFLFSVFFNCPPSLLL

SEQ ID NO: 12539 - protein, 90 aa, Zea mays
  Coding DNA Sequence Number=SeqID_4844
  Homolog annotation: Hit_ID=Q6JAH2; Match level="QueryCoverage=52%, HitCoverage=6%, E-value=5e-14, Identity=85%"; Hit description =Putative uncharacterized protein
MRGYGYETNGNHQEVEDEYGDEYYDQDEYDEEGSGAGDEYFEEEEPTEGQKEILELRERLKGQIIRKPKTAASCTAGGSSVFTNTFKRVG

SEQ ID NO: 12540 - protein, 52 aa, Zea mays
  Coding DNA Sequence Number=SeqID_4845
  Gene Ontology: Mol. function=nucleoside-triphosphatase activity; Cellular component=nucleus; Biological process=DNA replication
  Homolog annotation: Hit_ID=Q84N07; Match level="QueryCoverage=80%, HitCoverage=12%, E-value=1e-11, Identity=79%"; Hit description =Replication factor C 38 kDa subunit
GLELGWFGYIHSLNHPHYEHKIRLGSKAIFHLEAFVAKFMSICKEFLVATFG

SEQ ID NO: 12541 - protein, 135 aa, Zea mays
  misc_feature (34)..(34): Xaa can be any naturally occurring amino acid
  Coding DNA Sequence Number=SeqID_4846
  Gene Ontology: Mol. function=protein serine/threonine kinase activity; Cellular component=cytoplasm; Biological process=protein amino acid phosphorylation
  Homolog annotation: Hit_ID=Q10R62; Match level="QueryCoverage=99%, HitCoverage=31%, E-value=3e-53, Identity=77%"; Hit description =Serine/threonine-protein kinase NAK, putative, expressed
  Pfam annotation: Domain name=Pkinase_Tyr; Domain location=6-132; Score=-169.4; E_value=0.049; Accession=PF07714.7; Description =Protein tyrosine kinase
CIPEVGVIHTLHPITLIKLISHYPNCNNRLLFYXFMPNRTLYNHLFKKRADPCSWAIRLKVAIGAARGLSFLHDAENQVIYRDFKASNILLDQEFNAKLSDFGLAKAGPTGDKTHVSTQVMGTHGYAAPEYIATG

SEQ ID NO: 12542 - protein, 62 aa, Zea mays
  Coding DNA Sequence Number=SeqID_4847
  Gene Ontology: Mol. function=ribose phosphate diphosphokinase activity; Cellular component=mitochondrion; Biological process =nucleotide biosynthetic process
  Homolog annotation: Hit_ID=Q8S2E5; Match level="QueryCoverage=70%, HitCoverage=10%, E-value=1e-15, Identity=88%"; Hit description =Ribose-phosphate pyrophosphokinase 3
HTTHVPDDNTNLFFLFFPEGPEHGLSHFWLTDSCPLTVKAVKGRRPFEILSLAGPIASALQI

SEQ ID NO: 12543 - protein, 207 aa, Zea mays
  misc_feature (23)..(207): Xaa can be any naturally occurring amino acid
  Coding DNA Sequence Number=SeqID_4848
GFYICAFRFQDLNAKTYCKKKNXXXXXXXXXXXXXXXXXXXXXXXXXXXXXXXXXXXXXXXXXXXXXXXXXXXXXXXXXXXXXXXXXXXXXXXXXXXXXXXXXXXXXXXXXXXXXXXXXXXXXXXXXXXXXXXXXXXXXXXXXXXXXXXXXXXXXXXXXXXXXXXXXXXXXXXXXXXXXXXXXXXXXXXXXXXXXXXXXXXXXXXXX

SEQ ID NO: 12544 - protein, 192 aa, Zea mays
  misc_feature (95)..(95): Xaa can be any naturally occurring amino acid
  Coding DNA Sequence Number=SeqID_4850
  Gene Ontology: Mol. function=protein serine/threonine kinase activity; Biological process=protein amino acid phosphorylation
  Homolog annotation: Hit_ID=A2X5B3; Match level="QueryCoverage=93%, HitCoverage=34%, E-value=2e-63, Identity=74%"; Hit description =Putative uncharacterized protein
FILVIGGQARPLFNDRRKLPKMADPRLEGRYPMRGLYQALAVASMCTQSEAASRPLIADVVTALSYLASQPYDPSTAFASRRLGGSKPGENGGRXVVSRNDETGTSRSPGKDREDSPRDLPAILLNKDLEPERMVAEAHMWALMERMVPEANILIGRERMVAEANIWGKNWPCHRRPENGQGSLVSPPSRNR

SEQ ID NO: 12545 - protein, 295 aa, Zea mays
  Coding DNA Sequence Number=SeqID_4851
  Gene Ontology: Mol. function=metal ion binding; Biological process =metal ion transport
  Homolog annotation: Hit_ID=A3AJ20; Match level="QueryCoverage=25%, HitCoverage=42%, E-value=2e-27, Identity=79%"; Hit description =Putative uncharacterized protein
LWPGVHSSQHKMSTVVMGVDLECDKCYKKIRKVLCKVQDKVSIRTISYDEKNNTVTVSGPFDAEEVADRLTSDAGKVITDIHVVGGFGFGLGGGGGGGKQQKHGAAGGHGGGGHGGHGGGGKPGKNKHVKFDDMDMDMDDDFDDLDMDEPHAHAHGHGHGHGHGHGHGDGKPKIVRTTNTPIAARLEAPRTGPAMSMAAAAPVRMPMPMPAMAPMPQQQGMGGAPSIWPPAPEWGYSAQPYGSYSGPPAGGYYGGGGGPAGHWPWRGPYGDGYGRNPHGQQYYEDEEPSAARSVM

SEQ ID NO: 12546 - protein, 179 aa, Zea mays
  misc_feature (47)..(47): Xaa can be any naturally occurring amino acid
  misc_feature (91)..(91): Xaa can be any naturally occurring amino acid
  Coding DNA Sequence Number=SeqID_4852
  Gene Ontology: Mol. function=transferase activity; Cellular component= cytoplasm; Biological process=metabolic process
  Homolog annotation: Hit_ID=Q10N45; Match level="QueryCoverage=90%, HitCoverage=52%, E-value=4e-71, Identity=83%"; Hit description=IN2-1 protein, putative, expressed
RQAALAGRLTSAYEPPPLFDGTTRLHVAYLCPFAQRAWIARNYMGLXDKIKIVAIDLADRPAWYKEKVYPENKVPSLEHDNQVKGESLDLXKYIDSNFEGPSLLPEDPAKQQFAEELLAYTDAFNKAFYSCSSRPGEDVSEEAVAALDKIEDALGKFNEGPFSLGQFSLVCHWTLGILL

SEQ ID NO: 12547 - protein, 296 aa, Zea mays
  Coding DNA Sequence Number=SeqID_4853
  Gene Ontology: Cellular component=extracellular region; Biological process=cell wall organization and biogenesis
  Homolog annotation: Hit_ID=Q6H676; Match level="QueryCoverage=99%, HitCoverage=99%, E-value=1e-121, Identity=74%"; Hit description =Expansin-B11 precursor
  Pfam annotation: Domain name=DPBB_1; Domain location=102-184; Score =122.8; E_value=1e-33; Accession=PF03330.8; Description=Rare lipoprotein A (RlpA)-like double-psi
  Pfam annotation: Domain name=Pollen_allerg_1; Domain location=196 -279; Score=119.5; E_value=1e-32; Accession=PF01357.11; Description =Pollen allergen
  Pfam module annotation: Pfam domain module=DPBB_1::Pollen_allerg_1; Domain location=102-184::196-279
  Subcellular localization annotation: CTP_CleavageSite=58; ConfidenceScore=5.13e-01
MAKSCTLLFGTVLVVLLLLVSPIACSRKLAKPTNKHRPRHKPAAVRARSNHTATPSVSDAYGSGGWLSAGATYYGAPDGDGSDGGACGYQTAVGQRPFSSMIAAGSPSLFKEGKGCGACYEVKCDSNAACSGKPATVVITDECPGGVCLAEAAHFDMSGTSMGAMAKPGMADRLRASGILKVQYKRVPCKYSGVNIAFRVDQGSNPFYFEVLVEFEDGDGDLSAVDLMEAGCGTWTPMVQNWGALWRYNSNSGKALSAPFSLRLTSDSGKVLVASNVIPASWKAGGTYRSLVNYYP

SEQ ID NO: 12548 - protein, 130 aa, Zea mays
  misc_feature (62)..(62): Xaa can be any naturally occurring amino acid
  misc_feature (70)..(70): Xaa can be any naturally occurring amino acid
  Coding DNA Sequence Number=SeqID_4854
  Homolog annotation: Hit_ID=A3AU14; Match level="QueryCoverage=70%, HitCoverage=28%, E-value=5e-31, Identity=72%"; Hit description =Putative uncharacterized protein
VSLHERLDFFESNWAFFAGFGAPCVLPIVVFSPLISYGFLAILYPLFVLTAAGTQAELVIDXLRPARRGXRQIIPVFFVAQQLVLKMFLLFQVALGDNGGFTWAFLWGWGGPGGNLSKRPPCEYVDGLCL

SEQ ID NO: 12549 - protein, 123 aa, Zea mays
  Coding DNA Sequence Number=SeqID_4855
  Homolog annotation: Hit_ID=Q6H5X2; Match level="QueryCoverage=100%, HitCoverage=47%, E-value=1e-31, Identity=63%"; Hit description=ABA -responsive protein-like
TLGPKLYETVKGKLSLGARILRAGGVGKVFRRWFSSPVGGGGERLLRASQCYLSTTAGPIAGMLFVSTEKGAFRNDRSLGLALTFSARGGRGSGTKTVLRVPYKGFIPLRRSPGARPGQNRNR

SEQ ID NO: 12550 - protein, 74 aa, Zea mays
  Coding DNA Sequence Number=SeqID_4856
  Subcellular localization annotation: CTP_CleavageSite=39; ConfidenceScore=5.24e-01
GVALNHPGSRARWVITATTSSSWVVDSFQKLVSLEISFRSSYRFGCNVLSRLALCKREIHVFFGQPQVYLCTPE

SEQ ID NO: 12551 - protein, 126 aa, Zea mays
  misc_feature (48)..(48): Xaa can be any naturally occurring amino acid
  Coding DNA Sequence Number=SeqID_4858
  Gene Ontology: Mol. function=cation transmembrane transporter activity; Cellular component=integral to membrane; Biological process=calcium ion transport
  Homolog annotation: Hit_ID=A2XHN2; Match level="QueryCoverage=73%, HitCoverage=26%, E-value=2e-26, Identity=67%"; Hit description =Putative uncharacterized protein
MHQLPYCGYTILSSLARSCVLPSMPSVSDDRSGILFHDLDIPFCAVIXGWMMGLDMHLNSQLLETDTMCISVLVVAFMLQEGTSNYFKGLMLILCYLIVAASFFVHVDPDASKYLVYWFLRCTRAN

SEQ ID NO: 12552 - protein, 383 aa, Zea mays
  Coding DNA Sequence Number=SeqID_4859
  Gene Ontology: Mol. function=nucleic acid binding; Cellular component= ribonucleoprotein complex; Biological process=mRNA catabolic process, nonsense-mediated decay
  Homolog annotation: Hit_ID=A2YWJ2; Match level="QueryCoverage=93%, HitCoverage=80%, E-value=1e-100, Identity=55%"; Hit description =Putative uncharacterized protein
  Pfam annotation: Domain name=NID; Domain location=69-143; Score=2.3; E_value=0.026; Accession=PF07292.3; Description=NmiIFP 35 domain (NID)
  Pfam annotation: Domain name=RRM_1; Domain location=117-188; Score =67.0; E_value=6.3e-17; Accession=PF00076.12; Description=RNA recognition motif. (a.k.a. RRM, RBD, or
  Pfam annotation: Domain name=RRM_1; Domain location=27-96; Score =85.4; E_value=1.8e-22; Accession=PF00076.12; Description=RNA recognition motif. (a.k.a. RRM, RBD, or
  Pfam module annotation: Pfam domain module=NID::RRM_1::RRM_1; Domain location=69-143::117-188::27-96
MGKAEARSRGRGGGGGGGGASGNPGKIFVGGLPRDTTDATFVRHFGQYGEIVDSVIMKDRHTSQPRGFGFITYSDPAVVDKVIEDNHVINGKQVEIKRTIPKGSVQSSSKDFKTKKIFVGGLPSTLTEDEFKSFFARYGTVVDHQIMFDHETKRSRGFGFIVFASEQVVDDLLANGNMVDLAGSKVEIKKAEPKKSSNAPPPPVHVRNARSAYDSGSRDHPSADNYGGMASAYGNYRGGGFGPYRSDTGFGARLSSYGGVGDFGGAYGRYYAGLGGGYGAASSFGYPGRFGLYGGGFGGSYAGADLSGYRRGGGDESFGAPGGNPGFGGDAEESFGGPSSSGFSGTAYGGAYDPTLGGYGSASTPDMNRGSFTGGYGRYHPYG

SEQ ID NO: 12553 - protein, 78 aa, Zea mays
  Coding DNA Sequence Number=SeqID_4860
  Gene Ontology: Mol. function=protein transporter activity; Cellular component=mitochondrial inner membrane; Biological process=protein transport
  Homolog annotation: Hit_ID=Q65XV6; Match level="QueryCoverage=96%, HitCoverage=51%, E-value=9e-22, Identity=66%"; Hit description =Putative amino acid selective channel protein
MPRSGISGTLRSPQIDVVIDTGNPFLNRTVDGFLKIGAVGACKVAAEETFDCLHRGARARPEYLASTLDMCAGGSIES

SEQ ID NO: 12554 - protein, 1063 aa, Zea mays
  Coding DNA Sequence Number=SeqID_4861
  Gene Ontology: Mol. function=binding; Cellular component=centrosome; Biological process=establishment and/or maintenance of microtubule cytoskeleton polarity
  Homolog annotation: Hit_ID=Q5N749; Match level="QueryCoverage=99%, HitCoverage=52%, E-value=0.0, Identity=85%"; Hit description =Putative microtubule bundling polypeptide TMBP200
  Pfam annotation: Domain name=HEAT; Domain location=360-396; Score =16.2; E_value=0.1; Accession=PF02985.12; Description=HEAT repeat
  Pfam annotation: Domain name=HEAT; Domain location=401-436; Score =0.7; E_value=21; Accession=PF02985.12; Description=HEAT repeat
  Pfam annotation: Domain name=HEAT; Domain location=74-109; Score=9.8; E_value=0.91; Accession=PF02985.12; Description=HEAT repeat
  Pfam module annotation: Pfam domain module=HEAT::HEAT::HEAT; Domain location=360-396::401-436::74-109
SARGADVLKCLGDNKKHMRECTLTALDSWIAAAQLDKMVPYIIVSLGDQKTGSEGRKDLFDWLSKHVSKMSDPSEALPLLKPSASSLMDKSSEVRKAAESFMNEILRICGQEVVGRNLKDLPSPTLAIVSERLKLSTVHEGFSESVKMVTTSMSLPSKAGLKNNKHGLNDRGSNVGKPVSQRGLPARASVSMVSTQDPAQSQALFNIKDSNKEERERRVLVRKFKFEEPRREQIDELKIDLFKHFREDVSLRLWNSDFKRQIDGIELLQKALPSSWKEVIELLDILLRWFVLRFCESNTTCLLKVLDFLPELFDILKDQSYMLTEAEAAIFLPCLIEKSGHNIEKVREKMGDLIKQMVNIYSLPKLLPYILEGLRSKNNRTRIECVDIIGYFIDHHGTEVGGLMKNLPFVAALTAERDGEIRKAALNTLATAYKSRERELIVPPRKLSDAQRSMLDDRFKWKAREMDKRREGRPGDARAALRRSVRENGSDIAEQSGEVVSRPVAGSMISRDFGYADAHMDRHMVPRQIPSTTGPVDWREALEIVALGLPEQSVEGMKVICHELTQAADPESTLLEDLIKEADRLVSCLAVMVPKTFNFSLSGASSRSCKYVLNTLMQTFQIKRLAHAVKEGTLDNLITELLLWLLDERVPLMDDGSQLLKALNVLMLKILDNAERTSSFVVLINLLRPLDPSRWPSPTPMESLAVKNQKFSDLVVKCLIKLTKVLQSTIYEVDLDRILQSIHIYLQELGMEEIRRRAGADDKPLRMVKTVLHELVKLRGTAIKGHLSMNDDSMVPIDAEPQPIILAYIDLNLQTLAAARMLTPSGPMGQTHWGDAASNNPNPSTHSADAQLKQELAAIFKKIGDKQTCTIGLYELYRITQLYPKVDIFAQLQNASEAFRTYIRDGLAQVEKNAAAGRMPSSLPLSTPPPIAAIPNPKFAPSPVHTKSIGKTDYNEDNASGETQPFRGQGAITDQQTDRYHTSGTLDALRERMKSIQAAAIGHFDGAQARPLASMNGSNMVHGGTRLDGEPQQRSNIPPMDERALSGLQARMERLKSGSMELQ

SEQ ID NO: 12555 - protein, 117 aa, Zea mays
  misc_feature (37)..(37): Xaa can be any naturally occurring amino acid
  Coding DNA Sequence Number=SeqID_4862
  Gene Ontology: Mol. function=2 iron, 2 sulfur cluster binding; Biological process=electron transport
  Homolog annotation: Hit_ID=A3BIM6; Match level="QueryCoverage=94%, HitCoverage=8%, E-value=3e-32, Identity=62%"; Hit description =Putative uncharacterized protein
RVRPTRSCECLPGRVRVLHADALNLVQGGLTAGSTGXETSCAATLQACDTLHDRLKLVLDRMQQRSENVSWDTLVSQAYEDDVDMSASAYWVPGQASNKYLNYGAGISQAEDDLLTG

SEQ ID NO: 12556 - protein, 123 aa, Zea mays
  Coding DNA Sequence Number=SeqID_4863
  Gene Ontology: Mol. function=serine-type endopeptidase inhibitor activity; Cellular component=extracellular region
  Homolog annotation: Hit_ID=Q84LH6; Match level="QueryCoverage=50%, HitCoverage=48%, E-value=3e-29, Identity=79%"; Hit description =Putative Bowman-Birk serine protease inhibitor
  Pfam annotation: Domain name=Bowman-Birk_leg; Domain location=56-82; Score=24.3; E_value=0.00046; Accession=PF00228.10; Description =Bowman-Birk serine protease inhibitor family
  Pfam annotation: Domain name=Bowman-Birk_leg; Domain location=84-111; Score=15.2; E_value=0.027; Accession=PF00228.10; Description=Bowman -Birk serine protease inhibitor family
  Pfam module annotation: Pfam domain module=Bowman-Birk_leg::Bowman -Birk_leg; Domain location=56-82::84-111
GPILLKDPVSVKYLIQKETTTAFACSVLHRSAGQGAGGGGGELASRAKAAARAWPCCDSCGGCTRSEPPRCQCLDAAPRGCHPACRDCVKSSLSADPPVYQCMDRVPNFCQRRCTAAAAAAAH

SEQ ID NO: 12557 - protein, 96 aa, Zea mays
  misc_feature (6)..(6): Xaa can be any naturally occurring amino acid
  misc_feature (12)..(12): Xaa can be any naturally occurring amino acid
  misc_feature (21)..(23): Xaa can be any naturally occurring amino acid
  Coding DNA Sequence Number=SeqID_4864
PPPKKXTQNKKXTPQEKKKNXXXKPPPIASNQKPFKPSSPDWWKGYQTYEAWPGFGYISLVMGLPMNIELLCSVERQLIRWLAPPTHESPVHSYGM

SEQ ID NO: 12558 - protein, 328 aa, Zea mays
  misc_feature (83)..(83): Xaa can be any naturally occurring amino acid
  misc_feature (240)..(240): Xaa can be any naturally occurring amino acid
  misc_feature (300)..(300): Xaa can be any naturally occurring amino acid
  misc_feature (308)..(308): Xaa can be any naturally occurring amino acid
  misc_feature (328)..(328): Xaa can be any naturally occurring amino acid
  Coding DNA Sequence Number=SeqID_4866
  Gene Ontology: Mol. function=transferase activity; Cellular component= intracellular; Biological process=mRNA processing
  Homolog annotation: Hit_ID=A2Z492; Match level="QueryCoverage=96%, HitCoverage=26%, E-value=1e-120, Identity=69%"; Hit description =Putative uncharacterized protein
  Pfam annotation: Domain name=NTP_transf_2; Domain location=78-210; Score=4.9; E_value=0.075; Accession=PF01909.13; Description =Nucleotidyltransferase domain
MILLFPCCRCSEASTWDSQVLSRHAECLELEELTAISVNPSLLPALNQLLLEAYAILRPKPLDYDQRNTLVDVFRKMVNQRFXRFCSNSGSPVVEPFGSFTMDLFTPHSDLDLSINFSANTDEQYTRKQMISIIKKFSKVLFSYQRSGIFCGVLPIVSARVPILKVIDRGTGVECDISVENKDGMTRSMIIKFVSSLDERFQILSYLVKFWAKVHDLNTPRHLTMSSMSIISLVAFHLQXQTRHPPILPAFSDLLKDGLDCESIERNALRFRDFGSRNKESVAELFVSLISKLLSAERLXWEHGLCAXNFEASWISKTWKKGVGNLSX

SEQ ID NO: 12559 - protein, 131 aa, Zea mays
  Coding DNA Sequence Number=SeqID_4867
  Gene Ontology: Mol. function=electron carrier activity; Cellular component=anchored to membrane; Biological process=electron transport
  Homolog annotation: Hit_ID=Q53RK6; Match level="QueryCoverage=78%, HitCoverage=79%, E-value=5e-44, Identity=78%"; Hit description =Plastocyanin-like domain, putative
  Pfam annotation: Domain name=Copper-bind; Domain location=35-131; Score=0.6; E_value=0.00099; Accession=PF00127.11; Description=Copper binding proteins, plastocyaninaz
  Pfam annotation: Domain name=Cu_bind_like; Domain location=46-124; Score=148.3; E_value=2.1e-41; Accession=PF02298.8; Description =Plastocyanin-like domain
  Pfam module annotation: Pfam domain module=Copper-bind::Cu_bind_like; Domain location=35-131::46-124
MAAQGRMGGARGSSGAVVLALVLLCVLLHGEFAESAVYTVGDRGGWSFNTANWPKGKRFRAGDVLVFKYDPKAHNVVPVSAAGYSSCSAPRGVRALTTGNDRVTLKRGVNYFICSFPGHCQAGMKVAVTAA

SEQ ID NO: 12560 - protein, 114 aa, Zea mays
  misc_feature (1)..(71): Xaa can be any naturally occurring amino acid
  Coding DNA Sequence Number=SeqID_4868
XXXXXXXXXXXXXXXXXXXXXXXXXXXXXXXXXXXXXXXXXXXXXXXXXXXXXXXXXXXXXXXXXXXXXXXRAEHQRITNSFLSVDLALCSVLQAHTPASISGCLLAVDHHHHH

SEQ ID NO: 12561 - protein, 109 aa, Zea mays
  misc_feature (66)..(66): Xaa can be any naturally occurring amino acid
  misc_feature (74)..(74): Xaa can be any naturally occurring amino acid
  Coding DNA Sequence Number=SeqID_4870
  Gene Ontology: Mol. function=protein disulfide oxidoreductase activity; Cellular component=outer membrane-bounded periplasmic space; Biological process=defense response
  Homolog annotation: Hit_ID=Q8H8S2; Match level="QueryCoverage=83%, HitCoverage=34%, E-value=3e-35, Identity=79%"; Hit description =Putative polyketide synthase
RVISRMTDIFPGLGLEYDMSGLTRDTMDSHRLIALAGHQGYDKQNALVGELFLNYFCEGKYIGDKXILLDAARXVGIEGAEELLQDPTKGVDEVCLPVTNSAPGAMFLS

SEQ ID NO: 12562 - protein, 198 aa, Zea mays
  Coding DNA Sequence Number=SeqID_4871
  Gene Ontology: Mol. function=N-acetyltransferase activity; Cellular component=cytoplasm; Biological process=metabolic process
  Homolog annotation: Hit_ID=Q94F76; Match level="QueryCoverage=87%, HitCoverage=88%, E-value=7e-90, Identity=93%"; Hit description =Silencing group B protein
  Pfam annotation: Domain name=Acetyltransf_1; Domain location=45-130; Score=77.1; E_value=5.8e-20; Accession=PF00583.14; Description =Acetyltransferase (GNAT) family
  Pfam annotation: Domain name=FR47; Domain location=49-140; Score= -7.6; E_value=0.071; Accession=PF08445.1; Description=FR47-like protein
  Pfam module annotation: Pfam domain module=Acetyltransf_1::FR47; Domain location=45-130::49-140
MVCIRQATIDDLLAMQACNLMCLPENYQMKYYFYHMLSWPQLLFVAEDYGGRIVGYVLAKMEEDPSEPCHGHITSLAVLRSHRKLGLATKLMSAAQAAMDQVFGAEYVSLHVRRSNRAAFNLYTSTLGYQIHDIEAKYYADGEDAYDMRKMLRQPVPKKHHHHHHAGGGCCSHDAPAAAAAGSSPASAVNGEVDRLII

SEQ ID NO: 12563 - protein, 108 aa, Zea mays
  Coding DNA Sequence Number=SeqID_4872
  Gene Ontology: Mol. function=microtubule motor activity; Cellular component=microtubule associated complex; Biological process =microtubule-based movement
  Homolog annotation: Hit_ID=Q39130; Match level="QueryCoverage=83%, HitCoverage=7%, E-value=3e-29, Identity=70%"; Hit description =Calmodulin-binding protein
ALLTYGSGKVYVVHQKITILMSDSLGGNAKTLMFVNVSPAEANLEETYNSLLYASRVRCIVNDTSKHVAPKEIMRLKKLIAYWKEQACKRSDEDELEEVKEERISKER

SEQ ID NO: 12564 - protein, 118 aa, Zea mays
  misc_feature (12)..(12): Xaa can be any naturally occurring amino acid
  Coding DNA Sequence Number=SeqID_4873
  Gene Ontology: Mol. function=phosphoric ester hydrolase activity; Cellular component=cytoplasm; Biological process=carbohydrate metabolic process
  Homolog annotation: Hit_ID=Q9SDL8; Match level="QueryCoverage=57%, HitCoverage=19%, E-value=7e-22, Identity=76%"; Hit description =Fructose-1,6-bisphosphatase, cytosolic
MRNPSGKLRHTXEGEAMNLLMEQAGGQSFTGKERALDLVPTKIHDRSPIFLGSYDDVEEIKALYAEQAKSSSPSSLVRGEIDFSCLNLLLVTGARLSVSVSLGVPVSVNDIQCTMYSP

SEQ ID NO: 12565 - protein, 101 aa, Zea mays
  Coding DNA Sequence Number=SeqID_4874
IISNGVEVISCQGRNDTAGHTRTHGDRSLRADELHASDGERGERADGEGVDVGAGLGVGGCCRDLSTIACPSMSGLADRWRPSEHRYGVGLCRALILVPEC

SEQ ID NO: 12566 - protein, 70 aa, Zea mays
  Coding DNA Sequence Number=SeqID_4876
NGPPWDSLKASNPKEGKIFFEDPLERPKVLKNWPAKALRGARKTLLPGKEKSTFQAPGTQETGEGAFNPW

SEQ ID NO: 12567 - protein, 170 aa, Zea mays
  Coding DNA Sequence Number=SeqID_4878
  Gene Ontology: Mol. function=aminoacyl-tRNA ligase activity; Cellular component=mitochondrion; Biological process=embryonic development ending in seed dormancy
  Homolog annotation: Hit_ID=A2Y0Q1; Match level="QueryCoverage=100%, HitCoverage=27%, E-value=7e-89, Identity=95%"; Hit description =Putative uncharacterized protein
  Pfam annotation: Domain name=DALR_1; Domain location=55-170; Score =169.6; E_value=8.5e-48; Accession=PF05746.5; Description=DALR anticodon binding domain
GKIVDWTDEELEQTSEAVGYGAVKYYADLKNNRLTNYTFSFEQMLSDKGNTAVYLQYAHARICSIIRKSNKNVEELKMSGAISLDHPDERVLGLYLIRFAEVVEEACTNLLPNVVCEYLYNLSEMFTKFYTNCQVVGSPEETSRLLLCQATAVVMRQCFNLLGITPVYKL

SEQ ID NO: 12568 - protein, 211 aa, Zea mays
  misc_feature (187)..(187): Xaa can be any naturally occurring amino acid
  Coding DNA Sequence Number=SeqID_4879
  Gene Ontology: Mol. function=acyl carrier activity; Cellular component=chloroplast; Biological process=fatty acid biosynthetic process
  Homolog annotation: Hit_ID=A1YKG2; Match level="QueryCoverage=88%, HitCoverage=43%, E-value=1e-63, Identity=66%"; Hit description=Acyl -ATP thioesterase
  Pfam annotation: Domain name=Acyl-ACP_TE; Domain location=136-211; Score=-114.7; E_value=0.017; Accession=PF01643.8; Description=Acyl -ACP thioesterase
  Subcellular localization annotation: CTP_CleavageSite=48; ConfidenceScore=5.49e-01
MAASIAASSFFPGSPAPAAPKNGLGERPESLDVRGVAAKPGASSSAVRASKTRAHAAVPKMNGGGKSAVADGEHETVPSSVPKTFYNQLPDWSMLLAAITTIFLAAEKQWTMLDWKPRRPDMLTDTFGFGRIIHDGLMFRQNFSIRSYEIGADRTASIETLMNHLQETALNHVKTAGLLGDGFGSTXEMSKRNLFWVVSQMQAIIERIHAG

SEQ ID NO: 12569 - protein, 68 aa, Zea mays
  Coding DNA Sequence Number=SeqID_4880
  Gene Ontology: Mol. function=ATPase activity, coupled to transmembrane movement of substances; Cellular component=proton -transporting two-sector ATPase complex; Biological process=ATP hydrolysis coupled proton transport
  Homolog annotation: Hit_ID=Q8GUB2; Match level="QueryCoverage=89%, HitCoverage=87%, E-value=1e-10, Identity=55%"; Hit description =Vacuolar ATPase subunit e-like
  Pfam annotation: Domain name=ATP_synt_H; Domain location=2-69; Score =5.1; E_value=0.00061; Accession=PF05493.3; Description=ATP synthase subunit H
  Subcellular localization annotation: CTP_CleavageSite=40; ConfidenceScore=5.00e-01
MTTRATLSLCLPGVAASLFTILCWNGGTTTNLFHMTLATTAAIGRRMTYAIVYLAQMKPLINPMLSGE

SEQ ID NO: 12570 - protein, 116 aa, Zea mays
  misc_feature (73)..(73): Xaa can be any naturally occurring amino acid
  Coding DNA Sequence Number=SeqID_4881
  Gene Ontology: Mol. function=nucleic acid binding; Cellular component= cytoplasm; Biological process=multicellular organismal development
  Homolog annotation: Hit_ID=A2XWI3; Match level="QueryCoverage=93%, HitCoverage=8%, E-value=1e-43, Identity=79%"; Hit description =Putative uncharacterized protein
SSLVSVQLPSHSHVLWDENNFTADGLQTLTNNLCYTYARCTRSVSIVPPAYYAHLAAFRVRFYMEPDTSASGXMASGVTTNRAPGGARNPRAGVGNVSVRPLPAFKENVKRVMFYC

SEQ ID NO: 12571 - protein, 187 aa, Zea mays
  misc_feature (101)..(101): Xaa can be any naturally occurring amino acid
  Coding DNA Sequence Number=SeqID_4882
  Homolog annotation: Hit_ID=Q10LE5; Match level="QueryCoverage=72%, HitCoverage=85%, E-value=1e-33, Identity=55%"; Hit description =Expressed protein
  Pfam annotation: Domain name=PAM2; Domain location=5-22; Score=18.1; E_value=0.014; Accession=PF07145.5; Description=Ataxin-2 C-terminal region
MSAVAVSSSLNPDAPLFIPAALLQVEDFSPQWWDLITTTAWFRDHWSRERAHLDEMAEQIDAAGLLPDDEDLFYDDQPEQGPAAAALKTGRIVVSSRWCVXSARSGAQGAEHDLPEGRRRRPAGVPGETQERREADQVRRQPQEQRPPRDPPASLGSLGELIRKAAAPLAALLLAAASVVVCSFKSK

SEQ ID NO: 12572 - protein, 161 aa, Zea mays
  Coding DNA Sequence Number=SeqID_4883
  Gene Ontology: Mol. function=nutrient reservoir activity
  Homolog annotation: Hit_ID=Q03866; Match level="QueryCoverage=75%, HitCoverage=22%, E-value=3e-18, Identity=45%"; Hit description =Vicilin-like embryo storage protein
ERAPVYREGLALRSSLHLIPFPCSPSHDVRRCEDRPWHQRPRCLEQCREEEREKRQERSRHEADDRSGEGSSEDEREREQEKEEKQKDRRLYVFDRRSFRRVVRSEQGSLRVLRPFDKVSRLFRGIRDYRVAVLEANPRSFVVPIHTDAHLEIKSQLHKFF

SEQ ID NO: 12573 - protein, 106 aa, Zea mays
  Coding DNA Sequence Number=SeqID_4884
PTQSAHASAHASGNHNRVLKTGREAPPPCPCPLLKSGGGGQGNRHCCWDPCVSGNYRRAANLEITPCSKEMDGLAQTARRSDASGHGSAMRRGQPCRRLHSRRARC

SEQ ID NO: 12574 - protein, 140 aa, Zea mays
  Coding DNA Sequence Number=SeqID_4886
  Gene Ontology: Mol. function=cation transmembrane transporter activity; Cellular component=integral to membrane; Biological process=calcium ion transport
  Homolog annotation: Hit_ID=Q769E5; Match level="QueryCoverage=78%, HitCoverage=25%, E-value=4e-32, Identity=68%"; Hit description =Vacuolar cation/proton exchanger 1a (Ca(2+)/H(+) exchanger 1a)
  Subcellular localization annotation: CTP_CleavageSite=86; ConfidenceScore=5.38e-01
MDRLPESTRSMRKYASEAGGLRAARQGPHGRSLTARTAHSMSTTALRTKSKSAASLLRRVPFAPLRPVLANLQEVFLGTKLAIAAQCAHFGQVWVFTLSLLGLIPLAERVSFLTEQIAIYTGPTGKSRTSSVQAVFFFQA

SEQ ID NO: 12575 - protein, 235 aa, Zea mays
  misc_feature (118)..(118): Xaa can be any naturally occurring amino acid
  misc_feature (151)..(151): Xaa can be any naturally occurring amino acid
  Coding DNA Sequence Number=SeqID_4887
  Gene Ontology: Mol. function=binding; Cellular component =mitochondrial inner membrane; Biological process=transport
  Homolog annotation: Hit_ID=P29518; Match level="QueryCoverage=82%, HitCoverage=65%, E-value=9e-83, Identity=56%"; Hit description =Protein brittle-1, chloroplast precursor
  Pfam annotation: Domain name=Mito_carr; Domain location=111-195; Score=49.9; E_value=8.8e-12; Accession=PF00153.17; Description =Mitochondrial carrier protein
  Pfam annotation: Domain name=Mito_carr; Domain location=6-94; Score =102.6; E_value=1.2e-27; Accession=PF00153.17; Description =Mitochondrial carrier protein
  Pfam module annotation: Pfam domain module=Mito_carr::Mito_carr; Domain location=111-195::6-94
EPPKIPIPTALVAGALAGFASTLCTYPMELIKTRVTIEKDAYGNVAHAFVKILRDEGPSELYRGLTPSLIGVGPYADCNFYAYETLKRFYRCATGRVHCADVGPEATLLIKPRGGAIXSSGTFPLDVARKQMQVGPVGWRFVYQNVLHGIXCIPMKEGTNRLYRGLGPSYIKLMPAAVIIFMCYEACKKILFYNEVDFYYFFLILLWGGLVYFFLFIHIIFLHIYIYYIIYIILF

SEQ ID NO: 12576 - protein, 87 aa, Zea mays
  Coding DNA Sequence Number=SeqID_4888
GAWRMLRCVRERSRSSSPSQLWVAGPLSPYNVIIYLLCTELRLYSKDVTFDPKKKKKICGLGTMPCRAPHRPLRCVRTPVFGRRRAA

SEQ ID NO: 12577 - protein, 931 aa, Zea mays
  misc_feature (840)..(840): Xaa can be any naturally occurring amino acid
  Coding DNA Sequence Number=SeqID_4890
  Gene Ontology: Mol. function=protein binding; Cellular component =nuclear speck; Biological process=mRNA processing
  Homolog annotation: Hit_ID=A2ZTZ9; Match level="QueryCoverage=81%, HitCoverage=79%, E-value=0.0, Identity=62%"; Hit description =Putative uncharacterized protein
  Pfam annotation: Domain name=FF; Domain location=367-416; Score=57.1; E_value=6.1e-14; Accession=PF01846.10; Description=FF domain
  Pfam annotation: Domain name=FF; Domain location=434-484; Score=44.0; E_value=5.5e-10; Accession=PF01846.10; Description=FF domain
  Pfam annotation: Domain name=FF; Domain location=502-551; Score=20.3; E_value=0.007; Accession=PF01846.10; Description=FF domain
  Pfam annotation: Domain name=FF; Domain location=576-632; Score=24.7; E_value=0.00034; Accession=PF01846.10; Description=FF domain
  Pfam annotation: Domain name=FF; Domain location=709-759; Score=23.8; E_value=0.00066; Accession=PF01846.10; Description=FF domain
  Pfam annotation: Domain name=WW; Domain location=126-155; Score=44.9; E_value=2.9e-10; Accession=PF00397.16; Description=WW domain
  Pfam annotation: Domain name=WW; Domain location=167-196; Score=38.8; E_value=1.9e-08; Accession=PF00397.16; Description=WW domain
  Pfam module annotation: Pfam domain module=FF::FF::FF::FF::FF::WW::WW; Domain location=367-416::434-484::502-551::576-632::709-759::126 -155::167-196
  Subcellular localization annotation: CTP_CleavageSite=45; ConfidenceScore=5.39e-01
MPGDNVGMPAQMPHFPQPGQHMPHSNQVPPVSQGVPMVYQPARPMSSAPMQQQQQTAYAGGHLLTMGAPMQPLTYTYQPTSIPPVVQPWSTGPGQSVTHVPPLVQSGHQQVSAPTTLPPVNLSEPSSSDWQEHTAAEGKKYYYNKKTRQSSWEKPVELMTPLERADASTEWKEFTTPEGRKYYFNKVTKQSKWTIPDELKVARELAENTSNQQPDRESGIATSALVRSAAFEPSTAPANQSSSAVGIIASSTHDGSSNSVLSGAPLPHNVENTSSSIVGMQNGGSSTAVVPVAASTEVPLVATDAGSSRNNDENSSLTTGADAEDGTSAEDLVEAKKTMPVAGKINVTPVEEKTSEEEPVVYATKMEAKNAFKSLLESVNVESDWTWDQTMRVIINDKRYGALKTLGERKQAFNEYLNQRKKFEAEEKRIKQRKARDDFLAMLEESKELTSSTRWSKAILMFEDDERFKAVERPREREDLFENYLVELHKKEKAKAAEEHKRYVAEYRAFLESCDFIKASTQWRKVQERLEDDERYSRLEKFDRLDIFQEYIRHLEKEEEEQKRVQKDQVRRQERKNRDGFRKMLEEHVADGTLNARTRWRDYCAQIKDSQSYLAVASNTSGSTPKELFDDVIEELGKQYQEDKTQIKEVVKSGKIPMTTSWTLEEFQTATLEDDALKGISTINIKLVYDDQLERLKEKEQKEAKKRQRLGENFSDLLYSIKEISASSTWDDSKQLFEDSQEFRALDSETYARELFEECVVHLKERLKEKERLREEEKAKREKEREEKEKKKEKEKERKEKERKEKERDHREEREKEKGKDRSRRDEMEFDGADLNTHGXKERIKEKKHLREEEKAKREEEREEKEKKKEKEKKRKGHERNDKKRDRKQAHGSDSDSENRHKRHKKDRDSSRRNGAHELEDGELGEDGEIY

SEQ ID NO: 12578 - protein, 93 aa, Zea mays
  misc_feature (37)..(37): Xaa can be any naturally occurring amino acid
  Coding DNA Sequence Number=SeqID_4891
  Gene Ontology: Cellular component=cytoplasm; Biological process =response to stress
  Homolog annotation: Hit_ID=P46517; Match level="QueryCoverage=88%, HitCoverage=90%, E-value=1e-28, Identity=79%"; Hit description=Late embryogenesis abundant protein EMB564
  Pfam annotation: Domain name=LEA_5; Domain location=1-94; Score =115.4; E_value=1.7e-31; Accession=PF00477.8; Description=Small hydrophilic plant seed protein
KDLSFVIRDTNELDRKAREGKTVVLGWTGGMSVQAQXHLPDRRSRGGQTRRDHLWQQGYSEMGKMGGLSTTDESGVERAGREGANIDESKFTK

SEQ ID NO: 12579 - protein, 141 aa, Zea mays
  misc_feature (59)..(59): Xaa can be any naturally occurring amino acid
  Coding DNA Sequence Number=SeqID_4892
  Gene Ontology: Mol. function=nutrient reservoir activity
  Homolog annotation: Hit_ID=Q946V8; Match level="QueryCoverage=72%, HitCoverage=42%, E-value=5e-31, Identity=70%"; Hit description=19kD alpha zein D1
SRSRTTPSGCTRVDKRWENDGCYPDRPEAVPVTWNHSGRLGVATTAPTYTEMPQCSQQXLCPPSADGYQCPTMQSYMAHEAIQASILQSLALTLQQPYALLQQPSLVHLYLQRIAAQQLQQQLLPTINQGVAANLAGYLQQ

SEQ ID NO: 12580 - protein, 201 aa, Zea mays
  misc_feature (41)..(201): Xaa can be any naturally occurring amino acid
  Coding DNA Sequence Number=SeqID_4893
CARAFFILLHPTASGVSPPQKNHTHKHTHIHMIRHLINRRXXXXXXXXXXXXXXXXXXXXXXXXXXXXXXXXXXXXXXXXXXXXXXXXXXXXXXXXXXXXXXXXXXXXXXXXXXXXXXXXXXXXXXXXXXXXXXXXXXXXXXXXXXXXXXXXXXXXXXXXXXXXXXXXXXXXXXXXXXXXXXXXXXXXXXXXXXXXXXXXX

SEQ ID NO: 12581 - protein, 473 aa, Zea mays
  misc_feature (294)..(294): Xaa can be any naturally occurring amino acid
  Coding DNA Sequence Number=SeqID_4895
  Gene Ontology: Mol. function=transferase activity; Cellular component= mitochondrial outer membrane; Biological process=glycolysis
  Homolog annotation: Hit_ID=Q2KNB4; Match level="QueryCoverage=93%, HitCoverage=88%, E-value=0.0, Identity=85%"; Hit description =Hexokinase-3
  Pfam annotation: Domain name=Hexokinase_1; Domain location=19-211; Score=200.4; E_value=4.4e-57; Accession=PF00349.11; Description =Hexokinase
  Pfam annotation: Domain name=Hexokinase_2; Domain location=213-466; Score=205.2; E_value=1.5e-58; Accession=PF03727.6; Description =Hexokinase
  Pfam module annotation: Pfam domain module=Hexokinase_1::Hexokinase _2; Domain location=19-211::213-466
  Subcellular localization annotation: CTP_CleavageSite=35; ConfidenceScore=5.12e-01
WDPRGRPGPFSCPCPSPLFLYFFPPLASPRLRQVVDAMVVEMHAGLASDGGSKLKMLLTFVDALPAGNEEGTYYSIDLGGTNFRVLRVEVGAGSVVTRRKVELPIPEELTKGTIEELFNFVAMTLKEFVETEDGKDEQRALGFTFSFPVRQTSVSSGSLIRWNKGFLIEDAVGKDVAQCLNEALARNGLNVRVTALVNDTVGTLALGHYHDEDTVAAVIIGAGTNACYIERTDAIIKCQGLLTNSGGMVVNMEWGNFWSSHLPRTPYDISLDDETQNRNDQGFEKMISGIYLGXIARLVLHRMALESDVFGDAADNLCTPFTLSTPLLAAIRKDDSPDLSEVRKILQEHLKIPDTPLKTRRLVVKVCDIVTRRAARLAAAGIVGILKKLGRDGSGVASSGRTGGQMRRTVVAIEGGLYEGYPVFREYLDEALVEILGEEVARTVALRVTVDGSGAGAALLAAVHSSNRQQGSI

SEQ ID NO: 12582 - protein, 165 aa, Zea mays
  misc_feature (1)..(17): Xaa can be any naturally occurring amino acid
  Coding DNA Sequence Number=SeqID_4896
  Subcellular localization annotation: CTP_CleavageSite=26; ConfidenceScore=5.11e-01
XXXXXXXXXXXXXXXXXARRRFVSPRVARAHRRLLLSPEHVVTSSCLESLEHAASSSCLKSLEHADASSRLNTPTPHQVRGEPPLPASSCPFDFWFVIAEFPLDLGKKGRISCVWASYSRVEESWAHVGRIAPISRTGPSNRAASQARTPATPPSRHAIAGSMTR

SEQ ID NO: 12583 - protein, 296 aa, Zea mays
  misc_feature (43)..(296): Xaa can be any naturally occurring amino acid
  Coding DNA Sequence Number=SeqID_4898
  Subcellular localization annotation: CTP_CleavageSite=35; ConfidenceScore=5.20e-01
RRQSHKQGRTCSTARHESSTRAGTTARKGVDTATRIGSSRSTXXXXXXXXXXXXXXXXXXXXXXXXXXXXXXXXXXXXXXXXXXXXXXXXXXXXXXXXXXXXXXXXXXXXXXXXXXXXXXXXXXXXXXXXXXXXXXXXXXXXXXXXXXXXXXXXXXXXXXXXXXXXXXXXXXXXXXXXXXXXXXXXXXXXXXXXXXXXXXXXXXXXXXXXXXXXXXXXXXXXXXXXXXXXXXXXXXXXXXXXXXXXXXXXXXXXXXXXXXXXXXXXXXXXXXXXXXXXXXXXXXXXXXXXXXXXXX

SEQ ID NO: 12584 - protein, 174 aa, Zea mays
  Coding DNA Sequence Number=SeqID_4900
  Gene Ontology: Mol. function=DNA binding; Cellular component=nucleus; Biological process=regulation of transcription
  Homolog annotation: Hit_ID=Q8H131; Match level="QueryCoverage=92%, HitCoverage=42%, E-value=6e-80, Identity=84%"; Hit description =Putative NAM (No apical meristem) protein
  Pfam annotation: Domain name=NAM; Domain location=17-144; Score =297.0; E_value=3.6e-86; Accession=PF02365.6; Description=No apical meristem (NAM) protein
PAGGSGGSSDAHEDDLVMPGFRFHPTEEELIEFYLRRKVEGKRFNVELITFLDLYRYDPWELPAMAAIGEKEWYFYVPRDRKYRNGDRPNRVTASGYWKATGADRTIKADNSRPIGLKKTLVFYSGKAPKGVRSSWIMNEYRLPPDDTDRYHKTEISFCRVYKRTGIDNGGHGH

SEQ ID NO: 12585 - protein, 247 aa, Zea mays
  Coding DNA Sequence Number=SeqID_4901
  Gene Ontology: Mol. function=metal ion binding; Biological process =ubiquitin-dependent protein catabolic process
  Homolog annotation: Hit_ID=Q7XDV5; Match level="QueryCoverage=98%, HitCoverage=28%, E-value=1e-71, Identity=53%"; Hit description =Expressed protein
LHACRFDDLPLPADSITHTTRLVHEIIGKNSGGDGLLHAERAFRIAQLELAFLNDYFYTRYPILFWRGFPLLCAWHPLLTIALIAWLARDIHKLYEPREGETAHVIKGVNVDITITWIFMGIIVLKELWKMVTYILSDWTKVMLLCEYTSRRSIGRWCMCIPFPQRMCEFLVRVLCTPRCTIVHRWHNKVGQYEFLQSFGYDPWNVPYYLSLGLLPKETKGARVSSPTELPAAVKAAVLRSICSLDL

SEQ ID NO: 12586 - protein, 431 aa, Zea mays
  misc_feature (1)..(270): Xaa can be any naturally occurring amino acid
  Coding DNA Sequence Number=SeqID_4902
  Homolog annotation: Hit_ID=Q6EPQ3; Match level="QueryCoverage=37%, HitCoverage=23%, E-value=4e-76, Identity=89%"; Hit description=SPX (SYG1/Pho81/XPR1) domain-containing protein-like
XXXXXXXXXXXXXXXXXXXXXXXXXXXXXXXXXXXXXXXXXXXXXXXXXXXXXXXXXXXXXXXXXXXXXXXXXXXXXXXXXXXXXXXXXXXXXXXXXXXXXXXXXXXXXXXXXXXXXXXXXXXXXXXXXXXXXXXXXXXXXXXXXXXXXXXXXXXXXXXXXXXXXXXXXXXXXXXXXXXXXXXXXXXXXXXXXXXXXXXXXXXXXXXXXXXXXXXXXXXXXXXXXXXXXXXXXXXXXXXXXXXXXXXXXXXXXXXXXXXXXXXXXXXXXXLIVQEDAQSGSEDLVDDQSYHFMSLMLNLVNTFLYMVNTYIIVPTADDYAVSLGAAATVCGIIIGSMAVAQVFSSVYFSAWSNKSYFKPLVFSSIVLSLGNLLYALAFDLNSLSVLLIGRLLCGLGSARAVNRRYISDCVPLKMRLQASAGFVSASALGMA

SEQ ID NO: 12587 - protein, 93 aa, Zea mays
  Coding DNA Sequence Number=SeqID_4903
  Homolog annotation: Hit_ID=Q0UGR3; Match level="QueryCoverage=50%, HitCoverage=32%, E-value=3e-12, Identity=74%"; Hit description =Putative uncharacterized protein
  Subcellular localization annotation: CTP_CleavageSite=22; ConfidenceScore=5.38e-01
AAGARRAPAAGGQSCPPCARWRATRRPGPGGRRRGGADRSETATNTGQVTEKIGGAFSCDSAIGSQFDASKDGIAGQVEKAVDGPSRPATQKK

SEQ ID NO: 12588 - protein, 144 aa, Zea mays
  misc_feature (119)..(119): Xaa can be any naturally occurring amino acid
  Coding DNA Sequence Number=SeqID_4904
  Gene Ontology: Mol. function=protein binding; Biological process =retrograde transport, endosome to Golgi
  Homolog annotation: Hit_ID=A3AR53; Match level="QueryCoverage=74%, HitCoverage=10%, E-value=5e-37, Identity=71%"; Hit description =Putative uncharacterized protein
HSSSHASGHASAHASAHASAHASADVLRENTEAVFAACDAAHGRWAKLLGVRAGLHPRLRLAEFLIIYSITEEFIPATEKIGGECVYNIRGVLHQQSNQFLYYHHNVLITKINLDLHQXTFVAIHVSDQFQSIYLSLSYTYSSI

SEQ ID NO: 12589 - protein, 110 aa, Zea mays
  Coding DNA Sequence Number=SeqID_4905
GSQASSMVQTVTTDRGAVGRGAAHDCRLGRDYFVTNVLGSMLNIVTRSHIWVEDKDLSRVDGEVFQIEAWSRPRYGEITAWSGMPTVKVAVTVDAPAVVELMMQRLMTDD

SEQ ID NO: 12590 - protein, 145 aa, Zea mays
  misc_feature (132)..(132): Xaa can be any naturally occurring amino acid
  Coding DNA Sequence Number=SeqID_4906
  Homolog annotation: Hit_ID=A2XMC6; Match level="QueryCoverage=95%, HitCoverage=25%, E-value=4e-27, Identity=52%"; Hit description =Putative uncharacterized protein
  Subcellular localization annotation: CTP_CleavageSite=32; ConfidenceScore=5.44e-01
MPSPTSYLLLNPSKPSSFRRLSAPRLSRFHVSCDTPRGGGRSGGGRREVIPAGASKAKKQIVFFDAAPPVSQEGGGAVEKAGSEKLTQVGSGNAALALLRRATKRTLSVLSNLPLAISEMFAIAALMALGTXIDQGEAPSYYFEK

SEQ ID NO: 12591 - protein, 53 aa, Zea mays
  Coding DNA Sequence Number=SeqID_4907
NSGYDSRVQARLTLIIGLYTVQVIKGRGYKTRSRECQFMLMDQLPGINRCKIK

SEQ ID NO: 12592 - protein, 145 aa, Zea mays
  Coding DNA Sequence Number=SeqID_4909
  Subcellular localization annotation: CTP_CleavageSite=39; ConfidenceScore=5.34e-01
PPVHLVSGRYLLGAQQKSFSPLKSVLPGLEMVAPPGCPRSSTAYAPGLSRAGAVLMLSVLQSSSIWYGAVLGAVLVNLVLGSSQPMLTFALCFCSGTRLRHGPECSTVRRGLRSRCRYGGLVLGSLSSSSSLVLLFCLPGRTRGY

SEQ ID NO: 12593 - protein, 35 aa, Zea mays
  Coding DNA Sequence Number=SeqID_4910
  Homolog annotation: Hit_ID=A2WZG3; Match level="QueryCoverage=82%, HitCoverage=6%, E-value=3e-07, Identity=82%"; Hit description =Putative uncharacterized protein
DSWVARKMLSSRPTMVSWGDVDKVPPYESICKRLR

SEQ ID NO: 12594 - protein, 203 aa, Zea mays
  Coding DNA Sequence Number=SeqID_4911
  Subcellular localization annotation: CTP_CleavageSite=66; ConfidenceScore=5.13e-01
SLIPRSSETDRNLGVERLRPTKLHRATASPLAVRARRQHNTLRHGRTRGRTRGRTRGRTRGAEQPRQASSPGPRVRNRSLCSSPKFQTISYQRREDLGSMAPLQQTSRSWHPNPCGSPAIRVPCVLGWSSRVVAVEIAICSRASRNRRTSFSDQEIELFEFYEAEDSEHLFGEGCLWCNLCSGKEEGVEVDLQEFQEFDEFED

SEQ ID NO: 12595 - protein, 177 aa, Zea mays
  Coding DNA Sequence Number=SeqID_4913
  Gene Ontology: Mol. function=calcium-dependent phospholipid binding; Cellular component=cytoplasm; Biological process=electron transport
  Homolog annotation: Hit_ID=A3B3J8; Match level="QueryCoverage=61%, HitCoverage=20%, E-value=7e-42, Identity=77%"; Hit description =Putative uncharacterized protein
  Pfam annotation: Domain name=Annexin; Domain location=44-109; Score =79.8; E_value=9.1e-21; Accession=PF00191.10; Description=Annexin
  Pfam annotation: Domain name=Nitroreductase; Domain location=19-155; Score=-24.6; E_value=0.014; Accession=PF00881.14; Description =Nitroreductase family
  Pfam module annotation: Pfam domain module=Annexin::Nitroreductase; Domain location=44-109::19-155
QATFERYRQDRGKAFDEVLEERRSDQLAAMLKTAVWCLTSPEKHFAEVIRRSIVGLGTDEESLTRVIVSRAEIDMKKVKDEYKVRYRTTVTSDVNGDTSGYYNSILLTLAGYLILAARSLGLDAGPMSGFDPAKVNAAFFSENNWQVNLLINLGYGEASKLHPRLPRLSFDEASKFA

SEQ ID NO: 12596 - protein, 116 aa, Zea mays
  Coding DNA Sequence Number=SeqID_4914
SRCTSYLALQDRLEGALHGRQLLVAPLPHVLHLPGLLHQLPHQLRLPALWHRTRPQAPDHHVLPDCGLHSSEREVHHRRNRPTSTCSATAAPSMYATPCHVAYCIAVTNELIHKLE

SEQ ID NO: 12597 - protein, 55 aa, Zea mays
  Coding DNA Sequence Number=SeqID_4916
NAPESPYPRHLLVTTTLQVVGALPNLEQMAQKFTINRWRMKIPCLILLVRLDLRT

SEQ ID NO: 12598 - protein, 78 aa, Zea mays
  Coding DNA Sequence Number=SeqID_4918
  Gene Ontology: Mol. function=protein transporter activity; Cellular component=clathrin adaptor complex; Biological process=intracellular protein transport
  Homolog annotation: Hit_ID=A2Y9S0; Match level="QueryCoverage=100%, HitCoverage=8%, E-value=3e-27, Identity=75%"; Hit description =Putative uncharacterized protein
ICIFICGNKCSDKVFLLQNCLEGLVRILRDVSNSSYAPEYDIGGITDPFLHIRVLKLMRILGQGDADCSEYINDILAQ

SEQ ID NO: 12599 - protein, 144 aa, Zea mays
  misc_feature (36)..(36): Xaa can be any naturally occurring amino acid
  misc_feature (65)..(65): Xaa can be any naturally occurring amino acid
  Coding DNA Sequence Number=SeqID_4919
  Gene Ontology: Mol. function=DNA binding; Cellular component =nucleosome; Biological process=regulation of transcription
  Homolog annotation: Hit_ID=Q6WLH2; Match level="QueryCoverage=54%, HitCoverage=27%, E-value=1e-30, Identity=87%"; Hit description =Single myb histone 4
IRIALDIYVCTSYLFIKQRYAVLPIFIIFLASKLHXLADSNKIEKIDKSYRLPDSLATRTPAPMXASAPQQKDPSKPSKVSKAIGLFSASSPAKPHTSIRTSRSRCCSAMVRRSRSTSLTRLPLKGRKLLPLLTATVAGSLMRR

SEQ ID NO: 12600 - protein, 187 aa, Zea mays
  Coding DNA Sequence Number=SeqID_4920
  Gene Ontology: Mol. function=DNA binding; Cellular component=nucleus; Biological process=regulation of transcription
  Homolog annotation: Hit_ID=A2XW04; Match level="QueryCoverage=94%, HitCoverage=59%, E-value=2e-29, Identity=47%"; Hit description =Putative uncharacterized protein
LACLQHTDCPSSTSFGPLSLLISRKLADLGYKRSAKKCKEKFENVHKYYKRTKEGRTGRQDGKSYRFFDELEALHAAAPQPQPPLQKQQQQLPPASTTAPPLHAFATPVSAPPPISSMPPPTGPMQPAPISSAAPAVQVQAIVELPGAHQPLNLLQGFSFSSMSESESEDDDMTAETGGSQDHLGKR

SEQ ID NO: 12601 - protein, 126 aa, Zea mays
  Coding DNA Sequence Number=SeqID_4921
PCWGPLQGRHLLQDQLHAPCWQRPQLGRLGRNHIVDLAMPCPLGCLQPVCRCPCPWSLSFYQPRGFAFKPEAPFVCRLVLLEFLFFILPFFPFPPQFLSLSWHCTNNFSSACSLWTWVVQHVMNTN

SEQ ID NO: 12602 - protein, 87 aa, Zea mays
  Coding DNA Sequence Number=SeqID_4922
  Homolog annotation: Hit_ID=Q2R3B8; Match level="QueryCoverage=64%, HitCoverage=29%, E-value=3e-16, Identity=69%"; Hit description=TPR repeat region family protein, expressed
RESGPARRSRFRNTGPPQPFRQPPEDLISIPVFAAIKSKVTVNLTNHASPETRSTPGQPWVRGWDDLRKGKDGPKFGKSGITCWKWG

SEQ ID NO: 12603 - protein, 152 aa, Zea mays
  misc_feature (12)..(12): Xaa can be any naturally occurring amino acid
  misc_feature (22)..(22): Xaa can be any naturally occurring amino acid
  Coding DNA Sequence Number=SeqID_4923
  Gene Ontology: Mol. function=oxidoreductase activity, acting on the CH-CH group of donors; Cellular component=integral to membrane; Biological process=lipid metabolic process
  Homolog annotation: Hit_ID=Q3IAA0; Match level="QueryCoverage=100%, HitCoverage=48%, E-value=5e-42, Identity=59%"; Hit description=TSC13 protein
  Pfam annotation: Domain name=Steroid_dh; Domain location=1-153; Score= -24.8; E_value=0.00018; Accession=PF02544.7; Description=3-oxo-5 -alpha-steroid 4-dehydrogenase
PLSNVFRNCAYXWNLGAYIGFXCNHPLDPPMRGLQKKNGVGFGGRWPGPNFLWPNLGGETLRNPNREAGGYQTPGGFWLTFGTCPNNTTEIYQGVGFTMATQTVAGTFFFVWPAGLLTNWALGNHSRLKKLFDGKDGRPKSPRRGVILPPFL

SEQ ID NO: 12604 - protein, 102 aa, Zea mays
  Coding DNA Sequence Number=SeqID_4924
DTTKKTGHAKKKNPLIGESSLGSYHSTPITFLLPTLENGDAKKHDPLLVSHLHPQLLERDTLWGVKLCPKICSIWHELQRSTRKNVVPESFGIYFVAVASLK

SEQ ID NO: 12605 - protein, 65 aa, Zea mays
  Coding DNA Sequence Number=SeqID_4926
  Subcellular localization annotation: CTP_CleavageSite=17; ConfidenceScore=5.27e-01
RDLTNTASLNTISALPPFSTKRSLSSPCGSLALCHPCKRITLVPWHWSTAGLYVLNLPLGHPLDV

SEQ ID NO: 12606 - protein, 592 aa, Zea mays
  misc_feature (93)..(93): Xaa can be any naturally occurring amino acid
  misc_feature (459)..(459): Xaa can be any naturally occurring amino acid
  Coding DNA Sequence Number=SeqID_4928
  Gene Ontology: Mol. function=cytokinin dehydrogenase activity; Cellular component=extracellular region; Biological process =cytokinin metabolic process
  Homolog annotation: Hit_ID=Q4ADV8; Match level="QueryCoverage=85%, HitCoverage=86%, E-value=1e-145, Identity=56%"; Hit description =Cytokinin oxidase/dehydrogenase
  Pfam annotation: Domain name=Cytokin-bind; Domain location=275-585; Score=490.1; E_value=2.6e-144; Accession=PF09265.1; Description =Cytokinin dehydrogenase 1, FAD and cytok
  Pfam annotation: Domain name=FAD_binding_4; Domain location=85-243; Score=82.1; E_value=1.8e-21; Accession=PF01565.13; Description=FAD binding domain
  Pfam module annotation: Pfam domain module=Cytokin-bind::FAD_binding _4; Domain location=275-585::85-243
  Subcellular localization annotation: CTP_CleavageSite=14; ConfidenceScore=5.23e-01
SKTSIKQLGRSLARATTSTVAALCFLLSCVSATPSTLAASSAIIHDIIRGLADTTAARVRTDAEATARAFTDFGTNATEDDAARPAAVFYPVXAADIAALLRASSASASPFPVSARGRGHSTRGQATAPGGVVVDMASLAVAAGRDETATTNASSTSASARLAVSVDGRYIDAGGEQLWVDVLHAALAHGLTPRSWTDYLRLTVGGTLSNAGISGQAFRHGPQISNVLELDVVTGTGDMVTCSKEKDADLFDAVLGGLGQFGIITRARIPLAPAPARARWLRLLYTGAADLTADQERLIADDERRGGALAGLMDYVEGSVVTDLQQGLIGSWRSQPPPSSSSLYSESATDAARIAALAEEAGGVLYFLEGAVYYGGASDTTAADVDKRVDVMLRELRYARGFAYVQDVSYEQFLDRVSAGERRLRGEGLWDVPHPWLNLFLPRSRILDFAAGVFHGVLXSPRPAAAAAGPGVVYPMNRGKWDGATSAVLPYDDGDGDEVFYTVGILRSAVADGDLRRMEEQNAEVARFCEAAGIPCTQYLPAYATQADWAARHFGPAGSGRWDTFLRRKRKYDPMAILSRGQRIFSSPLLAS

SEQ ID NO: 12607 - protein, 82 aa, Zea mays
  Coding DNA Sequence Number=SeqID_4929
  Subcellular localization annotation: CTP_CleavageSite=42; ConfidenceScore=5.53e-01
RLMEKSFGLENYQLTNTLSVKLVWYSRRSSGSFGSRNGNVVRCGTLLKLGFNTTGTRSFPRSRNGTNVPGTRNVAKFPVPGY

SEQ ID NO: 12608 - protein, 226 aa, Zea mays
  Coding DNA Sequence Number=SeqID_4931
QLVLPEQVELQRARARGYRSALAPRARSVACRRRSPAPHCCVGLAEQLSQLAAPSGSRNAASPQMAGRRLVTLTLLAAAFLAAAPGGAGTKPSAKFELIHPAQAPVGPGDAHGPRAHGIHLLRTTSPPDGSGPGPSPNPKQSPGQRSPSPWPFPLGGGNRGQEKEPSCPFPSGPTPRPAPFLLLGPKTGQAPLNPGVHEGPTDNNNFLSPQGHAPRSFSSTVHPGR

SEQ ID NO: 12609 - protein, 115 aa, Zea mays
  Coding DNA Sequence Number=SeqID_4933
PLERSSFFFFFFFFFFFFFFLFGFFFLFWATLEDPIPHCSTRKQTCTLSYTIKHVYTKPISPLLGTLQNLSIMSNLRNTTCFWFPSGSLCCTLDLMGQALTMDHLLPPPPFFSSG

SEQ ID NO: 12610 - protein, 172 aa, Zea mays
  Coding DNA Sequence Number=SeqID_4935
KDVPIGAIRPKADEEDVQNVDMASASNVADACENAWGHANEDTFVSHEQARVQAEDVDAPGSSSQVVNRRNSSLLQAHPQNQIIRSPSQGVITRSHRHASFIEHHFFVSCVEPTCIDEALQVWGTDIPWVHWKDKRPHERPKGPINRKVIPSWAWGGTTSEANRHKAGSEQA

SEQ ID NO: 12611 - protein, 129 aa, Zea mays
  Coding DNA Sequence Number=SeqID_4937
  Subcellular localization annotation: CTP_CleavageSite=89; ConfidenceScore=5.33e-01
LPLARPEFLCSAMAAVELPARAYLPPMARPPRSDLAPVRRRFSLRRAPSSFPQRRRAQPWSPCACVFSARRRFSLLRASISSAVKLLPRAHMATYRRCSSLHHRNFWCRLPWNPARQHKHLACVFPVTP

SEQ ID NO: 12612 - protein, 83 aa, Zea mays
  Coding DNA Sequence Number=SeqID_4938
  Gene Ontology: Mol. function=catalytic activity
  Homolog annotation: Hit_ID=A7NTU5; Match level="QueryCoverage=59%, HitCoverage=11%, E-value=2e-14, Identity=79%"; Hit description =Chromosome chr18 scaffold_1, whole genome shotgun sequence
DTPVIYTKESLLNNVLAAIPPKLTSEEWSAALPRALVAGFVKTDKDFQTKIRTMESHRMRVGALAWSSLLSSRSRDRSILHHD

SEQ ID NO: 12613 - protein, 98 aa, Zea mays
  Coding DNA Sequence Number=SeqID_4939
  Subcellular localization annotation: CTP_CleavageSite=55; ConfidenceScore=5.69e-01
LDPLVAPPFFSLLPKSFFFFFFFFCVSSGNGPCARRFSIAAISFLKGTGGNVNLSAQRESPIHACLVWPKKIGEQSSGQHERQGSNFQGSLIYRKLGL

SEQ ID NO: 12614 - protein, 54 aa, Zea mays
  Coding DNA Sequence Number=SeqID_4941
NSLPALLRAFRCRHHFGHLDQHETFSGNRLGSYAARNPPLGIWELSKSHPPGFL

SEQ ID NO: 12615 - protein, 64 aa, Zea mays
  Coding DNA Sequence Number=SeqID_4943
RLFDRATGTLYDNSRWAETEAPRIREFHMSARCQRKLKFPLKGILRAQEGCCLSVRGSFLDSWG

SEQ ID NO: 12616 - protein, 87 aa, Zea mays
  Coding DNA Sequence Number=SeqID_4945
GQAELTRGMLKLCSPCVAASKSHTSYKPEANKRKSLGCIKGQPTNIKCDALRINFAPGQAGVPAELIKRPIHVERLMAIGAPGGKFF

SEQ ID NO: 12617 - protein, 114 aa, Zea mays
  misc_feature (72)..(72): Xaa can be any naturally occurring amino acid
  Coding DNA Sequence Number=SeqID_4947
  Gene Ontology: Mol. function=RNA polymerase II transcription factor activity; Cellular component=transcription factor TFIIE complex; Biological process=transcription initiation from RNA polymerase II promoter
  Homolog annotation: Hit_ID=A2YU74; Match level="QueryCoverage=79%, HitCoverage=29%, E-value=5e-17, Identity=90%"; Hit description =Putative uncharacterized protein
  Subcellular localization annotation: CTP_CleavageSite=39; ConfidenceScore=5.14e-01
MQAGNQKLRSTPHARHASVVFATMNSIEPFNRLVRLAARAFYDVSMKGDNQPKTSRGDNRGMAVVVLDALTXSAKNAKAHNAAAANDGQPIAKEGEEKVKLHTHSYCCLDYAQI

SEQ ID NO: 12618 - protein, 152 aa, Zea mays
  misc_feature (149)..(149): Xaa can be any naturally occurring amino acid
  Coding DNA Sequence Number=SeqID_4948
  Subcellular localization annotation: CTP_CleavageSite=41; ConfidenceScore=5.38e-01
HSAVKSSFCSKQLVPLENKFSSLVFMTPVTCSLVFPSINLSASTSKYIRNGIHPCDRHPVFFLSNGYIVSIMEEVILSVLSMEALGDDVVADGEERRTTLAAVHVCVLVVDLKRRSISTGSVSASGESFCCVTDGVTARWQSSCWSARXQLG

SEQ ID NO: 12619 - protein, 217 aa, Zea mays
  misc_feature (42)..(217): Xaa can be any naturally occurring amino acid
  Coding DNA Sequence Number=SeqID_4949
DRSSSGCHGRMGRTAILNSCRKTNVIVKVRYLEHRQHSILMXXXXXXXXXXXXXXXXXXXXXXXXXXXXXXXXXXXXXXXXXXXXXXXXXXXXXXXXXXXXXXXXXXXXXXXXXXXXXXXXXXXXXXXXXXXXXXXXXXXXXXXXXXXXXXXXXXXXXXXXXXXXXXXXXXXXXXXXXXXXXXXXXXXXXXXXXXXXXXXXXXXXXXXXXXXXXXXX

SEQ ID NO: 12620 - protein, 123 aa, Zea mays
  misc_feature (85)..(85): Xaa can be any naturally occurring amino acid
  misc_feature (95)..(95): Xaa can be any naturally occurring amino acid
  Coding DNA Sequence Number=SeqID_4950
  Subcellular localization annotation: CTP_CleavageSite=101; ConfidenceScore=5.55e-01
KFIGGGFVFKNTNFWGGAPFFFLKKNVFFFRRGGSLKTKQKNFFWGGPPFPPGGYPFFFKKKKKTAFLFFFWGGGKKKKQFFFYXWGARPLLLFXFLFFLKKKKVFGGGFFFFFFYGKDLFSF

SEQ ID NO: 12621 - protein, 192 aa, Zea mays
  misc_feature (1)..(148): Xaa can be any naturally occurring amino acid
  Coding DNA Sequence Number=SeqID_4952
XXXXXXXXXXXXXXXXXXXXXXXXXXXXXXXXXXXXXXXXXXXXXXXXXXXXXXXXXXXXXXXXXXXXXXXXXXXXXXXXXXXXXXXXXXXXXXXXXXXXXXXXXXXXXXXXXXXXXXXXXXXXXXXXXXXXXXXXXXXXXXXXXXXXQKARWEIVLCIQLKIHLVKTTCQTVFIKLQVLLSKIQVTFSYIL

SEQ ID NO: 12622 - protein, 201 aa, Zea mays
  Coding DNA Sequence Number=SeqID_4953
  Gene Ontology: Mol. function=protein binding; Cellular component =nucleus; Biological process=establishment of ommatidial polarity
  Homolog annotation: Hit_ID=Q655S9; Match level="QueryCoverage=97%, HitCoverage=54%, E-value=4e-49, Identity=54%"; Hit description=Zinc finger POZ domain protein-like
  Pfam annotation: Domain name=BTB; Domain location=15-134; Score=77.5; E_value=4.4e-20; Accession=PF00651.21; Description=BTBPOZ domain
ILLPVPPPSDLHQHFGELLESKDGADVTFRVSASGESFAAHKVILAARSSVFKAEFFGGVQEQERSSAYVIRDMEAAVFRSMLRFIYTDMAPELDGAQEPDAAAAMAKHLLVAADRYGLNRLKLMCECKLSGGIDIGTAAATLALAEQHNCSLLKAKCLEFVTKSPETLDAVLATDGYAHLVARCPLVLTELVRAACGRKI

SEQ ID NO: 12623 - protein, 59 aa, Zea mays
  Coding DNA Sequence Number=SeqID_4954
KPRVSPTSSIIPKFQHKNQLNYHESQRISPRKPKFISALWGKSKPGIPAFISGLRKLRT

SEQ ID NO: 12624 - protein, 151 aa, Zea mays
  Coding DNA Sequence Number=SeqID_4956
  Homolog annotation: Hit_ID=Q9AV09; Match level="QueryCoverage=78%, HitCoverage=20%, E-value=7e-33, Identity=61%"; Hit description =Putative uncharacterized protein OSJNBb0014I11.11
YKVDDGGTTADIAARTLLSMFQHSSECVAHRPGSSNQTAAQKVDDEPQPSLDSFEKTVLDSEETKDDGRSFSVAPPFKEGPACRIKLKRGRGMRNFQREIVPGLLLGRQEICEDLKAIGYEAKKARSRKPRKGPGASSARPRPRKRGAAKH

SEQ ID NO: 12625 - protein, 334 aa, Zea mays
  misc_feature (46)..(334): Xaa can be any naturally occurring amino acid
  Coding DNA Sequence Number=SeqID_4957
LAGWCSNQNLELSLNDKVVLNPAVFLYKFHVICLTSFYVFTFYITXXXXXXXXXXXXXXXXXXXXXXXXXXXXXXXXXXXXXXXXXXXXXXXXXXXXXXXXXXXXXXXXXXXXXXXXXXXXXXXXXXXXXXXXXXXXXXXXXXXXXXXXXXXXXXXXXXXXXXXXXXXXXXXXXXXXXXXXXXXXXXXXXXXXXXXXXXXXXXXXXXXXXXXXXXXXXXXXXXXXXXXXXXXXXXXXXXXXXXXXXXXXXXXXXXXXXXXXXXXXXXXXXXXXXXXXXXXXXXXXXXXXXXXXXXXXXXXXXXXXXXXXXXXXXXXXXXXXXXXXXXXXXXXXX

SEQ ID NO: 12626 - protein, 415 aa, Zea mays
  misc_feature (308)..(308): Xaa can be any naturally occurring amino acid
  Coding DNA Sequence Number=SeqID_4958
  Gene Ontology: Mol. function=calcium ion binding; Cellular component =intracellular; Biological process=defense response
  Homolog annotation: Hit_ID=A2X754; Match level="QueryCoverage=84%, HitCoverage=74%, E-value=1e-149, Identity=74%"; Hit description =Putative uncharacterized protein
  Pfam annotation: Domain name=efhand; Domain location=169-197; Score =21.0; E_value=0.0043; Accession=PF00036.22; Description=EF hand
  Pfam annotation: Domain name=efhand; Domain location=203-231; Score =30.1; E_value=7.9e-06; Accession=PF00036.22; Description=EF hand
  Pfam annotation: Domain name=efhand; Domain location=289-317; Score =0.3; E_value=17; Accession=PF00036.22; Description=EF hand
  Pfam module annotation: Pfam domain module=efhand::efhand::efhand; Domain location=169-197::203-231::289-317
  Subcellular localization annotation: CTP_CleavageSite=40; ConfidenceScore=5.10e-01
MAPLRRASRLLRSAVCRLRSPAPARAFSSAAATETGAVIAAAAVAVASSGLGLWLKPPSLADSGEAPGDQISVACAGATEAREEKGWFLFADSFRRRVFFNYEKRIRLLSPPEKIFEYFASVRNREGKVYMLPADLMRAVVPVFPPSESTVVREGRLRGERSPGELHCAPSEFFMQFDTNNDGLISFAEYIFFVTLLSIHESNFTVAFKMFDIDHKGVIDREEFKKIMALMRSFNRQGSTHKDGLRIGLKVGKPVENGGVVEYFFGSDGNEPLHFDKFSKILKELHDEIIQLEFSHYDVKSSKTIPAXDFALSMVASADMNHINKLLDRVDSLVKEPDLKDIRITFEEFKAFADLRRRLEPLSMAIFAYGKLNGLLTKEDLKRAAQHAQKVITKQCIADRYNGLHCMSSWWPKLD

SEQ ID NO: 12627 - protein, 462 aa, Zea mays
  Coding DNA Sequence Number=SeqID_4959
  Gene Ontology: Mol. function=protein dimerization activity; Cellular component=nucleus; Biological process=regulation of transcription, DNA-dependent
  Homolog annotation: Hit_ID=Q7XSS9; Match level="QueryCoverage=79%, HitCoverage=66%, E-value=3e-85, Identity=48%"; Hit description=Auxin response factor 13
  Pfam annotation: Domain name=Auxin_resp; Domain location=258-334; Score=34.9; E_value=5.3e-08; Accession=PF06507.4; Description=Auxin response factor
  Pfam annotation: Domain name=B3; Domain location=114-219; Score=66.9; E_value=6.7e-17; Accession=PF02362.12; Description=B3 DNA binding domain
  Pfam module annotation: Pfam domain module=Auxin_resp::B3; Domain location=258-334::114-219
MEPQPPLPLANGHGNSIVDRDVWLACAAPLSRLPTVGDDVYYFPDGHAEQCPAHLPAPLPAPHFFPCTVTDISLGADDKTDEVFAKISLRPGLAAASRPDPGSSNSPPREPLSYSIKELSQSDANGGGSFCVPRYCGDHVWPKVDFEADPPMQNLVMHDTTGKQWEFRHVYRAKQPRHVLTTGWSKFVNAKLLVAGDIIVFMRRPNGDLIVGLRRMPRYAGTLHRPGTGGDAQDPDQPPPPPPRNALARVPPKDVMEAARLAAEGRPFTVTYYPRKAAGEFVVPRNEVEGVLDTLWEPGSHVLMQFAEAEDTRRTMWADGHVKAIHQKIWRALEIDWDVASSAISAQLGRFVNAWQVQRIAYPSICGGLGDLCYPLPLMESESQVMAMILEQMPPRTSASPPNNPPRPGPGQKVNTIMLFGATIHVVQSDTDDDGYEQLNRDPPPNAAGGGDDMDHDSAENI

SEQ ID NO: 12628 - protein, 396 aa, Zea mays
  Coding DNA Sequence Number=SeqID_4960
  Gene Ontology: Mol. function=catalytic activity; Biological process =cellular metabolic process
  Homolog annotation: Hit_ID=Q60DC5; Match level="QueryCoverage=100%, HitCoverage=100%, E-value=0.0, Identity=82%"; Hit description =Progesterone 5-beta-reductase, putative
  Pfam annotation: Domain name=Epimerase; Domain location=31-282; Score= -36.3; E_value=0.00019; Accession=PF01370.11; Description=NAD dependent epimerasedehydratase family
MSWWWTGAIGAVKKRQDEQAGGAEPSYQSVALVVGSTGIVGTSLLDILPLSDTPAGPWKVYAVSRRPLPPWSPAPSPAVTHLHLDLADSAAVAEALQPLTDITHVFFVAWTSRPTEAENREANSAMLRNVLSVVVPNCPALVHVCLQTGRKHYVGPFEAIGKVAAPDPPFTEDMPRLDCPNFYYDMEDILFHEVSRRDGAVSWSVHRPTTVFGYSPRSAMNLVGSLCVYAAICRKEGTTLRWPGSRVTWEGFSDASDADLIAEHEIWAAVDPFAKNEAFNCSNGDLFKWKQLWPILADHFGLEWAGYEGEENRFKLEEVMAGKEAVWAEIVRENDLIATELDEITNWWFVDAMFAVETQLLDSMNKSKEHGFLGFRNTVSSFNTWIEKLKVFKIVP

SEQ ID NO: 12629 - protein, 134 aa, Zea mays
  misc_feature (99)..(99): Xaa can be any naturally occurring amino acid
  Coding DNA Sequence Number=SeqID_4961
  Gene Ontology: Mol. function=growth factor activity; Cellular component=extracellular region; Biological process=cell proliferation
  Homolog annotation: Hit_ID=Q7PCA2; Match level="QueryCoverage=100%, HitCoverage=100%, E-value=5e-12, Identity=41%"; Hit description =Putative phytosulfokine peptide precursor
  Pfam annotation: Domain name=PSK; Domain location=16-133; Score=58.3; E_value=2.5e-14; Accession=PF06404.3; Description=Phytosulfokine precursor protein (PSK
MERGRSSTSCRSLLLLLLVCFSHGAGAAAAARLLTPLQAAAAVPPPLALHQAESNGATAAAADDGLVMTQEGDADATSNGNDDDEISSVSESETMTGAXEACGTEGNDEEECLQRRLLGDAHLDYIYTQHKGKP

SEQ ID NO: 12630 - protein, 236 aa, Zea mays
  misc_feature (185)..(185): Xaa can be any naturally occurring amino acid
  Coding DNA Sequence Number=SeqID_4962
  Gene Ontology: Mol. function=transcription factor activity; Cellular component=nucleus; Biological process=regulation of transcription
  Homolog annotation: Hit_ID=A2Y6G3; Match level="QueryCoverage=100%, HitCoverage=89%, E-value=6e-56, Identity=50%"; Hit description =Putative uncharacterized protein
  Pfam annotation: Domain name=TCP; Domain location=43-230; Score =117.3; E_value=4.7e-32; Accession=PF03634.4; Description=TCP family transcription factor
EMISGNLTNEDLGAGRTKAEGPTTAAGAVVAKSPVLPSSRHWPPSTESRIVRVSRVFGGKDRHSKVRTVKGLRDRRVRLSVPTAIQLYDLQDRLGLSQPSKVVDWLLDAAQHEIDKLPPLQFPPQAAQDLVAHLPPPSMVAPFAADRADGDKRHCHGGVKGLMGLNNSIRLVNATMPLAHGLYYXPLVFYSPEGGGFTMKEEATGYQFPVQNSLDHSQGQLSLSSARSFLRPGNQG

SEQ ID NO: 12631 - protein, 144 aa, Zea mays
  Coding DNA Sequence Number=SeqID_4963
  Gene Ontology: Mol. function=protein serine/threonine kinase activity; Cellular component=myosin complex; Biological process =protein amino acid phosphorylation
  Homolog annotation: Hit_ID=A2YL76; Match level="QueryCoverage=84%, HitCoverage=20%, E-value=7e-60, Identity=92%"; Hit description =Putative uncharacterized protein
  Pfam annotation: Domain name=Pkinase; Domain location=1-116; Score= -77.1; E_value=0.00054; Accession=PF00069.15; Description=Protein kinase domain
  Pfam annotation: Domain name=Pkinase_Tyr; Domain location=1-116; Score=-79.4; E_value=1.5e-07; Accession=PF07714.7; Description =Protein tyrosine kinase
  Pfam module annotation: Pfam domain module=Pkinase::Pkinase_Tyr; Domain location=1-116::1-116
VVKVADFGVARVKDQSGVMTAETGTYRWMAPEVIEHLPYDHRADVFSFGIVLWELLTGKLPYEDMTPLQAAVAVVQKDLRPTIAVDTHPMLAELLQRCWQKDPALRPTFAEIVDILNSIKEAVRSSVHHKRHSCRSHSGRRRGC

SEQ ID NO: 12632 - protein, 242 aa, Zea mays
  misc_feature (199)..(199): Xaa can be any naturally occurring amino acid
  misc_feature (213)..(213): Xaa can be any naturally occurring amino acid
  misc_feature (215)..(215): Xaa can be any naturally occurring amino acid
  misc_feature (218)..(219): Xaa can be any naturally occurring amino acid
  misc_feature (234)..(234): Xaa can be any naturally occurring amino acid
  Coding DNA Sequence Number=SeqID_4964
  Gene Ontology: Mol. function=phospholipase D activity; Cellular component=membrane; Biological process=phosphatidylcholine metabolic process
  Homolog annotation: Hit_ID=Q43270; Match level="QueryCoverage=97%, HitCoverage=28%, E-value=1e-112, Identity=83%"; Hit description =Phospholipase D alpha 1
  Pfam annotation: Domain name=C2; Domain location=10-114; Score=39.5; E_value=1.2e-08; Accession=PF00168.20; Description=C2 domain
MAQILLHGTLHATIFEAESLSNPHRATGGAPKFIRKLVEGIEDTVGIGKGTTKIYATVDLEKARVGRTRMVSNEPVNPRWYESFHIYCAHMAADVVFTVKIDNPIGASLIGRAYLPVEDILGGDEIDKWLEIRDEKREPIGDSKIHVKLQYFDVGKDRNWARGVRSTKYPGVPYTFFSQRQGCKVTLYQDAHVGAHFFXRIPLDDGKNCDFFXLXGDXXDARSRGEHRVKVTGXSPAPCLFL

SEQ ID NO: 12633 - protein, 73 aa, Zea mays
  misc_feature (32)..(32): Xaa can be any naturally occurring amino acid
  misc_feature (45)..(45): Xaa can be any naturally occurring amino acid
  Coding DNA Sequence Number=SeqID_4965
  Gene Ontology: Mol. function=DNA binding; Cellular component =chromosome; Biological process=nucleosome assembly
  Homolog annotation: Hit_ID=P59169; Match level="QueryCoverage=91%, HitCoverage=47%, E-value=4e-26, Identity=95%"; Hit description =Histone H3.3
  Subcellular localization annotation: CTP_CleavageSite=55; ConfidenceScore=5.37e-01
MARTKQTARKSTGGKAPRKQLATKAARKSAPXTTGGVKKPHRYRXPGTVALREIRKYQKSTELLIRENGLFRG

SEQ ID NO: 12634 - protein, 120 aa, Zea mays
  misc_feature (2)..(2): Xaa can be any naturally occurring amino acid
  misc_feature (14)..(14): Xaa can be any naturally occurring amino acid
  misc_feature (18)..(18): Xaa can be any naturally occurring amino acid
  misc_feature (21)..(21): Xaa can be any naturally occurring amino acid
  misc_feature (23)..(23): Xaa can be any naturally occurring amino acid
  misc_feature (33)..(33): Xaa can be any naturally occurring amino acid
  misc_feature (38)..(38): Xaa can be any naturally occurring amino acid
  misc_feature (53)..(53): Xaa can be any naturally occurring amino acid
  Coding DNA Sequence Number=SeqID_4966
LXQGLRAPVFEGQXNLTXDRXWXHGSNMRGPSXLEAGXLQRTWSSRMVLTLTXPPRMLPGMTRLGWKAQTTAQPPRVLPEMIRLKWVAQTMAQPPRVSERGLPLILPWMFTRDLLHTPVA

SEQ ID NO: 12635 - protein, 55 aa, Zea mays
  misc_feature (6)..(6): Xaa can be any naturally occurring amino acid
  misc_feature (10)..(12): Xaa can be any naturally occurring amino acid
  misc_feature (16)..(16): Xaa can be any naturally occurring amino acid
  misc_feature (26)..(26): Xaa can be any naturally occurring amino acid
  misc_feature (31)..(32): Xaa can be any naturally occurring amino acid
  misc_feature (49)..(49): Xaa can be any naturally occurring amino acid
  misc_feature (51)..(51): Xaa can be any naturally occurring amino acid
  Coding DNA Sequence Number=SeqID_4967
LWIMRXSLNXXXYTHXSPIESSIKKXLLRIXXKPLRYQIIQYKYIYDLXNXHVSH

SEQ ID NO: 12636 - protein, 142 aa, Zea mays
  Coding DNA Sequence Number=SeqID_4969
  Gene Ontology: Mol. function=heat shock protein binding; Cellular component=intracellular; Biological process=protein folding
  Homolog annotation: Hit_ID=Q10E04; Match level="QueryCoverage=40%, HitCoverage=11%, E-value=9e-22, Identity=84%"; Hit description=Zinc finger family protein, putative, expressed
  Pfam annotation: Domain name=DnaJ; Domain location=54-91; Score=-4.6; E_value=0.012; Accession=PF00226.21; Description=DnaJ domain
TACLRFGRQRPELIRHISRWDIQVALRCGCPSIDRKVVNSGKRLRAYVGLVEGELAKKLHPDTNKGDADAPKFQEVQRAYEFFRNIFRDRDFGSRDIKVALELSFMEAVQGCSKTINFQNVCHVRNLQWEPACLLEPNLKHV

SEQ ID NO: 12637 - protein, 134 aa, Zea mays
  Coding DNA Sequence Number=SeqID_715
  Gene Ontology: Mol. function=RNA binding; Cellular component=voltage -gated potassium channel complex; Biological process=potassium ion transport
  Homolog annotation: Hit_ID=Q6K9R1; Match level="QueryCoverage=99%, HitCoverage=13%, E-value=4e-63, Identity=91%"; Hit description =Pumilio-like
  Pfam annotation: Domain name=PUF; Domain location=18-52; Score=33.3; E_value=8.7e-07; Accession=PF00806.9; Description=Pumilio-family RNA binding repeat
  Pfam annotation: Domain name=PUF; Domain location=60-94; Score=28.7; E_value=2.2e-05; Accession=PF00806.9; Description=Pumilio-family RNA binding repeat
  Pfam module annotation: Pfam domain module=PUF::PUF; Domain location =18-52::60-94
QHVLQHGKPEERSTIITQLAGQIVKMSQQKFASNVVEKCLTFGNPEQRQILITEMLGTTDENEPLQAMMKDQFANYVVQKVLEICDDQNRELILSRIKVHLNALKRYTYGKHIVARVEKLIAAGERRIGAPSSC

SEQ ID NO: 12638 - protein, 180 aa, Zea mays
  Coding DNA Sequence Number=SeqID_716
SPLLYVRARVSRPDNLGGRAVCAGGPDGHAVCRRSGSNNWYQSQVGPVHSQIKSRLTMCEGEIVGNSPTLSSESEKARFIWLRVQSPNRLAFWGSVGPRDLKPVAIRAGACVAARQLGWARRLCGRPRRTRRVSAIRFQQNRRKKKEHRFIMLEMDQSVTPAEEHDDASADDVEPSLLLP

SEQ ID NO: 12639 - protein, 173 aa, Zea mays
  misc_feature (1)..(88): Xaa can be any naturally occurring amino acid
  Coding DNA Sequence Number=SeqID_718
XXXXXXXXXXXXXXXXXXXXXXXXXXXXXXXXXXXXXXXXXXXXXXXXXXXXXXXXXXXXXXXXXXXXXXXXXXXXXXXXXXXXXXXXASDLSRSPSPPSSKQLFSPRHERCRSPAAVPPHGLVVDRARHLLVVMGNQRASPHDVVSSRHRSACGGTLIDRTMWRKSVGLTSK

SEQ ID NO: 12640 - protein, 79 aa, Zea mays
  misc_feature (60)..(60): Xaa can be any naturally occurring amino acid
  Coding DNA Sequence Number=SeqID_720
  Gene Ontology: Mol. function=threonine endopeptidase activity; Cellular component=proteasome core complex; Biological process =ubiquitin-dependent protein catabolic process
  Homolog annotation: Hit_ID=P52428; Match level="QueryCoverage=87%, HitCoverage=25%, E-value=1e-16, Identity=62%"; Hit description =Proteasome subunit alpha type-1
MIGGCSAYVGKVFRVTKHVGVALADLTADDRVLSRFLRNECINHFVYEAPLPISRLANKXACRLQLSQKKRWKKIQNSH

SEQ ID NO: 12641 - protein, 63 aa, Zea mays
  Coding DNA Sequence Number=SeqID_721
QNILFISKTEGYYMGRLHLLQVLIYSKCITYYNSRKVGTLQSLYISLTNLPPELETSSSLRNR

SEQ ID NO: 12642 - protein, 136 aa, Zea mays
  Coding DNA Sequence Number=SeqID_723
  Subcellular localization annotation: CTP_CleavageSite=44; ConfidenceScore=5.14e-01
KVGSARLVRGLRSAPSRPLRDRADSRAWTLFSSPITEAPSSGLRDGVGVARRQTRGRYRAGAIARAGRATSSKPMRGRARRGAQRGDRRSSIRRPGGGGREQAAARRQSTRRHPASGHRSELGLEGRGDWRCRLVE

SEQ ID NO: 12643 - protein, 189 aa, Zea mays
  Coding DNA Sequence Number=SeqID_725
  Subcellular localization annotation: CTP_CleavageSite=43; ConfidenceScore=5.42e-01
NFVKNLLFNNEMRPKKVIYCFFLFTPRPSRRRLPQQPQLPQPQSSPSPPQPPEFQSPPPSLLSLPPPQPPELPSSLLSLLPLALLFLHLFSLPLPQPLLCSFLRLVLRLRLLVLLGRLEQQQSLSWRRLLRVVWSLRLAPPLHLLVPQRSLLLEQSLVQPQQWPFRYDKAKDDRYKEKKKRSKMYLMLW

SEQ ID NO: 12644 - protein, 258 aa, Zea mays
  Coding DNA Sequence Number=SeqID_727
NEPFISVIKNTRVTFHHMKNNHAAAMRTDPEIEISSDEALPVGAEASGPSLVGPSSGDDDGDMSGVGDGGDDADGESDELVGPSDELVGPSDELVGPSDELVGPSDELVGPPELESGLGAGVLADEDFGAFAGEPPPEDGEALGVAEEFFLVVVGAEAVGGEVGAEAVCFGDPAAGGFGDPAAVGFGDAAPEGCLGDAAAVGEAVGELLLALALGAPAGVGGSAAKTAVMAKTATAIDRSIMVLVIFKCVNVRFSQMR

SEQ ID NO: 12645 - protein, 238 aa, Zea mays
  Coding DNA Sequence Number=SeqID_729
  Gene Ontology: Mol. function=translation elongation factor activity; Cellular component=cytoplasm; Biological process=translational elongation
  Homolog annotation: Hit_ID=Q940K8; Match level="QueryCoverage=89%, HitCoverage=82%, E-value=1e-102, Identity=87%"; Hit description =Putative uncharacterized protein At4g26310; T25K17.120
  Pfam annotation: Domain name=EFP; Domain location=118-172; Score =31.0; E_value=4.2e-06; Accession=PF01132.10; Description=Elongation factor P (EF-P)
  Pfam annotation: Domain name=EFP_N; Domain location=54-111; Score =16.9; E_value=0.00042; Accession=PF08207.2; Description=Elongation factor P (EF-P) KOW-like do
  Pfam annotation: Domain name=Elong-fact-P_C; Domain location=180-235; Score=82.7; E_value=1.2e-21; Accession=PF09285.1; Description =Elongation factor P, C-terminal
  Pfam module annotation: Pfam domain module=EFP::EFP_N::Elong-fact-P _C; Domain location=118-172::54-111::180-235
  Subcellular localization annotation: CTP_CleavageSite=75; ConfidenceScore=5.23e-01
MRGISSRSLYSLSRSLLSRVSHGITVATSGGCSGETRALGSLWSALQSRGVKVNAIQLRPGNVIERTGRTFRVVESEHKQQGRGGASIQVELRDVDNGSKLNLRFGPEESVEKVFVQEKSFTCLYTEGDTSFLIEPDTFEQVEVPLDIFGKAAVYLKEEMRVQLQLYDGRALSASVPKHVTCTIQETQLPMKGLTSAPRYKRALLDNGSTIQVPSYLEAGEKIVINTEDDSFVKRDNK

SEQ ID NO: 12646 - protein, 106 aa, Zea mays
  Coding DNA Sequence Number=SeqID_730
ARFSTIVSDFKLLHQPKQNKRPPDFTGNSTINTKEIHLQQLYWTFWASSAKHIPSLESINRLNTKISSKPLTVDQSRMISPKIAKTPESKPATPRQRDHRALESIP

SEQ ID NO: 12647 - protein, 153 aa, Zea mays
  misc_feature (1)..(1): Xaa can be any naturally occurring amino acid
  misc_feature (4)..(5): Xaa can be any naturally occurring amino acid
  misc_feature (7)..(7): Xaa can be any naturally occurring amino acid
  misc_feature (9)..(11): Xaa can be any naturally occurring amino acid
  misc_feature (21)..(21): Xaa can be any naturally occurring amino acid
  misc_feature (24)..(25): Xaa can be any naturally occurring amino acid
  misc_feature (28)..(29): Xaa can be any naturally occurring amino acid
  misc_feature (32)..(32): Xaa can be any naturally occurring amino acid
  misc_feature (37)..(37): Xaa can be any naturally occurring amino acid
  misc_feature (40)..(44): Xaa can be any naturally occurring amino acid
  misc_feature (47)..(49): Xaa can be any naturally occurring amino acid
  misc_feature (51)..(51): Xaa can be any naturally occurring amino acid
  misc_feature (54)..(54): Xaa can be any naturally occurring amino acid
  misc_feature (56)..(56): Xaa can be any naturally occurring amino acid
  misc_feature (61)..(61): Xaa can be any naturally occurring amino acid
  misc_feature (63)..(63): Xaa can be any naturally occurring amino acid
  misc_feature (66)..(67): Xaa can be any naturally occurring amino acid
  misc_feature (69)..(69): Xaa can be any naturally occurring amino acid
  misc_feature (71)..(71): Xaa can be any naturally occurring amino acid
  misc_feature (73)..(73): Xaa can be any naturally occurring amino acid
  misc_feature (81)..(81): Xaa can be any naturally occurring amino acid
  misc_feature (92)..(92): Xaa can be any naturally occurring amino acid
  misc_feature (98)..(98): Xaa can be any naturally occurring amino acid
  misc_feature (113)..(114): Xaa can be any naturally occurring amino acid
  misc_feature (128)..(128): Xaa can be any naturally occurring amino acid
  misc_feature (130)..(130): Xaa can be any naturally occurring amino acid
  misc_feature (136)..(136): Xaa can be any naturally occurring amino acid
  misc_feature (138)..(140): Xaa can be any naturally occurring amino acid
  misc_feature (142)..(143): Xaa can be any naturally occurring amino acid
  misc_feature (145)..(145): Xaa can be any naturally occurring amino acid
  Coding DNA Sequence Number=SeqID_4970
XAAXXEXIXXXKVFPQGSSSXTSXXTVXXIVXILGRXVLXXXXXHYXXXGXSVXPXRSASXLXPVXXFXIXDXSLLKYSSXSAFTLKLSLLXRRHIVXPLEAHHKPHSVEVAXXSCESHVFSALVMGXRXSAGGGXGXXXPXXLXRVGSVRDG

SEQ ID NO: 12648 - protein, 123 aa, Zea mays
  misc_feature (78)..(78): Xaa can be any naturally occurring amino acid
  misc_feature (102)..(103): Xaa can be any naturally occurring amino acid
  misc_feature (108)..(110): Xaa can be any naturally occurring amino acid
  Coding DNA Sequence Number=SeqID_4971
  Homolog annotation: Hit_ID=Q9AVH2; Match level="QueryCoverage=67%, HitCoverage=29%, E-value=1e-28, Identity=75%"; Hit description =Putative senescence-associated protein
MSQHSKVAAPKHLGARALDLELCPRWSEATPRTLRCHHCWNNPTLGEFCFTMIGRADIEGSKSNVVMNAWLPQASYPXGNFSDTSSFKLRRAKGSIGPAFTXXIRLEXXXKRAFTLLFHTRFL

SEQ ID NO: 12649 - protein, 83 aa, Zea mays
  misc_feature (12)..(12): Xaa can be any naturally occurring amino acid
  misc_feature (18)..(18): Xaa can be any naturally occurring amino acid
  misc_feature (22)..(22): Xaa can be any naturally occurring amino acid
  misc_feature (25)..(25): Xaa can be any naturally occurring amino acid
  misc_feature (30)..(30): Xaa can be any naturally occurring amino acid
  misc_feature (38)..(38): Xaa can be any naturally occurring amino acid
  misc_feature (46)..(46): Xaa can be any naturally occurring amino acid
  misc_feature (50)..(50): Xaa can be any naturally occurring amino acid
  misc_feature (52)..(52): Xaa can be any naturally occurring amino acid
  misc_feature (61)..(61): Xaa can be any naturally occurring amino acid
  misc_feature (65)..(65): Xaa can be any naturally occurring amino acid
  misc_feature (77)..(77): Xaa can be any naturally occurring amino acid
  misc_feature (81)..(81): Xaa can be any naturally occurring amino acid
  misc_feature (83)..(83): Xaa can be any naturally occurring amino acid
  Coding DNA Sequence Number=SeqID_4972
VGEKLSFHSLLXHHSAIXFFYXSRXFLFSXHLLCNLRXHVKLVEFXFVLXIXFGGVGSIFXHPGXLRLKTDSPTWTXTSTXPX

SEQ ID NO: 12650 - protein, 112 aa, Zea mays
  Coding DNA Sequence Number=SeqID_4974
  Subcellular localization annotation: CTP_CleavageSite=69; ConfidenceScore=5.04e-01
WSNLLQSVPLSAIDTLALTTSLNPKNAIIVITCYVSNTQLPSSAALTDPLCHHSLFCSTFQIVQLCKCRANTRSSFHTTTSSTPIQLPNPWFKHRKDPWKAGLSLFLSNQVQ

SEQ ID NO: 12651 - protein, 157 aa, Zea mays
  misc_feature (4)..(4): Xaa can be any naturally occurring amino acid
  misc_feature (12)..(12): Xaa can be any naturally occurring amino acid
  misc_feature (21)..(21): Xaa can be any naturally occurring amino acid
  misc_feature (23)..(24): Xaa can be any naturally occurring amino acid
  misc_feature (31)..(31): Xaa can be any naturally occurring amino acid
  misc_feature (33)..(34): Xaa can be any naturally occurring amino acid
  misc_feature (47)..(47): Xaa can be any naturally occurring amino acid
  misc_feature (52)..(53): Xaa can be any naturally occurring amino acid
  misc_feature (55)..(55): Xaa can be any naturally occurring amino acid
  misc_feature (57)..(58): Xaa can be any naturally occurring amino acid
  misc_feature (60)..(61): Xaa can be any naturally occurring amino acid
  misc_feature (63)..(63): Xaa can be any naturally occurring amino acid
  misc_feature (66)..(66): Xaa can be any naturally occurring amino acid
  misc_feature (75)..(75): Xaa can be any naturally occurring amino acid
  misc_feature (78)..(78): Xaa can be any naturally occurring amino acid
  misc_feature (89)..(89): Xaa can be any naturally occurring amino acid
  misc_feature (91)..(91): Xaa can be any naturally occurring amino acid
  misc_feature (109)..(109): Xaa can be any naturally occurring amino acid
  misc_feature (112)..(112): Xaa can be any naturally occurring amino acid
  misc_feature (117)..(120): Xaa can be any naturally occurring amino acid
  misc_feature (122)..(122): Xaa can be any naturally occurring amino acid
  misc_feature (124)..(124): Xaa can be any naturally occurring amino acid
  misc_feature (127)..(130): Xaa can be any naturally occurring amino acid
  misc_feature (132)..(157): Xaa can be any naturally occurring amino acid
  Coding DNA Sequence Number=SeqID_4976
LTLXTPPTKNGXRPPLKLICXRXXSRRIGRXQXXSLLHELTATHFDXDGVGXXLXTXXRXXSXAPXASSSSSACXTWXAFSPSGLSGGXLXSDPDTYDLLLDHAIRSEXVLXTVARXXXXPXNXPPXXXXLXXXXXXXXXXXXXXXXXXXXXXXXXX

SEQ ID NO: 12652 - protein, 160 aa, Zea mays
  misc_feature (1)..(1): Xaa can be any naturally occurring amino acid
  misc_feature (4)..(4): Xaa can be any naturally occurring amino acid
  misc_feature (6)..(10): Xaa can be any naturally occurring amino acid
  misc_feature (15)..(15): Xaa can be any naturally occurring amino acid
  misc_feature (79)..(79): Xaa can be any naturally occurring amino acid
  misc_feature (98)..(98): Xaa can be any naturally occurring amino acid
  misc_feature (146)..(146): Xaa can be any naturally occurring amino acid
  misc_feature (149)..(149): Xaa can be any naturally occurring amino acid
  Coding DNA Sequence Number=SeqID_4978
  Subcellular localization annotation: CTP_CleavageSite=27; ConfidenceScore=5.59e-01
XFPXPXXXXXASPSXASPRRPHPPEPRVQRLVQLVAEVSRRRNRTRTPPIPNFRDRREGVHRHRLVGVGGGHRFFLFFXPPFPGSPDAGPHEGGELDXEKEEEEEEKGNPQEERAGGKRAPARGLGRVGGGHCDGDARARRRGCLXRGXPHGVGRWGTGV

SEQ ID NO: 12653 - protein, 169 aa, Zea mays
  misc_feature (110)..(110): Xaa can be any naturally occurring amino acid
  misc_feature (113)..(116): Xaa can be any naturally occurring amino acid
  misc_feature (120)..(121): Xaa can be any naturally occurring amino acid
  misc_feature (125)..(125): Xaa can be any naturally occurring amino acid
  misc_feature (127)..(127): Xaa can be any naturally occurring amino acid
  misc_feature (129)..(133): Xaa can be any naturally occurring amino acid
  misc_feature (135)..(136): Xaa can be any naturally occurring amino acid
  misc_feature (138)..(164): Xaa can be any naturally occurring amino acid
  misc_feature (167)..(167): Xaa can be any naturally occurring amino acid
  Coding DNA Sequence Number=SeqID_4980
  Homolog annotation: Hit_ID=A2Y6L9; Match level="QueryCoverage=62%, HitCoverage=54%, E-value=1e-08, Identity=36%"; Hit description =Putative uncharacterized protein
HSTASPLCLLQVQSMAAPPRRNPNHGGKRKDEEPWLAAGIRPANFLPGLAIGFLLGLLLDLSSSWRPRFSLPSAPAPRGSKRAAAGSSAAPAPGEELKMVLVVRQDLKMXGWXXXXSCAXXQLSXTXIXXXXXRXXFXXXXXXXXXXXXXXXXXXXXXXXXXXXPLXFS

SEQ ID NO: 12654 - protein, 129 aa, Zea mays
  misc_feature (15)..(15): Xaa can be any naturally occurring amino acid
  misc_feature (18)..(18): Xaa can be any naturally occurring amino acid
  misc_feature (38)..(38): Xaa can be any naturally occurring amino acid
  misc_feature (45)..(45): Xaa can be any naturally occurring amino acid
  misc_feature (56)..(56): Xaa can be any naturally occurring amino acid
  misc_feature (59)..(59): Xaa can be any naturally occurring amino acid
  misc_feature (61)..(63): Xaa can be any naturally occurring amino acid
  misc_feature (66)..(67): Xaa can be any naturally occurring amino acid
  misc_feature (70)..(70): Xaa can be any naturally occurring amino acid
  misc_feature (73)..(74): Xaa can be any naturally occurring amino acid
  misc_feature (79)..(80): Xaa can be any naturally occurring amino acid
  misc_feature (82)..(87): Xaa can be any naturally occurring amino acid
  misc_feature (90)..(93): Xaa can be any naturally occurring amino acid
  misc_feature (95)..(100): Xaa can be any naturally occurring amino acid
  misc_feature (104)..(104): Xaa can be any naturally occurring amino acid
  misc_feature (109)..(109): Xaa can be any naturally occurring amino acid
  misc_feature (111)..(111): Xaa can be any naturally occurring amino acid
  misc_feature (113)..(115): Xaa can be any naturally occurring amino acid
  misc_feature (118)..(121): Xaa can be any naturally occurring amino acid
  misc_feature (125)..(127): Xaa can be any naturally occurring amino acid
  Coding DNA Sequence Number=SeqID_4981
RLAPTAATLTGEERXPEXAVLTREDRRPASTTPTPRRXLHFPRRXRTPPVLQLPDXRFXQXXXHHXXPFXFQXXSLFSXXPXXXXXXVPXXXXTXXXXXXLGIXIFHHXPXLXXXFNXXXXLLFXXXSP

SEQ ID NO: 12655 - protein, 114 aa, Zea mays
  misc_feature (45)..(45): Xaa can be any naturally occurring amino acid
  misc_feature (64)..(64): Xaa can be any naturally occurring amino acid
  misc_feature (70)..(70): Xaa can be any naturally occurring amino acid
  misc_feature (74)..(74): Xaa can be any naturally occurring amino acid
  Coding DNA Sequence Number=SeqID_4983
  Gene Ontology: Mol. function=DNA binding; Cellular component =chromosome; Biological process=nucleosome assembly
  Homolog annotation: Hit_ID=A3B4F3; Match level="QueryCoverage=92%, HitCoverage=58%, E-value=7e-33, Identity=75%"; Hit description =Histone H3
  Subcellular localization annotation: CTP_CleavageSite=31; ConfidenceScore=5.46e-01
MARTKQTARKSTGGKAPRKQLATKVARKSAPATGGVKKPHRFRPXTVALREIRKYQKSTELLIXKLPFQXLVRXDRPVLQEPNFRFQKRLPPLQERRLGSRTNLPSFARPFTPN

SEQ ID NO: 12656 - protein, 155 aa, Zea mays
  misc_feature (53)..(53): Xaa can be any naturally occurring amino acid
  misc_feature (64)..(64): Xaa can be any naturally occurring amino acid
  misc_feature (68)..(69): Xaa can be any naturally occurring amino acid
  misc_feature (71)..(71): Xaa can be any naturally occurring amino acid
  misc_feature (73)..(74): Xaa can be any naturally occurring amino acid
  misc_feature (77)..(81): Xaa can be any naturally occurring amino acid
  misc_feature (83)..(84): Xaa can be any naturally occurring amino acid
  misc_feature (86)..(86): Xaa can be any naturally occurring amino acid
  misc_feature (88)..(89): Xaa can be any naturally occurring amino acid
  misc_feature (91)..(91): Xaa can be any naturally occurring amino acid
  misc_feature (98)..(98): Xaa can be any naturally occurring amino acid
  misc_feature (100)..(101): Xaa can be any naturally occurring amino acid
  misc_feature (103)..(105): Xaa can be any naturally occurring amino acid
  misc_feature (110)..(111): Xaa can be any naturally occurring amino acid
  misc_feature (113)..(113): Xaa can be any naturally occurring amino acid
  misc_feature (117)..(119): Xaa can be any naturally occurring amino acid
  misc_feature (121)..(121): Xaa can be any naturally occurring amino acid
  misc_feature (124)..(124): Xaa can be any naturally occurring amino acid
  misc_feature (131)..(131): Xaa can be any naturally occurring amino acid
  misc_feature (133)..(135): Xaa can be any naturally occurring amino acid
  misc_feature (138)..(138): Xaa can be any naturally occurring amino acid
  misc_feature (142)..(142): Xaa can be any naturally occurring amino acid
  misc_feature (145)..(145): Xaa can be any naturally occurring amino acid
  misc_feature (149)..(151): Xaa can be any naturally occurring amino acid
  misc_feature (153)..(153): Xaa can be any naturally occurring amino acid
  misc_feature (155)..(155): Xaa can be any naturally occurring amino acid
  Coding DNA Sequence Number=SeqID_4984
  Subcellular localization annotation: CTP_CleavageSite=29; ConfidenceScore=5.49e-01
SNPSLQSKLVSSIQSQSPSSKKDPGETIRASPKLKKPCVRAPCPYPSPWPEMXSALSLPVNTNXSGRXXPXKXXKSXXXXXTXXLXPXXLXFGVAFLXDXXLXXXPPTPXXFXPPSXXXFXSPXPPRFSIXSXXXPHXLISXPSXTPLXXXPXPX

SEQ ID NO: 12657 - protein, 188 aa, Zea mays
  misc_feature (1)..(4): Xaa can be any naturally occurring amino acid
  misc_feature (6)..(6): Xaa can be any naturally occurring amino acid
  misc_feature (9)..(9): Xaa can be any naturally occurring amino acid
  misc_feature (12)..(27): Xaa can be any naturally occurring amino acid
  misc_feature (29)..(32): Xaa can be any naturally occurring amino acid
  misc_feature (36)..(37): Xaa can be any naturally occurring amino acid
  misc_feature (39)..(40): Xaa can be any naturally occurring amino acid
  misc_feature (42)..(42): Xaa can be any naturally occurring amino acid
  misc_feature (44)..(44): Xaa can be any naturally occurring amino acid
  misc_feature (46)..(47): Xaa can be any naturally occurring amino acid
  misc_feature (50)..(57): Xaa can be any naturally occurring amino acid
  misc_feature (59)..(60): Xaa can be any naturally occurring amino acid
  misc_feature (62)..(64): Xaa can be any naturally occurring amino acid
  misc_feature (66)..(68): Xaa can be any naturally occurring amino acid
  misc_feature (70)..(72): Xaa can be any naturally occurring amino acid
  misc_feature (74)..(79): Xaa can be any naturally occurring amino acid
  misc_feature (81)..(81): Xaa can be any naturally occurring amino acid
  misc_feature (84)..(96): Xaa can be any naturally occurring amino acid
  misc_feature (98)..(101): Xaa can be any naturally occurring amino acid
  misc_feature (103)..(104): Xaa can be any naturally occurring amino acid
  misc_feature (106)..(106): Xaa can be any naturally occurring amino acid
  misc_feature (110)..(110): Xaa can be any naturally occurring amino acid
  misc_feature (112)..(112): Xaa can be any naturally occurring amino acid
  misc_feature (114)..(114): Xaa can be any naturally occurring amino acid
  misc_feature (116)..(117): Xaa can be any naturally occurring amino acid
  misc_feature (119)..(120): Xaa can be any naturally occurring amino acid
  misc_feature (122)..(122): Xaa can be any naturally occurring amino acid
  misc_feature (129)..(130): Xaa can be any naturally occurring amino acid
  misc_feature (135)..(135): Xaa can be any naturally occurring amino acid
  misc_feature (141)..(141): Xaa can be any naturally occurring amino acid
  misc_feature (143)..(143): Xaa can be any naturally occurring amino acid
  misc_feature (147)..(148): Xaa can be any naturally occurring amino acid
  misc_feature (151)..(151): Xaa can be any naturally occurring amino acid
  misc_feature (154)..(154): Xaa can be any naturally occurring amino acid
  misc_feature (188)..(188): Xaa can be any naturally occurring amino acid
  Coding DNA Sequence Number=SeqID_4986
XXXXRXNDXWRXXXXXXXXXXXXXXXXFXXXXVAAXXHXXRXGXVXXKSXXXXXXXXTXXVXXXVXXXVXXXWXXXXXXSXCEXXXXXXXXXXXXXPXXXXFXXTXKGRXCXDXLXXRXXSXARKKISXXGEGEXQGGIEXEXPTLXXLPXQSXCVLLRPPMSTAPDQYSSVAVVLVGGRMHLVCQTX

SEQ ID NO: 12658 - protein, 157 aa, Zea mays
  misc_feature (113)..(113): Xaa can be any naturally occurring amino acid
  misc_feature (115)..(115): Xaa can be any naturally occurring amino acid
  misc_feature (118)..(118): Xaa can be any naturally occurring amino acid
  misc_feature (121)..(135): Xaa can be any naturally occurring amino acid
  misc_feature (137)..(157): Xaa can be any naturally occurring amino acid
  Coding DNA Sequence Number=SeqID_4988
IDVTPALSPLCVELPARTHALDHCRRSLLGTYGRAIRRILFSQQCVWRRWRQEEPTALGAAHHARSPTGAASCHHLTTSPPRRTVRFGARRAGGKQSDPLPRVGRWSPAGQRXVXARXLAXXXXXXXXXXXXXXXPXXXXXXXXXXXXXXXXXXXXX

SEQ ID NO: 12659 - protein, 91 aa, Zea mays
  misc_feature (12)..(12): Xaa can be any naturally occurring amino acid
  misc_feature (37)..(37): Xaa can be any naturally occurring amino acid
  misc_feature (45)..(46): Xaa can be any naturally occurring amino acid
  misc_feature (48)..(48): Xaa can be any naturally occurring amino acid
  misc_feature (50)..(53): Xaa can be any naturally occurring amino acid
  misc_feature (55)..(55): Xaa can be any naturally occurring amino acid
  Coding DNA Sequence Number=SeqID_4990
  Gene Ontology: Mol. function=structural constituent of ribosome; Cellular component=intracellular; Biological process=translation
  Homolog annotation: Hit_ID=A2YRD5; Match level="QueryCoverage=48%, HitCoverage=64%, E-value=2e-16, Identity=93%"; Hit description =Putative uncharacterized protein
  Pfam annotation: Domain name=Ribosomal_L34e; Domain location=5-88; Score=18.1; E_value=2.2e-05; Accession=PF01199.8; Description =Ribosomal protein L34e
MVQRLTYRKRYXYATKSNQTRVVKTPGGRLVYQYTKXRASGPKCXXVXGXXXXGXIFTEYKPDNPLHLSHFSFPPLPSYLLIFTSFCLSIH

SEQ ID NO: 12660 - protein, 151 aa, Zea mays
  misc_feature (119)..(119): Xaa can be any naturally occurring amino acid
  misc_feature (148)..(149): Xaa can be any naturally occurring amino acid
  Coding DNA Sequence Number=SeqID_4991
  Homolog annotation: Hit_ID=Q7XIH8; Match level="QueryCoverage=72%, HitCoverage=41%, E-value=4e-35, Identity=70%"; Hit description =Putative uncharacterized protein OJ1019_E02.18
IAAACSSNVSASCSDSDSEDLRLLLPNLLPASAAAAPSSEAQLHQFHLPALPSPITVRTIPSLGLTFQLWPSATTLLRFLPASPHLLPRPPAAHCPLSILELGSGTGAAGLALAAALPXHTVLSDLPAALPNLRHNASLNAPLLDSRXXSV

SEQ ID NO: 12661 - protein, 178 aa, Zea mays
  misc_feature (1)..(2): Xaa can be any naturally occurring amino acid
  misc_feature (4)..(4): Xaa can be any naturally occurring amino acid
  misc_feature (6)..(10): Xaa can be any naturally occurring amino acid
  misc_feature (12)..(13): Xaa can be any naturally occurring amino acid
  misc_feature (15)..(19): Xaa can be any naturally occurring amino acid
  misc_feature (21)..(23): Xaa can be any naturally occurring amino acid
  misc_feature (25)..(27): Xaa can be any naturally occurring amino acid
  misc_feature (29)..(38): Xaa can be any naturally occurring amino acid
  misc_feature (41)..(45): Xaa can be any naturally occurring amino acid
  misc_feature (48)..(54): Xaa can be any naturally occurring amino acid
  misc_feature (56)..(67): Xaa can be any naturally occurring amino acid
  misc_feature (69)..(74): Xaa can be any naturally occurring amino acid
  misc_feature (76)..(76): Xaa can be any naturally occurring amino acid
  misc_feature (78)..(79): Xaa can be any naturally occurring amino acid
  misc_feature (81)..(83): Xaa can be any naturally occurring amino acid
  misc_feature (125)..(125): Xaa can be any naturally occurring amino acid
  Coding DNA Sequence Number=SeqID_4992
XXGXRXXXXXKXXKXXXXXKXXXRXXXGXXXXXXXXXXVRXXXXXAGXXXXXXXGXXXXXXXXXXXXPXXXXXXRXRXXEXXXPPQTQMGPKGPRSGPSGHRRPAARHAAPQPTATPSRQGRSRXADSAAEPHRRPPSSTAAWRREPRIHLLASGEGMSAAAGAIRATPVDSVGGGEG

SEQ ID NO: 12662 - protein, 175 aa, Zea mays
  misc_feature (77)..(77): Xaa can be any naturally occurring amino acid
  misc_feature (82)..(82): Xaa can be any naturally occurring amino acid
  misc_feature (87)..(90): Xaa can be any naturally occurring amino acid
  misc_feature (92)..(92): Xaa can be any naturally occurring amino acid
  misc_feature (94)..(94): Xaa can be any naturally occurring amino acid
  misc_feature (97)..(97): Xaa can be any naturally occurring amino acid
  misc_feature (100)..(100): Xaa can be any naturally occurring amino acid
  misc_feature (102)..(103): Xaa can be any naturally occurring amino acid
  misc_feature (106)..(110): Xaa can be any naturally occurring amino acid
  misc_feature (112)..(117): Xaa can be any naturally occurring amino acid
  misc_feature (121)..(121): Xaa can be any naturally occurring amino acid
  misc_feature (123)..(130): Xaa can be any naturally occurring amino acid
  misc_feature (132)..(132): Xaa can be any naturally occurring amino acid
  misc_feature (134)..(136): Xaa can be any naturally occurring amino acid
  misc_feature (138)..(146): Xaa can be any naturally occurring amino acid
  misc_feature (148)..(148): Xaa can be any naturally occurring amino acid
  misc_feature (151)..(153): Xaa can be any naturally occurring amino acid
  misc_feature (155)..(155): Xaa can be any naturally occurring amino acid
  misc_feature (157)..(157): Xaa can be any naturally occurring amino acid
  misc_feature (159)..(159): Xaa can be any naturally occurring amino acid
  misc_feature (162)..(162): Xaa can be any naturally occurring amino acid
  misc_feature (164)..(164): Xaa can be any naturally occurring amino acid
  misc_feature (166)..(171): Xaa can be any naturally occurring amino acid
  misc_feature (173)..(175): Xaa can be any naturally occurring amino acid
  Coding DNA Sequence Number=SeqID_4994
  Subcellular localization annotation: CTP_CleavageSite=80; ConfidenceScore=5.54e-01
IGPVASPSSWHHHHLVAVSRDPSGSPSRPLARVLGVGWAVLLEGSLSATHSAPSFCPRSRRLGLVIAVIISTGHRFXVLVAXLVRTXXXXYXQXAGXLSXCXXAPXXXXXRXXXXXXFPFXCXXXXXXXXLXHXXXTXXXXXXXXXPXIPXXXPXFXFXFSXFXSXXXXXXLXXX

SEQ ID NO: 12663 - protein, 180 aa, Zea mays
  misc_feature (1)..(1): Xaa can be any naturally occurring amino acid
  misc_feature (6)..(6): Xaa can be any naturally occurring amino acid
  misc_feature (10)..(12): Xaa can be any naturally occurring amino acid
  misc_feature (17)..(21): Xaa can be any naturally occurring amino acid
  misc_feature (25)..(27): Xaa can be any naturally occurring amino acid
  misc_feature (30)..(32): Xaa can be any naturally occurring amino acid
  misc_feature (34)..(35): Xaa can be any naturally occurring amino acid
  misc_feature (40)..(40): Xaa can be any naturally occurring amino acid
  misc_feature (43)..(44): Xaa can be any naturally occurring amino acid
  misc_feature (47)..(48): Xaa can be any naturally occurring amino acid
  misc_feature (50)..(50): Xaa can be any naturally occurring amino acid
  misc_feature (52)..(52): Xaa can be any naturally occurring amino acid
  misc_feature (54)..(54): Xaa can be any naturally occurring amino acid
  misc_feature (57)..(58): Xaa can be any naturally occurring amino acid
  misc_feature (63)..(63): Xaa can be any naturally occurring amino acid
  misc_feature (70)..(71): Xaa can be any naturally occurring amino acid
  misc_feature (74)..(74): Xaa can be any naturally occurring amino acid
  misc_feature (76)..(76): Xaa can be any naturally occurring amino acid
  misc_feature (78)..(79): Xaa can be any naturally occurring amino acid
  misc_feature (87)..(87): Xaa can be any naturally occurring amino acid
  misc_feature (89)..(89): Xaa can be any naturally occurring amino acid
  misc_feature (94)..(94): Xaa can be any naturally occurring amino acid
  misc_feature (102)..(102): Xaa can be any naturally occurring amino acid
  misc_feature (116)..(116): Xaa can be any naturally occurring amino acid
  misc_feature (119)..(119): Xaa can be any naturally occurring amino acid
  misc_feature (123)..(123): Xaa can be any naturally occurring amino acid
  misc_feature (133)..(136): Xaa can be any naturally occurring amino acid
  misc_feature (139)..(140): Xaa can be any naturally occurring amino acid
  misc_feature (143)..(143): Xaa can be any naturally occurring amino acid
  misc_feature (145)..(148): Xaa can be any naturally occurring amino acid
  misc_feature (150)..(150): Xaa can be any naturally occurring amino acid
  misc_feature (152)..(152): Xaa can be any naturally occurring amino acid
  misc_feature (154)..(155): Xaa can be any naturally occurring amino acid
  misc_feature (159)..(160): Xaa can be any naturally occurring amino acid
  misc_feature (162)..(162): Xaa can be any naturally occurring amino acid
  misc_feature (164)..(165): Xaa can be any naturally occurring amino acid
  misc_feature (167)..(168): Xaa can be any naturally occurring amino acid
  misc_feature (172)..(177): Xaa can be any naturally occurring amino acid
  Coding DNA Sequence Number=SeqID_4996
XDAVAXLVVXXXRTPKXXXXXLSSXXXPMXXXKXXRRMTXGGXXAGXXVXDXGXAQXXPVDRXRVISAYXXPSXSXWXXCEIRKYQXSXELLIXRFPFQRLXPRDSRRIPRPTSAXSPXAVPXPGRWPRQAYXXXXSFXXTQXPXXXXGXAXSXXMPPXXFXFXXAXXPPVXXXXXXPLK

SEQ ID NO: 12664 - protein, 147 aa, Zea mays
  misc_feature (26)..(26): Xaa can be any naturally occurring amino acid
  misc_feature (75)..(75): Xaa can be any naturally occurring amino acid
  misc_feature (82)..(82): Xaa can be any naturally occurring amino acid
  misc_feature (122)..(123): Xaa can be any naturally occurring amino acid
  misc_feature (127)..(128): Xaa can be any naturally occurring amino acid
  misc_feature (136)..(136): Xaa can be any naturally occurring amino acid
  misc_feature (141)..(142): Xaa can be any naturally occurring amino acid
  Coding DNA Sequence Number=SeqID_4998
  Gene Ontology: Mol. function=structural constituent of ribosome; Cellular component=ribonucleoprotein complex; Biological process =translation
  Homolog annotation: Hit_ID=P49210; Match level="QueryCoverage=97%, HitCoverage=72%, E-value=2e-30, Identity=59%"; Hit description=60S ribosomal protein L9
  Pfam annotation: Domain name=Ribosomal_L6; Domain location=12-89; Score=25.0; E_value=0.00028; Accession=PF00347.13; Description =Ribosomal protein L6
MKTILASETMDIPEGVTVTVAAKLVXVEGPRGKLTRNFKHLNLDFQAGREGGRKAQGGTAWFGTRRTMAAIRTAXSHVQTSXSRGVTKGYVQRNGGFVYAHFPINASITNSNTAIEIRNFLXXRRKXXKGGHGFDXVTILXXEKQGR

SEQ ID NO: 12665 - protein, 138 aa, Zea mays
  misc_feature (10)..(10): Xaa can be any naturally occurring amino acid
  misc_feature (14)..(14): Xaa can be any naturally occurring amino acid
  misc_feature (18)..(19): Xaa can be any naturally occurring amino acid
  misc_feature (21)..(22): Xaa can be any naturally occurring amino acid
  misc_feature (24)..(26): Xaa can be any naturally occurring amino acid
  misc_feature (28)..(28): Xaa can be any naturally occurring amino acid
  misc_feature (33)..(33): Xaa can be any naturally occurring amino acid
  misc_feature (45)..(46): Xaa can be any naturally occurring amino acid
  misc_feature (69)..(70): Xaa can be any naturally occurring amino acid
  misc_feature (74)..(74): Xaa can be any naturally occurring amino acid
  misc_feature (76)..(77): Xaa can be any naturally occurring amino acid
  misc_feature (80)..(80): Xaa can be any naturally occurring amino acid
  misc_feature (83)..(83): Xaa can be any naturally occurring amino acid
  misc_feature (93)..(94): Xaa can be any naturally occurring amino acid
  misc_feature (96)..(96): Xaa can be any naturally occurring amino acid
  misc_feature (103)..(103): Xaa can be any naturally occurring amino acid
  misc_feature (116)..(116): Xaa can be any naturally occurring amino acid
  misc_feature (121)..(121): Xaa can be any naturally occurring amino acid
  misc_feature (125)..(126): Xaa can be any naturally occurring amino acid
  misc_feature (133)..(133): Xaa can be any naturally occurring amino acid
  misc_feature (135)..(135): Xaa can be any naturally occurring amino acid
  misc_feature (138)..(138): Xaa can be any naturally occurring amino acid
  Coding DNA Sequence Number=SeqID_4999
VWPSQWGSGXVGYXDFLXXHXXQXXXFXDHPAXRFSSSGAAMLLXXQDCSVVTVVHACHWWCAPSRMYXXSMEXRXXRRXTSXSKQVGPSGLXXEXDSLRSGXRRSADAPLSAGEXELCRXVLSXXEEAELFXIXLVX

SEQ ID NO: 12666 - protein, 139 aa, Zea mays
  misc_feature (54)..(54): Xaa can be any naturally occurring amino acid
  misc_feature (62)..(62): Xaa can be any naturally occurring amino acid
  misc_feature (64)..(64): Xaa can be any naturally occurring amino acid
  misc_feature (76)..(76): Xaa can be any naturally occurring amino acid
  misc_feature (85)..(85): Xaa can be any naturally occurring amino acid
  misc_feature (88)..(88): Xaa can be any naturally occurring amino acid
  misc_feature (94)..(94): Xaa can be any naturally occurring amino acid
  misc_feature (102)..(102): Xaa can be any naturally occurring amino acid
  misc_feature (104)..(106): Xaa can be any naturally occurring amino acid
  misc_feature (108)..(108): Xaa can be any naturally occurring amino acid
  misc_feature (115)..(117): Xaa can be any naturally occurring amino acid
  misc_feature (120)..(122): Xaa can be any naturally occurring amino acid
  misc_feature (126)..(128): Xaa can be any naturally occurring amino acid
  misc_feature (130)..(138): Xaa can be any naturally occurring amino acid
  Coding DNA Sequence Number=SeqID_5001
  Gene Ontology: Mol. function=structural constituent of ribosome; Cellular component=ribonucleoprotein complex; Biological process =translation
  Homolog annotation: Hit_ID=Q9LX88; Match level="QueryCoverage=89%, HitCoverage=90%, E-value=1e-27, Identity=66%"; Hit description=40S ribosomal protein S15a-4
  Pfam annotation: Domain name=Ribosomal_S8; Domain location=5-129; Score=-0.6; E_value=8.5e-07; Accession=PF00410.9; Description =Ribosomal protein S8
MVRVSVLNDALKSMYNAEKIGKRQVMIQAGRPRSSSRFLTVMQRHGYHWERFEXYVDDHRSXKXIVVELNGRLNKXCGVISPRFXDIXRERHLXGWTARLLXSXXXSXYIVLTTXXXIMXXXEARXXXGXXXXXXXXXL

SEQ ID NO: 12667 - protein, 168 aa, Zea mays
  misc_feature (67)..(67): Xaa can be any naturally occurring amino acid
  misc_feature (70)..(70): Xaa can be any naturally occurring amino acid
  misc_feature (73)..(73): Xaa can be any naturally occurring amino acid
  misc_feature (75)..(75): Xaa can be any naturally occurring amino acid
  misc_feature (80)..(80): Xaa can be any naturally occurring amino acid
  misc_feature (82)..(82): Xaa can be any naturally occurring amino acid
  misc_feature (84)..(84): Xaa can be any naturally occurring amino acid
  misc_feature (89)..(89): Xaa can be any naturally occurring amino acid
  misc_feature (91)..(168): Xaa can be any naturally occurring amino acid
  Coding DNA Sequence Number=SeqID_5002
  Subcellular localization annotation: CTP_CleavageSite=46; ConfidenceScore=5.57e-01
SLRRTFTVHTHRHSSQHPAPVELTRSLQSIYPVSLRFRSSISRAPSANEMAVPVEGVRRLRPVTGRXQRXPPXAXGDETXSXLXGVLLXLXXXXXXXXXXXXXXXXXXXXXXXXXXXXXXXXXXXXXXXXXXXXXXXXXXXXXXXXXXXXXXXXXXXXXXXXXXXXXX

SEQ ID NO: 12668 - protein, 141 aa, Zea mays
  misc_feature (7)..(7): Xaa can be any naturally occurring amino acid
  misc_feature (70)..(72): Xaa can be any naturally occurring amino acid
  misc_feature (74)..(74): Xaa can be any naturally occurring amino acid
  misc_feature (77)..(77): Xaa can be any naturally occurring amino acid
  misc_feature (81)..(83): Xaa can be any naturally occurring amino acid
  misc_feature (86)..(86): Xaa can be any naturally occurring amino acid
  misc_feature (89)..(90): Xaa can be any naturally occurring amino acid
  misc_feature (93)..(94): Xaa can be any naturally occurring amino acid
  misc_feature (98)..(98): Xaa can be any naturally occurring amino acid
  misc_feature (100)..(101): Xaa can be any naturally occurring amino acid
  misc_feature (103)..(104): Xaa can be any naturally occurring amino acid
  misc_feature (106)..(106): Xaa can be any naturally occurring amino acid
  misc_feature (109)..(110): Xaa can be any naturally occurring amino acid
  misc_feature (116)..(118): Xaa can be any naturally occurring amino acid
  misc_feature (122)..(126): Xaa can be any naturally occurring amino acid
  misc_feature (128)..(128): Xaa can be any naturally occurring amino acid
  misc_feature (135)..(137): Xaa can be any naturally occurring amino acid
  misc_feature (139)..(139): Xaa can be any naturally occurring amino acid
  Coding DNA Sequence Number=SeqID_5004
GLASFWXWLLWCAVQCLAAALQLLCALRSALHALVPAAVPPSHLQRMATVQGSRRPALQLHPLDSCSDPXXXQXLGXVDAXXXVTXDFXXPVXXMARXMXXTXXRXSSXXEAFSRXXXRDHXXXXXLXLIEVPPXXXTXPR

SEQ ID NO: 12669 - protein, 138 aa, Zea mays
  misc_feature (3)..(3): Xaa can be any naturally occurring amino acid
  misc_feature (6)..(8): Xaa can be any naturally occurring amino acid
  misc_feature (10)..(11): Xaa can be any naturally occurring amino acid
  misc_feature (13)..(13): Xaa can be any naturally occurring amino acid
  misc_feature (15)..(17): Xaa can be any naturally occurring amino acid
  misc_feature (19)..(19): Xaa can be any naturally occurring amino acid
  misc_feature (21)..(21): Xaa can be any naturally occurring amino acid
  misc_feature (23)..(27): Xaa can be any naturally occurring amino acid
  misc_feature (29)..(33): Xaa can be any naturally occurring amino acid
  misc_feature (36)..(37): Xaa can be any naturally occurring amino acid
  misc_feature (39)..(39): Xaa can be any naturally occurring amino acid
  misc_feature (41)..(41): Xaa can be any naturally occurring amino acid
  misc_feature (45)..(45): Xaa can be any naturally occurring amino acid
  misc_feature (49)..(51): Xaa can be any naturally occurring amino acid
  misc_feature (58)..(58): Xaa can be any naturally occurring amino acid
  misc_feature (62)..(64): Xaa can be any naturally occurring amino acid
  misc_feature (66)..(66): Xaa can be any naturally occurring amino acid
  misc_feature (72)..(72): Xaa can be any naturally occurring amino acid
  misc_feature (75)..(75): Xaa can be any naturally occurring amino acid
  misc_feature (83)..(83): Xaa can be any naturally occurring amino acid
  misc_feature (89)..(89): Xaa can be any naturally occurring amino acid
  misc_feature (92)..(92): Xaa can be any naturally occurring amino acid
  misc_feature (96)..(97): Xaa can be any naturally occurring amino acid
  misc_feature (99)..(100): Xaa can be any naturally occurring amino acid
  misc_feature (107)..(107): Xaa can be any naturally occurring amino acid
  misc_feature (131)..(131): Xaa can be any naturally occurring amino acid
  Coding DNA Sequence Number=SeqID_5006
  Gene Ontology: Mol. function=nutrient reservoir activity
  Homolog annotation: Hit_ID=P04702; Match level="QueryCoverage=89%, HitCoverage=50%, E-value=1e-14, Identity=47%"; Hit description=Zein -alpha M6 precursor
MIXYCXXXMXXAXSXXXAXAXIXXXXXLXXXXXLLXXYXTXIIDXIWEXXXLPPYRLXPANXXXQXTFIGPXCFXNRQAYLLXESLVQXIRXQQLXXTXXLPLINQXALGNLSPYSQQQQFLHFNQLSTLXPGCLFAA

SEQ ID NO: 12670 - protein, 172 aa, Zea mays
  misc_feature (1)..(43): Xaa can be any naturally occurring amino acid
  misc_feature (45)..(47): Xaa can be any naturally occurring amino acid
  misc_feature (49)..(52): Xaa can be any naturally occurring amino acid
  misc_feature (54)..(55): Xaa can be any naturally occurring amino acid
  misc_feature (57)..(59): Xaa can be any naturally occurring amino acid
  misc_feature (61)..(64): Xaa can be any naturally occurring amino acid
  misc_feature (68)..(68): Xaa can be any naturally occurring amino acid
  misc_feature (72)..(72): Xaa can be any naturally occurring amino acid
  misc_feature (123)..(123): Xaa can be any naturally occurring amino acid
  misc_feature (129)..(129): Xaa can be any naturally occurring amino acid
  misc_feature (131)..(132): Xaa can be any naturally occurring amino acid
  misc_feature (143)..(143): Xaa can be any naturally occurring amino acid
  misc_feature (151)..(152): Xaa can be any naturally occurring amino acid
  misc_feature (154)..(154): Xaa can be any naturally occurring amino acid
  misc_feature (166)..(166): Xaa can be any naturally occurring amino acid
  misc_feature (168)..(171): Xaa can be any naturally occurring amino acid
  Coding DNA Sequence Number=SeqID_5007
XXXXXXXXXXXXXXXXXXXXXXXXXXXXXXXXXXXXXXXXXXXEXXXQXXXXQXXVXXXPXXXXPINXPKVXAVIGLMIVGGTRVIKVRCQLRLPVGSYRVEELGFHIPKTPLVRGTGEEGTXIAACEXGXXMVTAAALAESXKQHQDAKXXPXSCCCYSTILSIXLXXXXS

SEQ ID NO: 12671 - protein, 114 aa, Zea mays
  misc_feature (21)..(21): Xaa can be any naturally occurring amino acid
  misc_feature (26)..(26): Xaa can be any naturally occurring amino acid
  misc_feature (29)..(29): Xaa can be any naturally occurring amino acid
  misc_feature (31)..(31): Xaa can be any naturally occurring amino acid
  misc_feature (37)..(37): Xaa can be any naturally occurring amino acid
  misc_feature (39)..(39): Xaa can be any naturally occurring amino acid
  misc_feature (54)..(54): Xaa can be any naturally occurring amino acid
  misc_feature (61)..(61): Xaa can be any naturally occurring amino acid
  misc_feature (64)..(64): Xaa can be any naturally occurring amino acid
  misc_feature (66)..(66): Xaa can be any naturally occurring amino acid
  misc_feature (72)..(72): Xaa can be any naturally occurring amino acid
  misc_feature (80)..(80): Xaa can be any naturally occurring amino acid
  misc_feature (82)..(82): Xaa can be any naturally occurring amino acid
  misc_feature (93)..(93): Xaa can be any naturally occurring amino acid
  misc_feature (102)..(103): Xaa can be any naturally occurring amino acid
  Coding DNA Sequence Number=SeqID_5009
  Gene Ontology: Biological process=cell redox homeostasis
  Homolog annotation: Hit_ID=Q4W1F6; Match level="QueryCoverage=75%, HitCoverage=70%, E-value=1e-16, Identity=58%"; Hit description =Thioredoxin h2 protein
  Pfam annotation: Domain name=Thioredoxin; Domain location=21-111; Score=-14.5; E_value=0.003; Accession=PF00085.10; Description =Thioredoxin
VCNTNNSHRRGRRDWSPSAVXIACHXKAXFXAHMTKXQXTVKLVDIDFTAAWCXPCCAIAXLFXEXAKKFTXVGFLKVDXDXVKEVTAVYLRXVMPTFQFVXXEPFIILWERRG

SEQ ID NO: 12672 - protein, 166 aa, Zea mays
  misc_feature (1)..(70): Xaa can be any naturally occurring amino acid
  misc_feature (72)..(73): Xaa can be any naturally occurring amino acid
  misc_feature (75)..(76): Xaa can be any naturally occurring amino acid
  misc_feature (82)..(82): Xaa can be any naturally occurring amino acid
  misc_feature (89)..(89): Xaa can be any naturally occurring amino acid
  misc_feature (97)..(97): Xaa can be any naturally occurring amino acid
  misc_feature (109)..(109): Xaa can be any naturally occurring amino acid
  misc_feature (117)..(117): Xaa can be any naturally occurring amino acid
  misc_feature (124)..(124): Xaa can be any naturally occurring amino acid
  misc_feature (138)..(138): Xaa can be any naturally occurring amino acid
  misc_feature (143)..(143): Xaa can be any naturally occurring amino acid
  misc_feature (150)..(150): Xaa can be any naturally occurring amino acid
  misc_feature (153)..(153): Xaa can be any naturally occurring amino acid
  misc_feature (158)..(159): Xaa can be any naturally occurring amino acid
  misc_feature (161)..(162): Xaa can be any naturally occurring amino acid
  misc_feature (165)..(165): Xaa can be any naturally occurring amino acid
  Coding DNA Sequence Number=SeqID_5010
XXXXXXXXXXXXXXXXXXXXXXXXXXXXXXXXXXXXXXXXXXXXXXXXXXXXXXXXXXXXXXXXXXXXXXPXXRXXSTPFPXAVLPAPXTVCPAPLXPGRRGRARPPPXRQGTEQGXASSHASXGAHEPSPVTRPRVXPLRFXLAVPWWXCVXQCDCXXSXXTAXD

SEQ ID NO: 12673 - protein, 171 aa, Zea mays
  misc_feature (1)..(70): Xaa can be any naturally occurring amino acid
  misc_feature (73)..(109): Xaa can be any naturally occurring amino acid
  misc_feature (112)..(112): Xaa can be any naturally occurring amino acid
  misc_feature (116)..(116): Xaa can be any naturally occurring amino acid
  misc_feature (121)..(121): Xaa can be any naturally occurring amino acid
  misc_feature (124)..(124): Xaa can be any naturally occurring amino acid
  misc_feature (132)..(132): Xaa can be any naturally occurring amino acid
  misc_feature (148)..(148): Xaa can be any naturally occurring amino acid
  misc_feature (154)..(154): Xaa can be any naturally occurring amino acid
  misc_feature (164)..(165): Xaa can be any naturally occurring amino acid
  misc_feature (168)..(168): Xaa can be any naturally occurring amino acid
  misc_feature (171)..(171): Xaa can be any naturally occurring amino acid
  Coding DNA Sequence Number=SeqID_5012
XXXXXXXXXXXXXXXXXXXXXXXXXXXXXXXXXXXXXXXXXXXXXXXXXXXXXXXXXXXXXXXXXXXXXXPPXXXXXXXXXXXXXXXXXXXXXXXXXXXXXXXXXXXXXIVXIFSXRDADXHRXCRMRAAYXQPRLSRTPIVLRPPVXLMVTRXPMLRVKGAIXXYRXSFX

SEQ ID NO: 12674 - protein, 120 aa, Zea mays
  misc_feature (4)..(5): Xaa can be any naturally occurring amino acid
  misc_feature (7)..(7): Xaa can be any naturally occurring amino acid
  misc_feature (29)..(29): Xaa can be any naturally occurring amino acid
  misc_feature (38)..(38): Xaa can be any naturally occurring amino acid
  misc_feature (48)..(48): Xaa can be any naturally occurring amino acid
  misc_feature (52)..(52): Xaa can be any naturally occurring amino acid
  misc_feature (60)..(60): Xaa can be any naturally occurring amino acid
  misc_feature (62)..(62): Xaa can be any naturally occurring amino acid
  misc_feature (64)..(64): Xaa can be any naturally occurring amino acid
  misc_feature (68)..(68): Xaa can be any naturally occurring amino acid
  misc_feature (74)..(74): Xaa can be any naturally occurring amino acid
  misc_feature (76)..(76): Xaa can be any naturally occurring amino acid
  misc_feature (85)..(86): Xaa can be any naturally occurring amino acid
  misc_feature (108)..(109): Xaa can be any naturally occurring amino acid
  misc_feature (112)..(112): Xaa can be any naturally occurring amino acid
  misc_feature (116)..(116): Xaa can be any naturally occurring amino acid
  Coding DNA Sequence Number=SeqID_5014
  Subcellular localization annotation: CTP_CleavageSite=36; ConfidenceScore=5.05e-01
TYLXXSXLDRLCLPSHSPRLLFPSAMAQXAFLSSLRSXLGSAPPAPPXHRLXPRRGYHVXLXAXEKAXWEEDDXFXRGSNHTKTXXKRVSKNRVMLSTFKLLVLACSXXALXGVGXLAQK

SEQ ID NO: 12675 - protein, 134 aa, Zea mays
  misc_feature (2)..(2): Xaa can be any naturally occurring amino acid
  misc_feature (5)..(9): Xaa can be any naturally occurring amino acid
  misc_feature (11)..(13): Xaa can be any naturally occurring amino acid
  misc_feature (17)..(17): Xaa can be any naturally occurring amino acid
  misc_feature (22)..(22): Xaa can be any naturally occurring amino acid
  misc_feature (25)..(26): Xaa can be any naturally occurring amino acid
  misc_feature (29)..(29): Xaa can be any naturally occurring amino acid
  misc_feature (31)..(31): Xaa can be any naturally occurring amino acid
  misc_feature (34)..(36): Xaa can be any naturally occurring amino acid
  misc_feature (41)..(42): Xaa can be any naturally occurring amino acid
  misc_feature (46)..(46): Xaa can be any naturally occurring amino acid
  misc_feature (49)..(49): Xaa can be any naturally occurring amino acid
  misc_feature (51)..(51): Xaa can be any naturally occurring amino acid
  misc_feature (61)..(61): Xaa can be any naturally occurring amino acid
  misc_feature (88)..(88): Xaa can be any naturally occurring amino acid
  misc_feature (106)..(106): Xaa can be any naturally occurring amino acid
  misc_feature (113)..(113): Xaa can be any naturally occurring amino acid
  misc_feature (121)..(121): Xaa can be any naturally occurring amino acid
  misc_feature (128)..(128): Xaa can be any naturally occurring amino acid
  Coding DNA Sequence Number=SeqID_5016
RXGRXXXXXCXXXTTIXLSGDXRQXXIPXYXILXXXRGHRXXHLTXDSXDXPTTICPIATXILNESISPKNRSTTTTTTVCFQQSIKXLQRNLAAYLQQQQFLPFXQITGGEXWLLTCKQXQLLPFNXLVKKPC

SEQ ID NO: 12676 - protein, 169 aa, Zea mays
  Coding DNA Sequence Number=SeqID_7018
  Gene Ontology: Mol. function=metal ion binding; Cellular component =cytoskeleton; Biological process=regulation of the force of heart contraction
  Homolog annotation: Hit_ID=Q9M047; Match level="QueryCoverage=98%, HitCoverage=87%, E-value=8e-87, Identity=78%"; Hit description =Transcription factor L2
  Pfam annotation: Domain name=LIM; Domain location=11-67; Score=69.8; E_value=9e-18; Accession=PF00412.12; Description=LIM domain
  Pfam annotation: Domain name=LIM; Domain location=110-166; Score =71.1; E_value=3.7e-18; Accession=PF00412.12; Description=LIM domain
  Pfam module annotation: Pfam domain module=LIM::LIM; Domain location =11-67::110-166
MSSFTGTQQKCKACEKTVYPVELLSADGVSYHKSCFKCSHCKSRLQLSRYSSMEGVLYCKPHYEQLFKESGSFTKNFQSPVKPAAEKSSPELTRTPSRVAGMFSGTQEKCATCSKTVYPIEKVTVESQTYHKSCFQCSHGGCPISPSNYAALEGILYCQHHFAQLFRKR

SEQ ID NO: 12677 - protein, 175 aa, Zea mays
  Coding DNA Sequence Number=SeqID_7019
  Gene Ontology: Mol. function=oxidoreductase activity, acting on the CH-OH group of donors, NAD or NADP as acceptor; Cellular component =mitochondrion; Biological process=tricarboxylic acid cycle
  Homolog annotation: Hit_ID=Q945K7; Match level="QueryCoverage=99%, HitCoverage=46%, E-value=4e-79, Identity=85%"; Hit description =Isocitrate dehydrogenase [NAD] catalytic subunit 5, mitochondrial precursor (EC 1.1.1.41) ...
  Homolog annotation: Hit description=(Isocitric dehydrogenase 5) (NAD(+)-specific ICDH 5)
  Pfam annotation: Domain name=Iso_dh; Domain location=45-175; Score= -155.4; E_value=1.5e-05; Accession=PF00180.10; Description =Isocitrateisopropylmalate dehydrogen
  Subcellular localization annotation: CTP_CleavageSite=28; ConfidenceScore=5.37e-01
MTMAANLARRLIGNRSAQILGTANSTSTAATSAARTFCSSTTPITATLFPGDGIGPEIAESVKKVFTTAGVPINWEEHYVSTEIDPRTQSFLTWESLESVRRNKVGLKGPMATPIGKGHRSLNLTLRKELNLYANVRPCYSLPGYKTRYDDVNLITIRENTEGEYSGLEHQVVRS

SEQ ID NO: 12678 - protein, 146 aa, Zea mays
  Coding DNA Sequence Number=SeqID_7020
  Gene Ontology: Mol. function=structural constituent of ribosome; Cellular component=ribonucleoprotein complex; Biological process =translation
  Homolog annotation: Hit_ID=Q9SK22; Match level="QueryCoverage=100%, HitCoverage=100%, E-value=1e-71, Identity=90%"; Hit description=40S ribosomal protein S16-1
  Pfam annotation: Domain name=Ribosomal_S9; Domain location=14-146; Score=285.6; E_value=9.6e-83; Accession=PF00380.9; Description =Ribosomal protein S9S16
MATKQAKASVQCFGRKKTAVAVTHCKPGCGLIKLNGSPIELFNPEILRFKIFEPVLLLGKHRFAGVDMRIRVNGGGHTSQVYAIRQSIAKALVAFYQKYVDEQSKKEVKDILIRYDRTLLVADPRRCEPKKFGGRGARSRFQKSYR

SEQ ID NO: 12679 - protein, 147 aa, Zea mays
  misc_feature (135)..(135): Xaa can be any naturally occurring amino acid
  Coding DNA Sequence Number=SeqID_7021
  Gene Ontology: Mol. function=structural constituent of ribosome; Cellular component=ribonucleoprotein complex; Biological process =translation
  Homolog annotation: Hit_ID=Q9SK22; Match level="QueryCoverage=100%, HitCoverage=100%, E-value=2e-71, Identity=89%"; Hit description=40S ribosomal protein S16-1
  Pfam annotation: Domain name=Ribosomal_S9; Domain location=14-147; Score=275.0; E_value=1.5e-79; Accession=PF00380.9; Description =Ribosomal protein S9S16
MATKPAKQSVQCFGRKKTAVAVTHCKPGCGMIKLNGSPIELFQPEILRFKIYEPVLLLGKHRFAGVDMRIRVNGGGHTSQVYAIRQSIAKALVAFYQKYVDEQSKKEVKDILIRYDRTLLVADPRRCEPKKFGGXRGARSRFQKSYR

SEQ ID NO: 12680 - protein, 201 aa, Zea mays
  misc_feature (192)..(192): Xaa can be any naturally occurring amino acid
  misc_feature (201)..(201): Xaa can be any naturally occurring amino acid
  Coding DNA Sequence Number=SeqID_7022
  Gene Ontology: Mol. function=nucleic acid binding; Cellular component= intracellular; Biological process=regulation of transcription
  Homolog annotation: Hit_ID=Q9SVY1; Match level="QueryCoverage=99%, HitCoverage=54%, E-value=7e-27, Identity=39%"; Hit description=Zinc finger-like protein
  Subcellular localization annotation: CTP_CleavageSite=70; ConfidenceScore=5.59e-01
MTDPYSNFFTGWFKSNPFHHYPNSSTSPSPPPPHSSFFFPHSGDLHRPPPAPTPPPSPPLREALPLLSLSPANKQQHHHDHQIQEPPSISMDVDYDHHHHQDDHNLDDHDHDVTVALHIGLPSPSPQDMASLLMMSSSSSSSRPTTHYLEDMNGKKDLDNDYHQGGVGGGEDDDEDSVGGDGGCRISRLNKXGQYWIPTPX

SEQ ID NO: 12681 - protein, 201 aa, Zea mays; identical to SEQ ID NO: 12680
  misc_feature (192)..(192): Xaa can be any naturally occurring amino acid
  misc_feature (201)..(201): Xaa can be any naturally occurring amino acid
  Coding DNA Sequence Number=SeqID_7023
  Gene Ontology: Mol. function=nucleic acid binding; Cellular component= intracellular; Biological process=regulation of transcription
  Homolog annotation: Hit_ID=Q9SVY1; Match level="QueryCoverage=99%, HitCoverage=54%, E-value=7e-27, Identity=39%"; Hit description=Zinc finger-like protein
  Subcellular localization annotation: CTP_CleavageSite=70; ConfidenceScore=5.59e-01

SEQ ID NO: 12682 - protein, 187 aa, Zea mays
  misc_feature (148)..(148): Xaa can be any naturally occurring amino acid
  misc_feature (168)..(168): Xaa can be any naturally occurring amino acid
  misc_feature (179)..(179): Xaa can be any naturally occurring amino acid
  misc_feature (187)..(187): Xaa can be any naturally occurring amino acid
  Coding DNA Sequence Number=SeqID_7024
  Gene Ontology: Mol. function=structural molecule activity; Cellular component=protein complex; Biological process=microtubule-based movement
  Homolog annotation: Hit_ID=Q3EA24; Match level="QueryCoverage=99%, HitCoverage=43%, E-value=6e-87, Identity=84%"; Hit description =Uncharacterized protein At4g14960.1
  Pfam annotation: Domain name=Tubulin; Domain location=49-187; Score =87.1; E_value=5.4e-23; Accession=PF00091.15; Description=TubulinFtsZ family, GTPase domain
MRECISIHIGQAGIQVGNACWELYCLEHGIQPDGQMPGDKTVGGGDDAFNTFFSETGAGKHVPRAVFVDLEPTVIDEVRTGTYRQLFHPEQLISGKEDAANNFARGHYTIGKEIVDLCLDRIRKLADNCTGLQGFLVFNAGGGETGSXGLGSLLLERLSVDYGKRPSXGFTVYPSPRLXPSGVEPYX

SEQ ID NO: 12683 - protein, 163 aa, Zea mays
  misc_feature (132)..(132): Xaa can be any naturally occurring amino acid
  Coding DNA Sequence Number=SeqID_7025
  Gene Ontology: Mol. function=structural molecule activity; Cellular component=protein complex; Biological process=microtubule-based movement
  Homolog annotation: Hit_ID=Q3EA24; Match level="QueryCoverage=97%, HitCoverage=37%, E-value=2e-76, Identity=88%"; Hit description =Uncharacterized protein At4g14960.1
  Pfam annotation: Domain name=Tubulin; Domain location=49-163; Score =49.3; E_value=1.4e-11; Accession=PF00091.15; Description=TubulinFtsZ family, GTPase domain
MRECISIHIGQAGIQVGNACWELYCLEHGIQPDGQMPSDKTVGGGDDAFNTFFSETGAGKHVPRAVFVDLEPTVIDEVRTGTYRQLFHPEQLISGKEDAANNFARGHYTIGKGIVDLCLDRIRKLADNCTGXLQGFLVFHAVGGGTGSGLGSLLLERISGRVR

SEQ ID NO: 12684 - protein, 116 aa, Zea mays
  misc_feature (26)..(26): Xaa can be any naturally occurring amino acid
  misc_feature (57)..(57): Xaa can be any naturally occurring amino acid
  misc_feature (89)..(89): Xaa can be any naturally occurring amino acid
  misc_feature (105)..(105): Xaa can be any naturally occurring amino acid
  Coding DNA Sequence Number=SeqID_7026
  Gene Ontology: Cellular component=ribonucleoprotein complex; Biological process=ribosome biogenesis and assembly
  Homolog annotation: Hit_ID=A7PYW1; Match level="QueryCoverage=98%, HitCoverage=49%, E-value=1e-29, Identity=53%"; Hit description =Chromosome chr12 scaffold_38, whole genome shotgun sequence
HRRKEGREQKESIVNGIRETVKNITXCPCFSFENMKNIKFKEFRQQFRHNERFFLGXNKLMQFALGPSAWDEIHPAIFKASKILHGEMXLLITDMPKEDVESLFXSYEDHPFYRAG

SEQ ID NO: 12685 - protein, 116 aa, Zea mays; identical to SEQ ID NO: 12684
  misc_feature (26)..(26): Xaa can be any naturally occurring amino acid
  misc_feature (57)..(57): Xaa can be any naturally occurring amino acid
  misc_feature (89)..(89): Xaa can be any naturally occurring amino acid
  misc_feature (105)..(105): Xaa can be any naturally occurring amino acid
  Coding DNA Sequence Number=SeqID_7027
  Gene Ontology: Cellular component=ribonucleoprotein complex; Biological process=ribosome biogenesis and assembly
  Homolog annotation: Hit_ID=A7PYW1; Match level="QueryCoverage=98%, HitCoverage=49%, E-value=1e-29, Identity=53%"; Hit description =Chromosome chr12 scaffold_38, whole genome shotgun sequence

SEQ ID NO: 12686 - protein, 209 aa, Zea mays
  misc_feature (199)..(199): Xaa can be any naturally occurring amino acid
  Coding DNA Sequence Number=SeqID_7028
  Gene Ontology: Mol. function=structural constituent of ribosome; Cellular component=ribonucleoprotein complex; Biological process =translation
  Homolog annotation: Hit_ID=P46286; Match level="QueryCoverage=100%, HitCoverage=80%, E-value=1e-114, Identity=95%"; Hit description=60S ribosomal protein L8-1
  Pfam annotation: Domain name=Ribosomal_L2; Domain location=11-90; Score=68.3; E_value=2.6e-17; Accession=PF00181.13; Description =Ribosomal Proteins L2, RNA binding domain
  Pfam annotation: Domain name=Ribosomal_L2_C; Domain location=96-209; Score=107.9; E_value=3e-29; Accession=PF03947.8; Description =Ribosomal Proteins L2, C-terminal domain
  Pfam module annotation: Pfam domain module=Ribosomal_L2::Ribosomal_L2_ C; Domain location=11-90::96-209
MGRVIRAQRKGAGSVFKSHTHHRKGPAKFRSLDYGERNGYLKGVVTEIIHDPGRGAPLARVAFRHPFRYKKQKELFVAAEGMYTGQFLYCGKKATLVVGNVLPLRAIPEGAVVCNVEHHVGDRGVLARASGDYAIVISHNPDNDTTRIKLPSGSKKIVPSGCRAMIGQVAGGGRTEKPMLKAGNAYHKYRVKRNSWPKXFRGVAMNPVQ

SEQ ID NO: 12687 - protein, 151 aa, Zea mays
  Coding DNA Sequence Number=SeqID_7029
  Homolog annotation: Hit_ID=Q8GWC3; Match level="QueryCoverage=99%, HitCoverage=71%, E-value=4e-56, Identity=72%"; Hit description =Putative uncharacterized protein
  Pfam annotation: Domain name=PRA1; Domain location=16-150; Score =99.4; E_value=1.1e-26; Accession=PF03208.9; Description=PRA1 family protein
MDWENVAAEDVIEALREVEWSTPPRSFGEFFSRFAFPRSFSKWRSRLKCHLYYYRTNYFILVILVLGLALITRPLAILGAAFTALSLAFLNDSFAATFNEKFIRTIRLFSPHLAAKMRPPHMPGIRGRSAARRTVYVWGKPRWGVWRTFLK

SEQ ID NO: 12688 - protein, 119 aa, Zea mays
  Coding DNA Sequence Number=SeqID_7030
  Gene Ontology: Mol. function=metal ion binding; Cellular component =cytoplasm; Biological process=ubiquitin cycle
  Homolog annotation: Hit_ID=Q940X7; Match level="QueryCoverage=100%, HitCoverage=100%, E-value=2e-58, Identity=87%"; Hit description=RING- box protein 1a
  Pfam annotation: Domain name=zf-C3HC4; Domain location=53-108; Score =7.4; E_value=0.013; Accession=PF00097.15; Description=Zinc finger, C3HC4 type (RING finger)
  Subcellular localization annotation: CTP_CleavageSite=12; ConfidenceScore=5.09e-01
MASLDSDVTMVPAGESSSSVAPSSSSTKKAKRFEVKKWSAVALWAWDIVVDNCAICRNHIMDLCIECQANQASATSEECTVAWGVCNHAFHFHCISRWLKTRQVCPLDNSEWEFQKYGH

SEQ ID NO: 12689 - protein, 118 aa, Zea mays
  Coding DNA Sequence Number=SeqID_7031
  Gene Ontology: Mol. function=metal ion binding; Cellular component =cytoplasm; Biological process=ubiquitin cycle
  Homolog annotation: Hit_ID=Q940X7; Match level="QueryCoverage=100%, HitCoverage=100%, E-value=1e-56, Identity=84%"; Hit description=RING- box protein 1a
  Pfam annotation: Domain name=zf-C3HC4; Domain location=52-107; Score =7.4; E_value=0.013; Accession=PF00097.15; Description=Zinc finger, C3HC4 type (RING finger)
MASLDSDVNMIPAGESSSSVAASSSSKKAKRFEVKKWSAVALWAWDIVVDNCAICRNHIMDLCIECQANQASATSEECTVAWGVCNHAFHFHCISRWLKTRQVCPLDNSEWEFQKYGH

SEQ ID NO: 12690 - protein, 178 aa, Zea mays
  Coding DNA Sequence Number=SeqID_7032
  Gene Ontology: Mol. function=protein serine/threonine kinase activity; Cellular component=extracellular region; Biological process=response to abscisic acid stimulus
  Homolog annotation: Hit_ID=Q9LRK2; Match level="QueryCoverage=94%, HitCoverage=64%, E-value=2e-48, Identity=55%"; Hit description =Putative cysteine-rich repeat secretory protein 35 precursor
  Pfam annotation: Domain name=DUF26; Domain location=88-140; Score =47.6; E_value=4.5e-11; Accession=PF01657.8; Description=Domain of unknown function DUF26
MKFSYSLSKRFVSPILAMQFLIIHSVSSLNLTNEYLNHKCFLDQGIYNTGSEYEDSLNIILRSVRTGSYYKNGFMRTSKGREPAPDAVTVMFQCRGDSYGSKCRTCADTAVAGFRRRCLRNKGGIIWYDQCFLWVSAIGEDMPINTNYKNIFSMYNPNNVRGDAKLFAKRVGRMFSLS

SEQ ID NO: 12691 - protein, 195 aa, Zea mays
  Coding DNA Sequence Number=SeqID_7033
  Gene Ontology: Mol. function=hydrogen ion transporting ATP synthase activity, rotational mechanism; Cellular component=proton -transporting ATP synthase complex, catalytic core F(1); Biological process=ATP synthesis coupled proton transport
  Homolog annotation: Hit_ID=Q01908; Match level="QueryCoverage=100%, HitCoverage=52%, E-value=4e-71, Identity=74%"; Hit description=ATP synthase gamma chain 1, chloroplast precursor
  Pfam annotation: Domain name=ATP-synt; Domain location=52-195; Score =64.8; E_value=3e-16; Accession=PF00231.9; Description=ATP synthase
  Subcellular localization annotation: CTP_CleavageSite=2; ConfidenceScore=5.71e-01
MACTNLTTMWVSSKLSISDSSSLSFRSILNPLPLPNHNSSPSRSSSVSPIQSSLRELRDRIDSVKNTQKITEAMKLVAAAKVRRAQEAVVNGRPFSETLVEVLYNINEQLQTDDIDVPLTKIRPVKKVALVVVTGDRGLCGGFNNFIIKKAEARIKELQGLGLDYTVISVGKKGNSYFLRRPYIPVDKYLESRTL

SEQ ID NO: 12692 - protein, 202 aa, Zea mays
  misc_feature (1)..(1): Xaa can be any naturally occurring amino acid
  misc_feature (5)..(7): Xaa can be any naturally occurring amino acid
  Coding DNA Sequence Number=SeqID_7322
  Subcellular localization annotation: CTP_CleavageSite=18; ConfidenceScore=5.02e-01
XPAGXXXPNFFSILLPSRHSHPAARKHRRLADGEPPFSLFCHLFSFCQPHRTSAAKELWFLANRALLLPLSFFSCRARPVLLFLKKMSMADRTCCSNSVFSFFPCLCFCAFSSIWPLVHWSTCSSFVTPLAIQPYASRSLHHLNSAEKYRWSWPFLVTLILISSLMYSIPLFCVNVCMRCVVIYGIEYGGLKRGCSSLCIFL

SEQ ID NO: 12693 - protein, 61 aa, Zea mays
  misc_feature (3)..(3): Xaa can be any naturally occurring amino acid
  misc_feature (8)..(8): Xaa can be any naturally occurring amino acid
  misc_feature (32)..(32): Xaa can be any naturally occurring amino acid
  misc_feature (36)..(36): Xaa can be any naturally occurring amino acid
  misc_feature (41)..(41): Xaa can be any naturally occurring amino acid
  misc_feature (50)..(50): Xaa can be any naturally occurring amino acid
  misc_feature (52)..(52): Xaa can be any naturally occurring amino acid
  misc_feature (55)..(55): Xaa can be any naturally occurring amino acid
  Coding DNA Sequence Number=SeqID_7324
  Gene Ontology: Mol. function=nucleic acid binding
  Homolog annotation: Hit_ID=A8BTK4; Match level="QueryCoverage=98%, HitCoverage=20%, E-value=3e-14, Identity=55%"; Hit description =Transposase
  Pfam annotation: Domain name=SWIM; Domain location=2-34; Score=39.7; E_value=1.1e-08; Accession=PF04434.8; Description=SWIM zinc finger
TNXVDTEXRSCSCRRWQIYGIPCAHATAALLXCGEXPRFYXHDCFSVMKXRXTYXQPIHPS

SEQ ID NO: 12694 - protein, 156 aa, Zea mays
  misc_feature (99)..(99): Xaa can be any naturally occurring amino acid
  misc_feature (106)..(106): Xaa can be any naturally occurring amino acid
  misc_feature (109)..(109): Xaa can be any naturally occurring amino acid
  misc_feature (122)..(122): Xaa can be any naturally occurring amino acid
  misc_feature (127)..(127): Xaa can be any naturally occurring amino acid
  Coding DNA Sequence Number=SeqID_7325
  Gene Ontology: Mol. function=metal ion binding
  Homolog annotation: Hit_ID=Q10R22; Match level="QueryCoverage=75%, HitCoverage=46%, E-value=8e-53, Identity=85%"; Hit description=Zinc finger, C3HC4 type family protein, expressed
  Pfam annotation: Domain name=zf-C3HC4; Domain location=89-130; Score =19.2; E_value=0.00059; Accession=PF00097.15; Description=Zinc finger, C3HC4 type (RING finger)
NNLLIHLYLVFLCCPFTGIQQVYQSPGSPQVVWQDNIEPDNMTYEELLDLGEAVGTQSRGLSQERISSLPVTKYKCGFFSRKKTRRERCVICQMEYRRXNLQMTLXPCXHVYHASCVTRWLXINQVXGCCFVEVLGRFSEACVCDAMKGPHELSPL

SEQ ID NO: 12695 - protein, 133 aa, Zea mays
  Coding DNA Sequence Number=SeqID_7326
TKGLMGRRRNDSIKLHYTRRSNARRALERLRREQARQGRARSWLAQAASDGTRSASLAPGLDARRAGAACCRAPPGLRVAAWAWLARGLRVACSRVREKRGREEREVRAGKEAATAWIQGARRAWSREREGAE

SEQ ID NO: 12696 - protein, 102 aa, Zea mays
  Coding DNA Sequence Number=SeqID_7328
SNSVAVVLTPCGWLSSPRSTTLPKSNCDQWTLGTTVILNGNDELFIFMQFVIILKYGAIAEACTTHLGSLESLEFLGVDEKKSRDGLFAKSPSLRFTIFIVS

SEQ ID NO: 12697 - protein, 98 aa, Zea mays
  misc_feature (84)..(87): Xaa can be any naturally occurring amino acid
  misc_feature (90)..(98): Xaa can be any naturally occurring amino acid
  Coding DNA Sequence Number=SeqID_7330
TNVVALPIAHYYCQFICRVFILLGRSIYTIAGCQFFIYLDTMEHTVKCWYAGVVPFLRIMFLFWLLSFRISTHPHDNSTLEHDXXXXLNXXXXXXXXX

SEQ ID NO: 12698 - protein, 108 aa, Zea mays
  Coding DNA Sequence Number=SeqID_7332
  Homolog annotation: Hit_ID=Q6K950; Match level="QueryCoverage=31%, HitCoverage=13%, E-value=1e-12, Identity=100%"; Hit description =Nucleolar RNA-binding Nop10p-like protein
  Pfam annotation: Domain name=Nop10p; Domain location=5-44; Score=3.8; E_value=0.014; Accession=PF04135.3; Description=Nucleolar RNA-binding protein, Nop10p family
SKMYLQYYINEKGDKVYTTKKESPLGVPTQSAHPGTPPLFTGVTFFFCCCNLPVKDVTVGTFLLLGTTYKDAESWFANMSISIRHVCRLGAPPDLFRLFIVCRVFNFF

SEQ ID NO: 12699 - protein, 102 aa, Zea mays
  Coding DNA Sequence Number=SeqID_7333
HFAGSGDHRSQSVATKKTDRFYTHPRIQCRASDRFGVCQGQRQVHYLLTQTASARRRQSYSYEQQNLLLTLDVWCCRDSTVSTSSICFSTAACSAFFGTTCS

SEQ ID NO: 12700 - protein, 170 aa, Zea mays
  Coding DNA Sequence Number=SeqID_7335
LEIILLHWSIYYSQDKPFPIYLHRKLYAHQHGSSRTICIGMQHVLISTKPCTSSECQNLQGKGNGESTSETAEAEGSSAVGRGGAGAGAGAGARARARAGLSTVGGGTGSSDGSSNGSHRGLGSSRNSDESEDGSGSVHFDGGFRLFGYWNSSKRIRSDLNECWCSDCSW

SEQ ID NO: 12701 - protein, 217 aa, Zea mays
  misc_feature (152)..(180): Xaa can be any naturally occurring amino acid
  misc_feature (185)..(196): Xaa can be any naturally occurring amino acid
  misc_feature (198)..(217): Xaa can be any naturally occurring amino acid
  Coding DNA Sequence Number=SeqID_7337
  Subcellular localization annotation: CTP_CleavageSite=22; ConfidenceScore=5.20e-01
HTVFFTFTGSIVQGIRPATGVRFSSRAQPPIRSGFLPPWWPIGAANAGAGEGELVTRGGGRARAGATPARPRWSAAAPTPGDGHPCAPVGVLVVAVSPRPERQRGGWIVDTTTRPRGVEERLMRLRVTYFSWTSRAYSLLLVGSDRGCRPGXXXXXXXXXXXXXXXXXXXXXXXXXXXXXRMEEXXXXXXXXXXXXIXXXXXXXXXXXXXXXXXXXX

SEQ ID NO: 12702 - protein, 82 aa, Zea mays
  misc_feature (72)..(72): Xaa can be any naturally occurring amino acid
  Coding DNA Sequence Number=SeqID_7338
  Gene Ontology: Mol. function=isopentenyl-diphosphate delta-isomerase activity; Biological process=isoprenoid biosynthetic process
  Homolog annotation: Hit_ID=Q9M6K4; Match level="QueryCoverage=82%, HitCoverage=26%, E-value=8e-16, Identity=64%"; Hit description =Isopentenyl pyrophosphate:dimethyllallyl pyrophosphate isomerase
MAAAVVDDAGMDAVQKRLMVEDECILVDEQDNGWGHESKYHCHLMEKDGSENLLLRPCRGVPFPPKFDLLLXQRPRKRVPFP

SEQ ID NO: 12703 - protein, 82 aa, Zea mays; identical to SEQ ID NO: 12702
  misc_feature (72)..(72): Xaa can be any naturally occurring amino acid
  Coding DNA Sequence Number=SeqID_7339
  Gene Ontology: Mol. function=isopentenyl-diphosphate delta-isomerase activity; Biological process=isoprenoid biosynthetic process
  Homolog annotation: Hit_ID=Q9M6K4; Match level="QueryCoverage=82%, HitCoverage=26%, E-value=8e-16, Identity=64%"; Hit description =Isopentenyl pyrophosphate:dimethyllallyl pyrophosphate isomerase

SEQ ID NO: 12704 - protein, 172 aa, Zea mays
  Coding DNA Sequence Number=SeqID_7340
  Subcellular localization annotation: CTP_CleavageSite=48; ConfidenceScore=5.09e-01
RHPIGHGGPAGHLKVAVRVGPNRPSRPGGGGGQPWQRARRRGTSGLARAGAALDGAGAEAPGGAGAPASPLQIERPRWRRGTRSLRGQRPLRPGAALGTLATAAVQARVHGAGSSHYAQARPPATRRGGPAMAARACSLARWRGSLASRARCPDARSGESLGGAGGQGVVLR

SEQ ID NO: 12705 - protein, 63 aa, Zea mays
  Coding DNA Sequence Number=SeqID_7342
  Homolog annotation: Hit_ID=A2X826; Match level="QueryCoverage=69%, HitCoverage=16%, E-value=5e-12, Identity=81%"; Hit description =Putative uncharacterized protein
EEAGFHTSECYKIRAVVADLRVRFVQVCQATDFRNTDPAREILKGGLPPLAGFFGKLYLFWCG

SEQ ID NO: 12706 - protein, 63 aa, Zea mays; identical to SEQ ID NO: 12705
  Coding DNA Sequence Number=SeqID_7343
  Homolog annotation: Hit_ID=A2X826; Match level="QueryCoverage=69%, HitCoverage=16%, E-value=5e-12, Identity=81%"; Hit description =Putative uncharacterized protein

SEQ ID NO: 12707 - protein, 86 aa, Zea mays
  misc_feature (1)..(1): Xaa can be any naturally occurring amino acid
  misc_feature (8)..(8): Xaa can be any naturally occurring amino acid
  misc_feature (12)..(12): Xaa can be any naturally occurring amino acid
  misc_feature (21)..(21): Xaa can be any naturally occurring amino acid
  misc_feature (23)..(23): Xaa can be any naturally occurring amino acid
  misc_feature (26)..(26): Xaa can be any naturally occurring amino acid
  misc_feature (28)..(28): Xaa can be any naturally occurring amino acid
  misc_feature (35)..(36): Xaa can be any naturally occurring amino acid
  misc_feature (45)..(45): Xaa can be any naturally occurring amino acid
  misc_feature (47)..(47): Xaa can be any naturally occurring amino acid
  misc_feature (49)..(49): Xaa can be any naturally occurring amino acid
  misc_feature (51)..(51): Xaa can be any naturally occurring amino acid
  misc_feature (55)..(56): Xaa can be any naturally occurring amino acid
  misc_feature (60)..(60): Xaa can be any naturally occurring amino acid
  misc_feature (62)..(62): Xaa can be any naturally occurring amino acid
  misc_feature (65)..(65): Xaa can be any naturally occurring amino acid
  misc_feature (79)..(79): Xaa can be any naturally occurring amino acid
  misc_feature (85)..(85): Xaa can be any naturally occurring amino acid
  Coding DNA Sequence Number=SeqID_7344
XYVEPYYXQLYXYIIKNNYVXLXLFXQXVKYFSSXXEGEAVCVFXRXGXAXPSNXXFPWXGXEKXTGGILIFFGLTPGXAPLPLXL

SEQ ID NO: 12708 - protein, 130 aa, Zea mays
  Coding DNA Sequence Number=SeqID_7346
  Gene Ontology: Mol. function=structural constituent of ribosome; Cellular component=ribosome; Biological process=translation
  Homolog annotation: Hit_ID=A2WSX8; Match level="QueryCoverage=97%, HitCoverage=94%, E-value=3e-60, Identity=85%"; Hit description=50S ribosomal protein L31
  Pfam annotation: Domain name=Ribosomal_L31; Domain location=36-104; Score=50.5; E_value=5.7e-12; Accession=PF01197.9; Description =Ribosomal protein L31
  Subcellular localization annotation: CTP_CleavageSite=33; ConfidenceScore=5.24e-01
MTLSLSTSFLSIPAAARTTARTLRSVVPSQGMRCSMRKKGLHPEIYEDAKVYCNGELVLVTGGTKPEYTVDVWSGNHPYYVGDTSALVVMDSQIEKFRKKWGHIKEYWPEDQWREMHPDGDPEFEPEGDN

SEQ ID NO: 12709 - protein, 143 aa, Zea mays
  misc_feature (82)..(82): Xaa can be any naturally occurring amino acid
  misc_feature (143)..(143): Xaa can be any naturally occurring amino acid
  Coding DNA Sequence Number=SeqID_7347
HEQRPRLGGSWLVGRRAASGGSARREAVSLSSSGREEMEAIVGVRAAPRGRAWPHLEKPPPPACCARVPTASLAVAADRPHXGCRSCEPISPRAVTDPTPCPLDALLLRTGRCFSPSAFVPWVVSDRTQHRTTAPLSYARDLX

SEQ ID NO: 12710 - protein, 107 aa, Zea mays
  Coding DNA Sequence Number=SeqID_7349
  Subcellular localization annotation: CTP_CleavageSite=37; ConfidenceScore=5.16e-01
GSRGRWSRLVASPRARCGRAHGHGAGAPLAATPSRTRAEPRPVVHRRVGAQQQRTAVRSGAVVLRSLEPLSRHRWDRGFERGRASERGGQLGTPNGPNGPSIVYCDG

SEQ ID NO: 12711 - protein, 130 aa, Zea mays
  misc_feature (74)..(74): Xaa can be any naturally occurring amino acid
  Coding DNA Sequence Number=SeqID_7351
  Homolog annotation: Hit_ID=Q69IM5; Match level="QueryCoverage=93%, HitCoverage=25%, E-value=1e-15, Identity=42%"; Hit description =Putative uncharacterized protein P0450E05.21
MGYEESKKHLLSLSYPELQCLCKRYNLPAKKTHSQLASSLASLLEASPSPAPPSCHQQILKEASTCNHANNKRXPYNGRDDGKPLVPAKHQKGVQTPGDENSKKGIGPGTRILPVFMTLGKPGISGPLFF

SEQ ID NO: 12712 - protein, 61 aa, Zea mays
  misc_feature (1)..(5): Xaa can be any naturally occurring amino acid
  Coding DNA Sequence Number=SeqID_7352
XXXXXRYNIYKGPHHPQGLRDPRRHGPRALLQLSQAAALSPTRQVGLNSEGMGAIRFAVIS

SEQ ID NO: 12713 - protein, 95 aa, Zea mays
  Coding DNA Sequence Number=SeqID_7354
  Subcellular localization annotation: CTP_CleavageSite=77; ConfidenceScore=5.37e-01
LDVRGKHLQRVAAATCNCARTEVLAAPVVSFSLPAPRATPASTVLRAPPAREPALARCELLPTARAPSLSPPRALPEAAAAWNPHFIAMADGDRE

SEQ ID NO: 12714 - protein, 136 aa, Zea mays
  misc_feature (1)..(1): Xaa can be any naturally occurring amino acid
  misc_feature (66)..(66): Xaa can be any naturally occurring amino acid
  Coding DNA Sequence Number=SeqID_7355
  Homolog annotation: Hit_ID=Q6YV09; Match level="QueryCoverage=72%, HitCoverage=59%, E-value=1e-13, Identity=44%"; Hit description =Putative uncharacterized protein OSJNBb0060O16.43
XQVTVFLFVRLPRKVVVKTKRVILRRWHRRCPPAPSRASGMKLSALLDLDDDGFEAAFAHGRAGGXSDWKERFRCFAVGGDGGVDFDFDGVWEAIIEQEGFFWFGSFWGRRGAVFKANDRMDGSFRLPVALERVRE

SEQ ID NO: 12715 - protein, 77 aa, Zea mays
  misc_feature (51)..(51): Xaa can be any naturally occurring amino acid
  misc_feature (68)..(69): Xaa can be any naturally occurring amino acid
  Coding DNA Sequence Number=SeqID_7356
GAGGGGGARRPRRADAGGGAGSPAGALPWTSGPLTWPPVLGLGFPPLVALXRRARGGDEGAAVNSCGXXGSSVVEST

SEQ ID NO: 12716 - protein, 92 aa, Zea mays
  misc_feature (1)..(1): Xaa can be any naturally occurring amino acid
  misc_feature (23)..(24): Xaa can be any naturally occurring amino acid
  Coding DNA Sequence Number=SeqID_7358
  Homolog annotation: Hit_ID=Q9CA32; Match level="QueryCoverage=98%, HitCoverage=50%, E-value=2e-29, Identity=74%"; Hit description =Putative uncharacterized protein T26J14.6
  Subcellular localization annotation: CTP_CleavageSite=52; ConfidenceScore=5.36e-01
XVLDSPSPFLCGSPPSRVANPLXXDARFRDEIKLVSSSPITTPLGQPPSSPSSSGRKGGCVRGNFGNSPAVRIEGFDCLDRDSRNCSIPALA

SEQ ID NO: 12717 - protein, 93 aa, Zea mays
  Coding DNA Sequence Number=SeqID_7359
  Subcellular localization annotation: CTP_CleavageSite=56; ConfidenceScore=5.36e-01
KLDYAKGPFGKAALSRFELMRQLINQTKQIGTCTSSQNKTMRFEKSSNRARLTVVRSDQASDPEATRRLRSRREEDFIRQEERGDFSSPRSKA

SEQ ID NO: 12718 - protein, 52 aa, Zea mays
  Coding DNA Sequence Number=SeqID_7361
IFLLFRWATCFPGENNDLFKGLIYSSIFLPSCLSVAPDKIGRRIRPRFNLTG

SEQ ID NO: 12719 - protein, 112 aa, Zea mays
  Coding DNA Sequence Number=SeqID_7363
  Gene Ontology: Mol. function=aspartic-type endopeptidase activity; Biological process=DNA integration
  Homolog annotation: Hit_ID=Q94EV3; Match level="QueryCoverage=94%, HitCoverage=8%, E-value=6e-47, Identity=85%"; Hit description=Fourf gag/pol protein
AFQVGRSGALLMRNGLCAHVLGVGTVILKFTSGKTVPLKSVQHVPSIKKNLISASMLCQDGYKVVFESNKCVMLKHDTFVGKGYDCGGLFHSSLHDVCNKMVNSVNKKKKKK

SEQ ID NO: 12720 - protein, 114 aa, Zea mays
  Coding DNA Sequence Number=SeqID_7364
TIGVCSIYKRRIYACAGTYNSKTMSTYINVHAIIRNRCAICICLVISARPCSVLWARTRGCIYWRWRRGGTGPCSFRLARRRQSRRSSTCLAWRQRPERHCSGGGGPPAGRSRC

SEQ ID NO: 12721 - protein, 83 aa, Zea mays
  Coding DNA Sequence Number=SeqID_7366
  Homolog annotation: Hit_ID=Q10BS7; Match level="QueryCoverage=65%, HitCoverage=18%, E-value=9e-09, Identity=53%"; Hit description =Putative uncharacterized protein
QNTIWILVGNVGKGPCPTRALVCQRLGTLVIFTVAQRLRAWAVLQRQDSCNFLVMATQHLTQVAKEFFSREHGWRSSLRIDSH

SEQ ID NO: 12722 - protein, 194 aa, Zea mays
  Coding DNA Sequence Number=SeqID_7367
CCRRAVALLLRPTEPSPPASRGRSSRRADADAETAVACFEALEEGARSMRAAVNSPPPHCYSHRRASATLLDARHVFDHVPPQRLPNLAAGLRVRPIAAAEWRPARRSAASAAARTCGAASGHSCKSQHPLLQPYRALVAPSAFLPSRRSSEGYIPRSCSSSSLQIYSRSPLLNLSPSSALMVSSQLTGSSDVA

SEQ ID NO: 12723 - protein, 112 aa, Zea mays
  misc_feature (4)..(4): Xaa can be any naturally occurring amino acid
  misc_feature (11)..(11): Xaa can be any naturally occurring amino acid
  misc_feature (15)..(15): Xaa can be any naturally occurring amino acid
  misc_feature (18)..(19): Xaa can be any naturally occurring amino acid
  misc_feature (22)..(22): Xaa can be any naturally occurring amino acid
  misc_feature (24)..(26): Xaa can be any naturally occurring amino acid
  misc_feature (30)..(30): Xaa can be any naturally occurring amino acid
  misc_feature (39)..(39): Xaa can be any naturally occurring amino acid
  misc_feature (44)..(44): Xaa can be any naturally occurring amino acid
  misc_feature (48)..(48): Xaa can be any naturally occurring amino acid
  misc_feature (55)..(56): Xaa can be any naturally occurring amino acid
  misc_feature (59)..(59): Xaa can be any naturally occurring amino acid
  misc_feature (61)..(61): Xaa can be any naturally occurring amino acid
  misc_feature (63)..(63): Xaa can be any naturally occurring amino acid
  misc_feature (69)..(71): Xaa can be any naturally occurring amino acid
  misc_feature (76)..(77): Xaa can be any naturally occurring amino acid
  misc_feature (81)..(81): Xaa can be any naturally occurring amino acid
  misc_feature (87)..(87): Xaa can be any naturally occurring amino acid
  Coding DNA Sequence Number=SeqID_7369
RGPXLFESRVXPSWXSLXXNPXFXXXKQLXTILPPSLQXHPISXHFIXDQFLPIXXCSXCXSXPQETYXXXMGREXXRRGXPKIPRXPALWRNRDPFRDPGWVVECALPCFD

SEQ ID NO: 12724 - protein, 112 aa, Zea mays; identical to SEQ ID NO: 12723
  misc_feature (4)..(4): Xaa can be any naturally occurring amino acid
  misc_feature (11)..(11): Xaa can be any naturally occurring amino acid
  misc_feature (15)..(15): Xaa can be any naturally occurring amino acid
  misc_feature (18)..(19): Xaa can be any naturally occurring amino acid
  misc_feature (22)..(22): Xaa can be any naturally occurring amino acid
  misc_feature (24)..(26): Xaa can be any naturally occurring amino acid
  misc_feature (30)..(30): Xaa can be any naturally occurring amino acid
  misc_feature (39)..(39): Xaa can be any naturally occurring amino acid
  misc_feature (44)..(44): Xaa can be any naturally occurring amino acid
  misc_feature (48)..(48): Xaa can be any naturally occurring amino acid
  misc_feature (55)..(56): Xaa can be any naturally occurring amino acid
  misc_feature (59)..(59): Xaa can be any naturally occurring amino acid
  misc_feature (61)..(61): Xaa can be any naturally occurring amino acid
  misc_feature (63)..(63): Xaa can be any naturally occurring amino acid
  misc_feature (69)..(71): Xaa can be any naturally occurring amino acid
  misc_feature (76)..(77): Xaa can be any naturally occurring amino acid
  misc_feature (81)..(81): Xaa can be any naturally occurring amino acid
  misc_feature (87)..(87): Xaa can be any naturally occurring amino acid
  Coding DNA Sequence Number=SeqID_7370

SEQ ID NO: 12725 - protein, 107 aa, Zea mays
  Coding DNA Sequence Number=SeqID_7372
  Gene Ontology: Mol. function=naringenin 3-dioxygenase activity
  Homolog annotation: Hit_ID=Q43262; Match level="QueryCoverage=42%, HitCoverage=12%, E-value=2e-16, Identity=91%"; Hit description =Flavanone 3-beta-hydroxylase
MAPVSISAVPFLPTAAEGETKLRASFVREEDERPKVPRDRFSDEAPRGVSTRIKVHTTELVMSEIQRATGPRPGDGAGPSLPGWSDPTALGLLSPQCPRNIRLRPSA

SEQ ID NO: 12726 - protein, 107 aa, Zea mays; identical to SEQ ID NO: 12725
  Coding DNA Sequence Number=SeqID_7373
  Gene Ontology: Mol. function=naringenin 3-dioxygenase activity
  Homolog annotation: Hit_ID=Q43262; Match level="QueryCoverage=42%, HitCoverage=12%, E-value=2e-16, Identity=91%"; Hit description =Flavanone 3-beta-hydroxylase

SEQ ID NO: 12727 - protein, 133 aa, Zea mays
  Coding DNA Sequence Number=SeqID_7374
  Homolog annotation: Hit_ID=A2Y640; Match level="QueryCoverage=100%, HitCoverage=96%, E-value=2e-35, Identity=58%"; Hit description =Putative uncharacterized protein
MDGKSFSNEQQAQQKNPDAVTNSVPSQGQEPLNTFPDSDDGNTNTGPLNGHAAAHVNMEAAISTEDVIRAGGFGAKDDIGSLLPTAIDSTDFEASLRDARGFEGEKAAPSHPGLGWKGEKADGGTKLADVAEQ

SEQ ID NO: 12728 - protein, 166 aa, Zea mays
  Coding DNA Sequence Number=SeqID_7375
  Gene Ontology: Mol. function=Rho GTPase activator activity; Cellular component=intracellular; Biological process=signal transduction
  Homolog annotation: Hit_ID=A2Z7W0; Match level="QueryCoverage=100%, HitCoverage=59%, E-value=2e-70, Identity=77%"; Hit description =Putative uncharacterized protein
IISRGGVDSEGRPVMVIVGAHFFFRCLDLERFVLYVVKEFEFLIQNPYTIVYFHFGASLHPHPDLGFMKRLQQILGGKHKKNFHTIYILPPPLGLRTPVMGMQLFFDGEVWKKVVYVDRLVQLFKYVPREQLPIPDFVFHHALEVNGGKGIIVAPRTKHFSQSPFG

SEQ ID NO: 12729 - protein, 139 aa, Zea mays
  misc_feature (18)..(20): Xaa can be any naturally occurring amino acid
  misc_feature (26)..(27): Xaa can be any naturally occurring amino acid
  misc_feature (31)..(31): Xaa can be any naturally occurring amino acid
  misc_feature (33)..(35): Xaa can be any naturally occurring amino acid
  misc_feature (52)..(53): Xaa can be any naturally occurring amino acid
  Coding DNA Sequence Number=SeqID_7376
  Homolog annotation: Hit_ID=Q10JT5; Match level="QueryCoverage=83%, HitCoverage=47%, E-value=3e-08, Identity=37%"; Hit description =Transcription initiation factor IID, 31kD subunit family protein, expressed
LRASSRRSRGGILFRLRXXXRRTSRXXNRMXLXXXIAAPPGSIPLPPEQDTXXAQNYQLLPPLKPPPQYEETEDENGEPNPSNPANSNPSYSQDQSNKEQQQQHTPQHGQKVSFQLNAVAAAAAAAKRPRMTIDQLNMG

SEQ ID NO: 12730 - protein, 159 aa, Zea mays
  misc_feature (1)..(15): Xaa can be any naturally occurring amino acid
  misc_feature (18)..(58): Xaa can be any naturally occurring amino acid
  misc_feature (60)..(62): Xaa can be any naturally occurring amino acid
  misc_feature (65)..(67): Xaa can be any naturally occurring amino acid
  misc_feature (87)..(87): Xaa can be any naturally occurring amino acid
  misc_feature (98)..(99): Xaa can be any naturally occurring amino acid
  misc_feature (114)..(114): Xaa can be any naturally occurring amino acid
  misc_feature (118)..(118): Xaa can be any naturally occurring amino acid
  misc_feature (123)..(124): Xaa can be any naturally occurring amino acid
  misc_feature (127)..(128): Xaa can be any naturally occurring amino acid
  misc_feature (134)..(134): Xaa can be any naturally occurring amino acid
  misc_feature (136)..(141): Xaa can be any naturally occurring amino acid
  misc_feature (154)..(159): Xaa can be any naturally occurring amino acid
  Coding DNA Sequence Number=SeqID_7377
XXXXXXXXXXXXXXXIQXXXXXXXXXXXXXXXXXXXXXXXXXXXXXXXXXXXXXXXXXFXXXGVXXXKFPDGFPPVQLEGQPVERSXNLWLTAIVILXXVVNFIDLMLDGFFFXFFLXKSNSXXVDXXTGFLAXNXXXXXXKKKKKKKKKKKKXXXXXX

SEQ ID NO: 12731 - protein, 355 aa, Zea mays
  misc_feature (104)..(104): Xaa can be any naturally occurring amino acid
  Coding DNA Sequence Number=SeqID_7379
  Gene Ontology: Mol. function=nickel ion binding; Cellular component =extracellular space
  Homolog annotation: Hit_ID=A2X8F0; Match level="QueryCoverage=100%, HitCoverage=100%, E-value=1e-173, Identity=83%"; Hit description =Putative uncharacterized protein
  Pfam annotation: Domain name=UPF0160; Domain location=31-354; Score =500.8; E_value=1.6e-147; Accession=PF03690.4; Description =Uncharacterised protein family (UPF0160)
  Subcellular localization annotation: CTP_CleavageSite=16; ConfidenceScore=5.02e-01
MAAAAGATSPKRLRVYSSAAGDADSSNGAGNGRRVGTHNGSFHCDEALGCFLIRLTSQFAGADVVRTRDSQILDSLEAVLDVGGVYDPSRHRYDHHQKGFNEVXGHGFNTKLSSAGLVYKHFGKEIIAKELQLNEEHEDVHRVYLAIYKSFVEALDAIDNGINQYDTEQTPKYVNNTHLSSRVGRLNPDWTEADQSPEKENAAFQKAMALAGSEFMESVRFHVKSWLPARSIVMECLLSRGNVDPSGEIMVLDRFCPWKLHLFELEEELKTDPLTKYVLYEDERSKGWRVQAVSVAPDRFESRKALPEKWRGMRDDELSKETGIPGCVFIHMSGFIGGNKTYEGALEMARAALKC

SEQ ID NO: 12732 - protein, 134 aa, Zea mays
  Coding DNA Sequence Number=SeqID_7380
ILLLLHLLARSFSSDGVGVGAGAYDGAEGRPPPPPPLEWKRDDAAMEMMMALMTRYRYGGVSQVAATARARGSSSSTNAAAAGPRNRAPTAISSARRPPPSRCARSPSIPSLVLARRSSSPEPSAARQLSSHRP

SEQ ID NO: 12733 - protein, 91 aa, Zea mays
  Coding DNA Sequence Number=SeqID_7381
  Gene Ontology: Mol. function=electron carrier activity; Cellular component=mitochondrial respiratory chain; Biological process =electron transport
  Homolog annotation: Hit_ID=Q4HVX7; Match level="QueryCoverage=100%, HitCoverage=83%, E-value=7e-49, Identity=97%"; Hit description =Cytochrome c
  Pfam annotation: Domain name=Cytochrom_C; Domain location=1-90; Score= 78.3; E_value=2.5e-20; Accession=PF00034.11; Description=Cytochrome c
RCAQCHTVEKDGGNKIGPAVHGLWGRKTGSVEGYAYTDANKQKGIEWNDDTLFEYLENPKKYIPGTKMAFGGLKKAKDRNDLIAYLKDSTK

SEQ ID NO: 12734 - protein, 99 aa, Zea mays
  misc_feature (10)..(10): Xaa can be any naturally occurring amino acid
  misc_feature (35)..(35): Xaa can be any naturally occurring amino acid
  misc_feature (38)..(38): Xaa can be any naturally occurring amino acid
  misc_feature (46)..(46): Xaa can be any naturally occurring amino acid
  misc_feature (65)..(65): Xaa can be any naturally occurring amino acid
  misc_feature (79)..(79): Xaa can be any naturally occurring amino acid
  misc_feature (87)..(87): Xaa can be any naturally occurring amino acid
  misc_feature (91)..(91): Xaa can be any naturally occurring amino acid
  Coding DNA Sequence Number=SeqID_7382
PQPLSIDTRXRDPSRPDPTLPRAASLILSASGLPXSPXTHHKREKXGPRRSVPLSTGGPYGWPHXGKNVRPFRGRAKLXSKSGLREXVLSXRDGVRLSR

SEQ ID NO: 12735 - protein, 222 aa, Zea mays
  misc_feature (1)..(18): Xaa can be any naturally occurring amino acid
  Coding DNA Sequence Number=SeqID_7384
XXXXXXXXXXXXXXXXXXACAATPGWGLPLPFPQIQLRFSIPFPSPSPAREPVSVNPAPGSISPKEAALHDLLPDPSIHPSIHPRLGRGGVRAVENGVGDPRWTPARLGALRTGGCCGTPPGVSAGPAPGGKKLGAQGGLRQTGPSFPREAHSARSILGAPPLFSLHNHPCSPPQWTQYAVTKPRPPPKPSLPRPFFYPNLGQPAVTPPPPDKNPPPAPRKR

SEQ ID NO: 12736 - protein, 147 aa, Zea mays
  misc_feature (54)..(54): Xaa can be any naturally occurring amino acid
  misc_feature (92)..(92): Xaa can be any naturally occurring amino acid
  misc_feature (96)..(96): Xaa can be any naturally occurring amino acid
  misc_feature (115)..(115): Xaa can be any naturally occurring amino acid
  misc_feature (131)..(132): Xaa can be any naturally occurring amino acid
  Coding DNA Sequence Number=SeqID_7386
  Gene Ontology: Mol. function=metal ion binding; Cellular component =cell junction
  Homolog annotation: Hit_ID=A2ZKZ0; Match level="QueryCoverage=55%, HitCoverage=64%, E-value=2e-26, Identity=76%"; Hit description =Putative uncharacterized protein
  Pfam annotation: Domain name=LIM; Domain location=47-106; Score=26.7; E_value=4.3e-06; Accession=PF00412.12; Description=LIM domain
  Subcellular localization annotation: CTP_CleavageSite=26; ConfidenceScore=5.25e-01
PTNPQFPYRQPSATQPRLRKQSVSLRRQEERRRRPWRPPFQGTTTKCTACEQDXVYLVDKLTADNRIYHKACFRCHHCKGTLKLANSPPFSXGVLXYCRPHFRQLVQEEKGSLDXSFEGTSPKVVKPEKKXXGKWRMATKVSSGLCW

SEQ ID NO: 12737 - protein, 173 aa, Zea mays
  Coding DNA Sequence Number=SeqID_7387
  Gene Ontology: Mol. function=nucleic acid binding; Cellular component= nuclear speck; Biological process=nuclear mRNA splicing, via spliceosome
  Homolog annotation: Hit_ID=Q6K4N0; Match level="QueryCoverage=58%, HitCoverage=54%, E-value=3e-26, Identity=59%"; Hit description =Putative Splicing factor, arginine/serine-rich 7
  Pfam annotation: Domain name=RRM_1; Domain location=4-70; Score=55.8; E_value=1.5e-13; Accession=PF00076.12; Description=RNA recognition motif. (a.k.a. RRM, RBD, or
  Pfam annotation: Domain name=zf-CCHC; Domain location=86-103; Score =33.0; E_value=1.1e-06; Accession=PF00098.13; Description=Zinc knuckle
  Pfam module annotation: Pfam domain module=RRM_1::zf-CCHC; Domain location=4-70::86-103
MARVYVGNLDSRVTSGELEDEFRVFGVLRSVWIARKPPGFAFIDFDDRRDAEDAIRDLDGKNGWRVELSRNSSGRGGRDRYGGSESKCYECGETGHFARECRLRIGSGGLGSGRRRSRSRSRSRSRSRSRSRSRSPRYRRSPSYSRRSYSPRYRSPRRRSPSPARARSYSRSP

SEQ ID NO: 12738 - protein, 176 aa, Zea mays
  misc_feature (1)..(17): Xaa can be any naturally occurring amino acid
  Coding DNA Sequence Number=SeqID_7388
  Subcellular localization annotation: CTP_CleavageSite=64; ConfidenceScore=5.05e-01
XXXXXXXXXXXXXXXXXRFTLSRWPVAWSVRLRFPDSIPTIPLPASCRPAGGRCKRNQPGNGSCAAAGGETQGRRRRGEEERVVAGGRQQALGGRPSPCSTRPFWLTGWGGGSPDPIPGPNKRVHAGWGEPESWGLGRPPPPRGARHRGRLTLLLISSRQEGRPMRLYWRRGTAGC

SEQ ID NO: 12739 - protein, 126 aa, Zea mays
  misc_feature (1)..(7): Xaa can be any naturally occurring amino acid
  misc_feature (84)..(84): Xaa can be any naturally occurring amino acid
  Coding DNA Sequence Number=SeqID_7390
  Subcellular localization annotation: CTP_CleavageSite=55; ConfidenceScore=5.08e-01
XXXXXXXSNGGDSEVPFTPPPRVFCTQHQGGLPGFSLGEPQAPSRSSRSILGEARASLPGSLHYFTHNTGLLFRTMNGHTQLRXTAFVQIPEPVKIYWEGGKKERGRNTSETERKKNAGRKKSRFV

SEQ ID NO: 12740 - protein, 86 aa, Zea mays
  Coding DNA Sequence Number=SeqID_7392
  Homolog annotation: Hit_ID=A8IXM2; Match level="QueryCoverage=100%, HitCoverage=100%, E-value=6e-22, Identity=62%"; Hit description =Wound-responsive protein-related
  Subcellular localization annotation: CTP_CleavageSite=47; ConfidenceScore=5.14e-01
MSYLNKVWMAASFVAVQGNADHGVKLKSGLTSAHRLQRRLSSDLRPLAAADLTGDSLPSEERRRTSSSTPDESLRQVMYLNCWAQG

SEQ ID NO: 12741 - protein, 190 aa, Zea mays
  misc_feature (1)..(5): Xaa can be any naturally occurring amino acid
  misc_feature (7)..(7): Xaa can be any naturally occurring amino acid
  misc_feature (9)..(10): Xaa can be any naturally occurring amino acid
  misc_feature (13)..(13): Xaa can be any naturally occurring amino acid
  misc_feature (15)..(15): Xaa can be any naturally occurring amino acid
  misc_feature (17)..(17): Xaa can be any naturally occurring amino acid
  misc_feature (20)..(20): Xaa can be any naturally occurring amino acid
  misc_feature (22)..(29): Xaa can be any naturally occurring amino acid
  misc_feature (31)..(31): Xaa can be any naturally occurring amino acid
  misc_feature (35)..(35): Xaa can be any naturally occurring amino acid
  misc_feature (37)..(38): Xaa can be any naturally occurring amino acid
  misc_feature (40)..(40): Xaa can be any naturally occurring amino acid
  misc_feature (42)..(44): Xaa can be any naturally occurring amino acid
  misc_feature (46)..(48): Xaa can be any naturally occurring amino acid
  misc_feature (50)..(51): Xaa can be any naturally occurring amino acid
  misc_feature (53)..(54): Xaa can be any naturally occurring amino acid
  misc_feature (57)..(58): Xaa can be any naturally occurring amino acid
  misc_feature (61)..(62): Xaa can be any naturally occurring amino acid
  misc_feature (64)..(64): Xaa can be any naturally occurring amino acid
  misc_feature (66)..(66): Xaa can be any naturally occurring amino acid
  misc_feature (68)..(68): Xaa can be any naturally occurring amino acid
  misc_feature (70)..(71): Xaa can be any naturally occurring amino acid
  misc_feature (73)..(74): Xaa can be any naturally occurring amino acid
  misc_feature (76)..(76): Xaa can be any naturally occurring amino acid
  misc_feature (82)..(84): Xaa can be any naturally occurring amino acid
  misc_feature (87)..(87): Xaa can be any naturally occurring amino acid
  misc_feature (90)..(92): Xaa can be any naturally occurring amino acid
  misc_feature (94)..(94): Xaa can be any naturally occurring amino acid
  misc_feature (96)..(96): Xaa can be any naturally occurring amino acid
  misc_feature (99)..(101): Xaa can be any naturally occurring amino acid
  misc_feature (103)..(110): Xaa can be any naturally occurring amino acid
  misc_feature (112)..(115): Xaa can be any naturally occurring amino acid
  misc_feature (117)..(118): Xaa can be any naturally occurring amino acid
  misc_feature (120)..(120): Xaa can be any naturally occurring amino acid
  misc_feature (122)..(128): Xaa can be any naturally occurring amino acid
  misc_feature (131)..(131): Xaa can be any naturally occurring amino acid
  misc_feature (133)..(135): Xaa can be any naturally occurring amino acid
  misc_feature (140)..(145): Xaa can be any naturally occurring amino acid
  misc_feature (147)..(150): Xaa can be any naturally occurring amino acid
  misc_feature (152)..(154): Xaa can be any naturally occurring amino acid
  misc_feature (159)..(160): Xaa can be any naturally occurring amino acid
  misc_feature (162)..(163): Xaa can be any naturally occurring amino acid
  misc_feature (166)..(173): Xaa can be any naturally occurring amino acid
  misc_feature (175)..(175): Xaa can be any naturally occurring amino acid
  misc_feature (177)..(178): Xaa can be any naturally occurring amino acid
  misc_feature (184)..(189): Xaa can be any naturally occurring amino acid
  Coding DNA Sequence Number=SeqID_7393
XXXXXDXVXXHVXMXVXVYXLXXXXXXXXVXVCTXVXXRXLXXXAXXXCXXVXXLCXXCTXXCXHXRXFXXTXXAXCIPMYXXXVPXMLXXXAXVXMRXXXVXXXXXXXXVXXXXCXXPXAXXXXXXXCVXHXXXILVRXXXXXXYXXXXIXXXCVPGXXHXXGMXXXXXXXXFXLXXARCNTXXXXXXR

SEQ ID NO: 12742 - protein, 259 aa, Zea mays
  misc_feature (1)..(60): Xaa can be any naturally occurring amino acid
  misc_feature (62)..(80): Xaa can be any naturally occurring amino acid
  misc_feature (82)..(84): Xaa can be any naturally occurring amino acid
  misc_feature (86)..(89): Xaa can be any naturally occurring amino acid
  misc_feature (91)..(91): Xaa can be any naturally occurring amino acid
  misc_feature (93)..(94): Xaa can be any naturally occurring amino acid
  misc_feature (96)..(106): Xaa can be any naturally occurring amino acid
  misc_feature (109)..(114): Xaa can be any naturally occurring amino acid
  misc_feature (116)..(122): Xaa can be any naturally occurring amino acid
  misc_feature (124)..(125): Xaa can be any naturally occurring amino acid
  misc_feature (127)..(127): Xaa can be any naturally occurring amino acid
  misc_feature (129)..(132): Xaa can be any naturally occurring amino acid
  misc_feature (134)..(136): Xaa can be any naturally occurring amino acid
  misc_feature (138)..(139): Xaa can be any naturally occurring amino acid
  misc_feature (141)..(143): Xaa can be any naturally occurring amino acid
  misc_feature (145)..(149): Xaa can be any naturally occurring amino acid
  misc_feature (151)..(153): Xaa can be any naturally occurring amino acid
  misc_feature (155)..(158): Xaa can be any naturally occurring amino acid
  misc_feature (160)..(160): Xaa can be any naturally occurring amino acid
  misc_feature (162)..(163): Xaa can be any naturally occurring amino acid
  misc_feature (166)..(166): Xaa can be any naturally occurring amino acid
  misc_feature (169)..(173): Xaa can be any naturally occurring amino acid
  misc_feature (175)..(176): Xaa can be any naturally occurring amino acid
  misc_feature (178)..(182): Xaa can be any naturally occurring amino acid
  misc_feature (184)..(184): Xaa can be any naturally occurring amino acid
  misc_feature (187)..(191): Xaa can be any naturally occurring amino acid
  misc_feature (194)..(196): Xaa can be any naturally occurring amino acid
  misc_feature (245)..(245): Xaa can be any naturally occurring amino acid
  misc_feature (253)..(253): Xaa can be any naturally occurring amino acid
  Coding DNA Sequence Number=SeqID_7395
XXXXXXXXXXXXXXXXXXXXXXXXXXXXXXXXXXXXXXXXXXXXXXXXXXXXXXXXXXXXYXXXXXXXXXXXXXXXXXXXNXXXIXXXXVXQXXCXXXXXXXXXXXFRXXXXXXVXXXXXXXVXXAXYXXXXVXXXSXXDXXXHXXXXXLXXXEXXXXTXEXXLTXISXXXXXLXXVXXXXXSXRNXXXXXVQXXXRKWKTKESSQRFNQIKRRFRDRTEDSARTGRINIGMSRESRAAHTRLAXEDAIVLGXRENSKL

SEQ ID NO: 12743 - protein, 91 aa, Zea mays
  misc_feature (48)..(48): Xaa can be any naturally occurring amino acid
  misc_feature (52)..(52): Xaa can be any naturally occurring amino acid
  misc_feature (58)..(58): Xaa can be any naturally occurring amino acid
  Coding DNA Sequence Number=SeqID_7396
  Homolog annotation: Hit_ID=Q8LFE2; Match level="QueryCoverage=100%, HitCoverage=83%, E-value=7e-22, Identity=67%"; Hit description =Photosystem II
  Subcellular localization annotation: CTP_CleavageSite=33; ConfidenceScore=5.74e-01
MASMTMTSSFLPTVSNLPANISSNSRRSLTVVKASGSENTTSLENNEXQNRXMKLRRXDLVFTAAAAAVCSLAKVAMADDEPKRGTRTCQE

SEQ ID NO: 12744 - protein, 247 aa, Zea mays
  misc_feature (53)..(53): Xaa can be any naturally occurring amino acid
  misc_feature (108)..(108): Xaa can be any naturally occurring amino acid
  misc_feature (146)..(146): Xaa can be any naturally occurring amino acid
  misc_feature (151)..(151): Xaa can be any naturally occurring amino acid
  misc_feature (169)..(169): Xaa can be any naturally occurring amino acid
  misc_feature (174)..(174): Xaa can be any naturally occurring amino acid
  misc_feature (183)..(183): Xaa can be any naturally occurring amino acid
  misc_feature (188)..(188): Xaa can be any naturally occurring amino acid
  misc_feature (207)..(208): Xaa can be any naturally occurring amino acid
  misc_feature (219)..(219): Xaa can be any naturally occurring amino acid
  misc_feature (223)..(223): Xaa can be any naturally occurring amino acid
  Coding DNA Sequence Number=SeqID_7397
  Gene Ontology: Mol. function=protein binding; Biological process =polarity specification of adaxial/abaxial axis
  Homolog annotation: Hit_ID=Q84WN1; Match level="QueryCoverage=93%, HitCoverage=46%, E-value=2e-80, Identity=73%"; Hit description =Putative uncharacterized protein At2g41370
YEVFLLLLQFLYSGQVSIVPQKHEPRPNCGERGCWHTHCSAAVDLALDTLAAXRYFGVEQLALLTQKQLASMVEKASIEDVMKVLIASRKQDMHQFWTTCSHLVAKSXGLPPEILAKLLPIDVVTKIEELVLNLLYSPFSMPHNHXHDLSXAQDLEDQKIRGLRRALDXSDVNXWKLMVMGEXGLNLXDESVSIGITLLKACVREVXXGLLGARTWPMXNYPXGPRRGKPLPHGLRWPSILGAGVHH

SEQ ID NO: 12745 - protein, 63 aa, Zea mays
  Coding DNA Sequence Number=SeqID_7398
  Gene Ontology: Mol. function=ubiquitin-protein ligase activity; Cellular component=mitochondrion; Biological process=regulation of G2/M transition of mitotic cell cycle
  Homolog annotation: Hit_ID=A2XW69; Match level="QueryCoverage=84%, HitCoverage=5%, E-value=9e-15, Identity=75%"; Hit description=E3 ubiquitin-protein ligase BRE1-like 1
LLSLVKQSDILKSKHEECEAYVVEIESIGHAYEDIMSQNQQLLQQIIERDDHNTKVSTSPRSR

SEQ ID NO: 12746 - protein, 97 aa, Zea mays
  Coding DNA Sequence Number=SeqID_7399
TSVCGGGGRRRKRNMQAVARAGAASSGHRGAGEGRESGAGAVDHGAQDAVQRHGAPRPGAHLLDIKDSENRCSRLGAMQRVRPGVMSEIAQQIDHEE

SEQ ID NO: 12747 - protein, 97 aa, Zea mays; identical to SEQ ID NO: 12746
  Coding DNA Sequence Number=SeqID_7400

SEQ ID NO: 12748 - protein, 118 aa, Zea mays
  misc_feature (110)..(111): Xaa can be any naturally occurring amino acid
  Coding DNA Sequence Number=SeqID_7401
SLIPQKNEERNDRVDHFLSEWYFPISTLYFWQESQKWPHKMQYSKTTSHLSVRCSSPAKCQVADLSTWLKAAAIAQSSPLGTQSTGEPRERGSPVQLHRMMTMSLSLSQXXHLRRLRR

SEQ ID NO: 12749 - protein, 128 aa, Zea mays
  misc_feature (8)..(8): Xaa can be any naturally occurring amino acid
  misc_feature (17)..(17): Xaa can be any naturally occurring amino acid
  misc_feature (19)..(21): Xaa can be any naturally occurring amino acid
  misc_feature (23)..(26): Xaa can be any naturally occurring amino acid
  misc_feature (28)..(28): Xaa can be any naturally occurring amino acid
  misc_feature (30)..(32): Xaa can be any naturally occurring amino acid
  misc_feature (35)..(35): Xaa can be any naturally occurring amino acid
  misc_feature (38)..(41): Xaa can be any naturally occurring amino acid
  misc_feature (44)..(49): Xaa can be any naturally occurring amino acid
  misc_feature (51)..(52): Xaa can be any naturally occurring amino acid
  misc_feature (56)..(56): Xaa can be any naturally occurring amino acid
  misc_feature (58)..(61): Xaa can be any naturally occurring amino acid
  misc_feature (63)..(63): Xaa can be any naturally occurring amino acid
  misc_feature (67)..(67): Xaa can be any naturally occurring amino acid
  misc_feature (69)..(69): Xaa can be any naturally occurring amino acid
  misc_feature (71)..(83): Xaa can be any naturally occurring amino acid
  misc_feature (85)..(87): Xaa can be any naturally occurring amino acid
  misc_feature (89)..(89): Xaa can be any naturally occurring amino acid
  misc_feature (91)..(92): Xaa can be any naturally occurring amino acid
  misc_feature (94)..(102): Xaa can be any naturally occurring amino acid
  misc_feature (109)..(110): Xaa can be any naturally occurring amino acid
  misc_feature (112)..(112): Xaa can be any naturally occurring amino acid
  misc_feature (114)..(122): Xaa can be any naturally occurring amino acid
  misc_feature (124)..(126): Xaa can be any naturally occurring amino acid
  misc_feature (128)..(128): Xaa can be any naturally occurring amino acid
  Coding DNA Sequence Number=SeqID_7402
NPPPLQKXLWEFKKPRXRXXXRXXXXIXFXXXVHXTVXXXXFIXXXXXXRXXSRIXLXXXXKXFFFXYXIXXXXXXXXXXXXXFXXXGXFXXIXXXXXXXXXLYRFFYXXYXIXXXXXXXXXSXXXIX

SEQ ID NO: 12750 - protein, 172 aa, Zea mays
  misc_feature (156)..(172): Xaa can be any naturally occurring amino acid
  Coding DNA Sequence Number=SeqID_7404
  Subcellular localization annotation: CTP_CleavageSite=61; ConfidenceScore=5.11e-01
SSYITALLVKLFWQLQLHDLCLGVVAAAAQSVGFSGSCTAADSWSSFSGSCSYMILCFGVVAAAAQTVGFSGSCTADSWSSFSGSCSLQLHDFVSRCSSSRSPNGWFFWQPQPKRLVFLAAAATVLCDGTVVSCTTKITSVLTAVGGQLSYVHPYXXXXXXXXXXXXXXXXX

SEQ ID NO: 12751 - protein, 124 aa, Zea mays
  Coding DNA Sequence Number=SeqID_7405
KIPKGKISLSLYFPVRKYLILIITRWLFGHPTVHERITEWLFARELYRSTTSTHTKKPQRLSAPPSLESGEIYGEMTTVTCGCGLRELEKRAATAKTGIGRVVEKDRIDRGGGGDLVRFSLLSG

SEQ ID NO: 12752 - protein, 99 aa, Zea mays
  Coding DNA Sequence Number=SeqID_7407
  Homolog annotation: Hit_ID=Q9XEQ6; Match level="QueryCoverage=43%, HitCoverage=21%, E-value=4e-07, Identity=67%"; Hit description =Putative uncharacterized protein
MNRGGRAGGGQRSLGYFFGSGEPPKPAGAPAASAPPVEKPSAAKTDAGKQAAGGGTSQTNNYHRADGQNTGNFLTDRPSTKDHAGPGGGCFLGYLFGGN

SEQ ID NO: 12753 - protein, 127 aa, Zea mays
  misc_feature (1)..(21): Xaa can be any naturally occurring amino acid
  misc_feature (30)..(30): Xaa can be any naturally occurring amino acid
  misc_feature (32)..(32): Xaa can be any naturally occurring amino acid
  misc_feature (60)..(60): Xaa can be any naturally occurring amino acid
  misc_feature (80)..(80): Xaa can be any naturally occurring amino acid
  misc_feature (82)..(82): Xaa can be any naturally occurring amino acid
  misc_feature (84)..(84): Xaa can be any naturally occurring amino acid
  misc_feature (90)..(90): Xaa can be any naturally occurring amino acid
  misc_feature (92)..(92): Xaa can be any naturally occurring amino acid
  misc_feature (95)..(95): Xaa can be any naturally occurring amino acid
  misc_feature (99)..(103): Xaa can be any naturally occurring amino acid
  misc_feature (105)..(106): Xaa can be any naturally occurring amino acid
  misc_feature (111)..(111): Xaa can be any naturally occurring amino acid
  misc_feature (114)..(117): Xaa can be any naturally occurring amino acid
  misc_feature (119)..(119): Xaa can be any naturally occurring amino acid
  misc_feature (125)..(125): Xaa can be any naturally occurring amino acid
  Coding DNA Sequence Number=SeqID_7408
XXXXXXXXXXXXXXXXXXXXXLCLVVVVRXPXLDAGPYMLSPTYVRANKRIPRRYSEASXWSMPKCSVKGQNKNHRRLCXVXVXMDRFQXLXMEXKVKXXXXXVXXLIEDXNPXXXXVXPINFMXVK

SEQ ID NO: 12754 - protein, 122 aa, Zea mays
  misc_feature (70)..(70): Xaa can be any naturally occurring amino acid
  misc_feature (106)..(106): Xaa can be any naturally occurring amino acid
  Coding DNA Sequence Number=SeqID_7410
YYIDASRASRTATSECIASCAMVIALPLPGNSLLFQIIRSRGARGRAGTYSTAASLIRGCIAAAAAEVLXPSPPLAALLLVLELLVLLLLQQQQAVVVVIVVVVAXGEAALLLLLVLVARPT

SEQ ID NO: 12755 - protein, 179 aa, Zea mays
  misc_feature (2)..(4): Xaa can be any naturally occurring amino acid
  misc_feature (6)..(6): Xaa can be any naturally occurring amino acid
  misc_feature (12)..(12): Xaa can be any naturally occurring amino acid
  misc_feature (17)..(17): Xaa can be any naturally occurring amino acid
  misc_feature (174)..(174): Xaa can be any naturally occurring amino acid
  misc_feature (177)..(178): Xaa can be any naturally occurring amino acid
  Coding DNA Sequence Number=SeqID_7412
EXXXQXKGCCRXRGSPXNSINQVRCSRNHAVVESEHSESAFRCLHNDRILLAVTRRDIERGEHHGTRVEPKEFVTPSHLPVAAARNRRRSSKIYKREAHWHPRSEFPIVPVSEQKKKATTCPGLRSASQSPPHLSLRLLVIGGNEARLHAATALTAWVYRVIWGQKEVSEDSRXVVXXL

SEQ ID NO: 12756 - protein, 252 aa, Zea mays
  misc_feature (177)..(177): Xaa can be any naturally occurring amino acid
  misc_feature (191)..(193): Xaa can be any naturally occurring amino acid
  misc_feature (196)..(200): Xaa can be any naturally occurring amino acid
  misc_feature (203)..(205): Xaa can be any naturally occurring amino acid
  misc_feature (209)..(213): Xaa can be any naturally occurring amino acid
  misc_feature (215)..(220): Xaa can be any naturally occurring amino acid
  Coding DNA Sequence Number=SeqID_7414
  Gene Ontology: Mol. function=translation initiation factor activity; Cellular component=eukaryotic translation initiation factor 3 complex; Biological process=translation
  Homolog annotation: Hit_ID=A3BRT1; Match level="QueryCoverage=82%, HitCoverage=54%, E-value=5e-98, Identity=83%"; Hit description =Putative uncharacterized protein
  Pfam annotation: Domain name=WD40; Domain location=1-38; Score=6.4; E_ value=5.1; Accession=PF00400.22; Description=WD domain, G-beta repeat
  Pfam annotation: Domain name=WD40; Domain location=136-174; Score =24.8; E_value=0.00031; Accession=PF00400.22; Description=WD domain, G-beta repeat
  Pfam annotation: Domain name=WD40; Domain location=42-80; Score=41.9; E_value=2.2e-09; Accession=PF00400.22; Description=WD domain, G-beta repeat
  Pfam module annotation: Pfam domain module=WD40::WD40::WD40; Domain location=1-38::136-174::42-80
MRPILMKGHERPLTFLRYNRDGDLLFSCAKDHTPTVWYADNGDRLGTYRGHNGAVWTCDVSHDSARLITGSADQTAKLWEVSTGKELFSFRFDAPARSVEFAIGDALAVVTTDNFMDHVPTVQVKRIAEDIDDQTEESALVITGIKGRINRAVWGPLNRTIITAGEDATIRIWDSEXGQLLNESDKESGHXXXISXXXXXLDXXXFLTXXXXXLXXXXXXLTLILCFSAFCKVFNNTIFTLHKELTQLVCPD

SEQ ID NO: 12757 - protein, 67 aa, Zea mays
  misc_feature (3)..(4): Xaa can be any naturally occurring amino acid
  misc_feature (7)..(7): Xaa can be any naturally occurring amino acid
  misc_feature (12)..(12): Xaa can be any naturally occurring amino acid
  Coding DNA Sequence Number=SeqID_7415
  Subcellular localization annotation: CTP_CleavageSite=39; ConfidenceScore=5.45e-01
KSXXQDXSGPAXPPPGGPGNLFNLKRTHFAPPVPTILVSTTQLACTICTQILPPPLHPDLLMMVLLG

SEQ ID NO: 12758 - protein, 151 aa, Zea mays
  Coding DNA Sequence Number=SeqID_7417
  Subcellular localization annotation: CTP_CleavageSite=75; ConfidenceScore=5.91e-01
FGTTKAASRHTRCTSASWRRTLPAYSSPPPSTSSPASTRRSPRAPCRSPWPPGPRPREGRPAGRSSTSSWTNELKDQMEATLLLNPYELCARPAASSRSYQMEQSMQSYLLRSPTGKIDGRSNSRMERQLQLGEKDRHQVLKDFSKLLDDQ

SEQ ID NO: 12759 - protein, 128 aa, Zea mays
  Coding DNA Sequence Number=SeqID_732
VHRHSISSAISCIDLVMAAAMLPRLVAVAALVALMCAVAVAQKVPAVGGAPVCNLVDQNVVNACFESCGRGMKIATADRITSAGKVKVQVDCCVAFGGHSCMCQMKKAWKAQGKSAQNNVGCVREKAC

SEQ ID NO: 12760 - protein, 162 aa, Zea mays
  Coding DNA Sequence Number=SeqID_734
  Gene Ontology: Mol. function=structural constituent of ribosome; Cellular component=ribonucleoprotein complex; Biological process =translation
  Homolog annotation: Hit_ID=Q42347; Match level="QueryCoverage=95%, HitCoverage=95%, E-value=2e-63, Identity=79%"; Hit description=60S ribosomal protein L24-1
  Pfam annotation: Domain name=Ribosomal_L24e; Domain location=3-73; Score=169.1; E_value=1.1e-47; Accession=PF01246.10; Description =Ribosomal protein L24e
MVLKTELCRFSGHKIYPGRGIRFIRSDSQVFLFINSKCKHYFHNKLKPSKLAWTTMYRKQHKKDAAQEAVKKRRRATKKPYSRSIVGATLEVIQKKRAEKPEVRDAAREAALRDIKERIKKTKDEKKAKKAEFASKQQKIKGSIPKTAAPKAAKLGGGGGRR

SEQ ID NO: 12761 - protein, 204 aa, Zea mays
  Coding DNA Sequence Number=SeqID_735
  Gene Ontology: Mol. function=transcription factor activity; Cellular component=nucleus; Biological process=regulation of transcription, DNA-dependent
  Homolog annotation: Hit_ID=O80340; Match level="QueryCoverage=100%, HitCoverage=100%, E-value=2e-70, Identity=67%"; Hit description =Ethylene-responsive transcription factor 4
  Pfam annotation: Domain name=AP2; Domain location=18-69; Score=77.8; E_value=3.5e-20; Accession=PF00847.10; Description=AP2 domain
MAKIGLKPDPVNNNAKEIRYRGVRKRPWGRYAAEIRDPGKKTRVWLGTFDTAEEAARAYDAAARDFRGAKAKTNFPNFLELSEKMPAAGGGFERSPSQSSTLDCDSPPAAVTPASAGIVPPQLELRLGGYQIPMARPIYFLDVMGVGNGGRAQPPVASAFRSPVACVAQSDSDSSSVVDFEGVMEKRSQLFDLDLNLSPPSEQA

SEQ ID NO: 12762 - protein, 95 aa, Zea mays
  Coding DNA Sequence Number=SeqID_736
  Gene Ontology: Biological process=double fertilization forming a zygote and endosperm
  Homolog annotation: Hit_ID=A1YMX5; Match level="QueryCoverage=98%, HitCoverage=86%, E-value=2e-46, Identity=100%"; Hit description =Putative uncharacterized protein
MQEKAEQWTESAKQTAQSACDKTADVALSARDKTANLTQSTQSKSADASHSTRESAQHGQEQTAGFLGQTGESVKNMAQGAFDGVKNSLGMNEKK

SEQ ID NO: 12763 - protein, 292 aa, Zea mays
  Coding DNA Sequence Number=SeqID_737
  Gene Ontology: Cellular component=chloroplast thylakoid membrane
  Homolog annotation: Hit_ID=Q9SB69; Match level="QueryCoverage=100%, HitCoverage=100%, E-value=1e-107, Identity=69%"; Hit description =Putative uncharacterized protein F22K18.50
  Subcellular localization annotation: CTP_CleavageSite=70; ConfidenceScore=5.76e-01
MESLSFPILNPLLASGSSLYRKQSSRMTSSMSSSVSFATGRTSLSTVRRSRVGVVKMQAVDEDIDLKQMRDMAAAKKRWDGLLREGKVKLLTPREAGYAIQLSNKPLLDVRPSSERNKAWVKGSDWVPIFDNEDNLDAGTLSKKVTSFAMGGWWSGTPILSFNKLFLSKVEEKFPKETELIVACQKGLRSLAACELLINAGYQNIFWVQGGLESAEDEDLVTEGSQPLKLAGIGGFSEFLGWTDQQRAQAAKEGWGYRLVFTARLFRVILAADALFLGAQQLGHYIQELRGH

SEQ ID NO: 12764 - protein, 209 aa, Zea mays
  misc_feature (90)..(90): Xaa can be any naturally occurring amino acid
  misc_feature (113)..(113): Xaa can be any naturally occurring amino acid
  Coding DNA Sequence Number=SeqID_738
  Homolog annotation: Hit_ID=A2ZPD9; Match level="QueryCoverage=88%, HitCoverage=77%, E-value=9e-22, Identity=36%"; Hit description =Putative uncharacterized protein
MAARRHAGSSSGPTSANLSMKLLVEVDRRGTPRRVVYAEAGKDVVDFLLTFLTLPIGTVVKLLRRNSMPMVGCVGNLYGSVEELPDDFIXTGTPGPPRTPCSGPPAAGFPCSXNAGSSSSSTGGFVRAGVTYEVMDDLEIAPRSNVDFITNLNRYGIRDIGCLQRKTVRVGDTEGLQILRASLKSKTVLTDVFLRTNTPSPSPRALTAG

SEQ ID NO: 12765 - protein, 127 aa, Zea mays
  Coding DNA Sequence Number=SeqID_739
  Subcellular localization annotation: CTP_CleavageSite=74; ConfidenceScore=5.11e-01
LSKYQTLLIFTGHRPPLSYIPSRAHGHTQTHGHWRLAGFTSRQAPGNAADNRCRSPKRMAARRRPFLLLPPPPSASAAAAAVRFTPSPVAPRGHVSSEKQVGTWNLKCQEKNQMVQEEPPGEEFDLI

SEQ ID NO: 12766 - protein, 183 aa, Zea mays
  Coding DNA Sequence Number=SeqID_741
  Subcellular localization annotation: CTP_CleavageSite=32; ConfidenceScore=5.38e-01
LEETISLKPVWQRHRRTSLQSQSSSLRDPRAAAAQVWRRRRFRSLRSLCLFILRLRFFLTLSAHTSGSLASPTSSRASQSPGPPLGTSTRDGYRCTAGWKAKRRSRSFGSGSGGAGGGGCGWRCGVSRWGRSGTGAGGGSQRGRGRRRRRSSLRAGAAAAMDGWEIRGEAEAEAAWIRGFGVV

SEQ ID NO: 12767 - protein, 139 aa, Zea mays
  Coding DNA Sequence Number=SeqID_743
  Gene Ontology: Mol. function=actin binding; Cellular component =intracellular; Biological process=response to stress
  Homolog annotation: Hit_ID=Q9ZSK4; Match level="QueryCoverage=100%, HitCoverage=100%, E-value=1e-66, Identity=87%"; Hit description =Actin-depolymerizing factor 3
  Pfam annotation: Domain name=Cofilin_ADF; Domain location=12-139; Score=211.7; E_value=1.7e-60; Accession=PF00241.10; Description =Cofilintropomyosin-type actin-bindin
MANAASGMAVHDDCKLKFLELKAKRTYRFIVYKIEEQQKQVVVEKLGEPGQSHDDFAASLPADECRYAIFDFDFVTAENCQKSKIFFVAWSPDTARVRSKMIYASSKDRFKRELDGIQVELQATDPTEMDLDVFKSRAN

SEQ ID NO: 12768 - protein, 245 aa, Zea mays
  Coding DNA Sequence Number=SeqID_744
  Gene Ontology: Mol. function=structural constituent of ribosome; Cellular component=ribonucleoprotein complex; Biological process =translation
  Homolog annotation: Hit_ID=Q4GXR1; Match level="QueryCoverage=93%, HitCoverage=95%, E-value=1e-105, Identity=81%"; Hit description =Ribosomal protein S3e
  Pfam annotation: Domain name=KH_2; Domain location=46-103; Score =39.9; E_value=9.1e-09; Accession=PF07650.7; Description=KH domain
  Pfam annotation: Domain name=Ribosomal_S3_C; Domain location=105-189; Score=115.8; E_value=1.3e-31; Accession=PF00189.10; Description =Ribosomal protein S3, C-terminal domain
  Pfam module annotation: Pfam domain module=KH_2::Ribosomal_S3_C; Domain location=46-103::105-189
MPAKTTSVKKRFVSDGMLRAELNEFLTRELAEDGYSGVDVRAAPSRTEIVISATRTQNVLGDKGRRIRELTSLIQKRFDFKDKAVELFAEKVAQRGLCAVAQAESLRYKLIGGLAVRRACYGVLRFIMESGAKGCEVVVSGKLRGQRAKSMKFVDGLMIHSGDPCNDYVNVATRHVLLRQGVLGIKVKIMLPWDQTGKLGPKKPLPDNVSVAEPKEEILPIAPTSDIKSKPEVAVPAVPVVPVVG

SEQ ID NO: 12769 - protein, 92 aa, Zea mays
  Coding DNA Sequence Number=SeqID_745
  Gene Ontology: Mol. function=RNA-directed DNA polymerase activity; Biological process=RNA-dependent DNA replication
  Homolog annotation: Hit_ID=Q8W0Y2; Match level="QueryCoverage=98%, HitCoverage=4%, E-value=4e-41, Identity=90%"; Hit description =Putative gag-pol
DLAFETKTSVVSPEHANSEQTDDASTLAKGLLGVTLVPETTMQSVPDVTSSPPVDQEVPTGSHLTPFGFSLDPPSDFALADALVEASPNPLV

SEQ ID NO: 12770 - protein, 218 aa, Zea mays
  misc_feature (19)..(19): Xaa can be any naturally occurring amino acid
  misc_feature (157)..(157): Xaa can be any naturally occurring amino acid
  Coding DNA Sequence Number=SeqID_746
  Gene Ontology: Mol. function=transposase activity; Biological process= transposition, DNA-mediated
  Homolog annotation: Hit_ID=B0J4S1; Match level="QueryCoverage=100%, HitCoverage=50%, E-value=5e-69, Identity=53%"; Hit description =Transposase IS204/IS1001/IS1096/IS1165 family protein
  Pfam annotation: Domain name=Transposase_12; Domain location=106-201; Score=102.8; E_value=1e-27; Accession=PF01610.8; Description =Transposase
SSFVPSGLVIESVSGSSDXTILAVRSKAVMAECPLCGTASRRIHSRYARQVADLPCAGRQIRLWVIARRFLCEIPHCRRRIFAERFGQDVVPVQSRRTARLECIVVAGIDDWAFRNNHCYGTIVCDLERRRIVRLLLNREIATVQAWLSDHPGIKIXVSRDRGGGYGEAAAKALPEVIQVADRWHLMENASAAFLGAVRRSMRVICTAIGATMINPEL

SEQ ID NO: 12771 - protein, 71 aa, Zea mays
  Coding DNA Sequence Number=SeqID_747
  Subcellular localization annotation: CTP_CleavageSite=48; ConfidenceScore=5.39e-01
ALFHPLPSYPAPPPHPPPCAPASAAPCTQARTTVPAPEERSGAAPHLRAASTPYERPPAAAAAHRLAAAAA

SEQ ID NO: 12772 - protein, 151 aa, Zea mays; identical to SEQ ID NO: 12758
  Coding DNA Sequence Number=SeqID_7418
  Subcellular localization annotation: CTP_CleavageSite=75; ConfidenceScore=5.91e-01

SEQ ID NO: 12773 - protein, 130 aa, Zea mays
  misc_feature (3)..(3): Xaa can be any naturally occurring amino acid
  misc_feature (13)..(13): Xaa can be any naturally occurring amino acid
  misc_feature (50)..(50): Xaa can be any naturally occurring amino acid
  misc_feature (85)..(85): Xaa can be any naturally occurring amino acid
  Coding DNA Sequence Number=SeqID_7419
  Subcellular localization annotation: CTP_CleavageSite=29; ConfidenceScore=5.55e-01
AAXGPDGSGVAPXARRGSLLSRRGAQSPRARGGGRARPPVAFRPGPRPGXAFPDPDSMGARPRRHGCSRGGPSDAIPGAGPMGGXGAAPVGTSPSAWPRGHAGVNPGGARLWQHGRGPCPGAQPRSGDRF

SEQ ID NO: 12774 - protein, 110 aa, Zea mays
  Coding DNA Sequence Number=SeqID_7421
  Subcellular localization annotation: CTP_CleavageSite=45; ConfidenceScore=5.42e-01
PGRGTSLIPSAWKHSRWRRARLLWRSTGRRRLHQFTVSPTERLTSAAARSTGRRRQRQLKDGGAQDPSWLLHRLIQANKVVVATSRRLFLHRFELEKTNFHRLGIQYPLH

SEQ ID NO: 12775 - protein, 192 aa, Zea mays
  misc_feature (2)..(3): Xaa can be any naturally occurring amino acid
  misc_feature (5)..(7): Xaa can be any naturally occurring amino acid
  misc_feature (12)..(12): Xaa can be any naturally occurring amino acid
  misc_feature (128)..(128): Xaa can be any naturally occurring amino acid
  misc_feature (148)..(149): Xaa can be any naturally occurring amino acid
  misc_feature (151)..(151): Xaa can be any naturally occurring amino acid
  misc_feature (154)..(154): Xaa can be any naturally occurring amino acid
  misc_feature (158)..(158): Xaa can be any naturally occurring amino acid
  misc_feature (161)..(161): Xaa can be any naturally occurring amino acid
  misc_feature (164)..(164): Xaa can be any naturally occurring amino acid
  misc_feature (170)..(170): Xaa can be any naturally occurring amino acid
  misc_feature (173)..(173): Xaa can be any naturally occurring amino acid
  misc_feature (177)..(177): Xaa can be any naturally occurring amino acid
  misc_feature (180)..(180): Xaa can be any naturally occurring amino acid
  misc_feature (185)..(185): Xaa can be any naturally occurring amino acid
  misc_feature (188)..(188): Xaa can be any naturally occurring amino acid
  misc_feature (191)..(192): Xaa can be any naturally occurring amino acid
  Coding DNA Sequence Number=SeqID_7423
  Subcellular localization annotation: CTP_CleavageSite=42; ConfidenceScore=5.24e-01
GXXVXXXVPAPXRSARRPPPLSSLTKVVYLIGLLCTLPLQVKAVRAPSLLQKTNSLLERMNYTTEVAAAIRAETDSALHRSIDGLAIASGDYQATMRKYNEQVLDKSLSRASQAWSYQTWCLHMKAMXQDPKTHITDTTALFKSSWTXXTXNRXLCRXLRXEGXRNSLRXCPXLSYXAPXFRSWXYGXSFXX

SEQ ID NO: 12776 - protein, 301 aa, Zea mays
  misc_feature (220)..(220): Xaa can be any naturally occurring amino acid
  misc_feature (222)..(222): Xaa can be any naturally occurring amino acid
  misc_feature (224)..(224): Xaa can be any naturally occurring amino acid
  misc_feature (233)..(233): Xaa can be any naturally occurring amino acid
  Coding DNA Sequence Number=SeqID_7425
  Gene Ontology: Mol. function=protein-tyrosine kinase activity; Cellular component=cell surface; Biological process=recognition or rejection of self pollen
  Homolog annotation: Hit_ID=A5JS87; Match level="QueryCoverage=77%, HitCoverage=23%, E-value=4e-35, Identity=41%"; Hit description =Stress-induced receptor-like kinase 1
  Pfam annotation: Domain name=B_lectin; Domain location=99-242; Score =75.6; E_value=1.6e-19; Accession=PF01453.15; Description=D-mannose binding lectin
  Subcellular localization annotation: CTP_CleavageSite=69; ConfidenceScore=5.07e-01
MPASPYSSYTLVLGLFLVSLLLLHSPRPCSCANYHTLAAGQALAVGDTLVSRNGKFALGFFPSGTTTTPAAAASKSSSDINTTAVSNWYLGIWFNKIPVFTPVWIANRDDPFTDPNNKPLPKRTLQISRDGNLVVVQEDNNAPQRTETLVVWSTGIITNNASSKTTTTSINTNTTNTVAELTHNGNLVVRDASASDASKVRWQSFDYPTDVYLPGSKLGXNXVXGLNRVFVSXEEQGEPGPRLLLRRVDYGLGDHPHQCSFRWSAHSPVGLGSNDSLSGTTTQEYIQRFANLKGNLEILMN

SEQ ID NO: 12777 - protein, 108 aa, Zea mays
  Coding DNA Sequence Number=SeqID_7426
LVVEWQFVEGSSNVRVRHQIIEIKRYVGLLKTSSICSRPLWLSRWVGGARSLPSLYGASLGVRTLRTAATSVLQGLTTCRATACARPASEQLAGQLDKGRGEQRGRGE

SEQ ID NO: 12778 - protein, 64 aa, Zea mays
  Coding DNA Sequence Number=SeqID_7427
HDTSIIGGGLHRKEADGRHGMEVVGSVDRRLVRLAHATPRPNRGLTYLRAVQEAQHAFASMEIH

SEQ ID NO: 12779 - protein, 152 aa, Zea mays
  misc_feature (1)..(1): Xaa can be any naturally occurring amino acid
  Coding DNA Sequence Number=SeqID_7429
  Gene Ontology: Mol. function=hydrolase activity, acting on carbon -nitrogen (but not peptide) bonds, in linear amides; Cellular component=cytoplasm; Biological process=metabolic process
  Homolog annotation: Hit_ID=A7PLN9; Match level="QueryCoverage=97%, HitCoverage=32%, E-value=3e-62, Identity=79%"; Hit description =Chromosome chr7 scaffold_20, whole genome shotgun sequence
  Pfam annotation: Domain name=FmdA_AmdA; Domain location=1-109; Score=- 136.2; E_value=1.6e-05; Accession=PF03069.5; Description =AcetamidaseFormamidase family
XYLTPVGPTPLHVSPIFEIGPVEPRFSEWLVFEGISVDESGKQHFLDASVAYKRAVLNAIEYLSKFGYSKEQVYLLLSCCPCEGRISGIVDSPNAVTTLAIPTAIFDQDIKPKRVKGRPLGGPQLRRLPDLLSCSNYGRLPATQDRSGTSAP

SEQ ID NO: 12780 - protein, 79 aa, Zea mays
  misc_feature (61)..(61): Xaa can be any naturally occurring amino acid
  misc_feature (72)..(72): Xaa can be any naturally occurring amino acid
  Coding DNA Sequence Number=SeqID_7430
  Subcellular localization annotation: CTP_CleavageSite=62; ConfidenceScore=5.70e-01
RQDGCQTNSANKQKARPPPPAGKQAQTPNRRPPASPARWPATTAPITVFLPRRHLLSRLSXLLEARPQGKGXPVGRPAA

SEQ ID NO: 12781 - protein, 182 aa, Zea mays
  misc_feature (104)..(104): Xaa can be any naturally occurring amino acid
  misc_feature (109)..(109): Xaa can be any naturally occurring amino acid
  misc_feature (112)..(113): Xaa can be any naturally occurring amino acid
  misc_feature (121)..(122): Xaa can be any naturally occurring amino acid
  misc_feature (142)..(142): Xaa can be any naturally occurring amino acid
  misc_feature (152)..(153): Xaa can be any naturally occurring amino acid
  misc_feature (162)..(165): Xaa can be any naturally occurring amino acid
  Coding DNA Sequence Number=SeqID_7432
  Subcellular localization annotation: CTP_CleavageSite=64; ConfidenceScore=5.46e-01
PKQSRSHTGGTLGFHLSSSFFPLCSSPHLIPRRLWLLPRCHGVGQRSCGRGRLSDLLAAAGRARAVAGKAAFVASAAALEMVVQAARKTTEAAKKVARPLRDRXVAILXCSXXWKQVFLDXXAAANTLSELTPVIEDIDLRXVSSASNSDNXXAMVSIRTVXXXXMNFLTINDIHVCMIIIC

SEQ ID NO: 12782 - protein, 182 aa, Zea mays; identical to SEQ ID NO: 12781
  misc_feature (104)..(104): Xaa can be any naturally occurring amino acid
  misc_feature (109)..(109): Xaa can be any naturally occurring amino acid
  misc_feature (112)..(113): Xaa can be any naturally occurring amino acid
  misc_feature (121)..(122): Xaa can be any naturally occurring amino acid
  misc_feature (142)..(142): Xaa can be any naturally occurring amino acid
  misc_feature (152)..(153): Xaa can be any naturally occurring amino acid
  misc_feature (162)..(165): Xaa can be any naturally occurring amino acid
  Coding DNA Sequence Number=SeqID_7433
  Subcellular localization annotation: CTP_CleavageSite=64; ConfidenceScore=5.46e-01

SEQ ID NO: 12783 - protein, 98 aa, Zea mays
  Coding DNA Sequence Number=SeqID_7434
LKPRERERYATSATGCGVLGRWLGEDNPRTRQNRTWLKGGASPFPATVCSRRSLRLELTSAVSSPISSSSPLREDTCHLKIILVPGISSPRSRTGTTG

SEQ ID NO: 12784 - protein, 89 aa, Zea mays
  misc_feature (3)..(3): Xaa can be any naturally occurring amino acid
  misc_feature (10)..(10): Xaa can be any naturally occurring amino acid
  misc_feature (12)..(13): Xaa can be any naturally occurring amino acid
  misc_feature (33)..(33): Xaa can be any naturally occurring amino acid
  misc_feature (35)..(35): Xaa can be any naturally occurring amino acid
  misc_feature (51)..(51): Xaa can be any naturally occurring amino acid
  misc_feature (64)..(64): Xaa can be any naturally occurring amino acid
  misc_feature (74)..(74): Xaa can be any naturally occurring amino acid
  misc_feature (78)..(78): Xaa can be any naturally occurring amino acid
  misc_feature (81)..(81): Xaa can be any naturally occurring amino acid
  misc_feature (85)..(85): Xaa can be any naturally occurring amino acid
  Coding DNA Sequence Number=SeqID_7436
KVXQRCYQSXLXXFYHRLFLDKPLTSELVSPIXQXQIREPRSGQNTCWDQXSCEEMIRIALLSXNGLLFEPTSXQQDXRNXPSLXQIRL

SEQ ID NO: 12785 - protein, 90 aa, Zea mays
  Coding DNA Sequence Number=SeqID_7438
  Gene Ontology: Mol. function=peptidyl-prolyl cis-trans isomerase activity; Biological process=protein folding
  Homolog annotation: Hit_ID=Q2R1J4; Match level="QueryCoverage=44%, HitCoverage=17%, E-value=4e-12, Identity=80%"; Hit description =Peptidyl-prolyl cis-trans isomerase
MAVLLRRAAALLVVAAVCADGASTFYSSDPNLGSARVVFQTNFGDIEFGFFPHVAPMDISVCFLPRDFTMSVISFKFVYGCINICVILVQ

SEQ ID NO: 12786 - protein, 164 aa, Zea mays
  misc_feature (1)..(16): Xaa can be any naturally occurring amino acid
  misc_feature (19)..(24): Xaa can be any naturally occurring amino acid
  misc_feature (37)..(38): Xaa can be any naturally occurring amino acid
  misc_feature (42)..(43): Xaa can be any naturally occurring amino acid
  misc_feature (81)..(81): Xaa can be any naturally occurring amino acid
  Coding DNA Sequence Number=SeqID_7439
  Homolog annotation: Hit_ID=A2WV82; Match level="QueryCoverage=85%, HitCoverage=45%, E-value=5e-40, Identity=60%"; Hit description =Putative uncharacterized protein
  Pfam annotation: Domain name=PPR; Domain location=30-64; Score=16.5; E_value=0.086; Accession=PF01535.11; Description=PPR repeat
XXXXXXXXXXXXXXXXGMXXXXXXEGLPRTFFMRMIXXYYSXXAYDKMFEIFADMEELGVRPDGSIIRMLGDVFQKLEMMXKYEKLKKKYPPPKWDYRHIKGKRIRIRVYPDSNPEVAAKGDPDTDELEELESTHLNNELDEAASSGLDRSVLDDAASGDLEYM

SEQ ID NO: 12787 - protein, 114 aa, Zea mays
  misc_feature (22)..(28): Xaa can be any naturally occurring amino acid
  misc_feature (30)..(34): Xaa can be any naturally occurring amino acid
  misc_feature (36)..(47): Xaa can be any naturally occurring amino acid
  misc_feature (51)..(56): Xaa can be any naturally occurring amino acid
  Coding DNA Sequence Number=SeqID_7440
  Subcellular localization annotation: CTP_CleavageSite=93; ConfidenceScore=5.22e-01
PKPILLSLSSNKHLTLCAFSCXXXXXXXFXXXXXKXXXXXXXXXXXXFFFXXXXXXFFFFFFFFFFFFFFFFFFFFFLEPPERRHFLPFKRIPLSYPEIYQWELTHKKRRTKPG

SEQ ID NO: 12788 - protein, 103 aa, Zea mays
  misc_feature (28)..(28): Xaa can be any naturally occurring amino acid
  misc_feature (36)..(36): Xaa can be any naturally occurring amino acid
  misc_feature (48)..(48): Xaa can be any naturally occurring amino acid
  misc_feature (66)..(66): Xaa can be any naturally occurring amino acid
  misc_feature (101)..(101): Xaa can be any naturally occurring amino acid
  Coding DNA Sequence Number=SeqID_7442
FFFFFHKLAYQNRIDSITARAMTVVQFXHLVEPLAXAGRTCLTFSSNXRISLREIKSTTSSITHTXMRQGLWRCAQGKMSLWCRESTASRTRIKGFAWESXRG

SEQ ID NO: 12789 - protein, 147 aa, Zea mays
  misc_feature (62)..(62): Xaa can be any naturally occurring amino acid
  misc_feature (66)..(66): Xaa can be any naturally occurring amino acid
  misc_feature (110)..(110): Xaa can be any naturally occurring amino acid
  misc_feature (118)..(119): Xaa can be any naturally occurring amino acid
  misc_feature (122)..(122): Xaa can be any naturally occurring amino acid
  misc_feature (141)..(141): Xaa can be any naturally occurring amino acid
  Coding DNA Sequence Number=SeqID_7444
  Gene Ontology: Mol. function=microtubule motor activity; Cellular component=microtubule associated complex; Biological process =microtubule-based movement
  Homolog annotation: Hit_ID=Q2QMU6; Match level="QueryCoverage=98%, HitCoverage=5%, E-value=2e-35, Identity=61%"; Hit description =Kinesin motor domain containing protein, expressed
EELGKKFDELNIVSMENAELKSQLQHIEEISCTMEELADKSEVIRRLVEKLIESRTLIDERXVCLXSLQNDFSKLSDEKTSCDTELLILKEKLEMPQALAEESEAIATEXRQIAEEHXXICXKGKDEEVKVLERSILKNLXIPVCVF

SEQ ID NO: 12790 - protein, 79 aa, Zea mays
  misc_feature (7)..(8): Xaa can be any naturally occurring amino acid
  misc_feature (15)..(15): Xaa can be any naturally occurring amino acid
  misc_feature (17)..(17): Xaa can be any naturally occurring amino acid
  Coding DNA Sequence Number=SeqID_7445
WGHLERXXNNSRRAXKXQMCLVQRRSKHQMSMLRRLAITSFNGLLMWTCTDVYGMRQFASLLMSSFELRGYVYYPQLTI

SEQ ID NO: 12791 - protein, 71 aa, Zea mays
  misc_feature (71)..(71): Xaa can be any naturally occurring amino acid
  Coding DNA Sequence Number=SeqID_7447
TFQLTVSSSAACETLVLQLPIPWRADPSPSAFLYERLNRGEPLSLGTREHNRVTTQPQVRVFPSRDSARTX

SEQ ID NO: 12792 - protein, 120 aa, Zea mays
  misc_feature (6)..(6): Xaa can be any naturally occurring amino acid
  misc_feature (9)..(11): Xaa can be any naturally occurring amino acid
  misc_feature (13)..(13): Xaa can be any naturally occurring amino acid
  misc_feature (16)..(17): Xaa can be any naturally occurring amino acid
  misc_feature (19)..(19): Xaa can be any naturally occurring amino acid
  misc_feature (26)..(26): Xaa can be any naturally occurring amino acid
  misc_feature (40)..(40): Xaa can be any naturally occurring amino acid
  misc_feature (48)..(48): Xaa can be any naturally occurring amino acid
  misc_feature (51)..(51): Xaa can be any naturally occurring amino acid
  misc_feature (72)..(72): Xaa can be any naturally occurring amino acid
  misc_feature (75)..(75): Xaa can be any naturally occurring amino acid
  misc_feature (85)..(85): Xaa can be any naturally occurring amino acid
  misc_feature (88)..(88): Xaa can be any naturally occurring amino acid
  misc_feature (92)..(93): Xaa can be any naturally occurring amino acid
  misc_feature (95)..(95): Xaa can be any naturally occurring amino acid
  misc_feature (101)..(101): Xaa can be any naturally occurring amino acid
  misc_feature (104)..(104): Xaa can be any naturally occurring amino acid
  misc_feature (106)..(106): Xaa can be any naturally occurring amino acid
  misc_feature (108)..(108): Xaa can be any naturally occurring amino acid
  misc_feature (110)..(110): Xaa can be any naturally occurring amino acid
  misc_feature (117)..(117): Xaa can be any naturally occurring amino acid
  misc_feature (119)..(119): Xaa can be any naturally occurring amino acid
  Coding DNA Sequence Number=SeqID_7449
  Subcellular localization annotation: CTP_CleavageSite=44; ConfidenceScore=5.45e-01
FFFFFXPSXXXGXTGXXQXPPTIKRXSSSSRQRERERDRXTRPRAGQXSAXYTHHATRFLVSRTVVSRVLLXPPXPRRPSHQTFXPPXPPAXXRXHTHLLXVTXPXRXLXAFRQGDXGXG

SEQ ID NO: 12793 - protein, 165 aa, Zea mays
  misc_feature (78)..(165): Xaa can be any naturally occurring amino acid
  Coding DNA Sequence Number=SeqID_7450
QAAWQAHGGQLAPLNFTFPLEARAQVKSLQGQCPGPYRGAWAFAQGGRISGAGLPTPWTGAPNAPPHQKTPPPQRDTXXXXXXXXXXXXXXXXXXXXXXXXXXXXXXXXXXXXXXXXXXXXXXXXXXXXXXXXXXXXXXXXXXXXXXXXXXXXXXXXXXXXXXXX

SEQ ID NO: 12794 - protein, 263 aa, Zea mays
  misc_feature (1)..(65): Xaa can be any naturally occurring amino acid
  misc_feature (67)..(86): Xaa can be any naturally occurring amino acid
  misc_feature (88)..(90): Xaa can be any naturally occurring amino acid
  misc_feature (93)..(93): Xaa can be any naturally occurring amino acid
  misc_feature (96)..(102): Xaa can be any naturally occurring amino acid
  Coding DNA Sequence Number=SeqID_7452
XXXXXXXXXXXXXXXXXXXXXXXXXXXXXXXXXXXXXXXXXXXXXXXXXXXXXXXXXXXXXXXXXFXXXXXXXXXXXXXXXXXXXXRXXXFRXFQXXXXXXXQILPQQFSGNKSRLSLSYVLLLCVLQTMATFSASLSSAVAIHVEATDSHVHAKRDTIADRPSSPRRRARPARPVPTLELPSLPWRLVISVRRASFASAEAGIATAASTSSTAGRGDRYRCSRESSTTSAVTGFIPTAIAISIPRKLHIRDSRGGKAGPQAT

SEQ ID NO: 12795 - protein, 117 aa, Zea mays
  Coding DNA Sequence Number=SeqID_7454
DSPLPKEGHGSQPTASEKKYHVHQNHKQVTIQITPYLNIRAKECRRVASFFQSLVFQCSLNIPKDLVLNKRELKTAIHVPEPCLWILLGFNSKGLAYTTCLELKDFVVLVAAAVLEF

SEQ ID NO: 12796 - protein, 112 aa, Zea mays
  Coding DNA Sequence Number=SeqID_7455
  Subcellular localization annotation: CTP_CleavageSite=41; ConfidenceScore=5.12e-01
KAETNGAQSPLPHADKDGVVVVALIRRRRLGRPIRPLPEPSAAARAVSVARPRNPRLDARPQASPGRPWSWLSSRISVPLPRGVAPSSSKPRALTSFNTLVISAARHQWYFS

SEQ ID NO: 12797 - protein, 277 aa, Zea mays
  Coding DNA Sequence Number=SeqID_7457
  Homolog annotation: Hit_ID=Q2QXF9; Match level="QueryCoverage=51%, HitCoverage=80%, E-value=1e-32, Identity=57%"; Hit description =Expressed protein
  Subcellular localization annotation: CTP_CleavageSite=31; ConfidenceScore=5.35e-01
MTRNSRARTRDGMRRRVNGDRRTARSGRRRRATRRRRMRRRRKNGGWSPAPPHLLPGSHSLLCILHHTTVPASGVLVDFSGQLEAPSPLHSTAPPSPTASAMPPAPAAVAPEPQKLSLTPTPPTQQCRRPRSPLANGLAAGDFELRHWRTPKKRAAPQWAPPPVIEIPNGGAGSDGDDSNSSGGGGGHGYTSLRDILSSPEYAAAGGSPGACGGGGCGSCGDIHMIRHPLVKHAAYAYLQMTPSAREDPGRRGRRWRGSLCRMLLGCLSFIGALFRP

SEQ ID NO: 12798 - protein, 37 aa, Zea mays
  misc_feature (33)..(34): Xaa can be any naturally occurring amino acid
  Coding DNA Sequence Number=SeqID_7458
VLWPPRLPRNHHPPREAGQQDCRMVVVVGPSGXXTAS

SEQ ID NO: 12799 - protein, 146 aa, Zea mays
  misc_feature (87)..(87): Xaa can be any naturally occurring amino acid
  misc_feature (139)..(139): Xaa can be any naturally occurring amino acid
  Coding DNA Sequence Number=SeqID_7460
  Subcellular localization annotation: CTP_CleavageSite=65; ConfidenceScore=5.58e-01
TLPASSFRAAVRTTHCQPPTLRRAYPNQVASRPAPAHCPPATAARRHRATAQAPTAPRGHAPTARAAARLPARLERLEAGAAARQAXGLEQQSCQSTATGRSDAAVGCCPAEQPLSHGPTPRRLDARTGGRSPGAPPPXAARPHLA

SEQ ID NO: 12800 - protein, 148 aa, Zea mays
  misc_feature (82)..(82): Xaa can be any naturally occurring amino acid
  Coding DNA Sequence Number=SeqID_7462
  Gene Ontology: Cellular component=chloroplast thylakoid membrane
  Homolog annotation: Hit_ID=O04616; Match level="QueryCoverage=90%, HitCoverage=78%, E-value=1e-50, Identity=79%"; Hit description =Uncharacterized protein At4g01150, chloroplast precursor
  Subcellular localization annotation: CTP_CleavageSite=65; ConfidenceScore=5.82e-01
MAMTVAASSSVAVMIPRVTSVSDRFSAVPYLPPLPPRSFGRSSFTVPPKLVSGNGSQKGELMKMRASSSDETSTSIDTNELXTDLKEKWDGLENKSTVIIYGGGAIVAVWLSSIVVGAINSVPLLPKVMELVGLGYTGWFVYRYLLFK

SEQ ID NO: 12801 - protein, 97 aa, Zea mays
  misc_feature (43)..(43): Xaa can be any naturally occurring amino acid
  Coding DNA Sequence Number=SeqID_7463
  Gene Ontology: Mol. function=rRNA binding; Cellular component =intracellular; Biological process=ribosome biogenesis and assembly
  Homolog annotation: Hit_ID=A7PAF2; Match level="QueryCoverage=83%, HitCoverage=44%, E-value=8e-32, Identity=80%"; Hit description =Chromosome chr14 scaffold_9, whole genome shotgun sequence
  Pfam annotation: Domain name=Ribosomal_S4; Domain location=1-97; Score=16.4; E_value=0.0034; Accession=PF00163.9; Description =Ribosomal protein S4S9 N-terminal domain
MRKLKNHEKKVLKKVNFLEWKREGGHRETLITGRYHMGGRDDXKKYSGLCRMVQKLTNVLKQMDATDPFRIQMTDTLLEKLYNMGVIPTRKSLALTD

SEQ ID NO: 12802 - protein, 88 aa, Zea mays
  Coding DNA Sequence Number=SeqID_7464
  Gene Ontology: Mol. function=DNA binding; Cellular component =chromosome; Biological process=nucleosome assembly
  Homolog annotation: Hit_ID=P59259; Match level="QueryCoverage=76%, HitCoverage=65%, E-value=9e-30, Identity=100%"; Hit description =Histone H4
  Pfam annotation: Domain name=Histone; Domain location=25-87; Score =45.5; E_value=1.9e-10; Accession=PF00125.14; Description=Core histone H2AH2BH3H4
MSGRGKGGKGLGKGGAKRHRKVLRDNIQGITKPAIRRLARRGGVKRISGLIYEETRGVLKIFLENVIRDAVTYTEHARRKTVTAMDVV

SEQ ID NO: 12803 - protein, 122 aa, Zea mays
  Coding DNA Sequence Number=SeqID_7465
  Gene Ontology: Mol. function=DNA binding
  Homolog annotation: Hit_ID=A5AQF9; Match level="QueryCoverage=92%, HitCoverage=54%, E-value=9e-54, Identity=86%"; Hit description =Putative uncharacterized protein
  Pfam annotation: Domain name=BAH; Domain location=29-121; Score=84.2; E_value=4.1e-22; Accession=PF01426.8; Description=BAH domain
MAKTRPGVPSKIKTGRKELDSYTIKGTNKLVRAGDCVLMRPSDAGKPPYVARVEKIEADARNNVKVHCRWYYRPEESLGGRRQFHGAKELFLSDHFDVQSAHTIEGKCIVHTFKNYTRLENV

SEQ ID NO: 12804 - protein, 166 aa, Zea mays
  misc_feature (114)..(114): Xaa can be any naturally occurring amino acid
  Coding DNA Sequence Number=SeqID_7466
  Subcellular localization annotation: CTP_CleavageSite=80; ConfidenceScore=5.23e-01
SLVPLSALDPEQAGARNHLVRRPPPSPLAPAPSPQPPAPLAPTPSPVAPVGLRAPSPVARHPPLFAPPEPTPPTPPVARRSSAYAHTTCCTARPPALATSRSLPASATRPPSCXCLRGPPAGARLHQRHQPQPAPAPPDRVRPTVSYTDRGAADREAVVRLHQIEA

SEQ ID NO: 12805 - protein, 131 aa, Zea mays
  misc_feature (25)..(26): Xaa can be any naturally occurring amino acid
  Coding DNA Sequence Number=SeqID_7468
AVNELTHRTQTLDYTFKESHHHHQXXPPPPSKPPPPRSPPPPPRSPPPPPPSPPPPKPPPIPALIPALIPAPIPIPPRPPPAPPPPPRNFSSLNWVSPEISFLAPTFAQKSAMKRSTSKLVKVPFMFALMV

SEQ ID NO: 12806 - protein, 154 aa, Zea mays
  Coding DNA Sequence Number=SeqID_7469
  Homolog annotation: Hit_ID=A9P901; Match level="QueryCoverage=88%, HitCoverage=53%, E-value=5e-45, Identity=61%"; Hit description =Putative uncharacterized protein
ISWSRGASNISSVSLKKMGFLSQQISRDELKPGDHIYSWRNAYIYAHHGIYVGNGEVIHFTCGGGLGTRTGTSVDNIIVSSVPNHGGDNPCPNCRDQSNLDGVISSCLDCFLAGGNLYLFEYGVSGPIFMAKPRGAICTTAVSDSSDETVHRAR

SEQ ID NO: 12807 - protein, 111 aa, Zea mays
  misc_feature (19)..(19): Xaa can be any naturally occurring amino acid
  misc_feature (74)..(74): Xaa can be any naturally occurring amino acid
  Coding DNA Sequence Number=SeqID_7470
  Gene Ontology: Mol. function=translation initiation factor activity; Cellular component=cytoplasm; Biological process=regulation of translation
  Homolog annotation: Hit_ID=P41568; Match level="QueryCoverage=100%, HitCoverage=98%, E-value=2e-47, Identity=87%"; Hit description =Protein translation factor SUI1 homolog 1
  Pfam annotation: Domain name=SUI1; Domain location=25-106; Score =145.8; E_value=1.2e-40; Accession=PF01253.13; Description =Translation initiation factor SUI1
MSELDSQVPTAFDPFADAXAEDSGAGTKEYVHIRVQQRNGRKSLTTVQGLKKEYSYSKILKDLKKEFCCNGTVXQDSELGQVIQLQGDQRKNVSTFLVQAGLVKKDNIKIH

SEQ ID NO: 12808 - protein, 77 aa, Zea mays
  Coding DNA Sequence Number=SeqID_7471
  Gene Ontology: Mol. function=hydrolase activity
  Homolog annotation: Hit_ID=A7QN19; Match level="QueryCoverage=97%, HitCoverage=12%, E-value=8e-13, Identity=52%"; Hit description =Chromosome undetermined scaffold_129, whole genome shotgun sequence
AFFEGLTASSLWWVRATNEFLGALSCSRYMHIQKIQESGSSGSGKQDETSINQGPYLNIAEDGLVAAANLEENTTRS

SEQ ID NO: 12809 - protein, 136 aa, Zea mays
  Coding DNA Sequence Number=SeqID_7472
  Gene Ontology: Mol. function=structural constituent of ribosome; Cellular component=ribonucleoprotein complex; Biological process =translation
  Homolog annotation: Hit_ID=Q9SZX9; Match level="QueryCoverage=99%, HitCoverage=69%, E-value=6e-66, Identity=93%"; Hit description=60S ribosomal protein L9-2
  Pfam annotation: Domain name=Ribosomal_L6; Domain location=12-90; Score=37.4; E_value=5e-08; Accession=PF00347.13; Description =Ribosomal protein L6
MKTILSSETMDIPEGVVIKVHAKVIEVEGPRGKLTRDFKHLNLDFQLIKDAVTGKRQLKIDSWFGSRKASASIRTALSHVSNLIAGVTQGFLYKMRFVYAHFPINASISGNNKSIEIRNFLGEKKVRKVDMLDGVT

SEQ ID NO: 12810 - protein, 102 aa, Zea mays
  Coding DNA Sequence Number=SeqID_7473
  Gene Ontology: Mol. function=ammonium transmembrane transporter activity; Cellular component=integral to membrane; Biological process=ammonium transport
  Homolog annotation: Hit_ID=Q9M6N7; Match level="QueryCoverage=100%, HitCoverage=21%, E-value=1e-52, Identity=95%"; Hit description =Ammonium transporter 2
MAGAYDASLPSVPDWLNKGDNAWQLTSATLVGLQSMPGLVILYASIVKKKWAVNSAFMALYAFAAVLLCWVLLCYKMAFGDELLPFWGKGGPAFDQGYLKGQ

SEQ ID NO: 12811 - protein, 78 aa, Zea mays
  misc_feature (18)..(18): Xaa can be any naturally occurring amino acid
  misc_feature (20)..(21): Xaa can be any naturally occurring amino acid
  misc_feature (62)..(62): Xaa can be any naturally occurring amino acid
  misc_feature (69)..(69): Xaa can be any naturally occurring amino acid
  Coding DNA Sequence Number=SeqID_7474
  Homolog annotation: Hit_ID=O64818; Match level="QueryCoverage=100%, HitCoverage=100%, E-value=9e-33, Identity=87%"; Hit description =Uncharacterized protein At2g23090
  Pfam annotation: Domain name=DUF1909; Domain location=4-74; Score =129.6; E_value=9.2e-36; Accession=PF08927.1; Description=Domain of unknown function (DUF1909)
MGGGNAQKSKMAREKNLXKXXQAGKGSQLEANKKAMSIQCMVCMQTFICTTSEVKCREHAEXKHPKADXVACFPHLSK

SEQ ID NO: 12812 - protein, 65 aa, Zea mays
  Coding DNA Sequence Number=SeqID_7475
MAAKGRRVVERDAYPVRRGGEGAVRRDIYTSVCRASHEDRSNRPELLLKDIQYTGHMWGGQSTHS

SEQ ID NO: 12813 - protein, 86 aa, Zea mays
  Coding DNA Sequence Number=SeqID_7477
  Gene Ontology: Mol. function=transcription factor activity; Cellular component=nuclear matrix; Biological process=positive regulation of transcription, DNA-dependent
  Homolog annotation: Hit_ID=Q7RTV0; Match level="QueryCoverage=100%, HitCoverage=78%, E-value=2e-45, Identity=89%"; Hit description=PHD finger-like domain-containing protein 5A
  Pfam annotation: Domain name=PHF5; Domain location=1-86; Score=201.5; E_value=2e-57; Accession=PF03660.5; Description=PHF5-like protein
MAKHHPDLIMCRKQPGIAIGRLCEKCDGKCVVCDSYVRPCTLVRICDECNYGSFQGRCTICGGVGISDAYYCKECTQQEKDRDGCP

SEQ ID NO: 12814 - protein, 114 aa, Zea mays
  misc_feature (35)..(35): Xaa can be any naturally occurring amino acid
  misc_feature (101)..(102): Xaa can be any naturally occurring amino acid
  Coding DNA Sequence Number=SeqID_7478
  Gene Ontology: Mol. function=calcium ion binding; Cellular component =spindle pole; Biological process=regulation of light-activated channel activity
  Homolog annotation: Hit_ID=P27164; Match level="QueryCoverage=100%, HitCoverage=93%, E-value=1e-57, Identity=69%"; Hit description =Calmodulin-related protein
  Pfam annotation: Domain name=efhand; Domain location=12-40; Score =40.4; E_value=6.6e-09; Accession=PF00036.22; Description=EF hand
  Pfam annotation: Domain name=efhand; Domain location=48-76; Score =39.0; E_value=1.8e-08; Accession=PF00036.22; Description=EF hand
  Pfam annotation: Domain name=efhand; Domain location=85-113; Score =27.7; E_value=4.2e-05; Accession=PF00036.22; Description=EF hand
  Pfam module annotation: Pfam domain module=efhand::efhand::efhand; Domain location=12-40::48-76::85-113
MADQLTDDQISEFKEAFSLFDKDGDGCITTKELGXVMRSLGQNPTEAELQDMINEVDADGNGTIDFPEFLNLMARKMKDTDSEEELKEAFRVFDKDQNGFXXAAELRHVMTNLG

SEQ ID NO: 12815 - protein, 130 aa, Zea mays
  Coding DNA Sequence Number=SeqID_7479
  Gene Ontology: Mol. function=DNA binding; Cellular component =chromosome; Biological process=DNA mediated transformation
  Homolog annotation: Hit_ID=Q9LD28; Match level="QueryCoverage=93%, HitCoverage=93%, E-value=2e-47, Identity=82%"; Hit description =Histone H2A.6
  Pfam annotation: Domain name=CBFD_NFYB_HMF; Domain location=25-89; Score=21.9; E_value=0.0015; Accession=PF00808.13; Description =Histone-like transcription factor (CBFNF-Y) and archaeal histone
  Pfam annotation: Domain name=Histone; Domain location=19-92; Score =113.8; E_value=5.3e-31; Accession=PF00125.14; Description=Core histone H2AH2BH3H4
  Pfam module annotation: Pfam domain module=CBFD_NFYB_HMF::Histone; Domain location=25-89::19-92
  Subcellular localization annotation: CTP_CleavageSite=41; ConfidenceScore=5.22e-01
MAGRGKTLGSGVAKKATSRSSKAGLQFPVGRIARFLKNGKYAERVGAGAPVYLAAVLEYLAAEVLELAGNAARDNKKTRIVPRHIQLAVRNDEELSKLLGDVTIANGGVMPNIHNLLLPKEGWWCQTVTT

SEQ ID NO: 12816 - protein, 128 aa, Zea mays
  Coding DNA Sequence Number=SeqID_7480
  Gene Ontology: Mol. function=structural constituent of ribosome; Cellular component=ribonucleoprotein complex; Biological process =translation
  Homolog annotation: Hit_ID=P34788; Match level="QueryCoverage=100%, HitCoverage=84%, E-value=3e-67, Identity=97%"; Hit description=40S ribosomal protein S18
  Pfam annotation: Domain name=Ribosomal_S13; Domain location=14-128; Score=224.4; E_value=2.6e-64; Accession=PF00416.12; Description =Ribosomal protein S13S18
MSLVANDEFQHILRVLNTNVDGKQKIMFALTSIKGIGRRLANIVCKKADVDMNKRAGELSAAEIDNLMTIVANPKQYKIPDWFLNRQKDYKDGKYSQVVSNALDMKLRDDLERLKKIRNHRGLRHYWG

SEQ ID NO: 12817 - protein, 228 aa, Zea mays
  misc_feature (224)..(224): Xaa can be any naturally occurring amino acid
  Coding DNA Sequence Number=SeqID_7481
  Gene Ontology: Mol. function=transferase activity; Cellular component= cytoplasm; Biological process=response to stress
  Homolog annotation: Hit_ID=Q8LGN6; Match level="QueryCoverage=100%, HitCoverage=97%, E-value=1e-114, Identity=91%"; Hit description =Glutathione-S-transferase Cla47
  Pfam annotation: Domain name=GST_C; Domain location=100-203; Score =34.0; E_value=5.6e-07; Accession=PF00043.15; Description=Glutathione S-transferase, C-terminal domain
  Pfam annotation: Domain name=GST_N; Domain location=5-78; Score=74.0; E_value=4.9e-19; Accession=PF02798.10; Description=Glutathione S -transferase, N-terminal domain
  Pfam module annotation: Pfam domain module=GST_C::GST_N; Domain location=100-203::5-78
MAGEGDIKLLGMVVSPFVVRVRMALHMKGVSYEYIEQDLFNKSELLLRSNPVNKKVPVLIHGGKPIYESLVIMQYADEVWSGKGASILPADPHERAVARFWAAYVDDKMFPAYIGIMKAATEEARAEKAKEALVVLANLEEAFAQCSKGKPFFAGDSVGYLDLAVGCNLFWLEAIRKMFGVTFFDVGKTPLLAAWAERFAGTEMAREVVPDADTAVVFAKKLQXRFGS

SEQ ID NO: 12818 - protein, 102 aa, Zea mays
  misc_feature (58)..(58): Xaa can be any naturally occurring amino acid
  misc_feature (97)..(97): Xaa can be any naturally occurring amino acid
  Coding DNA Sequence Number=SeqID_7482
  Gene Ontology: Cellular component=extracellular region; Biological process=cellulose and pectin-containing cell wall organization and biogenesis
  Homolog annotation: Hit_ID=Q38864; Match level="QueryCoverage=100%, HitCoverage=40%, E-value=5e-30, Identity=63%"; Hit description =Expansin-A5 precursor
MAVLVISALLLHVLASSTCVQGFYRRGGHHPGGHGGPWINAHATFYGGGDASGTMGGXCGYGNLYSQGYGTETAALSTALFDNGLSCGACFELKCVXDPQWC

SEQ ID NO: 12819 - protein, 70 aa, Zea mays
  Coding DNA Sequence Number=SeqID_7483
FVNSISFLHRHLHLHQLRLPWLKRRLSLVVEPPVLRLSDKLICLPRLLRREASYAPTITILLPPLLSSFF

SEQ ID NO: 12820 - protein, 99 aa, Zea mays
  misc_feature (31)..(31): Xaa can be any naturally occurring amino acid
  Coding DNA Sequence Number=SeqID_7485
IEGDQSSKLPPRRTRSEPTLQIDSEDTKRYXRRSKQIFSPLLTLNHDGKTLSQKKLHTANKETLELYPPLTAPWRPPERMKPTTFSLLFFLSDFTLKEL

SEQ ID NO: 12821 - protein, 160 aa, Zea mays
  misc_feature (151)..(151): Xaa can be any naturally occurring amino acid
  Coding DNA Sequence Number=SeqID_7487
  Gene Ontology: Mol. function=sugar:hydrogen symporter activity; Cellular component=integral to membrane; Biological process =carbohydrate transport
  Homolog annotation: Hit_ID=Q10PW9; Match level="QueryCoverage=100%, HitCoverage=30%, E-value=7e-71, Identity=85%"; Hit description=Sugar carrier protein C, putative, expressed
ASLYSAVITGAVNVLATLVSVYAVDRAGRRALLLEAGVQMFLSQVVIAVVLGIKVTDRSDNLGHGWAILVVVMVCTYVASFAWSWGPLGWLIPSETFPLETRSAGQSVTVCVNLLFTFLIAQAFLSMLCHLKFAIFIFFSAWVLVMSVFVXLFFLPETKN

SEQ ID NO: 12822 - protein, 34 aa, Zea mays
  Coding DNA Sequence Number=SeqID_7488
TVDLVLSNYGAEGTWPYLIDEFVEYLYDKSIVEK

SEQ ID NO: 12823 - protein, 55 aa, Zea mays
  Coding DNA Sequence Number=SeqID_7489
  Homolog annotation: Hit_ID=Q9SN96; Match level="QueryCoverage=100%, HitCoverage=100%, E-value=6e-26, Identity=96%"; Hit description =Putative uncharacterized protein F18L15.150
MRLFDPWPVFFKREWKRCWPFLTGFAVTGVLITKLTAGFTEEDTKNSKFVQQHRR

SEQ ID NO: 12824 - protein, 128 aa, Zea mays
  Coding DNA Sequence Number=SeqID_7490
  Gene Ontology: Mol. function=ribonuclease H activity; Cellular component=chromatin; Biological process=RNA-dependent DNA replication
  Homolog annotation: Hit_ID=A7Q2I1; Match level="QueryCoverage=89%, HitCoverage=39%, E-value=4e-31, Identity=58%"; Hit description =Chromosome chr1 scaffold_46, whole genome shotgun sequence
  Pfam annotation: Domain name=RnaseH; Domain location=18-128; Score= -10.2; E_value=0.00028; Accession=PF00075.14; Description=RNase H
MARREDRSHPKPQDSCTIEFDGASRGNPGRAGAGAVLRAPDNTVLFRSREGLGSATNNVAEYRALNLGLETALNNGFRNVRVQGDSQLVCKQVQGEWATRHPKMAELCGQAHELMSQFDSCDIQHVPR

SEQ ID NO: 12825 - protein, 129 aa, Zea mays
  misc_feature (11)..(11): Xaa can be any naturally occurring amino acid
  Coding DNA Sequence Number=SeqID_7491
LSPTGRTGCTXRERGDSPLLPRQRGLVGPQPDERAVAVALRVRTRHGAPNVAPHLWRSLARRCLLSHQLRAAEGLNRSGSDDEAQTLRFRCGIGRRGRGFGGRGMPRRLGVEAQAEGAAGAALEGQRGA

SEQ ID NO: 12826 - protein, 127 aa, Zea mays
  Coding DNA Sequence Number=SeqID_7493
  Gene Ontology: Mol. function=DNA binding; Cellular component =chromosome; Biological process=nucleosome assembly
  Homolog annotation: Hit_ID=A2Y9L8; Match level="QueryCoverage=98%, HitCoverage=83%, E-value=3e-52, Identity=85%"; Hit description =Histone H3
  Pfam annotation: Domain name=Histone; Domain location=58-126; Score =103.5; E_value=6.6e-28; Accession=PF00125.14; Description=Core histone H2AH2BH3H4
  Subcellular localization annotation: CTP_CleavageSite=53; ConfidenceScore=5.45e-01
MARTKQTARKSTGGKAPRKQLATKAARKSAPATGGVKKPHRFRPGTVALREIRKYQKSTELLIRKLPFQRLVREIAQDFKMDLRFQSSAVAALQEAAEAYLVGLFEDTNLCAIHAKRVTIMPKDISS

SEQ ID NO: 12827 - protein, 143 aa, Zea mays
  misc_feature (51)..(52): Xaa can be any naturally occurring amino acid
  Coding DNA Sequence Number=SeqID_7494
  Gene Ontology: Mol. function=structural constituent of ribosome; Cellular component=ribonucleoprotein complex; Biological process =translation
  Homolog annotation: Hit_ID=Q9SKZ3; Match level="QueryCoverage=100%, HitCoverage=99%, E-value=2e-59, Identity=78%"; Hit description=40S ribosomal protein S12-2
  Pfam annotation: Domain name=Ribosomal_L7Ae; Domain location=29-124; Score=112.7; E_value=1.1e-30; Accession=PF01248.16; Description =Ribosomal protein L7AeL30eS12eGadd45 family
MSGDEAAPAVVVPPVAEPSAIPEDMDLLTALELTLRKARAHGGVVRGLHEXXKLIEKRSAQLCVLAEDCNQPDYVKLVKALCADHNINLLTVPSAKTLGEWAGLCKIDSEGNARKVVGCSCLVVKDYGEDTTALNIVKKHIES

SEQ ID NO: 12828 - protein, 134 aa, Zea mays
  misc_feature (131)..(131): Xaa can be any naturally occurring amino acid
  Coding DNA Sequence Number=SeqID_7495
  Gene Ontology: Mol. function=DNA binding; Cellular component =chromosome; Biological process=nucleosome assembly
  Homolog annotation: Hit_ID=P59169; Match level="QueryCoverage=100%, HitCoverage=98%, E-value=1e-68, Identity=99%"; Hit description =Histone H3.3
  Pfam annotation: Domain name=CBFD_NFYB_HMF; Domain location=64-129; Score=2.0; E_value=0.1; Accession=PF00808.13; Description=Histone -like transcription factor (CBFNF-Y) and archaeal histone
  Pfam annotation: Domain name=Histone; Domain location=58-132; Score =136.9; E_value=5.7e-38; Accession=PF00125.14; Description=Core histone H2AH2BH3H4
  Pfam module annotation: Pfam domain module=CBFD_NFYB_HMF::Histone; Domain location=64-129::58-132
  Subcellular localization annotation: CTP_CleavageSite=24; ConfidenceScore=5.41e-01
MARTKQTARKSTGGKAPRKQLATKAARKSAPTTGGVKKPHRYRPGTVALREIRKYQKSTELLIRKLPFQRLVREIAQDFKTDLRFQSHAVLALQEAAEAYLVGLFEDTNLCAIHAKRVTIMPKDIQLARRXRGE

SEQ ID NO: 12829 - protein, 139 aa, Zea mays
  misc_feature (125)..(125): Xaa can be any naturally occurring amino acid
  Coding DNA Sequence Number=SeqID_7496
  Gene Ontology: Mol. function=oxidoreductase activity, acting on NADH or NADPH; Cellular component=mitochondrial respiratory chain; Biological process=electron transport
  Homolog annotation: Hit_ID=Q9FLX7; Match level="QueryCoverage=100%, HitCoverage=82%, E-value=1e-73, Identity=96%"; Hit description =Probable NADH dehydrogenase [ubiquinone] 1 alpha subcomplex subunit 5, mitochondrial precursor
  Pfam annotation: Domain name=ETC_C1_NDUFA5; Domain location=27-83; Score=125.4; E_value=1.6e-34; Accession=PF04716.4; Description=ETC complex I subunit conserved regio
MFLRAIGRPLLAKVKQTTGIVGLDVVPNARAVLIDLYSKTLKEIQAVPEDEGYRKAVESFTRHRLNVCKEEEDWEAIEKRLGCGQVEELIEEAQDELTLIAKMIEWDPWGVPDDYECEVIENDAXIPKHVPQHRPGPLP

SEQ ID NO: 12830 - protein, 94 aa, Zea mays
  Coding DNA Sequence Number=SeqID_7497
LLFPFSLLLNNTRPVGRQDTLLRFISILLLADLSVTLLALLQFYWLALAAFLAILLILPLALLCPFPAGLNALLSREMRRASLTRIYALWNATS

SEQ ID NO: 12831 - protein, 134 aa, Zea mays
  Coding DNA Sequence Number=SeqID_7498
  Gene Ontology: Mol. function=small conjugating protein ligase activity; Cellular component=UBC13-MMS2 complex; Biological process =regulation of protein metabolic process
  Homolog annotation: Hit_ID=Q2V4C1; Match level="QueryCoverage=99%, HitCoverage=87%, E-value=3e-69, Identity=97%"; Hit description =Ubiquitin carrier protein
  Pfam annotation: Domain name=UQ_con; Domain location=9-134; Score =224.7; E_value=2.1e-64; Accession=PF00179.16; Description=Ubiquitin -conjugating enzyme
MANSNLPRRIIKETQRLLSEPAPGISASPSEENMRYFNVMILGPSQSPYEGGVFKLELFLPEEYPMAAPKVRFLTKIYHPNIDKLGRICLDILKDKWSPALQIRTVLLSIQALLSAPNPDDPLSENIAQHWKSM

SEQ ID NO: 12832 - protein, 66 aa, Zea mays
  Coding DNA Sequence Number=SeqID_7499
  Subcellular localization annotation: CTP_CleavageSite=26; ConfidenceScore=5.07e-01
GKVCLFGSLHPSFFSVPCGVGRSWAPATAVEGRRLRQGVGNPILYLKSRVGSYKFWRNGNGRQGSR

SEQ ID NO: 12833 - protein, 112 aa, Zea mays
  Coding DNA Sequence Number=SeqID_7501
  Gene Ontology: Mol. function=structural constituent of ribosome; Cellular component=ribonucleoprotein complex; Biological process =translation
  Homolog annotation: Hit_ID=Q9LMK0; Match level="QueryCoverage=100%, HitCoverage=100%, E-value=2e-59, Identity=96%"; Hit description=60S ribosomal protein L35a-1
  Pfam annotation: Domain name=Ribosomal_L35Ae; Domain location=12-106; Score=170.9; E_value=3.4e-48; Accession=PF01247.8; Description =Ribosomal protein L35Ae
MVKGRQGERVRLYVRGTILGYKRSKSNQYPNTSLIQIEGVNTTEEVTWYKGKRMAYIYKAKTKKNGSHYRCIWGKVTRPHGNSGVVRAKFTSNLPPKSMGMRVRVFMYPSNI

SEQ ID NO: 12834 - protein, 118 aa, Zea mays
  misc_feature (33)..(33): Xaa can be any naturally occurring amino acid
  misc_feature (35)..(36): Xaa can be any naturally occurring amino acid
  misc_feature (112)..(112): Xaa can be any naturally occurring amino acid
  Coding DNA Sequence Number=SeqID_7502
  Gene Ontology: Mol. function=DNA binding
  Homolog annotation: Hit_ID=A9PGX0; Match level="QueryCoverage=66%, HitCoverage=57%, E-value=1e-23, Identity=75%"; Hit description =Putative uncharacterized protein
  Pfam annotation: Domain name=dsDNA_bind; Domain location=37-118; Score=7.7; E_value=0.00012; Accession=PF01984.10; Description=Double- stranded DNA-binding domain
KFYSVVLVFVRAAQYLFDFASREKQRLLLWLLXLXXIRQRRMQELMAQHGTQGKQGSQQNPDQERAQEDAKREADERRQMMLSQILSSQARERIARIALVKPEKARAVEDVXLRGCSN

SEQ ID NO: 12835 - protein, 82 aa, Zea mays
  misc_feature (82)..(82): Xaa can be any naturally occurring amino acid
  Coding DNA Sequence Number=SeqID_7503
  Gene Ontology: Mol. function=nucleotide binding; Cellular component =plasma membrane; Biological process=small GTPase mediated signal transduction
  Homolog annotation: Hit_ID=P31582; Match level="QueryCoverage=98%, HitCoverage=40%, E-value=2e-38, Identity=97%"; Hit description=Ras -related protein RHA1
  Pfam annotation: Domain name=Ras; Domain location=12-82; Score=-6.1; E_value=6.4e-09; Accession=PF00071.12; Description=Ras family
MATAGNKNINAKLVLLGDVGAGKSSLVLRFVKDQFVEFQESTIGAAFFSQTLAVNDATVKFEIWDTAGQERYHSLAPMYYRX

SEQ ID NO: 12836 - protein, 138 aa, Zea mays
  Coding DNA Sequence Number=SeqID_7504
  Subcellular localization annotation: CTP_CleavageSite=90; ConfidenceScore=5.03e-01
QQSKYSIATILFPLSYNQNTHFEMSISKVLGFLILTCLLIASAMAQSPSPAPFIGGGRRVISPSPSKTPTPESSVASPPSLPQADSPSIDSAAVTPSSISDSPSEAPAPSQQSSAVSNQYTVFAGSITVILYAAVLAF

SEQ ID NO: 12837 - protein, 51 aa, Zea mays
  Coding DNA Sequence Number=SeqID_7506
  Gene Ontology: Mol. function=structural constituent of ribosome; Cellular component=ribonucleoprotein complex; Biological process =translation
  Homolog annotation: Hit_ID=P51424; Match level="QueryCoverage=100%, HitCoverage=100%, E-value=1e-23, Identity=98%"; Hit description=60S ribosomal protein L39-1
  Pfam annotation: Domain name=Ribosomal_L39; Domain location=9-51; Score=102.3; E_value=1.5e-27; Accession=PF00832.10; Description =Ribosomal L39 protein
MPSHKSFMIKKKLAKKMRQNRPIPHWIRLRTDNTIRYNAKRRHWRRTKLGF

SEQ ID NO: 12838 - protein, 152 aa, Zea mays
  Coding DNA Sequence Number=SeqID_7507
  Gene Ontology: Mol. function=cellulose synthase (UDP-forming) activity; Cellular component=membrane; Biological process=cellulose biosynthetic process
  Homolog annotation: Hit_ID=A6Q0E9; Match level="QueryCoverage=100%, HitCoverage=16%, E-value=4e-83, Identity=100%"; Hit description =Putative mixed beta glucan synthase
PINLTERLFQVLRWSTGSLEIFFSKNNPLFGSTYLHPLQRVAYINITTYPFTAIFLIFYTTVPALSFVTGHFIVQRPTTMFYVYLGIVLSTLLVIAVLEVKWAGVTVFEWFRNGQFWMTASCSAYLAAVCQVLTKVIFRRDISFKLTSKLPS

SEQ ID NO: 12839 - protein, 96 aa, Zea mays
  Coding DNA Sequence Number=SeqID_7508
  Gene Ontology: Mol. function=structural constituent of ribosome; Cellular component=ribonucleoprotein complex; Biological process =translation
  Homolog annotation: Hit_ID=Q8LFH7; Match level="QueryCoverage=98%, HitCoverage=100%, E-value=3e-46, Identity=92%"; Hit description=60S ribosomal protein L37-1
  Pfam annotation: Domain name=Ribosomal_L37e; Domain location=2-55; Score=131.6; E_value=2.2e-36; Accession=PF01907.9; Description =Ribosomal protein L37e
  Subcellular localization annotation: CTP_CleavageSite=52; ConfidenceScore=5.31e-01
MTKGTGSFGKRRNKSHTLCVRCGRRSFHIQKSRCSACAYPAARKRTYNWSVKAIRRKTTGTGRMRYLKNVPRRFKTGFREGTEAKPRNKGAAASSA

SEQ ID NO: 12840 - protein, 143 aa, Zea mays
  Coding DNA Sequence Number=SeqID_7509
  Gene Ontology: Mol. function=peptidyl-prolyl cis-trans isomerase activity; Cellular component=mitochondrial matrix; Biological process=protein folding
  Homolog annotation: Hit_ID=A7DX10; Match level="QueryCoverage=74%, HitCoverage=73%, E-value=1e-56, Identity=96%"; Hit description =Parvulin-type peptidyl-prolyl cis/trans isomerase
  Pfam annotation: Domain name=Rotamase; Domain location=48-140; Score =86.9; E_value=6.3e-23; Accession=PF00639.11; Description=PPIC-type PPIASE domain
MGKDAKSGGKGKGKQASGSDDAAASKGKGKSGKAADGLGTCTYVKARHVLCEKQGKINEAYKKLQDGWLSNGDKVPPAEFAKIAAEYSECPSGKKGGDLGWFPRGKMAGPFQDVAFNTPVGVTSAPFKSTHGYHIILSEGRKN

SEQ ID NO: 12841 - protein, 107 aa, Zea mays
  Coding DNA Sequence Number=SeqID_7510
  Gene Ontology: Mol. function=glutamate-5-semialdehyde dehydrogenase activity; Cellular component=cytoplasm; Biological process=amino acid biosynthetic process
  Homolog annotation: Hit_ID=P54887; Match level="QueryCoverage=100%, HitCoverage=14%, E-value=3e-48, Identity=93%"; Hit description=Delta- 1-pyrroline-5-carboxylate synthetase A (P5CS A) [Includes: Glutamate 5-kinase (EC ...
  Homolog annotation: Hit description=2.7.2.11) (Gamma-glutamyl kinase) (GK); Gamma- glutamyl phosphate reductase (GPR) (EC 1.2.1.41) (Glutamate-5- semialdehyde dehydrogenase) (Glutamyl-gamma -semialdehyde dehydrogenase)]
ISSLAASIRQLAEMEDPIGRVLAKTEIADGLILEKTSSPLGVLLIVFESRPDALVQIASLAIRSGNGLLLKGGKEARRSNAILHKVITDAIPKTVGGKLIGLVTSRE

SEQ ID NO: 12842 - protein, 130 aa, Zea mays
  misc_feature (15)..(15): Xaa can be any naturally occurring amino acid
  Coding DNA Sequence Number=SeqID_7511
  Homolog annotation: Hit_ID=A7QRM6; Match level="QueryCoverage=94%, HitCoverage=64%, E-value=7e-33, Identity=58%"; Hit description =Chromosome undetermined scaffold_151, whole genome shotgun sequence
MSIGAMQEIEETAPXIDDSQPSGETRSQSATTKVPEVEIHLYRSGKGPIDVFKSNLGGWEQDQLEVRAILEKYGLKSIFAFNVEKGRGVPIRFQRNGRSVLTYRDGATVYIDGEPQDSMIQPITRIVLGV

SEQ ID NO: 12843 - protein, 109 aa, Zea mays
  misc_feature (10)..(10): Xaa can be any naturally occurring amino acid
  misc_feature (100)..(100): Xaa can be any naturally occurring amino acid
  misc_feature (105)..(105): Xaa can be any naturally occurring amino acid
  misc_feature (108)..(108): Xaa can be any naturally occurring amino acid
  Coding DNA Sequence Number=SeqID_7512
  Gene Ontology: Mol. function=structural constituent of ribosome; Cellular component=ribonucleoprotein complex; Biological process =translation
  Homolog annotation: Hit_ID=P49205; Match level="QueryCoverage=100%, HitCoverage=77%, E-value=6e-50, Identity=93%"; Hit description=40S ribosomal protein S17-1
  Pfam annotation: Domain name=Ribosomal_S17e; Domain location=1-109; Score=192.2; E_value=1.3e-54; Accession=PF00833.8; Description =Ribosomal S17
MGRVRTKTVXKSSRQVIEKYYSRMTLDFHTNKKILEEVAIIPSKRLRNKIAGFSTHLMKRIQKGPVRGISLKLQEEERERRMDFVPDESAIKTDRIEVDXETLDXLAXL

SEQ ID NO: 12844 - protein, 143 aa, Zea mays
  misc_feature (34)..(34): Xaa can be any naturally occurring amino acid
  misc_feature (76)..(76): Xaa can be any naturally occurring amino acid
  misc_feature (101)..(101): Xaa can be any naturally occurring amino acid
  misc_feature (127)..(127): Xaa can be any naturally occurring amino acid
  misc_feature (129)..(129): Xaa can be any naturally occurring amino acid
  Coding DNA Sequence Number=SeqID_7513
  Gene Ontology: Mol. function=structural constituent of ribosome; Cellular component=mitochondrial small ribosomal subunit; Biological process=translation
  Homolog annotation: Hit_ID=Q9CA19; Match level="QueryCoverage=100%, HitCoverage=92%, E-value=9e-68, Identity=88%"; Hit description=Small ribosomal subunit protein S13, mitochondrial precursor
  Pfam annotation: Domain name=Ribosomal_S13; Domain location=33-137; Score=99.8; E_value=8.7e-27; Accession=PF00416.12; Description =Ribosomal protein S13S18
MFGLRRSAATLFDHSQSLLRNLSFHGLRVQGIRXGNAEVPNHKPLKTGLQEVYGIGRRKSHQVLCGLGITNKLARXLTGKELIDLREEVGMHQHGDELRRXVGSEIQRLVEVDCYRGSRHRHGMPCXGXRTKTNARTKKGKRV

SEQ ID NO: 12845 - protein, 118 aa, Zea mays
  Coding DNA Sequence Number=SeqID_7514
  Gene Ontology: Mol. function=hydrolase activity, hydrolyzing O -glycosyl compounds; Cellular component=cell wall; Biological process= carbohydrate metabolic process
  Homolog annotation: Hit_ID=Q5JZX2; Match level="QueryCoverage=81%, HitCoverage=33%, E-value=3e-38, Identity=81%"; Hit description =Xyloglucan endo-transglycosylase/hydrolase precursor
  Pfam annotation: Domain name=Glyco_hydro_16; Domain location=25-118; Score=-35.2; E_value=7e-05; Accession=PF00722.11; Description =Glycosyl hydrolases family 16
MARRFLAVLAVALALLQAASAKSWLDKRFNTDGTVRTGYDASGQQVVMLNLNQQSGAAGFNSKEQYLYGEFSIQMKLIPGNSAGTVSCFYLSSGDDEWRDEIDMEFMGNSSGHPVVLN

SEQ ID NO: 12846 - protein, 80 aa, Zea mays
  Coding DNA Sequence Number=SeqID_7515
LIAVVDLDLEWKRRSLLGILWFRSQLLARNRIKEATTRGSGAAARASRAVGGGWLRRRRDNGGERWRRGSARTWLRLLSL

SEQ ID NO: 12847 - protein, 44 aa, Zea mays
  misc_feature (38)..(38): Xaa can be any naturally occurring amino acid
  misc_feature (41)..(41): Xaa can be any naturally occurring amino acid
  misc_feature (43)..(43): Xaa can be any naturally occurring amino acid
  Coding DNA Sequence Number=SeqID_7517
  Gene Ontology: Mol. function=structural constituent of ribosome; Cellular component=ribonucleoprotein complex; Biological process =translation
  Homolog annotation: Hit_ID=Q9SR73; Match level="QueryCoverage=100%, HitCoverage=68%, E-value=3e-15, Identity=93%"; Hit description=40S ribosomal protein S28-1
  Pfam annotation: Domain name=Ribosomal_S28e; Domain location=1-44; Score=50.6; E_value=5.6e-12; Accession=PF01200.9; Description =Ribosomal protein S28e
MDSQIKHAVVVKVMGRTGSRGQVTQVRVKFTDSDRYIXRNXKXP

SEQ ID NO: 12848 - protein, 59 aa, Zea mays
  misc_feature (7)..(7): Xaa can be any naturally occurring amino acid
  Coding DNA Sequence Number=SeqID_7518
YALFLNXEIKKIVPSFRFNPYRLLLLLQCFCLYKLQLQQSKQSSLIRFDDFAIHYCNSL

SEQ ID NO: 12849 - protein, 126 aa, Zea mays
  misc_feature (14)..(14): Xaa can be any naturally occurring amino acid
  misc_feature (20)..(20): Xaa can be any naturally occurring amino acid
  misc_feature (40)..(40): Xaa can be any naturally occurring amino acid
  misc_feature (43)..(43): Xaa can be any naturally occurring amino acid
  misc_feature (48)..(48): Xaa can be any naturally occurring amino acid
  misc_feature (58)..(58): Xaa can be any naturally occurring amino acid
  misc_feature (80)..(80): Xaa can be any naturally occurring amino acid
  misc_feature (87)..(87): Xaa can be any naturally occurring amino acid
  misc_feature (93)..(95): Xaa can be any naturally occurring amino acid
  misc_feature (97)..(97): Xaa can be any naturally occurring amino acid
  misc_feature (109)..(109): Xaa can be any naturally occurring amino acid
  misc_feature (116)..(116): Xaa can be any naturally occurring amino acid
  misc_feature (120)..(120): Xaa can be any naturally occurring amino acid
  Coding DNA Sequence Number=SeqID_7520
STNCFNYKKKTPNXELPHVXTCSSHTSWPTPLGPYPSACXPAXVQLLXRWQGDGHGPXPPGPEPGPLQGAGSSVSSLDAXFPPPPSXPWSPCXXXPXATGNRQDINSPXLHYLFWXESMXFLLAGK

SEQ ID NO: 12850 - protein, 106 aa, Zea mays
  misc_feature (28)..(28): Xaa can be any naturally occurring amino acid
  misc_feature (38)..(38): Xaa can be any naturally occurring amino acid
  Coding DNA Sequence Number=SeqID_7522
MADAKQQQQQQQQQPQQAAAAATGVWKXTVKPFVNRGXLWDARDLRHPAYRHGSGGGSSLGGGLPLVRAQGTCLQMGGVAGPSKKVWPGRIAWGRRATQWAGLGTL

SEQ ID NO: 12851 - protein, 102 aa, Zea mays
  misc_feature (2)..(3): Xaa can be any naturally occurring amino acid
  misc_feature (7)..(7): Xaa can be any naturally occurring amino acid
  misc_feature (9)..(9): Xaa can be any naturally occurring amino acid
  misc_feature (13)..(13): Xaa can be any naturally occurring amino acid
  misc_feature (21)..(21): Xaa can be any naturally occurring amino acid
  misc_feature (35)..(35): Xaa can be any naturally occurring amino acid
  misc_feature (37)..(37): Xaa can be any naturally occurring amino acid
  misc_feature (48)..(48): Xaa can be any naturally occurring amino acid
  misc_feature (59)..(59): Xaa can be any naturally occurring amino acid
  misc_feature (67)..(67): Xaa can be any naturally occurring amino acid
  misc_feature (101)..(101): Xaa can be any naturally occurring amino acid
  Coding DNA Sequence Number=SeqID_7523
  Gene Ontology: Mol. function=threonine endopeptidase activity; Cellular component=proteasome core complex; Biological process =ubiquitin-dependent protein catabolic process
  Homolog annotation: Hit_ID=A1CM55; Match level="QueryCoverage=98%, HitCoverage=37%, E-value=2e-20, Identity=56%"; Hit description =Proteasome subunit alpha type
RXXMARXYXERNXAEFADCSXEELINHGLKALREXLXQDKELRIDNTXVGVVGLVPKDXATPSSKGXKLENFKLYDGQDVGALLEALDGAATEGGEMEVDXQ

SEQ ID NO: 12852 - protein, 86 aa, Zea mays
  misc_feature (8)..(8): Xaa can be any naturally occurring amino acid
  misc_feature (27)..(27): Xaa can be any naturally occurring amino acid
  misc_feature (51)..(51): Xaa can be any naturally occurring amino acid
  misc_feature (69)..(70): Xaa can be any naturally occurring amino acid
  misc_feature (76)..(78): Xaa can be any naturally occurring amino acid
  misc_feature (80)..(80): Xaa can be any naturally occurring amino acid
  Coding DNA Sequence Number=SeqID_7524
RKSFRFEXQFASLSTGLLQIPKKKISXNNSLLLLVIRTLNLKYFFLHFFKXLAKIVASIHNFNFTYVIXXIVSITXXXIXPKKKKK

SEQ ID NO: 12853 - protein, 194 aa, Zea mays
  misc_feature (130)..(130): Xaa can be any naturally occurring amino acid
  misc_feature (148)..(148): Xaa can be any naturally occurring amino acid
  misc_feature (159)..(159): Xaa can be any naturally occurring amino acid
  Coding DNA Sequence Number=SeqID_7526
  Homolog annotation: Hit_ID=Q1QNZ7; Match level="QueryCoverage=79%, HitCoverage=30%, E-value=6e-56, Identity=70%"; Hit description =Putative uncharacterized protein
  Pfam annotation: Domain name=Peptidase_M15_2; Domain location=51-194; Score=140.1; E_value=6.3e-39; Accession=PF05951.3; Description =Bacterial protein of unknown function
CRPNARRLGGLIVLAVFARRFNPLSLPKAGYQVGLAALLLLAGAGSVHDATALNQTRTLSFHHTHSGEDLTVTFKRDGRYDEAALKQLNHFLRDWRSQDETVMDRHLFDIIWEVYNDVGGKQPIQIISAXRPRTNAMLRRRSSGVARXQQHMLGHAMDXIPGVPLDKSVPGCARGVSPTRLPFRGIRIAGIPHW

SEQ ID NO: 12854 - protein, 184 aa, Zea mays
  misc_feature (11)..(11): Xaa can be any naturally occurring amino acid
  misc_feature (14)..(14): Xaa can be any naturally occurring amino acid
  misc_feature (35)..(35): Xaa can be any naturally occurring amino acid
  Coding DNA Sequence Number=SeqID_7527
  Homolog annotation: Hit_ID=A2VU36; Match level="QueryCoverage=98%, HitCoverage=69%, E-value=1e-55, Identity=56%"; Hit description =Putative uncharacterized protein
  Pfam annotation: Domain name=WbqC; Domain location=6-184; Score =187.7; E_value=2.9e-53; Accession=PF08889.1; Description=WbqC-like protein family
NFAIMQPYFLXYIXGYYQLIGAVDLFIVYDNIKYXQKGWINRNRMLVNGKDALFSLPLKKDSDALDIRDRELAPDFDRAKLLNQWRGAYRTAPFFKETFPLLEEIVGFQDPNLFRYLFNSLQMTCAHLGLKTTFKISSEVPIDHSLKFQDKVLALCEAEGTQTYINAIGGLELYDAKAFSARGI

SEQ ID NO: 12855 - protein, 96 aa, Zea mays
  misc_feature (2)..(2): Xaa can be any naturally occurring amino acid
  misc_feature (6)..(6): Xaa can be any naturally occurring amino acid
  misc_feature (23)..(23): Xaa can be any naturally occurring amino acid
  misc_feature (27)..(27): Xaa can be any naturally occurring amino acid
  misc_feature (34)..(35): Xaa can be any naturally occurring amino acid
  Coding DNA Sequence Number=SeqID_7528
PXWGKXRKREKITFGGGSHGNKXGWVXSLRKLNXXIFWGLHFFGFLMARVLFKDRPILHFGPSKGSSLDVTDQGIMGDNFNGRVSSFLSGTVSIFL

SEQ ID NO: 12856 - protein, 195 aa, Zea mays
  misc_feature (84)..(85): Xaa can be any naturally occurring amino acid
  misc_feature (87)..(88): Xaa can be any naturally occurring amino acid
  misc_feature (90)..(92): Xaa can be any naturally occurring amino acid
  misc_feature (94)..(97): Xaa can be any naturally occurring amino acid
  misc_feature (101)..(103): Xaa can be any naturally occurring amino acid
  misc_feature (105)..(109): Xaa can be any naturally occurring amino acid
  misc_feature (113)..(120): Xaa can be any naturally occurring amino acid
  misc_feature (122)..(122): Xaa can be any naturally occurring amino acid
  misc_feature (126)..(139): Xaa can be any naturally occurring amino acid
  misc_feature (142)..(142): Xaa can be any naturally occurring amino acid
  misc_feature (145)..(150): Xaa can be any naturally occurring amino acid
  misc_feature (153)..(154): Xaa can be any naturally occurring amino acid
  misc_feature (158)..(159): Xaa can be any naturally occurring amino acid
  misc_feature (161)..(161): Xaa can be any naturally occurring amino acid
  misc_feature (164)..(165): Xaa can be any naturally occurring amino acid
  misc_feature (168)..(172): Xaa can be any naturally occurring amino acid
  misc_feature (174)..(183): Xaa can be any naturally occurring amino acid
  misc_feature (186)..(194): Xaa can be any naturally occurring amino acid
  Coding DNA Sequence Number=SeqID_7530
RERERESSVSPPFTPPLLPPAIDILLEDADRSPPLGQLFLSLLLSIKGSRAPLPSPAYPNSPHLSSSPVHCSTSSLVAVHRRSXXEXXTXXXPXXXXPAGXXXCXXXXXGSTXXXXXXXXPXAPPXXXXXXXXXXXXXXVTXPAXXXXXXPPXXRPAXXLXSPXXAPXXXXXPXXXXXXXXXXPRXXXXXXXXXS

SEQ ID NO: 12857 - protein, 115 aa, Zea mays
  misc_feature (4)..(4): Xaa can be any naturally occurring amino acid
  misc_feature (6)..(7): Xaa can be any naturally occurring amino acid
  misc_feature (9)..(9): Xaa can be any naturally occurring amino acid
  misc_feature (14)..(14): Xaa can be any naturally occurring amino acid
  misc_feature (19)..(19): Xaa can be any naturally occurring amino acid
  misc_feature (21)..(21): Xaa can be any naturally occurring amino acid
  misc_feature (24)..(25): Xaa can be any naturally occurring amino acid
  misc_feature (27)..(27): Xaa can be any naturally occurring amino acid
  misc_feature (43)..(43): Xaa can be any naturally occurring amino acid
  misc_feature (50)..(50): Xaa can be any naturally occurring amino acid
  misc_feature (55)..(56): Xaa can be any naturally occurring amino acid
  misc_feature (62)..(62): Xaa can be any naturally occurring amino acid
  misc_feature (64)..(64): Xaa can be any naturally occurring amino acid
  misc_feature (74)..(75): Xaa can be any naturally occurring amino acid
  misc_feature (80)..(80): Xaa can be any naturally occurring amino acid
  misc_feature (83)..(83): Xaa can be any naturally occurring amino acid
  misc_feature (85)..(88): Xaa can be any naturally occurring amino acid
  misc_feature (90)..(90): Xaa can be any naturally occurring amino acid
  misc_feature (96)..(99): Xaa can be any naturally occurring amino acid
  misc_feature (101)..(101): Xaa can be any naturally occurring amino acid
  misc_feature (103)..(108): Xaa can be any naturally occurring amino acid
  misc_feature (111)..(112): Xaa can be any naturally occurring amino acid
  Coding DNA Sequence Number=SeqID_7532
PRIXGXXGXHPGLXIWGRXPXESXXSXVAIPSVEPTKGRPTGXSRVWFKXVRDQXXQGRLRXSXQDTQFLHESXXNNNAXSAXVXXXXIXGPGTLXXXXNXLXXXXXXQTXXLGD

SEQ ID NO: 12858 - protein, 83 aa, Zea mays
  Coding DNA Sequence Number=SeqID_7534
HYFYSGNAMAWIIAIHKVVIYVHSLGNFFMNYLGFQKAFEATILEQVFIFKLHVIGFHISIGKTGLLSPRGYKTMAFSDVLAS

SEQ ID NO: 12859 - protein, 105 aa, Zea mays
  misc_feature (81)..(81): Xaa can be any naturally occurring amino acid
  misc_feature (89)..(89): Xaa can be any naturally occurring amino acid
  misc_feature (91)..(92): Xaa can be any naturally occurring amino acid
  misc_feature (97)..(97): Xaa can be any naturally occurring amino acid
  misc_feature (100)..(101): Xaa can be any naturally occurring amino acid
  misc_feature (105)..(105): Xaa can be any naturally occurring amino acid
  Coding DNA Sequence Number=SeqID_7536
AGLLPTFRYITLLHYTTTLLTLHYTTNYYYIILLILTLLIYTNILSQWHFATSLVAAATAAALAVALVVAFVIAGVIAITXAPLLGRVXGXXLVRGXLRXXRALX

SEQ ID NO: 12860 - protein, 78 aa, Zea mays
  Coding DNA Sequence Number=SeqID_7538
AIHFHLYNSTPPLTYSQRERRKRGNKGTMAQIKPLPGFKLETSGFDTMLSCMHQPIQPKSLKCYEKVGNQVIHINNIH

SEQ ID NO: 12861 - protein, 151 aa, Zea mays
  misc_feature (15)..(15): Xaa can be any naturally occurring amino acid
  misc_feature (19)..(19): Xaa can be any naturally occurring amino acid
  misc_feature (22)..(22): Xaa can be any naturally occurring amino acid
  misc_feature (27)..(27): Xaa can be any naturally occurring amino acid
  misc_feature (49)..(49): Xaa can be any naturally occurring amino acid
  misc_feature (54)..(55): Xaa can be any naturally occurring amino acid
  misc_feature (58)..(58): Xaa can be any naturally occurring amino acid
  misc_feature (67)..(67): Xaa can be any naturally occurring amino acid
  misc_feature (70)..(72): Xaa can be any naturally occurring amino acid
  misc_feature (80)..(81): Xaa can be any naturally occurring amino acid
  misc_feature (84)..(89): Xaa can be any naturally occurring amino acid
  misc_feature (93)..(93): Xaa can be any naturally occurring amino acid
  misc_feature (95)..(95): Xaa can be any naturally occurring amino acid
  misc_feature (99)..(99): Xaa can be any naturally occurring amino acid
  misc_feature (101)..(102): Xaa can be any naturally occurring amino acid
  misc_feature (105)..(107): Xaa can be any naturally occurring amino acid
  misc_feature (110)..(110): Xaa can be any naturally occurring amino acid
  misc_feature (114)..(114): Xaa can be any naturally occurring amino acid
  misc_feature (116)..(116): Xaa can be any naturally occurring amino acid
  misc_feature (118)..(119): Xaa can be any naturally occurring amino acid
  misc_feature (121)..(122): Xaa can be any naturally occurring amino acid
  misc_feature (125)..(128): Xaa can be any naturally occurring amino acid
  misc_feature (130)..(131): Xaa can be any naturally occurring amino acid
  misc_feature (133)..(133): Xaa can be any naturally occurring amino acid
  misc_feature (135)..(137): Xaa can be any naturally occurring amino acid
  misc_feature (141)..(141): Xaa can be any naturally occurring amino acid
  misc_feature (143)..(144): Xaa can be any naturally occurring amino acid
  misc_feature (146)..(148): Xaa can be any naturally occurring amino acid
  misc_feature (150)..(151): Xaa can be any naturally occurring amino acid
  Coding DNA Sequence Number=SeqID_7540
DWNGRTHGCRKCSKXPGAXDGXRSARXRPRLGPPGAAPGLCPNCWQRGXFSREXXGPXEPEGGEPPXGGXXXLGKGGGSXXSPXXXXXXVFSXQXTLTXWXXLNXXXPLXLHTXSXRXXGXXSFXXXXNXXHXPXXXPTFXYXXLXXXNXX

SEQ ID NO: 12862 - protein, 110 aa, Zea mays
  misc_feature (27)..(27): Xaa can be any naturally occurring amino acid
  misc_feature (57)..(57): Xaa can be any naturally occurring amino acid
  misc_feature (96)..(97): Xaa can be any naturally occurring amino acid
  misc_feature (100)..(100): Xaa can be any naturally occurring amino acid
  misc_feature (106)..(106): Xaa can be any naturally occurring amino acid
  Coding DNA Sequence Number=SeqID_7542
  Gene Ontology: Mol. function=hydrolase activity, acting on acid anhydrides, catalyzing transmembrane movement of substances; Cellular component=integral to membrane; Biological process =metabolic process
  Homolog annotation: Hit_ID=Q43243; Match level="QueryCoverage=88%, HitCoverage=9%, E-value=4e-31, Identity=74%"; Hit description=H(+) -transporting ATPase
SKEARASVQEVHFLPIKPTDKRNCIKXYLNGEGRMHRVSKGSTKSRSFVLAHNKSDXIERRVRAVIDKFAERGLRALGVAYQEVPDGRKESPGGPXXFIXLLPLFXPPGP

SEQ ID NO: 12863 - protein, 230 aa, Zea mays
  misc_feature (1)..(119): Xaa can be any naturally occurring amino acid
  misc_feature (122)..(122): Xaa can be any naturally occurring amino acid
  misc_feature (124)..(124): Xaa can be any naturally occurring amino acid
  misc_feature (130)..(130): Xaa can be any naturally occurring amino acid
  misc_feature (137)..(137): Xaa can be any naturally occurring amino acid
  misc_feature (147)..(147): Xaa can be any naturally occurring amino acid
  Coding DNA Sequence Number=SeqID_7543
XXXXXXXXXXXXXXXXXXXXXXXXXXXXXXXXXXXXXXXXXXXXXXXXXXXXXXXXXXXXXXXXXXXXXXXXXXXXXXXXXXXXXXXXXXXXXXXXXXXXXXXXXXXXXXXXXXXXXXXEDXDXLDVLLXLKENAAXGLKLTDDRIXGIPRDLNSGGTENTSKRWNGPWLHGQTHNPTGGEGQAQGQIRRGGPPKQPNSREAVPGEWESLKGSGGGQKKLEPSGTSLRGG

SEQ ID NO: 12864 - protein, 99 aa, Zea mays
  Coding DNA Sequence Number=SeqID_7545
  Gene Ontology: Mol. function=hydrogen ion transporting ATPase activity, rotational mechanism; Cellular component=cytoplasm; Biological process=protein modification process
  Homolog annotation: Hit_ID=P55857; Match level="QueryCoverage=97%, HitCoverage=100%, E-value=1e-45, Identity=92%"; Hit description =Ubiquitin-like protein SMT3
  Pfam annotation: Domain name=ubiquitin; Domain location=21-91; Score =43.7; E_value=6.7e-10; Accession=PF00240.13; Description=Ubiquitin family
MSGAGEEDKKPAEGGAHINLKVKGQDGNEVFFRIKRSTQLKKLMNAYCDRQSVDMNAIAFLFDGRRLRGEQTPDELEMEDGDEIDAMLHQTGGSVPSTT

SEQ ID NO: 12865 - protein, 121 aa, Zea mays
  Coding DNA Sequence Number=SeqID_7546
  Gene Ontology: Mol. function=transposase activity; Biological process= transposition, DNA-mediated
  Homolog annotation: Hit_ID=Q8LN48; Match level="QueryCoverage=93%, HitCoverage=38%, E-value=1e-19, Identity=46%"; Hit description =Putative uncharacterized protein P0031G09.3
MLDQEACEVQSPPSVTSVYRRGKKQKKSQVASVLDDYLEHKKKQTQKIVEVLLEKKSREEEYSIERCLDTVDAMEELTDEEKALAAEVFKNELNREMFVMQKNVNVRLIWLRRKISRIAST

SEQ ID NO: 12866 - protein, 475 aa, Zea mays
  Coding DNA Sequence Number=SeqID_7547
  Gene Ontology: Mol. function=translation initiation factor activity; Cellular component=transcription factor TFIIE complex; Biological process=transcription initiation from RNA polymerase II promoter
  Homolog annotation: Hit_ID=A2Z6Y8; Match level="QueryCoverage=100%, HitCoverage=100%, E-value=1e-140, Identity=90%"; Hit description =Putative uncharacterized protein
MDLKDSLSKFKQQQERCQSSLASIAASTSKPKHRAQPAHAPNVPARPSQPIKFSNDTERLQHINSIRKSPVGAQIKLVIELLYKTRQAFTAEQINEATYVDIHGNKAVFDSLRNNPKVSYDGRRFSYKSKHDLKGKDPLGVLLADSPSRPARRRARKPHLALPAEERASTTVPAARRSVHSIHAASGERGVRTLRPMDLKDSLSKFKQQQERCQSSLASIAASTSKPKHRAQPAHAPNVPARPSQPIKFSNDTERLQHINSIRKSPVGAQIKLVIELLYKTRQAFTAEQINEATYVDIHGNKAVFDSLRNNPKVSYDGRRFSYKSKHDLKGKDQLLVLIRKFPEGLAVVEVKDAYSNVLEDLQALKAAGEVWLLSNMDSQEDIVYPNDPKAKIKVDDDLKQLFREIELPRDMVDIEKELQKNGFKPMTNTAKRRAAAQINGVKPKAKPKKKQREITKRTKLTNAHLPELFQNLNT

SEQ ID NO: 12867 - protein, 590 aa, Zea mays
  misc_feature (106)..(107): Xaa can be any naturally occurring amino acid
  Coding DNA Sequence Number=SeqID_7548
  Gene Ontology: Mol. function=metal ion binding; Cellular component =cytoplasm; Biological process=lipid catabolic process
  Homolog annotation: Hit_ID=A2YQJ5; Match level="QueryCoverage=97%, HitCoverage=50%, E-value=1e-177, Identity=69%"; Hit description =Putative uncharacterized protein
  Pfam annotation: Domain name=DDHD; Domain location=333-531; Score =131.1; E_value=3.2e-36; Accession=PF02862.8; Description=DDHD domain
MMERLTSSPNGRIDHVLQEKTFQHPYLSALGAHTNYWRDHDTALFILKHLYRDIPEDPPSDVIERMPIKLFYERDPVEEETPTFSDHAAIEFCRKKAYMEDDASLXXVLSYDILCHQESLLAPFPTEYLNMETSDRNQGAKSANEVALHDSGAKDHDTSSLGYSCADNENSVVDEDSTRTDMSCMDSILPSCVLEDSPNNHDTGVPRGAVVADQNEKENRIENHQTVYTEEGTTSGVSTKDAEASHISRSAEDVHEEVLDKEKMIISLEEEVKRLKAKLDQLEQHKHLVTESTSGVEYHGGKNGNHALNSGKLFVAQESTNQSYSPQIKYTKLNFKVDTFFAVGSPLGVFLSLRNVRIGIGKGQDYWQDKNIIEEMPCCRQMFNIFHPFDPVAYRIEPLVCEDYLKKRPVIVPYHRGGKRIHVGVQEFTEDISARSQAIACQLKSLKVKAVAALLALSRNDTEEDGESANEEGRSYGSIMMERLTGSPDGRIDHVLQEKTFQHSYLSALGAHTNYWRDHDTALFILKHLYRDIPEDPPSDVVERMHIKLFYERDPVEEETPVTFSDHAAIKEFCRKVRAYSTKMEDDANC

SEQ ID NO: 12868 - protein, 685 aa, Zea mays
  Coding DNA Sequence Number=SeqID_7549
  Gene Ontology: Mol. function=heat shock protein binding; Cellular component=endoplasmic reticulum membrane; Biological process=protein folding
  Homolog annotation: Hit_ID=A7QG99; Match level="QueryCoverage=92%, HitCoverage=91%, E-value=0.0, Identity=74%"; Hit description =Chromosome undetermined scaffold_91, whole genome shotgun sequence
  Pfam annotation: Domain name=DnaJ; Domain location=99-161; Score =94.3; E_value=3.9e-25; Accession=PF00226.21; Description=DnaJ domain
  Pfam annotation: Domain name=Sec63; Domain location=205-604; Score= -16.1; E_value=2.3e-08; Accession=PF02889.7; Description=Sec63 domain
  Pfam module annotation: Pfam domain module=DnaJ::Sec63; Domain location=99-161::205-604
MAAAEENSSLFLIFVLTMIALPLVPYTILRLCRAASEKVKTIHCRCSGCHRSGKYRKSIYKRISNLSTCSNLTILLLWIVMILLVYYIKHVSREVQVFEPFSILGLESGASESDIKKSYRRLSIQYHPDKNPDPEAHKYFVEYISKAYQALTDPISRENYEKYGHPDGRQGLQMGIALPKFLLNIDGASGGIMLLGIVGFCILLPLMIAVIYLSRSSKYTGNYVMHQTLSTYYYFMKPSLAPSKVMDVFIKAAEYMEMPVRRSDDEPLQKLFVAVRSELNLDLKNIKTEQAKFWKQHPSLVKMELLIQAHLTCESFALTPALLKDYRHMLELAPRLLEELVKIAVLPRNPHGFGWLRPAIGVIELSQNIVQAVPLSARKTSGGNSEGIAHFLQLPHFTEATVKKIARKKIRAFQELCDMSVEGRAALLTQVAGLSEEQVRDVELVLEMIPCIEVDIKCETEGEEGIQEGDVVTMYAWVSLRRRNGLTAALPHCPNFPFHKEENFWLLLADAASNDVWLSQKVSFMDEATAITAASKAIQDTQEALGASAKEIGNAVKEAVDRVKKGSRLVMGKFQAPAEGTHNLTSFCLCDAWIGCDIKTSFKLKVLKRSRAGTRGHVPEEGSAAAVEDGIEDEEEEDEEEYDDYESEYSDDEEDEKNKGKGQGKVVNGSAHQGAESDIDSGSDE

SEQ ID NO: 12869 - protein, 353 aa, Zea mays
  misc_feature (1)..(1): Xaa can be any naturally occurring amino acid
  Coding DNA Sequence Number=SeqID_7550
  Gene Ontology: Mol. function=catalytic activity; Cellular component =nucleus; Biological process=metabolic process
  Homolog annotation: Hit_ID=Q2QNV4; Match level="QueryCoverage=88%, HitCoverage=69%, E-value=1e-152, Identity=43%"; Hit description =Pentatricopeptide, putative, expressed
  Pfam annotation: Domain name=PPR; Domain location=119-153; Score=4.6; E_value=2.2; Accession=PF01535.11; Description=PPR repeat
  Pfam annotation: Domain name=PPR; Domain location=185-219; Score=2.0; E_value=4.5; Accession=PF01535.11; Description=PPR repeat
  Pfam annotation: Domain name=PPR; Domain location=48-82; Score=51.4; E_value=3.2e-12; Accession=PF01535.11; Description=PPR repeat
  Pfam annotation: Domain name=PPR; Domain location=83-116; Score=8.1; E_value=0.86; Accession=PF01535.11; Description=PPR repeat
  Pfam module annotation: Pfam domain module=PPR::PPR::PPR::PPR; Domain location=119-153::185-219::48-82::83-116
XQVHGRAVKTGHTSETEVANALISLYGKCGSIEDAKMIFSEMSLRNEVSWNTIITSCSQHGRGLEALDLFDQMKQEGLKPNDVTFIGVLAACSHVGLVEEVLSYFKSMSNVYGLNPIPDHYACVVDILGRAGQLDRARRFVDEMPITANAMIWRTLLSACKVHKNIEIGELAAKHLLELEPHDSASYVLLSNAYAVTGKWANRDQVRKMMKDRGIRKEPGRSWIEVKNAVHAFFVGDRSHPLSDQIYKFLSELNDRLSKIGYKQENPNLFHEKEQEQKDPTAFVHSEKLAVAFGLMTLPPCIPLRVIKNLRVCDDCHSWMKCTSEVTRREIVLRDVYRFHHFNSGSCSCGDYW

SEQ ID NO: 12870 - protein, 153 aa, Zea mays
  Coding DNA Sequence Number=SeqID_7551
  Homolog annotation: Hit_ID=Q6K1X0; Match level="QueryCoverage=90%, HitCoverage=89%, E-value=2e-51, Identity=68%"; Hit description =Putative iron-stress related protein
MSSSGPLPAGTHQTRNRAGNRRKSGDRADKANYSYNNDGEKSNVPSLKNLPPIVHHETFFSNVQNDYNQTGLVPLEGCSASEASQLLSDRWTAAINMYNDQTIDPSEKPVMYSGSSSSSWGHLKLPHQMNFLEELRRAVDAHTEFASPVVTWN

SEQ ID NO: 12871 - protein, 302 aa, Zea mays
  Coding DNA Sequence Number=SeqID_7552
  Gene Ontology: Cellular component=nuclear chromosome; Biological process=chromosome segregation
  Homolog annotation: Hit_ID=Q9AXN6; Match level="QueryCoverage=99%, HitCoverage=57%, E-value=1e-66, Identity=49%"; Hit description=RIX4
  Pfam annotation: Domain name=Rad21_Rec8; Domain location=242-296; Score=77.8; E_value=3.5e-20; Accession=PF04824.7; Description =Conserved region of Rad21  Rec8 like protein
KRRKLPQTALDVWRFSRTNRQGSFLLEPLLHGTCSDLQETYERNFPCVSGLDAECSNVAGVANDDPDASLERQLSPNVPRTAELSYHELTPTSPGNAEAQPEPPLPTLKSPGAAGAVPDDDMLPELPRFSPIDVPSSIRGNDTPYKTPGGTPSWLGGSAVSEIPSSDGNYSLPGQSTRDSDNMSFLFPINEDDEHPEIPGLMSTPGGVSSVATGTTGLGSMSARTRAVALFFKDHASSPSDDQPGKFSLNKILEGKTRKQAARMFFETTVLKSYNYIDVQQEDPYGAIEILVKPLLSAAKLT

SEQ ID NO: 12872 - protein, 314 aa, Zea mays
  Coding DNA Sequence Number=SeqID_7553
  Gene Ontology: Mol. function=oxidoreductase activity; Cellular component=cytoplasm; Biological process=response to stress
  Homolog annotation: Hit_ID=A2T1W7; Match level="QueryCoverage=99%, HitCoverage=100%, E-value=1e-121, Identity=67%"; Hit description =Aldose reductase
  Pfam annotation: Domain name=Aldo_ket_red; Domain location=9-287; Score=443.4; E_value=3.2e-130; Accession=PF00248.11; Description =Aldoketo reductase family
LKMAESFVLNTGSRIPSVGLGVWQIQPDAANDAIYAAVKAGYRHIDCAAAYNNEEEVGLALKKLFEDGVVKRDDLFITSKLWAANHAPEDVEEGIDTTLQDLQLDYLDLYLIHGPIRIKKGTSTMTPENFLPTDIPATWAAMEKLYDSGKARAIGVSNFSCKKLHDLLAVARVPPAVNQVECHPVWQQDKLRKLCQSNGVHLSAFSPLGSPGSPWINGPSVLKNPIVVSVADKLQKTPAQVALRWGIQMGHSVLPKSANESRIKENIDIFGWSIPEDLMAKFSEIKQVRLLTAEFVVHPQAGYNTLEDFWDGEI

SEQ ID NO: 12873 - protein, 239 aa, Zea mays
  Coding DNA Sequence Number=SeqID_7554
  Gene Ontology: Mol. function=small conjugating protein ligase activity; Cellular component=endoplasmic reticulum membrane; Biological process=regulation of protein metabolic process
  Homolog annotation: Hit_ID=A0EVF8; Match level="QueryCoverage=100%, HitCoverage=100%, E-value=1e-126, Identity=91%"; Hit description =Ubiquitin conjugating enzyme 2
  Pfam annotation: Domain name=UQ_con; Domain location=9-160; Score =121.8; E_value=2e-33; Accession=PF00179.16; Description=Ubiquitin -conjugating enzyme
MAEKGCLKRLQKEYHALCKEPPPQVVARPLPNDILEWHYVLEGSKGTPFEGGYYYGKLKFPPDYPFKPPSISMTTPSGRFAPHKRICLSMSDFHPESWNPMWSVASILTGLLSFMMDDALTTGSIKTSDAEKRRLAKASLVYNCESKNCPHFRKLFPEYVEKYNQQLQLENTAAEPVPQENPAPAPSPAVQQAPTVANRAQPLAEARRDKNQKKAVPFWMVLVMFSVFGAVMALPLMQL

SEQ ID NO: 12874 - protein, 252 aa, Zea mays
  Coding DNA Sequence Number=SeqID_7555
  Gene Ontology: Mol. function=nucleic acid binding; Cellular component= nucleus; Biological process=intracellular signaling cascade
  Homolog annotation: Hit_ID=Q10BE5; Match level="QueryCoverage=77%, HitCoverage=69%, E-value=2e-85, Identity=61%"; Hit description=Zinc knuckle family protein, expressed
  Pfam annotation: Domain name=DUF1777; Domain location=1-89; Score= -86.0; E_value=0.098; Accession=PF08648.2; Description=Protein of unknown function (DUF1777)
  Pfam annotation: Domain name=zf-CCHC; Domain location=114-131; Score =29.8; E_value=9.8e-06; Accession=PF00098.13; Description=Zinc knuckle
  Pfam annotation: Domain name=zf-CCHC; Domain location=137-154; Score =22.1; E_value=0.00069; Accession=PF00098.13; Description=Zinc knuckle
  Pfam annotation: Domain name=zf-CCHC; Domain location=156-173; Score =31.9; E_value=2.3e-06; Accession=PF00098.13; Description=Zinc knuckle
  Pfam annotation: Domain name=zf-CCHC; Domain location=175-192; Score =19.1; E_value=0.002; Accession=PF00098.13; Description=Zinc knuckle
  Pfam annotation: Domain name=zf-CCHC; Domain location=207-224; Score =28.0; E_value=3.4e-05; Accession=PF00098.13; Description=Zinc knuckle
  Pfam annotation: Domain name=zf-CCHC; Domain location=226-243; Score =22.2; E_value=0.00067; Accession=PF00098.13; Description=Zinc knuckle
  Pfam annotation: Domain name=zf-CCHC; Domain location=57-74; Score =27.2; E_value=6e-05; Accession=PF00098.13; Description=Zinc knuckle
  Pfam annotation: Domain name=zf-CCHC; Domain location=76-93; Score =19.0; E_value=0.002; Accession=PF00098.13; Description=Zinc knuckle
  Pfam annotation: Domain name=zf-CCHC; Domain location=95-112; Score =31.5; E_value=3.1e-06; Accession=PF00098.13; Description=Zinc knuckle
  Pfam module annotation: Pfam domain module=DUF1777::zf-CCHC::zf -CCHC::zf-CCHC::zf-CCHC::zf-CCHC::zf-CCHC::zf-CCHC::zf-CCHC::zf-CCHC; Domain location=1-89::114-131::137-154::156-173::175-192::207 -224::226-243::57-74::76-93::95-112
  Subcellular localization annotation: CTP_CleavageSite=28; ConfidenceScore=5.66e-01
MTSSRSKSRSHSRSRSRSRSPRRRDRLRSERAPRRSRSRSRSRSPYRRRERRGYRDFACKNCRRPGHFAKECPSAPMCNNCNLPGHFAAECTLQTVCWNCKESGHIASECKNEALCHACNKTGHLARDCPTSGANVKLCNKCFKSGHIAVDCTNERACNNCRQPGHIARECKNDPVCNLCNVSGHVARVCPKTTLASVIQGGPFRDILCRICGQPGHISRNCMATIICDTCGGRGHMSYECPSARIFGLRRL

SEQ ID NO: 12875 - protein, 346 aa, Zea mays
  misc_feature (4)..(8): Xaa can be any naturally occurring amino acid
  misc_feature (10)..(10): Xaa can be any naturally occurring amino acid
  misc_feature (14)..(14): Xaa can be any naturally occurring amino acid
  Coding DNA Sequence Number=SeqID_7556
  Gene Ontology: Cellular component=Golgi transport complex; Biological process=protein transport
  Homolog annotation: Hit_ID=A2XE41; Match level="QueryCoverage=78%, HitCoverage=37%, E-value=1e-127, Identity=84%"; Hit description =Putative uncharacterized protein
  Pfam annotation: Domain name=COG6; Domain location=2-344; Score= -90.3; E_value=1.3e-07; Accession=PF06419.2; Description=Conserved oligomeric complex COG6
CGFXXXXXAXRPPXRPPTRPVSFKLSNTLGFYCYTISELLGEDTALCNTIWSLRDAAQQTFFNILKSRGEKLLRYPPLVAVDLSPPPAVREGISLLLELIDTYNSMMVPASGKRPNFDPVISALLDPIIQVCEQAAEAQKSKGSLARRGRTSSDPSGNSRDSISVDAILSKNLSTSILSAESSSKVYLINCLSAIQEPLMGQEVATSYVNNLRSMIEAHICVLVDKEVDCILRKCGLSNKMPYIKEYGSKADARPLADIIETSPQMLMECLKAFYGIVTGTEGSLPEFEQLQVPRLRSDACNGLARALAESYELIYSAVMDPNNSYPDPRSLVKHSPEQIRTILEA

SEQ ID NO: 12876 - protein, 151 aa, Zea mays
  Coding DNA Sequence Number=SeqID_7557
  Subcellular localization annotation: CTP_CleavageSite=59; ConfidenceScore=5.11e-01
AKLPNKIKIFLWFLLKNKILTKRNLKKEDGLGLRIAAFPGSRAPRRARCGRPPARTRSVASVGTDARTGGRLNGRSAPLRKRARPCHADRQCGSGLSLGPSRGGQAPPRERGRHLGALLGGASLVAAGATALVGVGGGCRWWGRGKLDGGV

SEQ ID NO: 12877 - protein, 693 aa, Zea mays
  misc_feature (589)..(590): Xaa can be any naturally occurring amino acid
  misc_feature (593)..(594): Xaa can be any naturally occurring amino acid
  Coding DNA Sequence Number=SeqID_7559
  Homolog annotation: Hit_ID=Q10NJ8; Match level="QueryCoverage=97%, HitCoverage=80%, E-value=0.0, Identity=57%"; Hit description =Expressed protein
  Subcellular localization annotation: CTP_CleavageSite=28; ConfidenceScore=5.31e-01
HSSPSPSSRSLESNQSTPMSGHHHSSIRAQQNRLTDKHHGRARCPPSPNSAVLSLLSGHGTHPCPENGHNYVGLGLSNVSLASDSLGSSSRSCRRHEIVGDEETRWKIEDVVHHCSRRLFTDSDNIGKHFFTSNNKDSMCNDPEQSSGLDCENFESLISDAVMDTARNGSRSPDCFLEDIETSREFPRIPYSCPLPIIDSAAKEIGTTSTEAGDNFIGTAAKVSKNSSLNQSALNATENPPRYSAKFSDRMPDRHQGSVMNRVSRSSSLKESPHARQPNVVPPVDKTGDRSSPNSKGRRSPLRRMLDPILKPRHSSPIRPSFVPKCHLPVNTTKQSLDLGGSVPQNMQRRSVDLVVNSNYRIEANTNQPPRVLLNSARYIQKEKDSTTTRQAFLQLAWKNGLPLFMLSYGDSDILAATVRRKGISEKDDLESTYAVFTVEEPKKKSGAWIKAGGKNKKHHLLSSIVGEIKVARRKSRCHHTADVHVYREFVLLGSGFLPSSEESGDSHVSGEFAAFISALPQQEAETSNQSSSQNTRQKNLAPTGCGCPPLGNFQPSSASANVIAVLPDGFHGKSTSGQPLPLIESQAXXSQXXELLAQGHDREDRHAFSMTSFKEGLYTVEFRSSIALLQAFAMCIVMLHGRYPDRLQVGSQAAQEHDLLAGHEVKAMVASQGRAPTSYVPHRPPLSPVGRA

SEQ ID NO: 12878 - protein, 168 aa, Zea mays
  misc_feature (122)..(122): Xaa can be any naturally occurring amino acid
  misc_feature (127)..(127): Xaa can be any naturally occurring amino acid
  Coding DNA Sequence Number=SeqID_7560
  Homolog annotation: Hit_ID=A2XUV0; Match level="QueryCoverage=37%, HitCoverage=38%, E-value=3e-21, Identity=79%"; Hit description =Putative uncharacterized protein
  Pfam annotation: Domain name=DUF212; Domain location=55-164; Score= -24.1; E_value=0.00027; Accession=PF02681.5; Description=Divergent PAP2 family
  Subcellular localization annotation: CTP_CleavageSite=25; ConfidenceScore=5.29e-01
RPRSSPQPPWKGICTPQPLWKGRVRCPGSASQPPWKARICSFHRRHPSPFNPLTFHGQRGSAVSIDGIIGYTPIKCQACTPLQPIDAYRRTQIIYYCQVMHGAFGVRLHAGKQAEVLNQIVXELPEXHPLSETKPLREILGHTVPQVMAGCILGILMAVVMLLALGRS

SEQ ID NO: 12879 - protein, 285 aa, Zea mays
  Coding DNA Sequence Number=SeqID_7561
  Subcellular localization annotation: CTP_CleavageSite=29; ConfidenceScore=5.34e-01
RGALPSSGRPSAQPSLLYLPSARFISLARASLHARLLPCRAPLPCSLLFFSHAHRLLHLRISLRPAEFSTPCSTARPTTAQVRPAEVLHLPAKLRARAFSLRPAAPLLPSLLAVELPLPALSSSHLSVARRRRVPAHLPPRDARPPEQLPGARPDLFPPCAPLSGCSLRRISFSGAHRLLGSPPHLAAHRAPCAPWPPCLLPGRRLASGSPTMPGVLPALLAAPMSSSPARWSPSPLPAFPLVVASLCAAEAWWVLVAGMVVRRGIWACRCGLPIDAPPVLTGPS

SEQ ID NO: 12880 - protein, 623 aa, Zea mays
  Coding DNA Sequence Number=SeqID_7562
  Gene Ontology: Mol. function=nucleic acid binding; Cellular component= nucleus; Biological process=DNA replication
  Homolog annotation: Hit_ID=O24183; Match level="QueryCoverage=99%, HitCoverage=99%, E-value=0.0, Identity=77%"; Hit description =Replication protein A1
  Pfam annotation: Domain name=Rep-A_N; Domain location=6-108; Score =104.5; E_value=3.2e-28; Accession=PF04057.3; Description=Replication factor-A protein 1, N-terminal domain
  Pfam annotation: Domain name=Rep_fac-A_C; Domain location=468-613; Score=248.8; E_value=1.2e-71; Accession=PF08646.1; Description =Replication factor-A C terminal domain
  Pfam annotation: Domain name=tRNA_anti; Domain location=192-282; Score=37.9; E_value=3.7e-08; Accession=PF01336.15; Description=OB -fold nucleic acid binding domain
  Pfam module annotation: Pfam domain module=Rep-A_N::Rep_fac-A_C::tRNA_ anti; Domain location=6-108::468-613::192-282
MDAAKLVTPGAVSYILAHPSTGSDGAVSDLVVQVLDLKSIGMGSRFSFTATDGNDKIKAMLPTYFASEVHSGNLKNFGLIRILDYTCNSVKGNADKVLIVVKCETVCEALDAEINGEAKKEDPPIVLKPKDEGSVVAEETNSPPLVMKPKQEVKSASQIVTEQRGNAAPATRLSMTRRVHPLITLNPYQGNWVIKVRVTSKGNLRTYRNARGEGCVFNVELTDEDGTQIQATMFNEAAKKFYPIFELGKVYYVSKGSLRIANKQFKTVKNDYELSLNENAIVEEAEGETFLPPVQYNLVKIDQLGPYVGGRELVDIVGVVQSVSPTLSVRRKIDNETIPKRDIVVADDSGKTVTISLWNDLATTTGQELLDMVDSSPVVAIKSLKVSDFQGVSLSTIGRSTLEINPDLPEAKNLKSWYDSEGKDTSLAPISAEVGATRAGGFKSMYSDRVFLSHITSDPAMGQEKPVFFSLYAIISHIKPDQNMWYRACTTCNKKVTEAFGSGYWCEGCQKNYSECSLRYIMVIKLSDPTGEAWVSVFNEHAEKIIGCSADELDRIRKEEGDDSYVLKLKEATWVPHLFRVSVTQHEYMNEKRQRITVRGEAPVDFAAESKYLLEEIAKLTAC

SEQ ID NO: 12881 - protein, 871 aa, Zea mays
  misc_feature (288)..(288): Xaa can be any naturally occurring amino acid
  Coding DNA Sequence Number=SeqID_7563
  Gene Ontology: Cellular component=cytosol
  Homolog annotation: Hit_ID=A2YNG8; Match level="QueryCoverage=92%, HitCoverage=71%, E-value=0.0, Identity=57%"; Hit description =Putative uncharacterized protein
  Subcellular localization annotation: CTP_CleavageSite=65; ConfidenceScore=5.01e-01
AEKRKCNPSPSSSYSSIRWVLIEEGETQHPKSSSNVPVQSSSASKIVLEKTLSKCTTENSSLSIESSSDSSSSYPCTSFSSLDGNKSVQQELPYTSEELFAQRPLKSSPSLREPDMNAKSGHPNVGFRDIVKDCINRDSVGLTVKTSVQEARRNGQHKDSPRPLLLSKSMDGTCIIGIDRTTKVPANVNGSRRCLQEQSRFSCDDRRLLRPAETQECKRPSSRLKELPRLSLDSRKESLSPGSRQKNLSYKRTDDILKNTLRPQDSPSNRRANSVIAKLMGLEEATNXSVLKTKPSPRILTEAAPWRQQERSATNICREAEGRPRIASVYADIERRVGGFDFLECNNKDFRALRILGALNAKDAKSKNDSSGGSVAIHRTGYDLTTSGSFQAPIVVMKPARTTEKHGVSLASVAPIAGLRSLRKLPARYSSFTGTNETSTNENIHLRMSRAQLKSEETVSSANSPRPTSSSSPRNVLKNAEPERRSRPPVSPKSPSKKSNEAVSPKGRTRSKPSQVKCHRDEVLQITGNRISLAKQVDVSIIDCPKPLGGNSTFVPPSNAAATASQKAPSILDSDQNIHSLDNIPSPVSVLDTSFYHKRISDSFKDGETHSSEECWNPNSLPDTPQSKANSEVNQIKPENLEVLIQKLEQLQSMSEEDASIKEVMASVAANKDHQYIYEIMLASGLLHKEHSVTALPGQLQPSNYPINPELFLILEQTRPVSVSAFQTVSGAKKSCKPCAGKLHRRLVFDLVNETIAQKMIICRSGSQPVKFLQSRKLSGWQLFKDLCTEVDRQIKCPEEEENGNMISDEDTVNGTKDWMSFDTMLHGMVWEIERSIFKGLIDEVIGGETIEKMQFGQRKLQRQLSFSSIN

SEQ ID NO: 12882 - protein, 435 aa, Zea mays
  misc_feature (135)..(136): Xaa can be any naturally occurring amino acid
  Coding DNA Sequence Number=SeqID_7564
  Gene Ontology: Mol. function=membrane alanyl aminopeptidase activity; Cellular component=cytoplasm; Biological process=proteolysis
  Homolog annotation: Hit_ID=Q6K4E8; Match level="QueryCoverage=87%, HitCoverage=49%, E-value=0.0, Identity=83%"; Hit description =Putative puromycin-sensitive aminopeptidase; metalloproteinase MP100
  Pfam annotation: Domain name=Peptidase_M1; Domain location=1-345; Score=465.7; E_value=6e-137; Accession=PF01433.10; Description =Peptidase family M1
CHIFVLALAPSLRLPVRGRFLKDLAPKEVVFFADDEILVLGFSKDLVLGEGVLSMKFNGTLNDQMRGFYRSKYQYKGKMKNMAVTQFESVDARRCFPCWDEPAFKAKFKLTLEVNVGMVALSNMPIANQTVAGPXXTVHYVDPPLMSTYLVAIVIGLFEYIEGVTPEGTKVRVYTQVGKSSQGKFALDVGIKSLHLYKDYFGTPYPLPKLDMVAIPDFAAGAMENYGLVTFREVALLFDEESSMESSKQSIAITVAHELAHQWFGNLVTMEWWTHLWLNEGFATWMSNLAVNSFFPQWNIWTQFLDDTTAGLKLDSLEESHPIEVEIHHATEVDEIFDAISYDKGASVIRMLHNYLGAERFQKALASYIRKFAYSNAKTEDLWAVLEENSGEPIKNMMTTWTKQQGYPVINAKLQGNYLELEQAQFLLDGSSGPR

SEQ ID NO: 12883 - protein, 100 aa, Zea mays
  Coding DNA Sequence Number=SeqID_7565
  Subcellular localization annotation: CTP_CleavageSite=56; ConfidenceScore=5.28e-01
KNIVSCNPSFSCLRASTSSLQPQGVAAAHRQLASSPLEPEGLSLGPRRLAGSLSLAASEAGSSQRLLSNFDDCYLSVLLIALFVAVAGVPHGHAPHFPES

SEQ ID NO: 12884 - protein, 399 aa, Zea mays
  Coding DNA Sequence Number=SeqID_7567
  Gene Ontology: Mol. function=GTP binding; Cellular component =intracellular; Biological process=signal transduction
  Homolog annotation: Hit_ID=A7P6K6; Match level="QueryCoverage=100%, HitCoverage=100%, E-value=0.0, Identity=87%"; Hit description =Chromosome chr9 scaffold_7, whole genome shotgun sequence
  Pfam annotation: Domain name=Dynamin_N; Domain location=65-173; Score= -24.0; E_value=0.00078; Accession=PF00350.13; Description=Dynamin family
  Pfam annotation: Domain name=MMR_HSR1; Domain location=63-174; Score =120.8; E_value=4.2e-33; Accession=PF01926.13; Description=GTPase of unknown function
  Pfam annotation: Domain name=TGS; Domain location=290-366; Score =126.8; E_value=6.3e-35; Accession=PF02824.11; Description=TGS domain
  Pfam module annotation: Pfam domain module=Dynamin_N::MMR_HSR1::TGS; Domain location=65-173::63-174::290-366
MGILERIKEIEAEMARTQKNKATEYHLGQLKAKLAKLRTQLLEPPKGSSGGGDGFEVTKFGHGRVALIGFPSVGKSTLLTMLTGTHSEAASYEFTTLTCIPGIVHYNDTKIQLLDLPGIIEGASEGKGRGRQVIAVAKSSDLVLMVLDASKSEGHRQILTRELEAVGLRLNKRPPQIYFKRKKTGGISFNTTVPLTHIDEKLCYQILHEYKIHNAEVLFREDATVDDLIDVIEGNRKYIKCVYVYNKIDVVGIDDVDNLARQPNSLVISCNLKLNLDRLLARMWEEMGLVRVYTKPQGQQPDFTDPVVLSTDRGGCTVEDFCNHIHRSLLKDVKYVLVWGTSARHYPQHCGLGHGLNDEDVVQIVKKKEKEEGGRGRFKSHTNAPDRISDRVKKAPLKT

SEQ ID NO: 12885 - protein, 339 aa, Zea mays
  misc_feature (56)..(56): Xaa can be any naturally occurring amino acid
  misc_feature (63)..(63): Xaa can be any naturally occurring amino acid
  misc_feature (116)..(116): Xaa can be any naturally occurring amino acid
  misc_feature (181)..(181): Xaa can be any naturally occurring amino acid
  misc_feature (246)..(246): Xaa can be any naturally occurring amino acid
  Coding DNA Sequence Number=SeqID_7568
  Gene Ontology: Mol. function=aspartic-type endopeptidase activity; Biological process=proteolysis
  Homolog annotation: Hit_ID=Q7XBD4; Match level="QueryCoverage=87%, HitCoverage=30%, E-value=2e-68, Identity=47%"; Hit description =Cinful1 polyprotein
  Subcellular localization annotation: CTP_CleavageSite=52; ConfidenceScore=5.50e-01
VYKFQFPPIHPPSRRLSLPKPSSIPAATPRKRRMASVLDAVLESVKTLAPASAEAXARKVKIXRKTSDASTVHTLAEVGPSEAPAEARPSKTAPITLEKESVPEKSKSPSPEAPTXEFIVRHASRKQLSEEQVVEVQHYAKDLKYPRWSLVYGGSDEDDFLYCLPDNKEIHVCREMMDNIXYSKFELGLSAMSKDQLADSLAYNSLKGLILSKALKAQKEAEDENYRIALGNLRSKVITLRNEALXKDKILLSLVDRLRSNDAKLVVQAEAHKAKVDELKRKVAEATEKFEVEVVKHEICEIERSRAQNNTDELRASKERCYEYPWNVLGKGGGGGTSE

SEQ ID NO: 12886 - protein, 325 aa, Zea mays
  misc_feature (140)..(140): Xaa can be any naturally occurring amino acid
  misc_feature (142)..(142): Xaa can be any naturally occurring amino acid
  Coding DNA Sequence Number=SeqID_7569
  Gene Ontology: Mol. function=acyltransferase activity; Cellular component=integral to membrane; Biological process=metabolic process
  Homolog annotation: Hit_ID=A7Q3C3; Match level="QueryCoverage=41%, HitCoverage=89%, E-value=1e-46, Identity=67%"; Hit description =Chromosome chr13 scaffold_48, whole genome shotgun sequence
  Pfam annotation: Domain name=Acyltransferase; Domain location=69-222; Score=-11.4; E_value=0.011; Accession=PF01553.11; Description =Acyltransferase
VIQVLFSQEPFRIKVKYQSCRLASLLCLWLGWFLEESFLNPVKWLDEVEAGGAGEDSPGGGSHDVGGLGAAARGDEAEEAGARRRECHRRRLGRWVLTAKDICFKNVVMSYMFRLGKCQPITRGGGIYQEHMNEALDVLXNXAGYGVFVYNYVLIFLLATDAISPAYGFCPLFNSKIYHDIFKQLHTFPEGKIAQEDQPIRRLKWGTASLIVRAPITPIVLPIVHSGFEKVMPENSFFGRRTPVPLCSKKIDIIVGEPIEFDLPSLKQEASTVPHDSSSERKGWPTITPDGLDEAAQRWLYQKMSDKVQSVMERLRKTVTNLKQR

SEQ ID NO: 12887 - protein, 155 aa, Zea mays
  Coding DNA Sequence Number=SeqID_7570
  Gene Ontology: Mol. function=phospholipase A2 activity; Cellular component=vacuole; Biological process=lipid catabolic process
  Homolog annotation: Hit_ID=Q10E50; Match level="QueryCoverage=100%, HitCoverage=100%, E-value=4e-68, Identity=76%"; Hit description =Phospholipase A2, putative, expressed
MERGSSWRLPAVVVGILVCAALFSPPAAALNIGIQSAGDGVSKQQACSRTCESDHCTTPPFLRYGKYCGILYSGCPGEPPCDALDACCMHHDNCVQAKMDYLSTACNEALLDCLARLREGTSTFNGNKCMIDEVIDVISLVIEAAVVAGRVLHKP

SEQ ID NO: 12888 - protein, 370 aa, Zea mays
  misc_feature (16)..(16): Xaa can be any naturally occurring amino acid
  misc_feature (27)..(28): Xaa can be any naturally occurring amino acid
  misc_feature (34)..(35): Xaa can be any naturally occurring amino acid
  misc_feature (37)..(37): Xaa can be any naturally occurring amino acid
  misc_feature (92)..(92): Xaa can be any naturally occurring amino acid
  misc_feature (141)..(141): Xaa can be any naturally occurring amino acid
  misc_feature (187)..(190): Xaa can be any naturally occurring amino acid
  misc_feature (269)..(269): Xaa can be any naturally occurring amino acid
  Coding DNA Sequence Number=SeqID_7571
  Gene Ontology: Mol. function=RNA-directed DNA polymerase activity; Cellular component=chromatin; Biological process=RNA-dependent DNA replication
  Homolog annotation: Hit_ID=Q8W0Y2; Match level="QueryCoverage=98%, HitCoverage=16%, E-value=1e-147, Identity=72%"; Hit description =Putative gag-pol
SVPTSTCFMIYGGRVXASALHRKQERXXVCSVKXXAXVYLDWSGKPITFDRDDHPDRVPSPGKYPLVVDLVIGNVRLTKVLMDEGSSLNIIXADTLGLLRIDLSSIRAGAAPFHGIIPGKRVHPLGQLDLPVCFGTPSNFXKETLTFEVVGFRGTYHVVLGRPCYAKFMAVPNYTYLKLKMPGPNEXXXXGSTYCHAYECKVECVEYVEAIVESEALIADLDCLSKEAPDAKRHAGNFEPAKAVKSVSLDPSNDASKKVRIGSELDPKXEAVLVDFLRANTEIFAWSPSDMPGIPRDVTEHSLDIRAGARPMKQHLRRFDEEKRRAIGKEVHKLMAAGFIKEVFHPEWLANPVLVKKKGGRWRMCVDYTG

SEQ ID NO: 12889 - protein, 255 aa, Zea mays
  Coding DNA Sequence Number=SeqID_7572
  Gene Ontology: Mol. function=nutrient reservoir activity
  Homolog annotation: Hit_ID=P04700; Match level="QueryCoverage=97%, HitCoverage=95%, E-value=6e-84, Identity=70%"; Hit description=Zein -alpha PZ22.1/22A1 precursor
  Pfam annotation: Domain name=Zein; Domain location=3-255; Score =455.4; E_value=7.4e-134; Accession=PF01559.7; Description=Zein seed storage protein
YRIRHELLVSATNAFIIPQCSLAPSASIPQFLPPVTSMGFEHPAVQAYRLQLVLAGSALQQPIAQLQQQSLAHLTLQTIATQQQQHFLPSLSPLAVVNPVAYLQQQLFASNPLVLAKVVTYQQQQQLQQFMPALSQLAMVNPAVYLQLFSFSPLAVGNAPRYLQQQLLQQIVPALTHQLVMANPATYLQQLFPFNQLAVWNFAGYLQQGQQLLNPLAVANPLVVTFLQQQQLLPYNQFFLMNPPLQQPMVGGAIF

SEQ ID NO: 12890 - protein, 387 aa, Zea mays
  misc_feature (312)..(312): Xaa can be any naturally occurring amino acid
  Coding DNA Sequence Number=SeqID_7573
SYENNADAEPNKERRDLTGVNDVDVRGCAKTANTRRHHGVLSIGSTKQRVDSARRRRGCRTFRRAPSKHHGHCAAARKQGGHRVASHGGVAPRRLLQYAMGSWRSGCWSSERRPWREGRSCCCNFWAPARRSCRGVAPMGASPTAPRRRWEQRAWAPWLLGDAGAQSAIVGVGNGEKKLSAENSGRHGARSRGSRDQGERRGRCAQGVGGGACWLEEEEGEEGAMDQSSPTPWTAEGNAGELDCWPTTEKTTPCCSRSPGGGAGRALGCCCAREKEQGALREGEQRCHAMDAGELAARARAGPAMPRSGKQXCGQRGEVARWSQGQRSALHAKIMGEGASRKKPWLLGGRSSSSHGETQQRHAPAMGDSSRALDQRSARAVGGAMDE

SEQ ID NO: 12891 - protein, 555 aa, Zea mays
  Coding DNA Sequence Number=SeqID_7575
  Homolog annotation: Hit_ID=Q5JMX2; Match level="QueryCoverage=98%, HitCoverage=98%, E-value=0.0, Identity=73%"; Hit description =Putative vascular plant one zinc finger protein
MRMGKGLSSRAGSRHRQFRARAMTRVDDLQEVFSGLQSARKDSRSADAAVLEAQLQQMLREWRSELNAPSPTSSLQGNARELSDPPSDTLRLLQLVVAEEEDDATSKMVEQQQQQPPPPLPANRSQGHAHVVCQGMKPEPHEEAVDVAVDQPQLLSQGVLPNGAATASAVFHDQLYYVNQELTVEDFLYDDDYKIDLSGSNLDVINNLEGIVQLEYPDHNLPQGLAPNAYLDMNSCGQSAGAVFLHMPDLLTTMTSAPSAFLKPKCALWDCPRPAIGSERWHNYCSMYHADLAVQEEGPPGTMPVIRPRGIDLKDGPLFAALSAKVQGKNVGVPICEGAATAKSPWNAPELFDLYIFEGESIREWLFFDKPRRAFDSGNRKQRSLPDYNGRGWHESRKQVMKDFGGLKRSYYMDPQPSNSYEWHLYEYEINDCDAFALYRLEFKSSDAKKIAKSKLGCNPLNEIQQQMDRLSADSPVDTKRTARSRTEPNPIDVNTNIYSVPNTTVQTDVPNAYQPGSQVDQMTYLNGSVVYGPHLPYGYSTERSDFYWNSNDGT

SEQ ID NO: 12892 - protein, 133 aa, Zea mays
  Coding DNA Sequence Number=SeqID_7576
VEKNSERHLCTRPTLWRVAPAVPAHALRGAQVLRLPSNPSSDHWHWGKQKHGQVLDVLQRLPICPARWKTAGEHLLWGTPRVMGALPKFRDGVIAHRRSCSTVAPPISVGSGLHRPIDRSRTGTTGCGAWRML

SEQ ID NO: 12893 - protein, 180 aa, Zea mays
  misc_feature (79)..(79): Xaa can be any naturally occurring amino acid
  Coding DNA Sequence Number=SeqID_749
  Gene Ontology: Mol. function=RNA-directed DNA polymerase activity; Cellular component=chromatin; Biological process=RNA-dependent DNA replication
  Homolog annotation: Hit_ID=Q8W0Y2; Match level="QueryCoverage=100%, HitCoverage=7%, E-value=3e-60, Identity=65%"; Hit description =Putative gag-pol
GSTYCHAYECKVECVEYVEAIVESEALIADLDCLSKEAPDAKRHAGNFEPAKAVKSVSLDPSNDASKKVRIGSELDPKXEAVLVDFLRANTEIFAWSPSDMPGIPRDVTEHSLDIRAGARPMKQHLRRFDEEKRRAIGKEVHKLMAAGFIKEVFHPEWLANPVLVKKKGGRWRMCVDYTG

SEQ ID NO: 12894 - protein, 137 aa, Zea mays
  Coding DNA Sequence Number=SeqID_750
  Gene Ontology: Mol. function=sequence-specific DNA binding; Cellular component=nucleus; Biological process=regulation of transcription, DNA-dependent
  Homolog annotation: Hit_ID=A2Z209; Match level="QueryCoverage=29%, HitCoverage=42%, E-value=2e-12, Identity=83%"; Hit description =Putative uncharacterized protein
  Pfam annotation: Domain name=HSF_DNA-bind; Domain location=13-129; Score=-78.7; E_value=0.0027; Accession=PF00447.8; Description=HSF -type DNA-binding
MDKSMLGDLDGLPEEDKMWMAAMIDQLQIHDRFMLYQRISWVEQGRCFVVWKPVELARDLLPLHFKHYNFSFVRQLNTYVSTSKTHSSIYTSYVLLVTEIVVAKQRSALVRSVCLLFMSNETDGRKKPLDRRCQSCL

SEQ ID NO: 12895 - protein, 127 aa, Zea mays
  Coding DNA Sequence Number=SeqID_751
DFRSNPMIRGSGFRRKRRRRYNLVDFDNNQAPDLAVISSITLYCVLELPAGSPIPWNNLIPPPGCDTETQSNTATMGNVASSLVPANASPAQYTQAFFALSSAFIFSIQFLPDDIRGVLMDYGARRP

SEQ ID NO: 12896 - protein, 541 aa, Zea mays
  Coding DNA Sequence Number=SeqID_753
  Gene Ontology: Mol. function=ubiquitin protein ligase binding; Cellular component=cullin-RING ubiquitin ligase complex; Biological process=ubiquitin-dependent protein catabolic process
  Homolog annotation: Hit_ID=A7ED37; Match level="QueryCoverage=96%, HitCoverage=65%, E-value=1e-144, Identity=51%"; Hit description =Putative uncharacterized protein
  Pfam annotation: Domain name=Cullin; Domain location=1-541; Score =248.2; E_value=1.8e-71; Accession=PF00888.12; Description=Cullin family
MSRLICPYKPIDGNSPSQILLRSTFSYFDRTYLLRQLHTSINDMMISQFRRTIFPSTKEQQQDSPGEMLLLGLCELVDFDRKGDSRKDAELTKRSVALLYILSVYTKLFEPLFLVKTREFLKDFAGTRSASSLKEYIKACEKLIQDERVRFLQYNLESTTQKQMMEIVHQVLIHDYTDKLLNEGSLTELLREHDVASLKALYDLLHLAGIESKLRVPWASYVMSTAKGIIGDKERGDQMTVRLLTLRRGLDVIIRDAFLKSNELKEGMRGAFGSAMNDKATASCWSTGTSKVAEMIAKHFDLLLRGGLKAIPKELLSDIQDRAVAEKEGLASSADEDAELDRQLNQTLELCRHVHGKDTFEAFYKKDLARRLLMGRSASSDAERNMITKLRDEAGSSLTQNIETMFKDQELAKEEMDAFREWDRNTLGKPSDLLHVMVLSSGAWPTYPDVNLNLPDNVASQHERFDKFYQHKHSGRVLTWKHCLGHVTLTANFPKGRKELFVSAFQASVLLLFNTVPNDGFLSYDEIKTGTNLQDADLDRT

SEQ ID NO: 12897 - protein, 178 aa, Zea mays
  misc_feature (62)..(62): Xaa can be any naturally occurring amino acid
  misc_feature (125)..(125): Xaa can be any naturally occurring amino acid
  misc_feature (167)..(167): Xaa can be any naturally occurring amino acid
  Coding DNA Sequence Number=SeqID_754
  Gene Ontology: Mol. function=RNA-directed DNA polymerase activity; Cellular component=integral to membrane; Biological process=RNA -dependent DNA replication
  Homolog annotation: Hit_ID=Q7FS87; Match level="QueryCoverage=99%, HitCoverage=13%, E-value=5e-69, Identity=72%"; Hit description =Putative glycerol 3-phosphate permease
HLSPLLFVLAADLLQSIINKAKYLGLLRLPIQNGCGQDFPIIQYADDAIMVMETCPKQLFFXKAMLNSFAESTGLHVNYHKSNIYPINVSSQNKELLVNTFQCQIRTLLFTYLGLPMGLNKPNLXAFFMLIQKMERRLASTSHFLFQVGRLEMVNTVFSSLPAYYMXMCTLRIPKVVI

SEQ ID NO: 12898 - protein, 153 aa, Zea mays
  misc_feature (145)..(145): Xaa can be any naturally occurring amino acid
  Coding DNA Sequence Number=SeqID_755
  Homolog annotation: Hit_ID=A2X0K1; Match level="QueryCoverage=96%, HitCoverage=17%, E-value=6e-58, Identity=72%"; Hit description =Putative uncharacterized protein
  Pfam annotation: Domain name=PPR; Domain location=61-95; Score=7.5; E_ value=1; Accession=PF01535.11; Description=PPR repeat
  Pfam annotation: Domain name=PPR; Domain location=96-130; Score=27.4; E_value=5.3e-05; Accession=PF01535.11; Description=PPR repeat
  Pfam module annotation: Pfam domain module=PPR::PPR; Domain location =61-95::96-130
MWEPSIGLALDVVDRMCKSSSDVPIESFHPIIHACEQRCELHMARPIYDLIRHHNLKFKSKTFRSIISLFVKLKDFEGAYNILTDAEESGEISTVSLYNAIMLGYYREKNYNGAQMVMSQMQIAGVKPDSETFSYLIANCESEEXISKYCDQL

SEQ ID NO: 12899 - protein, 82 aa, Zea mays
  Coding DNA Sequence Number=SeqID_756
IYFEFRKNIKYSEKYENLPETSTRHINMFQTPFHIETLCNVMNATTKVPLGLTSLGLHQYNKITHLYLEKKRRKAKKGDGNT

SEQ ID NO: 12900 - protein, 68 aa, Zea mays
  Coding DNA Sequence Number=SeqID_758
YTVKGGQLFFHHPSFKFKQSQGQNELNRASIQQLQNNHRNISSKFPKHATLGPKLAGYCATTSLVVIR

SEQ ID NO: 12901 - protein, 70 aa, Zea mays
  Coding DNA Sequence Number=SeqID_760
MSAGTGTTWPHGHRSRGVGEATLRRQLCGENGGLVITTKEAPSSLGSIIVAPSSLHISYKVQARIKIWLR

SEQ ID NO: 12902 - protein, 177 aa, Zea mays
  misc_feature (20)..(20): Xaa can be any naturally occurring amino acid
  misc_feature (26)..(26): Xaa can be any naturally occurring amino acid
  misc_feature (101)..(101): Xaa can be any naturally occurring amino acid
  misc_feature (124)..(125): Xaa can be any naturally occurring amino acid
  misc_feature (132)..(132): Xaa can be any naturally occurring amino acid
  misc_feature (134)..(134): Xaa can be any naturally occurring amino acid
  misc_feature (137)..(137): Xaa can be any naturally occurring amino acid
  misc_feature (145)..(145): Xaa can be any naturally occurring amino acid
  Coding DNA Sequence Number=SeqID_762
WLNYIQVTTHSGREDDDDDXEEQNSXVVGERREEEEEGSGLLLARTIQYTVLWYRHSRSTSLAVVHVQVQPVRAAGGEGSEDAARGPRGRGRCSSSSASPXLGPQSSRCMTLAVLPWPVAVVLXXPARATPXSXLPXRAAASRAXARRAASSGHLLLVLSSRPSVMAAVASCAVVGS

SEQ ID NO: 12903 - protein, 260 aa, Zea mays
  Coding DNA Sequence Number=SeqID_764
  Gene Ontology: Mol. function=transferase activity; Cellular component= cytoplasm; Biological process=metabolic process
  Homolog annotation: Hit_ID=Q10N45; Match level="QueryCoverage=89%, HitCoverage=76%, E-value=1e-112, Identity=86%"; Hit description=IN2 -1 protein, putative, expressed
  Pfam annotation: Domain name=GST_C; Domain location=147-237; Score =8.2; E_value=0.015; Accession=PF00043.15; Description=Glutathione S -transferase, C-terminal domain
  Pfam annotation: Domain name=GST_N; Domain location=48-123; Score =12.7; E_value=0.044; Accession=PF02798.10; Description=Glutathione S- transferase, N-terminal domain
  Pfam module annotation: Pfam domain module=GST_C::GST_N; Domain location=147-237::48-123
  Subcellular localization annotation: CTP_CleavageSite=17; ConfidenceScore=5.05e-01
AHRHLHARSSSRTGRIVAMAAAASASSVKEVLPSPLTSASEPPPLFDGTTRLYVAYLCPFAQRAWIARNYKGLQDKIKIVAIDLADRPAWYKEKVYPENKVPSLEHDNQVKGESLDLVKYIDNNFEGPSLLPEDHAKQQFAEELLGYTDAFNKAFYSCLVDREDVSEEAVAALDKIEDALGKFNDGPFFLGQFSLVDVAYVPFIERFQILYSNIKNYDITKGRPSLQKFIEEVNKIDAYTQTKLDPQFLLEQTKKRLGIA

SEQ ID NO: 12904 - protein, 250 aa, Zea mays
  misc_feature (107)..(107): Xaa can be any naturally occurring amino acid
  Coding DNA Sequence Number=SeqID_765
  Gene Ontology: Mol. function=metal ion binding; Cellular component =integral to membrane
  Homolog annotation: Hit_ID=Q6Z7F4; Match level="QueryCoverage=98%, HitCoverage=91%, E-value=5e-68, Identity=54%"; Hit description =Putative nucleic acid binding protein
  Pfam annotation: Domain name=C1_3; Domain location=194-225; Score =13.5; E_value=0.014; Accession=PF07649.3; Description=C1-like domain
  Pfam annotation: Domain name=PHD; Domain location=195-246; Score =55.4; E_value=2e-13; Accession=PF00628.19; Description=PHD-finger
  Pfam module annotation: Pfam domain module=C1_3::PHD; Domain location= 194-225::195-246
MDRHGSARLATPEDVFTDFRARRDGILKALTTDVEKFYKLCDPEYKDTLCLYGLPNKTWEVNVPAAEIPPELPEPAEGINITRDSMPKEDWLSFVAVRSDAWLVAVXAFHFGALHGFDKDARRQLHIMINNHPTVYEVVIGSGEKQPKAHNTNYETKSSSIKEPSSSSKLAEQPLPKKERQIIKEDGGDKDEAFLCGTCGGMYSENGVFWIGCDICDKWYHGDCVRITPAEAKHIDQYSCPACSNKRNIE

SEQ ID NO: 12905 - protein, 348 aa, Zea mays
  Coding DNA Sequence Number=SeqID_7578
  Gene Ontology: Mol. function=ATP binding; Cellular component =cytoplasm; Biological process=septin ring assembly
  Homolog annotation: Hit_ID=Q8H1Q2; Match level="QueryCoverage=99%, HitCoverage=98%, E-value=1e-150, Identity=75%"; Hit description =Nucleotide-binding protein
  Pfam annotation: Domain name=ArsA_ATPase; Domain location=64-271; Score=-171.6; E_value=0.044; Accession=PF02374.6; Description=Anion -transporting ATPase
  Pfam annotation: Domain name=CbiA; Domain location=66-264; Score =26.0; E_value=1.9e-07; Accession=PF01656.13; Description=Cobyrinic acid a,c-diamide synthase
  Pfam module annotation: Pfam domain module=ArsA_ATPase::CbiA; Domain location=64-271::66-264
MENGGGKGDVPNDANEHCPGTQSEEAGKADACAGCPNQQICATAPKGPDPDVVAIVERLATVKHKLLVLSGKGGVGKSTFSAQLSFALAEMDHQVGLLDIDICGPSIPKMLGLEGQDIHQSNLGWSPVYVESNLGVMSIGFMLPNPDDAVIWRGPRKNGLIKQFLKDVDWGEIDYLVVDAPPGTSDEHISIVQYLQATGIDGAIIVTTPQQVSLIDVRKEINFCKKVGVPVLGVVENMSGLRQPLSDLSFVKPGEAGETDATEWALNYIKEKAPELLSVMACSEVFDSSKGGAEKMCREMGVPFLGKVPMDPQLCKAAEEGRSCFSDQKCGASAPALQSIVKKLIKTG

SEQ ID NO: 12906 - protein, 732 aa, Zea mays
  misc_feature (11)..(12): Xaa can be any naturally occurring amino acid
  Coding DNA Sequence Number=SeqID_7579
  Gene Ontology: Mol. function=binding; Cellular component=ubiquitin ligase complex; Biological process=regulation of transcription, DNA -dependent
  Homolog annotation: Hit_ID=A7QCD4; Match level="QueryCoverage=96%, HitCoverage=57%, E-value=0.0, Identity=76%"; Hit description =Chromosome undetermined scaffold_77, whole genome shotgun sequence
  Pfam annotation: Domain name=HEAT; Domain location=109-143; Score =2.5; E_value=11; Accession=PF02985.12; Description=HEAT repeat
  Pfam annotation: Domain name=HEAT; Domain location=149-185; Score =3.3; E_value=8.8; Accession=PF02985.12; Description=HEAT repeat
  Pfam annotation: Domain name=HEAT; Domain location=359-394; Score =12.6; E_value=0.35; Accession=PF02985.12; Description=HEAT repeat
  Pfam annotation: Domain name=HEAT; Domain location=439-475; Score =18.6; E_value=0.024; Accession=PF02985.12; Description=HEAT repeat
  Pfam annotation: Domain name=HEAT; Domain location=519-550; Score =9.3; E_value=1.1; Accession=PF02985.12; Description=HEAT repeat
  Pfam annotation: Domain name=HEAT; Domain location=66-104; Score=9.2; E_value=1.1; Accession=PF02985.12; Description=HEAT repeat
  Pfam annotation: Domain name=TIP120; Domain location=552-719; Score =299.9; E_value=4.9e-87; Accession=PF08623.1; Description=TBP (TATA -binding protein) -interacting protein 120 (TIP120)
  Pfam module annotation: Pfam domain module=HEAT::HEAT::HEAT::HEAT::HEA T::HEAT::TIP120; Domain location=109-143::149-185::359-394::439 -475::519-550::66-104::552-719
FFPTPGWEKPXXVVIHSPSVSYALSAPILSAIRDRYYKVTAEALRVCGELVRVLRPNLETTSVDFKPYIGPIYNAILGRLANQDQDQEVKECAISCMSLVVSTFGDGLERELPACLPILVDRMGNEITRLTAVKAFSVIANSPLRIDLSCVLDHVVSELTAFLRKANRALRQATLGTLNSLVVTYGGQIGSSSYETIIAELSTLISARDLYLEDPKRKLCCTIMVDRKSIQNVGLAVRDKVLPQALVLIRSALLQGQALQALQRFFASLVQSANTSFDALLESLISAAKPSHSGSLAKQALSSIAKCVAVLCLAAGDQKCASTIEMLKGILKDDSTTNSAKQHMALLCLGEIGRRKDLSNHVQIENIVIESFQSPFEEIKSAASYALGNIAVGNLSKYLPFILDQIDNQQKKQYLLLHSLKEVIVRQSVDHTGQSELQDSNIEKILALLFNHCESEEEGVRNVVAECLGKISLIEPKKLVPALEVRTSSPAANTRATVAIAIKYSIVERPEKIDEIMYSKISTFLMLIKDSDRHVRRAAVLALSTAAHNKPNLIKGLLPEILPLLYDQTVIKQELIRTVDLGPFKHVVDDGLELRKAAFECVDTLLDSCLDQVNPSSFIVPFLLSGLGDHYDVKMPCHLILSKLADKCPSAVLAVLDSIVEPIEKTISHKPKGDAVKQEVDRNEDMIRSALRAISSLSRISGSDYSIRFKNLMNKITATPALAEKYNSVRGE

SEQ ID NO: 12907 - protein, 252 aa, Zea mays
  misc_feature (1)..(1): Xaa can be any naturally occurring amino acid
  misc_feature (110)..(112): Xaa can be any naturally occurring amino acid
  misc_feature (116)..(116): Xaa can be any naturally occurring amino acid
  misc_feature (120)..(121): Xaa can be any naturally occurring amino acid
  misc_feature (129)..(130): Xaa can be any naturally occurring amino acid
  misc_feature (136)..(137): Xaa can be any naturally occurring amino acid
  misc_feature (143)..(145): Xaa can be any naturally occurring amino acid
  misc_feature (150)..(151): Xaa can be any naturally occurring amino acid
  misc_feature (173)..(173): Xaa can be any naturally occurring amino acid
  misc_feature (175)..(175): Xaa can be any naturally occurring amino acid
  Coding DNA Sequence Number=SeqID_7580
  Gene Ontology: Mol. function=cation transmembrane transporter activity; Cellular component=integral to membrane; Biological process=potassium ion transport
  Homolog annotation: Hit_ID=A2Q1H4; Match level="QueryCoverage=94%, HitCoverage=73%, E-value=4e-91, Identity=73%"; Hit description=TrkA-N
  Pfam annotation: Domain name=TrkA_N; Domain location=59-174; Score =79.2; E_value=1.3e-20; Accession=PF02254.8; Description=TrkA-N domain
XGLLSPQLSSLLFLVVGISMALTPWLAAGGQFLASKFEQHDVRSLLPVESETDDLHDHIIILGFGRVGQIVAQLLSERLIPFVALDVRSDRVAVGRALDLPVYFGDAGSXXXLHKXGAEXXCAAAITLXXPGANYXXVWALNXXXPNVKXXVRAHDVDHGVNLEKAGATAVVXEXLEPSLQLAAAVLAQAKLPMSEIQETINEFRNRHLSELTELCATSGSSLGYGFSRATSKSKSFTSDDENQTVDGTLAI

SEQ ID NO: 12908 - protein, 654 aa, Zea mays
  misc_feature (544)..(544): Xaa can be any naturally occurring amino acid
  misc_feature (546)..(546): Xaa can be any naturally occurring amino acid
  misc_feature (550)..(552): Xaa can be any naturally occurring amino acid
  Coding DNA Sequence Number=SeqID_7581
  Gene Ontology: Mol. function=ubiquitin protein ligase binding; Cellular component=cullin-RING ubiquitin ligase complex; Biological process=ubiquitin-dependent protein catabolic process
  Homolog annotation: Hit_ID=A7ED37; Match level="QueryCoverage=95%, HitCoverage=78%, E-value=0.0, Identity=54%"; Hit description =Putative uncharacterized protein
  Pfam annotation: Domain name=Cullin; Domain location=1-575; Score =331.5; E_value=1.5e-96; Accession=PF00888.12; Description=Cullin family
MSRLICPYKPIDGNSPSQILLRSTFSYFDRTYLLRQLHTSINDMMISQFRRTIFPSTKEQQQDSPGEMLLLGLCELVDFDRKGDSRKDAELTKRSVALLYILSVYTKLFEPLFLVKTREFLKDFAGTRSASSLKEYIKACEKLIQDERVRFLQYNLESTTQKQMMEIVHQVLIHDYTDKLLNEGSLTELLREHDVASLKALYDLLHLAGIESKLRVPWASYVMSTAKGIIGDKERGDQMTVRLLTLRRGLDVIIRDAFLKSNELKEGMRGAFGSAMNDKATASCWSTGTSKVAEMIAKHFDLLLRGGLKAIPKELLSDIQDRAVAEKEGLASSADEDAELDRQLNQTLELCRHVHGKDTFEAFYKKDLARRLLMGRSASSDAERNMITKLRDEAGSSLTQNIETMFKDQELAKEEMDAFREWDRNTLGKPSDLLHVMVLSSGAWPTYPDVNLNLPDNVASQHERFDKFYQHKHSGRVLTWKHCLGHVTLTANFPKGRKELFVSAFQASVLLLFNTVPNDGFLSYDEIKTGTNLQDADLDRTLQXLXCGKXXXLTKHPKGKDVKPTDTFTYNKSFTDPKVRVKINQIQLKETKEENKAMHDRIAQDRRFETQAAIVRIMKSRKQLGHAELVAEVIAMTSKRGSVEPPEIKKEIEK

SEQ ID NO: 12909 - protein, 158 aa, Zea mays
  Coding DNA Sequence Number=SeqID_7582
TKFLRIRTILQNCHLLPRFFSFLSSMEKRGEGAARAGGRRPGQLRGGWGHRRCRGLHRPQRRGLRARSGAGGPLPAAAAREGEGTTPGGQGAGEGSTVGEREGGGGRERSCAGKTKTKNFMGNNGGWAHRRRRPRRSREKNHQLVTNRRSVDESKASG

SEQ ID NO: 12910 - protein, 376 aa, Zea mays
  Coding DNA Sequence Number=SeqID_7584
  Gene Ontology: Mol. function=nucleic acid binding; Cellular component= nucleus; Biological process=mRNA processing
  Homolog annotation: Hit_ID=Q2R0Q1; Match level="QueryCoverage=99%, HitCoverage=66%, E-value=1e-170, Identity=81%"; Hit description=U2 snRNP auxilliary factor, large subunit, splicing factor family protein, expressed
  Pfam annotation: Domain name=RRM_1; Domain location=164-235; Score =79.3; E_value=1.2e-20; Accession=PF00076.12; Description=RNA recognition motif. (a.k.a. RRM, RBD, or
  Pfam annotation: Domain name=RRM_1; Domain location=44-120; Score =30.3; E_value=6.9e-06; Accession=PF00076.12; Description=RNA recognition motif. (a.k.a. RRM, RBD, or
  Pfam module annotation: Pfam domain module=RRM_1::RRM_1; Domain location=164-235::44-120
  Subcellular localization annotation: CTP_CleavageSite=66; ConfidenceScore=5.08e-01
MIAGQLPGVTAPIPGVGVLPNLYNLAAGQPQAMTQQATRHARRVYVGGLPPTANEQTVAIFFNGVMAAIGGNTAGPGDAVLNVYINHDKKFAFVEMRSVEEASNAMVLDGIMFEGAPVKIRRPTDYNPSLAAALGPSQPNPNLNLSAVGLTPGSAGGLEGPDRIFVGGLQYYFTEAQVRELLESFGPLRGFDLVKDRETGNSKGYAFCVYQDLNVTDIACAALNGIKMGDKTLTVRRANQGASQPRPEQESILLQAQQQVQMQKFVYQVGGALPTKVVCLTQVVTEDELRDDEEYDDIVEDMREEGHKYGNLVKVAIPRPDPSGAPVAGVGKVFLEYADVEGSTKAKTGMHGRKFGGNQVVAVFYPEDKFAAEQYD

SEQ ID NO: 12911 - protein, 385 aa, Zea mays
  Coding DNA Sequence Number=SeqID_7585
  Gene Ontology: Mol. function=phosphoprotein phosphatase activity; Cellular component=cytoplasm; Biological process=protein amino acid dephosphorylation
  Homolog annotation: Hit_ID=P48489; Match level="QueryCoverage=77%, HitCoverage=92%, E-value=1e-169, Identity=96%"; Hit description =Serine/threonine-protein phosphatase PP1
  Pfam annotation: Domain name=Metallophos; Domain location=131-326; Score=159.7; E_value=8.1e-45; Accession=PF00149.18; Description =Calcineurin-like phosphoesterase
  Subcellular localization annotation: CTP_CleavageSite=65; ConfidenceScore=5.32e-01
MFTRQLQHLSWLATLTACCTTHLPIWFRLISFLGPSTPLRPFRRAARNPSPTDSLQPSPQGEGMSAAPAAGGQGGGGIDAALLDDIIRRLLEVRTARPGKQVQLSESEIRQLCTVSRAIFLSQPNLLELEAPIKICGDIHGQYSDLLRLFEYGGFPPEANYLFLGDYVDRGKQSLETICLLLAYKIKYPENFFLLRGNHECASINRIYGFYDECKRRFNVRLWKVFTECFNTLPVAALIDDKILCMHGGLSPDLAHLDEIKNLQRPTDVPDQGLLCDLLWSDPGKDAQGWGMNDRGVSYTFGADKVSEFLQKHDLDLICRAHQVVEDGYEFFADRQLVTIFSAPNYCGEFDNAGAMMSVDETLMCSFQILKPAERKNKFMGSNKM

SEQ ID NO: 12912 - protein, 437 aa, Zea mays
  Coding DNA Sequence Number=SeqID_7586
  Gene Ontology: Mol. function=oxidoreductase activity; Cellular component=extracellular region; Biological process=response to oxidative stress
  Homolog annotation: Hit_ID=Q5U1Q7; Match level="QueryCoverage=82%, HitCoverage=76%, E-value=1e-125, Identity=60%"; Hit description =Class III peroxidase 36 precursor
  Pfam annotation: Domain name=peroxidase; Domain location=40-274; Score=317.9; E_value=1.8e-92; Accession=PF00141.13; Description =Peroxidase
MDARLGFFLLLVAAAFAPLVSAQLSADFYKTSCPDAEKIIFGVVQKRFKADPGTAAGLLRLVFHDCFANGCDASILIDPMSNQASEKEAGPNVSVKGYDVIEEIKTELEKKCPNVVSCADIISVSARDSVKLTGGPEYAVPLGRRDSLVSNREDADNLPGPDIAVPKLIDEFDKQGFNVEEMVAMLGGGHSIGVCRCFFIETDAAPIDPKYKKTISDACDGKDSGSVPMDSTSPNDLDGSYFGLVLEKKMPLTIDRLMGMDKKTEPIVKAMSDKTTDFVPIFAKAMEKLSVLKVLTGKDGEIRKTCSEFNNPQNTSGSTSVIRISSIDPDQMAGLSQPGSTSRKVGPPPVEEETPAMVATEAAAKVPGGVVVSAGDQDRSGSGSGPKLRGSVEPVVNPVPAAPGGAEEAAKQQAVTALEEKKKRNMAKLRAPGQAKL

SEQ ID NO: 12913 - protein, 593 aa, Zea mays
  Coding DNA Sequence Number=SeqID_7587
  Gene Ontology: Mol. function=ferredoxin-nitrite reductase activity; Cellular component=chloroplast; Biological process=nitrate assimilation
  Homolog annotation: Hit_ID=P17847; Match level="QueryCoverage=91%, HitCoverage=95%, E-value=0.0, Identity=94%"; Hit description =Ferredoxin--nitrite reductase, chloroplast precursor
  Pfam annotation: Domain name=NIR_SIR; Domain location=202-362; Score =173.9; E_value=4.3e-49; Accession=PF01077.12; Description=Nitrite and sulphite reductase 4Fe-4S domain
  Pfam annotation: Domain name=NIR_SIR; Domain location=460-594; Score =10.1; E_value=0.00033; Accession=PF01077.12; Description=Nitrite and sulphite reductase 4Fe-4S domain
  Pfam annotation: Domain name=NIR_SIR_ferr; Domain location=124-194; Score=92.7; E_value=1.1e-24; Accession=PF03460.7; Description =NitriteSulfite reductase ferredoxin-like half domain
  Pfam annotation: Domain name=NIR_SIR_ferr; Domain location=383-452; Score=88.3; E_value=2.4e-23; Accession=PF03460.7; Description =NitriteSulfite reductase ferredoxin-like half domain
  Pfam module annotation: Pfam domain module=NIR_SIR::NIR_SIR::NIR_SIR _ferr::NIR_SIR_ferr; Domain location=202-362::460-594::124-194::383 -452
  Subcellular localization annotation: CTP_CleavageSite=53; ConfidenceScore=5.45e-01
MASTASLQRFLPASPHASSRRRAGRARAAVSIPSSSPPATRDNEVPAERLEPRVEAREGGYWSLKERYRTGLNPHEKVKLEKEPMALFMDGGVRDLAKIPMDVIDAAKLTKDDVDVRLKWLGLFHRRKHQYGRFMMRLKLPNGVTTSEQTRYLASVIEAYGADGCADVTTRQNWQIRGVTLPDVPAILDGLRAVGLTSLQSGMDNVRNPVGNPLAGVDPHEIVDTRPYTNLLSSYITSNSQGNPAITNLPRKWNVCVIGSHDLYEHPHINDLAYMPAVKDGKFGFNLLVGGFISPKRWAEALPLDAWVAGDDVVPACKAILEAYRDLGFRGNRQKTRMMWLIDELGMEVFRSEVEKRMPNGVLERAAAEDLVDKKWERRDYLGVHPQKQEGLSYVGLHVPVGRLQAADMFELARLADEYGTGELRLTVEQNVVLPNVSNRRLDALLAEPLLQRQRLSPQPSLLLRGLVACTGNQFCGQAIIETKARALQVAREVEKRVAVPRPVRMHWTGCPNSCAQVQVADIGFMGCLTKDRDGKVVEAADIFVGGRVGSDSHLADVYRKSVPCKDLVPIVADLLVERFGAVPREREEEDEE

SEQ ID NO: 12914 - protein, 344 aa, Zea mays
  misc_feature (31)..(31): Xaa can be any naturally occurring amino acid
  misc_feature (169)..(170): Xaa can be any naturally occurring amino acid
  misc_feature (283)..(283): Xaa can be any naturally occurring amino acid
  misc_feature (288)..(291): Xaa can be any naturally occurring amino acid
  misc_feature (293)..(294): Xaa can be any naturally occurring amino acid
  misc_feature (298)..(299): Xaa can be any naturally occurring amino acid
  misc_feature (301)..(303): Xaa can be any naturally occurring amino acid
  misc_feature (305)..(308): Xaa can be any naturally occurring amino acid
  Coding DNA Sequence Number=SeqID_7588
  Gene Ontology: Mol. function=acyl-CoA binding; Cellular component =nucleus; Biological process=lipid transport
  Homolog annotation: Hit_ID=Q10B01; Match level="QueryCoverage=99%, HitCoverage=52%, E-value=1e-139, Identity=74%"; Hit description=Acyl- CoA binding family protein, putative, expressed
  Pfam annotation: Domain name=Kelch_1; Domain location=36-81; Score =18.7; E_value=0.018; Accession=PF01344.15; Description=Kelch motif
  Pfam annotation: Domain name=Kelch_1; Domain location=86-131; Score =25.2; E_value=0.00024; Accession=PF01344.15; Description=Kelch motif
  Pfam annotation: Domain name=Kelch_2; Domain location=35-81; Score =25.2; E_value=0.00024; Accession=PF07646.5; Description=Kelch motif
  Pfam annotation: Domain name=Kelch_2; Domain location=86-131; Score =10.4; E_value=2.5; Accession=PF07646.5; Description=Kelch motif
  Pfam module annotation: Pfam domain module=Kelch_1::Kelch_1::Kelch _2::Kelch_2; Domain location=36-81::86-131::35-81::86-131
VGEDAKRCLLNDLHILDLETMTWDDESSLRXTPPPRSDHAAACHADRYLLIFGGGSHATCFNDLHVLDLQTMEWSRPKQQGLTPSPRAGHAGATVGENWYIVGGGNNKSGVSDTLVLNMSTLTWSVVSTAEGRVPLASEGMTLVHSNYNGYDYLISFGGYNGRYSNEVXXLSLKSDFKSTTKEETVSDTTSRVVEPEVEMVIGVDSADSDLKNSTDEASEQFLAALKAEKEELEATLNREQLQTVQLKEDIAQAESRNVELTKELQAVRGQLAAEQSRCFKLXVDVAXXXXKXXSMDXXKXXXEXXXXQRAASEQAALDAKQRQSSGGMWSWLVGTPPDDKSES

SEQ ID NO: 12915 - protein, 359 aa, Zea mays
  Coding DNA Sequence Number=SeqID_7589
  Gene Ontology: Mol. function=nucleic acid binding; Cellular component= nucleus; Biological process=proteolysis
  Homolog annotation: Hit_ID=Q10RA9; Match level="QueryCoverage=36%, HitCoverage=42%, E-value=8e-59, Identity=88%"; Hit description =Expressed protein
  Pfam annotation: Domain name=Alba; Domain location=72-142; Score =98.5; E_value=2e-26; Accession=PF01918.11; Description=Alba
MILLVKHQDTDQSSVEITVATDHTTNYQNKKVLHAPTGAPSATCSPGSSPEESAMDRYQRVEKPPPEPAAIGENEIRITTQGLVRNYVTYATSLVQEKQVKEIALKAMGQAISKAVAIAEIIKKRIPGLHQDTIISSVSITDVWEPIEEGLVPLEMTRHVSMISISLSPKEHNKNSPGYQAPLHSDLKPQRYLQPQQYQQYQPRQHQVQTDSYGRGRGRSRGRGRGWGTRGGYGGGYGGYEYDNNQVGYGGYEHHGGYGHQGGYGNQGGYGHNQGGYGHDQGGYGGYGYNQGGYGGYENGGWNYNRNRGGGGRGRGNWGYGGPGYDRGGRGAGGPGGRGYVRGRGRMGGGRGRGNQNYY

SEQ ID NO: 12916 - protein, 111 aa, Zea mays
  misc_feature (1)..(1): Xaa can be any naturally occurring amino acid
  Coding DNA Sequence Number=SeqID_7590
  Subcellular localization annotation: CTP_CleavageSite=43; ConfidenceScore=5.71e-01
XLLCSWLRCSRATSFARRHVDSRVLFRSRSVVSRTSSRVVRTRCRASVACRHKSFVCVACAIYMCRLPCHALLARISRVDHVCRASSARDNKLFALISIHVNNVNLLGLIF

SEQ ID NO: 12917 - protein, 302 aa, Zea mays
  Coding DNA Sequence Number=SeqID_7592
  Gene Ontology: Mol. function=nucleic acid binding; Cellular component= spliceosome; Biological process=mRNA processing
  Homolog annotation: Hit_ID=Q5QNG0; Match level="QueryCoverage=94%, HitCoverage=91%, E-value=1e-113, Identity=74%"; Hit description=RNA -binding protein-like
  Pfam annotation: Domain name=PAM2; Domain location=27-44; Score=25.6; E_value=0.00018; Accession=PF07145.5; Description=Ataxin-2 C-terminal region
  Pfam annotation: Domain name=PAM2; Domain location=51-68; Score=6.9; E_value=0.78; Accession=PF07145.5; Description=Ataxin-2 C-terminal region
  Pfam annotation: Domain name=RRM_1; Domain location=119-187; Score =55.7; E_value=1.6e-13; Accession=PF00076.12; Description=RNA recognition motif. (a.k.a. RRM, RBD, or
  Pfam annotation: Domain name=RRM_1; Domain location=216-285; Score =43.6; E_value=7.2e-10; Accession=PF00076.12; Description=RNA recognition motif. (a.k.a. RRM, RBD, or
  Pfam module annotation: Pfam domain module=PAM2::PAM2::RRM_1::RRM_1; Domain location=27-44::51-68::119-187::216-285
MAAVAEGSASAAAKEVEYQAGVQKLVDLLSNLNPAAKEFVPSSAPAAAASPPKKALSADAPVFDYRSTAGGNGATDDPFYVGFGNQQRKRGNGYINQGRRRTNDRLRRADREDSVRRTVYVSELDHTVTEERLADIFATCGHVVDCRICGDPHSVLRFAFIEFSDEEGARTALNLGGTIFGFYPVRVLPSKTAILPVNPKFLPRTDDEKEMVMRTVYCTNIDKMVTQLDVKKFFEELCGEVSRLRLLGDNVHSTRIAFVEFVHAEGAIMALNCSGMILGTLPVRVSPSKTPVKPRVNRMGSN

SEQ ID NO: 12918 - protein, 272 aa, Zea mays
  Coding DNA Sequence Number=SeqID_7593
  Gene Ontology: Mol. function=ER retention sequence binding; Cellular component=integral to membrane; Biological process=protein retention in ER
  Homolog annotation: Hit_ID=Q69SG3; Match level="QueryCoverage=100%, HitCoverage=100%, E-value=1e-145, Identity=94%"; Hit description=ER lumen protein-retaining receptor-like
  Pfam annotation: Domain name=ER_lumen_recept; Domain location=47-258; Score=93.2; E_value=7.9e-25; Accession=PF00810.9; Description=ER lumen protein retaining receptor
MRASKRPLGVVTAWVRRQPPKVKAFLAVVTGMAALVFIRFIVHDHDNLFVAAEAVHALGIAVLIYKLTKERTCAGLSLKTQDLTALFLAVRLYCSFVMEYDIHTILDTATLVATLFVIYMIRFKLRSTYMVDKDNFALYYVVLPCAGLALLIHPSTSHNIVNRISWGFCVYLEAVSVLPQLHLMQNTKIVEPFTAHYVFALGVARFLSCAHWVLQVLDTRGRLLTALGYGLWPSMVLLSEIVQTFILADFCYYYVKSLVGGQLVLRLPSGVV

SEQ ID NO: 12919 - protein, 642 aa, Zea mays
  misc_feature (582)..(582): Xaa can be any naturally occurring amino acid
  misc_feature (605)..(605): Xaa can be any naturally occurring amino acid
  misc_feature (627)..(627): Xaa can be any naturally occurring amino acid
  Coding DNA Sequence Number=SeqID_7594
  Gene Ontology: Mol. function=thiamin-phosphate diphosphorylase activity; Cellular component=intracellular; Biological process =thiamin biosynthetic process
  Homolog annotation: Hit_ID=Q10F62; Match level="QueryCoverage=100%, HitCoverage=100%, E-value=0.0, Identity=88%"; Hit description =Thiamine biosynthesis protein thiC, putative, expressed
  Pfam annotation: Domain name=ThiC; Domain location=165-585; Score =1095.5; E_value=0; Accession=PF01964.9; Description=ThiC family
  Subcellular localization annotation: CTP_CleavageSite=54; ConfidenceScore=5.41e-01
MAALQPSFSPAMTLKSSCSALKFPKTALLSGFGGIPRLQDAQDRNTSVAYLIPKAASVTDQSIAEPPKTKQNRHTVDPTAPEFLPLPSFEECFPRSTKESSEIIHEESGHVLKVPFRRVHLTGDQKHFDTYDTSGPQNISPRIGLPKIRKEWIDRREKLGSPRYTQMYYAKQGIVTEEMLYCASRENLSPEFVRTEVARGRAIIPSNKRHLELEPMIVGRNFLVKVNANIGNSAVVSSIEEEVHKLQWATMWGADTVMDLSTGRHIHETREWIIRNSPVPIGTVPIYQALEKVNGIAENLSWEIFRDTLIEQAEQGVDYFTIHAGVLLRYIPLTAKRMTGIVSRGGSIHAKWCLTYHKENFAYEHWDDILDICNQYDVALSIGDGLRPGSIYDANDSAQFAELLTQGELTRRAWAKDVQVMNEGPGHIPMHKIPENMEKQLEWCNEAPFYTLGPLTTDIAPGYDHITSAIGAANIGALGTALLCYVTPKEHLGLPNRDDVKTGVISYKISAHAADLAKGHPYAQAWDDALSKARFEFRWLDQFALSLDPVTAMAFHDETLPSEGAKVAHFCSMCGPKFCSKXEFLAARKTISGEENGDGGGEIYXMNAMSAEFLAARKTISGEQHGXAGGEIYVPESYAAQK

SEQ ID NO: 12920 - protein, 280 aa, Zea mays
  Coding DNA Sequence Number=SeqID_7595
  Homolog annotation: Hit_ID=Q94GP5; Match level="QueryCoverage=93%, HitCoverage=99%, E-value=4e-54, Identity=51%"; Hit description =Putative uncharacterized protein OJ1124_H03.7
  Subcellular localization annotation: CTP_CleavageSite=34; ConfidenceScore=5.04e-01
PKERRVGSWILGPVLLACFLRSKIQEMILRRRSRSMNSSAGAQRSHVPDQSARSSTSPCDGDSGGAGAAGSKIATARALFASPRLLHSSSLPAGTVAFAKSPAPDAEPQTAFSMSPTSVLDAAAAFVPGTDGAGKRRPPWRARDNNGLADALDCSDHHHQQQQQERIVLAATPSSCSLARSCSLDRRVEFGVKNRSSWLPLRGCEATAPAPADPWEIEPSSEDYTCVISRGPNPRTVHIFGDRVVEGGAGAGADAAAEREDSSPRQINLPARGDRGFFSL

SEQ ID NO: 12921 - protein, 438 aa, Zea mays
  Coding DNA Sequence Number=SeqID_7596
  Gene Ontology: Mol. function=protein serine/threonine kinase activity; Cellular component=cytoplasm; Biological process=protein amino acid phosphorylation
  Homolog annotation: Hit_ID=Q10LQ2; Match level="QueryCoverage=98%, HitCoverage=97%, E-value=1e-174, Identity=70%"; Hit description=CIPK- like protein 1, putative, expressed
  Pfam annotation: Domain name=NAF; Domain location=307-364; Score =80.3; E_value=6.3e-21; Accession=PF03822.5; Description=NAF domain
  Pfam annotation: Domain name=Pkinase; Domain location=12-266; Score =351.8; E_value=1.2e-102; Accession=PF00069.15; Description=Protein kinase domain
  Pfam annotation: Domain name=Pkinase_Tyr; Domain location=12-266; Score=63.0; E_value=3e-16; Accession=PF07714.7; Description=Protein tyrosine kinase
  Pfam module annotation: Pfam domain module=NAF::Pkinase::Pkinase_Tyr; Domain location=307-364::12-266::12-266
MAEKENILMQRYEMGKLLGKGSFAKVYHARNVKTSESVAIKVIDKDKIKKCGLMDQIIQEISVMKLVKHPNIVQLYEVMATKTKIYFVIEYVKGGELFKKVQRGRLKEDVARTYFQQLISAVDFCHTRQVYHRDLKPENLLLDGSHNLKISDFGLSALPNCKRKDGLLHTICGTPAYVAPEVISQKGYDGAKADIWACGVILYVLLAGYLPFQDKNMMDMYKKICKAELKWPSWFSSDVRKLLRRILHPNPNRRISIEEIRTHPWFRIGLDARLFDSTTRDYVPSDMDLALNSLNSNMVECNSAAEKLTILNAFDIISLSNGFDLSGIFENSNKESKFMSTNTAMTIITKLMEVAKSLDLKVITKTGGLLNMEAAKSGIKGVMSINAEIFQITPNYHLVEIKKINGDILEYHNFMNQSMRPALEDIVWAWHGEQPDEK

SEQ ID NO: 12922 - protein, 488 aa, Zea mays
  Coding DNA Sequence Number=SeqID_7597
  Gene Ontology: Mol. function=protein binding; Cellular component =cytoplasm; Biological process=ubiquitin cycle
  Homolog annotation: Hit_ID=Q2QYR9; Match level="QueryCoverage=97%, HitCoverage=89%, E-value=0.0, Identity=46%"; Hit description=Leucine Rich Repeat family protein, expressed
  Pfam annotation: Domain name=LRR_1; Domain location=101-124; Score =11.7; E_value=2.1; Accession=PF00560.23; Description=Leucine Rich Repeat
  Pfam annotation: Domain name=LRR_1; Domain location=151-173; Score =3.0; E_value=87; Accession=PF00560.23; Description=Leucine Rich Repeat
  Pfam annotation: Domain name=LRR_1; Domain location=177-200; Score =6.8; E_value=17; Accession=PF00560.23; Description=Leucine Rich Repeat
  Pfam annotation: Domain name=LRR_1; Domain location=203-226; Score =0.6; E_value=2.4e+02; Accession=PF00560.23; Description=Leucine Rich Repeat
  Pfam annotation: Domain name=LRR_1; Domain location=229-251; Score =6.1; E_value=23; Accession=PF00560.23; Description=Leucine Rich Repeat
  Pfam annotation: Domain name=LRR_1; Domain location=279-303; Score =4.5; E_value=45; Accession=PF00560.23; Description=Leucine Rich Repeat
  Pfam annotation: Domain name=LRR_1; Domain location=305-328; Score =5.7; E_value=27; Accession=PF00560.23; Description=Leucine Rich Repeat
  Pfam annotation: Domain name=LRR_1; Domain location=330-357; Score =5.1; E_value=35; Accession=PF00560.23; Description=Leucine Rich Repeat
  Pfam annotation: Domain name=LRR_1; Domain location=382-407; Score =8.5; E_value=8.3; Accession=PF00560.23; Description=Leucine Rich Repeat
  Pfam annotation: Domain name=LRR_1; Domain location=48-71; Score=2.6; E_value=1e+02; Accession=PF00560.23; Description=Leucine Rich Repeat
  Pfam annotation: Domain name=LRR_1; Domain location=75-98; Score =10.3; E_value=3.8; Accession=PF00560.23; Description=Leucine Rich Repeat
  Pfam module annotation: Pfam domain module=LRR_1::LRR_1::LRR_1::LRR _1::LRR_1::LRR_1::LRR_1::LRR_1::LRR_1::LRR_1::LRR_1; Domain location =101-124::151-173::177-200::203-226::229-251::279-303::305-328::330 -357::382-407::48-71::75-98
PTLVSLAALCLVPSDPLILSCWSNNKIEMCLLFQITKDSLPSIMKLPNLQELTLVGCIGIDDGALVSLERECSKSLQVLDMSQCQNITDVGVSSILKSVPNLLELDLSYCCPVTPSMVRNFQKLPKLQALKLEGCKFMANGPKAIGTSCVSLRELSLSKSSGVTDTELSFVVSRLKNLLKLDITCCRSITDVSLAAITSSCTSLISLRMESCSHVSSGALQLIGKHCSHLEELDLTDSDLDDEGLKALARCSELSSLKIGICLKISDEGLSHIGRSCPKLREIDLYRCGGLSDDGIIQIAQSCPMLESINLSYCTEITDRSLISLSKCAKLNTLEIRGCPSVSSIGLSEIAMGCRLLSKLDIKKCFGINDVGMLYLSQFAHSLRQINLSYCSVTDVGLLSLSSISGLQNMTIVHLAGITPNGLTATLMVCGGLTKVKLHEAFRSMMPPHTIKNVEARGCVFQWIDKPFKVEVEPCDVWKQQSQDVLVR

SEQ ID NO: 12923 - protein, 630 aa, Zea mays
  Coding DNA Sequence Number=SeqID_7598
  Gene Ontology: Mol. function=hydrolase activity; Cellular component =nucleus; Biological process=mRNA transport
  Homolog annotation: Hit_ID=A2YQ08; Match level="QueryCoverage=73%, HitCoverage=87%, E-value=0.0, Identity=79%"; Hit description =Putative uncharacterized protein
  Pfam annotation: Domain name=GDA1_CD39; Domain location=221-631; Score=460.9; E_value=1.7e-135; Accession=PF01150.8; Description =GDA1CD39 (nucleoside phosphatase) family
  Subcellular localization annotation: CTP_CleavageSite=53; ConfidenceScore=5.35e-01
GFHIPHHTQPGVVRHRHRQAEHFPSGRPSPPRAASPPLCLVRPRQILRRLALPCSVRRACLCPRHAIPISKPERGQLKVPAPRVRHKRCLPRLPTVPHATTQSQQIHHRRARRAPRRGALDPAQQEAANPSPSQSPPAPASGGRGVRYRTPSSPDLLLLPADPKMRRYSALPNGGRQETLADRAHRYRGVLLVVLAPLALVSLVLLLMPRSPAGATAGARRSGPPGADKYAVIFDAGSSGSRVHVFRFDANLDLVHIGSEIELFVQIKPGLSHYANDPREAAESLVSLLDDAKRVVPAELRDQTPVRVGATAGLRNLGAQKSEAILQAVRDILREKSSFKNQPDWVTVLDGTQEGAYEWVTINYLLGNLGKTYADTVGVVDLGGGSVQMAYAIAEKDAEKAPKPSEGEDAYVKKLFLKGTTYYLYVHSYLHYGLLAARAEVLKAGNGNGYSNCMLEGFQGKYKYGDDSFEASAPPSGASYSKCKDDAVKALKVDEACTHMKCSFGGIWNGGGGAGQKNLFVASFFFDRAAEAGFVNANAPVAKVKPSDFRQAAERACSLSVKNAEATFPGVQKDSIPYICMDLVYQYTLLVEGFGVDPDHEMTLVKKVPYSDAYVEAAWPLGSAIEVASS

SEQ ID NO: 12924 - protein, 356 aa, Zea mays
  misc_feature (270)..(270): Xaa can be any naturally occurring amino acid
  Coding DNA Sequence Number=SeqID_7599
  Gene Ontology: Mol. function=hydrolase activity, acting on carbon -nitrogen (but not peptide) bonds; Cellular component=cellular _component; Biological process=nitrogen compound metabolic process
  Homolog annotation: Hit_ID=Q10R10; Match level="QueryCoverage=86%, HitCoverage=99%, E-value=1e-142, Identity=82%"; Hit description =Hydrolase, carbon-nitrogen family protein, expressed
  Pfam annotation: Domain name=CN_hydrolase; Domain location=74-252; Score=193.4; E_value=5.6e-55; Accession=PF00795.12; Description =Carbon-nitrogen hydrolase
  Subcellular localization annotation: CTP_CleavageSite=42; ConfidenceScore=5.77e-01
MVAAAAAAATATAAALLAPGLKLCAGRARVSSPSGLPLRRVTAMASAPNSSFRPEEARSPPALELPIPPLSKFKVALCQLSVTADKSRNIAHARAAIEKAASDGAKLVVLPEIWNGPYSNDSFPEYAEDIEAGGDAAPSFSMLSEVARSLQITLVGGSIAERSGNNLYNTCCVFGSDGQLKGKHRKIHLFDIDIPGKITFKESKTLTAGQSPTVVDTDVGRIGIGICYDIRFQELAMLYAARGAHLLCYPGAFNMTTGPLHWELLQRARXNEFEPQLFVATCGPARDTSAGYVAWGHSTLVGPFGEVIATTEHEEATIIAEIDYSLIEQRRQFLPLQHQRRGDLYQLVDVQRLGSH

SEQ ID NO: 12925 - protein, 587 aa, Zea mays
  Coding DNA Sequence Number=SeqID_7600
  Gene Ontology: Mol. function=diphosphate-fructose-6-phosphate 1 -phosphotransferase activity; Cellular component=6-phosphofructokinase complex; Biological process=glycolysis
  Homolog annotation: Hit_ID=A2X8W6; Match level="QueryCoverage=98%, HitCoverage=99%, E-value=0.0, Identity=79%"; Hit description =Putative uncharacterized protein
  Pfam annotation: Domain name=PFK; Domain location=93-373; Score= -102.0; E_value=1.6e-06; Accession=PF00365.10; Description =Phosphofructokinase
MGSVAMDADYGAPRELSPLQKARALYRPETPPCLQGPTVSVEYGDAAIAADVAGAHVISHAFPHTYGQPLVHFLTKTANVHDATIVTEHPVVRIGVVFSGRQSPGGHNVIWGLYDVVKAHNSNSKIIGFLGGTDGLFAQKTIEITDEALPSYKNQGGYDMLGRTRDQIRTTEQVKATIGTCQALKLDALVIIGGVTSNTDAAQLAETFAQLKCPTKVVGVPVTLNGDLKNQFVETTVGFDTICKVNSQLISNACIDALSAEKYYYFIRMMGRKASHVALECALQSHPNMVILGEEVSVSKLTIFDITKQICDAVQARAEKDKYHGVVLIPEGLVESIPELYALLQEIHGLHNKGVSVENISSHLSPWASALFEFLPPFIRKQLLLHPGSDDSAQLSQIEIEKLLAQLVETEMDKRLVLGHVCYHIVAAGLNGYMATVTNLKSPVNKWKCGAAPITSMMTVKRWSRGAATSQIGKPAVHMASVDLKGKAYELLRQNSSSFMMEDIYRNPGPLQFEGSGADTKPISLCVEDQDYMGRIKKLQEYLEKVKSIVKPGCSQDVLKAAVSAMASVTEMLTIMSSLSFSGQATI

SEQ ID NO: 12926 - protein, 191 aa, Zea mays
  Coding DNA Sequence Number=SeqID_7601
  Gene Ontology: Mol. function=receptor activity; Cellular component =integral to membrane; Biological process=protein insertion into membrane
  Homolog annotation: Hit_ID=Q53ND6; Match level="QueryCoverage=74%, HitCoverage=63%, E-value=2e-43, Identity=54%"; Hit description =TB2/DP1, HVA22 family, putative
  Pfam annotation: Domain name=TB2_DP1_HVA22; Domain location=3-98; Score=60.5; E_value=5.7e-15; Accession=PF03134.9; Description=TB2DP1, HVA22 family
MSIELLTKFLTLLFGYAMPALECFKAIEQRPGRADQLRFWCEYWIILVLLVMFDEIAGVLISKIPMYYELKLAFLVYLWYPKTRGTDIVYETFLQPLVMQYQPNIEARLQYLRANAGDILVFYLKNFTERGYELFLRVLDYVRSQASRGTRTRSFFSFRGERSERPSFTDDYVTGGDRRDGGRHRRPRSGY

SEQ ID NO: 12927 - protein, 494 aa, Zea mays
  misc_feature (16)..(17): Xaa can be any naturally occurring amino acid
  Coding DNA Sequence Number=SeqID_7602
  Gene Ontology: Mol. function=protein kinase activity; Cellular component=cellulose and pectin-containing cell wall; Biological process=protein amino acid phosphorylation
  Homolog annotation: Hit_ID=Q6Y2W9; Match level="QueryCoverage=97%, HitCoverage=69%, E-value=0.0, Identity=84%"; Hit description =Atypical receptor-like kinase MARK
  Pfam annotation: Domain name=Pkinase; Domain location=194-460; Score =72.6; E_value=1.3e-18; Accession=PF00069.15; Description=Protein kinase domain
  Pfam annotation: Domain name=Pkinase_Tyr; Domain location=193-460; Score=55.6; E_value=8.5e-16; Accession=PF07714.7; Description =Protein tyrosine kinase
  Pfam module annotation: Pfam domain module=Pkinase::Pkinase_Tyr; Domain location=194-460::193-460
  Subcellular localization annotation: CTP_CleavageSite=57; ConfidenceScore=5.18e-01
PRVRPRPPRVRPASLXXQPRSAFLGTGLCGGPLGPCPGEVSPSPAPAGQTPSLTPVPSSGGGNGSGSGSGGTIGGNGGESGHKNKKLSGGAIAGIAIGSALGAGLLLFLLVCLCRRSGGTRTRSLEMPPPEAPAAAAAAGGRKPPEMTSGAAVAPLTTIGHPNAPIGQSTSGKKLVFFGSAAAVAPFDLEDLLRASAEVLGKGAFGTTYKAVLESGATVAVKRLKDVTLSEAEFRERISEIGELQHEFIVPLRAYYYSKDEKLLVYDFMPMGSLSAVLHGNVSSGRTPLNWDLRSSIALAAARGVEYIHSTTSTASHGNIKSSNVLLGKSYQARVSENGLTTLVGPSSSSSRTTGYRAPEVIDSRRVSQKADVYSFGVLLLELVTGKAPSQAALNDEGVDLPRWVQSVNRSEWGSLVFDMELMRHQTGEEPMAQLVLLAMDCTAQVPEARPSMAHVVMRIEEIKKSSVTPNIEQVDDQSSRAESEAAPTNPFAT

SEQ ID NO: 12928 - protein, 422 aa, Zea mays
  misc_feature (134)..(135): Xaa can be any naturally occurring amino acid
  misc_feature (141)..(143): Xaa can be any naturally occurring amino acid
  misc_feature (210)..(210): Xaa can be any naturally occurring amino acid
  Coding DNA Sequence Number=SeqID_7603
  Gene Ontology: Mol. function=oxidoreductase activity, acting on the CH-OH group of donors, NAD or NADP as acceptor; Cellular component =cytoplasm; Biological process=metabolic process
  Homolog annotation: Hit_ID=A2YK32; Match level="QueryCoverage=81%, HitCoverage=89%, E-value=1e-122, Identity=64%"; Hit description =Putative uncharacterized protein
  Pfam annotation: Domain name=2-Hacid_dh_C; Domain location=208-388; Score=173.9; E_value=4.1e-49; Accession=PF02826.9; Description=D -isomer specific 2-hydroxyacid dehydro
  Pfam annotation: Domain name=ADH_zinc_N; Domain location=239-353; Score=-17.3; E_value=0.021; Accession=PF00107.16; Description=Zinc -binding dehydrogenase
  Pfam module annotation: Pfam domain module=2-Hacid_dh_C::ADH_zinc_N; Domain location=208-388::239-353
  Subcellular localization annotation: CTP_CleavageSite=73; ConfidenceScore=5.08e-01
MAGAIVGRLGRHPTSLLLLTLPRHAAAHHRLHSPSSSQGTVPHLPLFLRPWRFPSFCPAAAVLHGRPLIYNPLAAVARAGLPGQYSKMGDPSERNGHGALTRVDEVGLEQVPDVIHSYHICVVKNKRIDSDIIXXATQMKXXXQYGVGYVMLQKLLYIDDYIKTTPLFQAIDDVIQHFLLHLIKIMINLLLACVCFTNITSILSYVAYHXAHCAFNLQKEMDTAVNRKDLGVPVGDTLFGKTILILGFGAIGIEVAKRLRPFGVKILATKRNWSSDTLPSYVDELVDKKGGPEDMYEFAGEANIVIACMTLTSETIGIVDHKFVSSMKKGSYLVNIARGRLLDYKAVFDHLESGHLAGLGIDVAWMEPFDPEDPVLKFPNVILTPHVAGVTEYSYRTMAKSVGDTALQLHLGEAFTEVEFVN

SEQ ID NO: 12929 - protein, 735 aa, Zea mays
  misc_feature (2)..(5): Xaa can be any naturally occurring amino acid
  Coding DNA Sequence Number=SeqID_7604
  Gene Ontology: Mol. function=RNA binding; Cellular component=voltage -gated potassium channel complex; Biological process=potassium ion transport
  Homolog annotation: Hit_ID=Q8LLB9; Match level="QueryCoverage=99%, HitCoverage=79%, E-value=0.0, Identity=76%"; Hit description=BPM
  Pfam annotation: Domain name=NABP; Domain location=80-398; Score =574.9; E_value=8e-170; Accession=PF07990.3; Description=Nucleic acid binding protein NABP
  Pfam annotation: Domain name=PUF; Domain location=399-433; Score =37.2; E_value=5.9e-08; Accession=PF00806.9; Description=Pumilio -family RNA binding repeat
  Pfam annotation: Domain name=PUF; Domain location=435-469; Score =37.5; E_value=4.7e-08; Accession=PF00806.9; Description=Pumilio -family RNA binding repeat
  Pfam annotation: Domain name=PUF; Domain location=471-505; Score =27.5; E_value=4.9e-05; Accession=PF00806.9; Description=Pumilio -family RNA binding repeat
  Pfam annotation: Domain name=PUF; Domain location=507-541; Score =31.8; E_value=2.5e-06; Accession=PF00806.9; Description=Pumilio -family RNA binding repeat
  Pfam annotation: Domain name=PUF; Domain location=543-577; Score =41.7; E_value=2.6e-09; Accession=PF00806.9; Description=Pumilio -family RNA binding repeat
  Pfam annotation: Domain name=PUF; Domain location=580-614; Score =39.4; E_value=1.3e-08; Accession=PF00806.9; Description=Pumilio -family RNA binding repeat
  Pfam annotation: Domain name=PUF; Domain location=616-650; Score =29.1; E_value=1.6e-05; Accession=PF00806.9; Description=Pumilio -family RNA binding repeat
  Pfam annotation: Domain name=PUF; Domain location=658-692; Score =40.4; E_value=6.6e-09; Accession=PF00806.9; Description=Pumilio -family RNA binding repeat
  Pfam module annotation: Pfam domain module=NABP::PUF::PUF::PUF::PUF::P UF::PUF::PUF::PUF; Domain location=80-398::399-433::435-469::471 -505::507-541::543-577::580-614::616-650::658-692
  Subcellular localization annotation: CTP_CleavageSite=59; ConfidenceScore=5.07e-01
GXXXXDSQTASHNSSESLCSSGIQYGLNRGPGTIGGLHSSNSLRSLDEIPNNDLPPNTFASLLGSSLSRSASPDPELVRRAPSPSLPPIGVKVGNTDKKINGGSSSFRRSSSAIGGSDDLVAALSGMNLSSRAMSGQTMDQSQLYQDVDNVQKFLFDRQGDQPTGNQQHYMRRPEQGQSKLPDGYSANLANSSTMRNQINAGSFTSFDSLSLGSGFASPRIGSRSPGGTVSSRQNLAGMSNMLNYNGIGSPTASPSLQTSIDPAYIQYLAQIAATWDDPLMDRSHLGNSYMDLLGTQKANLGPLLQSQKQYGYCGNLGFNLGYAGSPLASPVLPSSPIAPGSPLRHGDRNMRFPSGMRNFGNSFGSWNSGMSGKMDANLMPSLLEEFKSNKSKSYELSEIAGHVVEFSADQYGSRFIQQKLETASTEEKDMVFSEIMPQALTLMTDVFGNYVVQKFFEHGSTAQIKELAGQLIGRVLALSLQMYGCRVIQKAIEVVDLDLQTKMVAELEGHVMRCVRDQNGNHVIQKCIECIPQHAIEFIVSTFYGQVVMLSTHPYGCRVIQRVLEHCDDPKTQQIMMDEILQSVCLLAQDQYGNYVVQHVLEHGKPHERSAIIEKLIGQVVQMSQQKFASNVIEKCLAFGNPVERQVLIGEMLGSTSESEPLEVMMKDQFGNYVVQKVLETCDDQQREMILTRIKTHLNTLKKYTYGKHIVARVEKLVAAGEKRLGLQPACTAA

SEQ ID NO: 12930 - protein, 162 aa, Zea mays
  Coding DNA Sequence Number=SeqID_7605
  Gene Ontology: Mol. function=protein binding; Cellular component =clathrin coat of trans-Golgi network vesicle; Biological process =intracellular protein transport
  Homolog annotation: Hit_ID=Q10CG5; Match level="QueryCoverage=99%, HitCoverage=87%, E-value=3e-84, Identity=98%"; Hit description =Adapter-related protein complex 1 sigma 1B subunit, putative, expressed
  Pfam annotation: Domain name=Clat_adaptor_s; Domain location=1-143; Score=248.1; E_value=2e-71; Accession=PF01217.10; Description =Clathrin adaptor complex small chain
MINFVLLISRQGKVRLTKWYSPYTQKERTKVIIRELSGLILTRGPKLCNFVEWRGYKVVYRRYASLYFCMCIDAEDNELEVLEIIHHFVEILDRYFGSVCELDLIFNFHKAYYILDEILIAGELQESSKKNVARLIAAQDSLVEAAKEEASSISNIIAQATK

SEQ ID NO: 12931 - protein, 561 aa, Zea mays
  Coding DNA Sequence Number=SeqID_7606
  Gene Ontology: Biological process=chloroplast organization and biogenesis
  Homolog annotation: Hit_ID=Q75G59; Match level="QueryCoverage=100%, HitCoverage=100%, E-value=1e-173, Identity=59%"; Hit description =Expressed protein
  Pfam annotation: Domain name=CDT1; Domain location=112-242; Score =176.0; E_value=9.7e-50; Accession=PF08839.1; Description=DNA replication factor CDT1 like
MSEGDATQLALEKGLPQVSNDDGSSSPATMHKLKVDTEDAGSKIESPTPEKLESRSKGVVVSSLARNLLAERYKDRFANQFLEDEGDIDDEDYNDSISPGMSRSQRSRSIELLEKHKDLLNLFNRMESSIRLLRLRKRMATFNNIATQVEILAKRKLSYCHLAQMKYLFPEAIQIKRVLLHDEKSLCMYADMEIILVMDVVEYTSPDHSPSMAICDAFYSKLLTFLDAHHKGTDIPEAILPEPFNLRSRGQLNLEASNNGHAAEPHLQGTTKDGFSNASHFPQSFRKLMSQKVITDGAERTQLLLDPTKLSSVSAYDTEGTNRSPKKQDKHASVTVNSEISATPSRHLISRCQEGTPKQETSESPLLAQTPATQTPKRQLPTPLEKLEATCGHISEPRSASSARRSLNTSLKFEGGSPSYHDRMEHVATSKIGIFSEDSSSFNKSLEENGPVFFTDREKINLADPVGVQEKMASLRSTFGIVCDISHSIKNSLITKQELFHNILANNLEIEQMGEIEEQLHILEDLAPDWISKVINGGEIFYSFETIADQNSVWERLVEAV

SEQ ID NO: 12932 - protein, 432 aa, Zea mays
  misc_feature (165)..(165): Xaa can be any naturally occurring amino acid
  misc_feature (182)..(182): Xaa can be any naturally occurring amino acid
  Coding DNA Sequence Number=SeqID_7607
  Gene Ontology: Mol. function=DNA binding; Cellular component=nucleus
  Homolog annotation: Hit_ID=A4UQN4; Match level="QueryCoverage=49%, HitCoverage=92%, E-value=8e-35, Identity=41%"; Hit description=MBD3
  Pfam annotation: Domain name=MBD; Domain location=25-107; Score=12.9; E_value=0.0018; Accession=PF01429.10; Description=Methyl-CpG binding domain
MDSFEGSDHITQRKVVPAKHIALVDGKNEPAGEGLPDGWLKECRPRKNRYGSRAKSDTFYIDPINGYEFHSLKDVHRYLESGDISKCIRLPNKRKIGDLHTKEDRSHHTGKLSDHTQLDTADESNRYDLPEGTNALGYALQNPESEENNENIALSKPDNISSIQXKLVRLKLQKIRASNQAXIEYTPGEAKSVTRKGTDVKEKPKGKQYKTKPAKGIAIPLRSSPRLAALKISQEANNATRDGHIGTQTDTINVPEPKQVQKPRRKTNSSVIPERKDGEPTRSCAETLPSLPNQIQGASFPHSSGDAGCQNAPAEAPVLRQQAGAGQGETSDGLPGSALTSLFQHVWSDPCLVFAFRTLLGDIPVLDDARAYRSSAYDGNRDYYLPPQNMNKNAAANWSALAYDSNRNHAQVDHVMPRTSDTFYSSGWFPPQ

SEQ ID NO: 12933 - protein, 405 aa, Zea mays
  misc_feature (86)..(86): Xaa can be any naturally occurring amino acid
  misc_feature (214)..(214): Xaa can be any naturally occurring amino acid
  misc_feature (330)..(330): Xaa can be any naturally occurring amino acid
  Coding DNA Sequence Number=SeqID_7608
  Gene Ontology: Mol. function=acyltransferase activity; Cellular component=integral to membrane; Biological process=metabolic process
  Homolog annotation: Hit_ID=Q60EI7; Match level="QueryCoverage=99%, HitCoverage=99%, E-value=1e-178, Identity=75%"; Hit description =Putative 1-acylglycerol-3-phosphate acyltransferase
  Pfam annotation: Domain name=Acyltransferase; Domain location=105 -264; Score=20.8; E_value=1.1e-05; Accession=PF01553.11; Description =Acyltransferase
MECSNSTSSQGHHVEKWNQVQIIDPSIVEMGPSHLPLSFMRRCRGVLCLVIMILTAFMMMVYLSPVTTFLVRLFSVHYSRKSTCFXFGMWLAMWPFLFEKINKTRFVFSGESVPAKERVLLMNSARAEVDWMYLWDFALRKGRLQCIKYILKKSLMKLPVFNWAFHIIEFIPVERKWEIDEAIIRSRLSEFKNPKDPLWLAVFPEGTDYTEKKXCIKSQEYAAEHGLPVLKNVLLPKTKGFNCCLQVLRSTIDAVYDITIAYKHRPPTFLDNVYGVGPSEVHIHISSIQVSDIPASEDGVAGWLVERFRLKDELLSGFSALGHFPDEGKXTEGDLSTAECLANFAAVVAVTGLLAYLTLFSSVWFKLFVAFSCSSLTLATCYSVHLPQMVGFGSGTPGSIHAKEA

SEQ ID NO: 12934 - protein, 664 aa, Zea mays
  Coding DNA Sequence Number=SeqID_7609
  Gene Ontology: Mol. function=nucleic acid binding; Cellular component= nucleus; Biological process=regulation of transcription, DNA-dependent
  Homolog annotation: Hit_ID=Q10LF6; Match level="QueryCoverage=97%, HitCoverage=44%, E-value=0.0, Identity=79%"; Hit description =Transcriptional activator, putative, expressed
  Pfam annotation: Domain name=Helicase_C; Domain location=444-522; Score=93.9; E_value=5.1e-25; Accession=PF00271.21; Description =Helicase conserved C-terminal domain
APGRELSRLRPILKPFMLRRVKIDVIAEMTKKKEEIVPCKLSSRQQVFYQAIKNKISLNELLAGSRGSLNDKKLLSLMNIVMQLRKVCNHPELFERNEGSSYFNFAEIPNSLLSPPFGELQDVHYAGKRNPIIFEIPKLVYEGIISNMENSGNICGFQNGYLNRLFNIFLPSNIYRSAIPEVSSSKESLLSSGAFGFTRLSNLCPVEASFLATASLFERLVFSVMQWNRNYTAEILDEFLDSEDTGIQSSQNDSTKVRAVARLLLSSTKAKPSLLRTKIGTGPIDGPYEALVLSHRDRLASNIRLLRSAYAFIPPARAPPINVWCADRNFAYKFTDEMYDPWAKKLFLGFARTSEFNGPRQPIAPHPLIQELNTDLPIIEPMLQLPYRIFGSSPPMSNFDPAKMLTDSGKLHTLDMLLRRLRAEGHRVLLFAQMTKMLDILEDYMNFRKFKYFRLDGSSAISDRRDMVRDFQNRNDIFVFLLSTRAGGLGINLTAADTVIFYEIDWNPTQDQQAMDRTHRLGQTKEVTVYRLICKDTIEEKILQRAKQKNAVQELVMKGKHVQDDHLMRQEDVVSLLIDDTQIAHKLKEISMQAKDRQKRRRAKGIKVDKEGDLTLEDLDDATAEAVDQDKTTSKKKHRGSIRILMIMKRGRNSDSGTQWPAHM

SEQ ID NO: 12935 - protein, 231 aa, Zea mays
  Coding DNA Sequence Number=SeqID_7610
  Gene Ontology: Mol. function=transferase activity
  Homolog annotation: Hit_ID=A3B8F8; Match level="QueryCoverage=55%, HitCoverage=30%, E-value=1e-26, Identity=48%"; Hit description =Putative uncharacterized protein
  Subcellular localization annotation: CTP_CleavageSite=54; ConfidenceScore=5.05e-01
MARFQFLPSQAWRPCRSPRDPLLKPGVPAPRDRACQAWRRRGRCPRDPLPSTCQAWHRPGRCHARRTRRDEILDPPRHPPPPRHGRPRRPRAPLPEVGMVRTTIAGVTTAARFQELVDWMEEWKAAFRDNSKWTETVNLGLGSLALIMSGLLPFAIDGDLGFGKPSLVLPWVRHGRLGSASVMVVPCPSGDMSWFFGGTRMWLRLMEVVESDPLMKQTTNLGMATEAGSRL

SEQ ID NO: 12936 - protein, 398 aa, Zea mays
  Coding DNA Sequence Number=SeqID_7611
  Gene Ontology: Mol. function=nucleoside-triphosphatase activity; Cellular component=protein complex; Biological process=protein catabolic process
  Homolog annotation: Hit_ID=A2YEV9; Match level="QueryCoverage=95%, HitCoverage=95%, E-value=0.0, Identity=87%"; Hit description =Putative uncharacterized protein
  Pfam annotation: Domain name=AAA; Domain location=174-361; Score =313.7; E_value=3.4e-91; Accession=PF00004.19; Description=ATPase family associated with various cellular activities (AAA)
  Pfam annotation: Domain name=AAA_2; Domain location=170-302; Score= -34.8; E_value=0.0049; Accession=PF07724.4; Description=ATPase family associated with various
  Pfam annotation: Domain name=AAA_3; Domain location=174-305; Score= -17.0; E_value=0.024; Accession=PF07726.2; Description=ATPase family associated with various
  Pfam annotation: Domain name=AAA_5; Domain location=174-309; Score =4.4; E_value=0.0013; Accession=PF07728.4; Description=ATPase family associated with various
  Pfam module annotation: Pfam domain module=AAA::AAA_2::AAA_3::AAA_5; Domain location=174-361::170-302::174-305::174-309
MAEGGEEARRRAAIAEYRKKLLTCRELEARVKTGRENLKNAKKNLEKTEEDLKSLQSVGQIIGEVLRPLDKERFIVKASSGPRYVVACRSKVDKEKLIAGTRVVLDMTTLTIMRILPREVDPVVYNMLHEDPGNVSYSAVGGLSDQIRELRESIELPLMNPELFLRVGIKPPKGVLLYGPPGTGKTLLARAIASNIDANFLKVVSSAIIDKYIGESARLIREMFNYAREHQPCIIFMDEIDAIGGRRFSEGTSADREIQRTLMELLNQLDGFDELGKVKMIMATNRPDVLDPALLRPGRLDRKIEIPLPNEQGRMEVLKIHAAGIAKHGEIDYEAVVKLAEGFNGADMRNLCTEAGMAAIRAERDYVIHEDFMKAVRKLNDAKKLESSAHYSADFGKD

SEQ ID NO: 12937 - protein, 286 aa, Zea mays
  Coding DNA Sequence Number=SeqID_7612
  Gene Ontology: Mol. function=protein binding; Cellular component =nucleus; Biological process=ribosome biogenesis and assembly
  Homolog annotation: Hit_ID=Q6K882; Match level="QueryCoverage=77%, HitCoverage=77%, E-value=1e-119, Identity=95%"; Hit description =Putative nucleolar essential protein
  Pfam annotation: Domain name=Nep1; Domain location=115-281; Score =274.4; E_value=2.3e-79; Accession=PF03587.5; Description=Nep1 ribosome biogenesis protein
MGRPYAVKGRKKKRKLEEAAAASDAAPPVEEAEELPPPEVRSGEEKSSEEDEAAAGEEEHAAADGLPILPRTVDGKRRPGAIFVLERACLEVGKVGKTMQILNSDDHANYLRKQNRNPADYRPDIIHQALLAIFDSPLTKAGRLQAVYVRTEKGVLFEIKPHVRMPRTFKRFCGLMSQLLQKLSITAVGKREKLLNVVKNPVTRYLPVGARKIGLSFSAEKSVNLFDYVAKSNDDEPLVFVVGAMAHGKIDKEYTDDYIQICNYPLSAACCLNRICSALEQKWNIQ

SEQ ID NO: 12938 - protein, 697 aa, Zea mays
  Coding DNA Sequence Number=SeqID_7613
  Homolog annotation: Hit_ID=Q7XHW3; Match level="QueryCoverage=99%, HitCoverage=52%, E-value=0.0, Identity=79%"; Hit description =Putative uncharacterized protein OSJNBa0008J01.25-1
LYLNFTPGSMSHYLAHMSTLNEILLGVSYGDVIHILSLYGMVPDVAVALMPLCEAFGSIAPPPNHKSTILGETSVYTVFSCAFLCLLRLWKFYRPPQEYCLAGRGGSVKLELTLDYLLLMHNNRIFSNSSAPNRDSYNSMGSVNEVSAQPIYIDSFPKLSAWYFQNQACIASTLSGLCNKNPVHQVANKILNMICRKMNKGGVSSSNLSSTSSSSVSGSSVSASDDSYQRPAVPAWEFLEAVPFVLEAVLTACAHGRLSSRDLTTSLRDLVDFLPASLAAIVSYFSAEITRGIWKPVPMNGTEWPSPGASLHSIEAEVKEILASAGVQINSCYPRGVPPMLPLPMAALVSLTITFKLDRSLEYIQGVIGHALENCAGGSSWPSMPIIGALWTQKVRRWHDFIVLSCMRSPFGRDKDAVAQLIRSCFSSFLQSSSSGSDIIANRGVGALLGDSITDQGLRLPMAPGFVYLRTCRTFHDTYFVSEVILKQVIEWAHKLANGWSFNGPPQLKSGRTPLSCAASMAHQVAMLGGGLLCIAGGPLVVQVLYEDTLPTLLLSAREQSLKDPGPVSSTLQGYAMANMLFYCGSLLWGADRSSPVMKLSFLSRRPRVVRNHMDFIAGVLDGHILLGCDPGTWKAYVSQFMFLVVKFVPSWLPDIKLDTLKKIAAGLRSWHEHDLALSLLERGGPQAISVVVETFL

SEQ ID NO: 12939 - protein, 240 aa, Zea mays
  misc_feature (70)..(70): Xaa can be any naturally occurring amino acid
  Coding DNA Sequence Number=SeqID_7614
  Gene Ontology: Mol. function=binding; Cellular component=anaphase -promoting complex; Biological process=regulation of mitotic metaphase/anaphase transition
  Homolog annotation: Hit_ID=Q949C2; Match level="QueryCoverage=66%, HitCoverage=27%, E-value=1e-66, Identity=73%"; Hit description =Anaphase-promoting complex subunit 8-like protein
  Pfam annotation: Domain name=APC8; Domain location=1-90; Score=-8.2; E_value=1.1e-05; Accession=PF04049.4; Description=Anaphase promoting complex subunit 8  Cdc23
LGGRDHARWRVVRQHAHPDDDAFDSGGDKYLLAKTYFDCREYRRAEHVLQNQVGRKAVFLRCYAFCMSAXWREAENAVNQELVALEKELSTHRRTGSIDSFGLYLYGIVLHDKGCEGLTRKILVEPVNSYPWNWSAWSELQTLCTSSDILNKLNLKNRWMKDFFLASAYLELETHEEDFFLASADSFFGLSCTIDAGPQTVLLKEDFPIPVRVPFVTKKRKQYNIFSSLASLQDSSGTSC

SEQ ID NO: 12940 - protein, 137 aa, Zea mays
  misc_feature (1)..(1): Xaa can be any naturally occurring amino acid
  misc_feature (5)..(7): Xaa can be any naturally occurring amino acid
  misc_feature (10)..(13): Xaa can be any naturally occurring amino acid
  misc_feature (45)..(45): Xaa can be any naturally occurring amino acid
  misc_feature (48)..(48): Xaa can be any naturally occurring amino acid
  misc_feature (52)..(52): Xaa can be any naturally occurring amino acid
  misc_feature (65)..(65): Xaa can be any naturally occurring amino acid
  misc_feature (71)..(71): Xaa can be any naturally occurring amino acid
  misc_feature (89)..(89): Xaa can be any naturally occurring amino acid
  misc_feature (94)..(94): Xaa can be any naturally occurring amino acid
  misc_feature (107)..(108): Xaa can be any naturally occurring amino acid
  misc_feature (117)..(119): Xaa can be any naturally occurring amino acid
  Coding DNA Sequence Number=SeqID_7615
  Gene Ontology: Mol. function=nucleotide binding; Biological process =response to stress
  Homolog annotation: Hit_ID=Q3KIT6; Match level="QueryCoverage=92%, HitCoverage=29%, E-value=1e-50, Identity=80%"; Hit description=Heat shock protein YegD
XGGTXXXSLXXXXPERRQIDNRHDDILATGGVHIGGTDFDKQLSXAGXMPLXFGYGSRMKSGAYXPTSHHXNLATWHTINSVYSQKSKXALGSXRYDIEDTGGIDRXXNLIEQRAGXXXAMEVEETKISQVPARQQP

SEQ ID NO: 12941 - protein, 115 aa, Zea mays
  misc_feature (62)..(62): Xaa can be any naturally occurring amino acid
  misc_feature (71)..(71): Xaa can be any naturally occurring amino acid
  misc_feature (76)..(76): Xaa can be any naturally occurring amino acid
  misc_feature (84)..(84): Xaa can be any naturally occurring amino acid
  misc_feature (94)..(94): Xaa can be any naturally occurring amino acid
  Coding DNA Sequence Number=SeqID_7616
  Gene Ontology: Mol. function=metal ion binding
  Homolog annotation: Hit_ID=A5B787; Match level="QueryCoverage=44%, HitCoverage=15%, E-value=4e-08, Identity=49%"; Hit description =Putative uncharacterized protein
  Pfam annotation: Domain name=zf-C3HC4; Domain location=34-75; Score =25.4; E_value=0.00012; Accession=PF00097.15; Description=Zinc finger, C3HC4 type (RING finger)
MSKLLSYISKVMCIKARTEATQAGEDSSCTADECRICMYKIRLGEATRRLQCRHVFHRDCDXRWLSSCQQXCPLCXVYVAVRGXAAGGGLAHQXDAQALADDLVIWFSTVLVPGF

SEQ ID NO: 12942 - protein, 56 aa, Zea mays
  Coding DNA Sequence Number=SeqID_7617
LTHTCTGKSLQPTHLFKKIDCFGAGSFIRERPPFIFDQVCGFFFERGLNAAAGSKE

SEQ ID NO: 12943 - protein, 51 aa, Zea mays
  Coding DNA Sequence Number=SeqID_7619
  Subcellular localization annotation: CTP_CleavageSite=18; ConfidenceScore=5.10e-01
TVCVLHLGTKTPHSSKFTLTTRSKFTLTTLLSDFTTAHGLEPVPTDFVRGV

SEQ ID NO: 12944 - protein, 103 aa, Zea mays
  Coding DNA Sequence Number=SeqID_7621
  Homolog annotation: Hit_ID=A2YKC1; Match level="QueryCoverage=78%, HitCoverage=79%, E-value=1e-21, Identity=59%"; Hit description =Putative uncharacterized protein
  Pfam annotation: Domain name=Tryp_alpha_amyl; Domain location=28-103; Score=28.8; E_value=1.9e-05; Accession=PF00234.12; Description =Protease inhibitorseed storageLTP f
MAKAGATAVLVTVLVVLAATAEMAHGVCNLSSAGIRACQPAAAIRNPTDQPSSECCAALAGADLACLCRYKNAAGVWVRFYRIDINRAMGLPGKCGLAMPANC

SEQ ID NO: 12945 - protein, 115 aa, Zea mays
  Coding DNA Sequence Number=SeqID_7622
  Gene Ontology: Cellular component=extracellular region
  Homolog annotation: Hit_ID=Q19VG5; Match level="QueryCoverage=77%, HitCoverage=77%, E-value=4e-42, Identity=85%"; Hit description=GASA -like protein
  Pfam annotation: Domain name=GASA; Domain location=4-115; Score=95.3; E_value=1.9e-25; Accession=PF02704.5; Description=Gibberellin regulated protein
MAPSKLAVVVALVASLLLLTTSNTKLGLFVLGQAAPGAYPPRAPPPHQIVDLAKDCGGACDVRCGAHSRKNICTRACLKCCGVCRCVPAGTAGNQQTCGKCYTDWTTHGNKTKCP

SEQ ID NO: 12946 - protein, 354 aa, Zea mays
  Coding DNA Sequence Number=SeqID_7623
  Gene Ontology: Mol. function=sequence-specific DNA binding; Cellular component=intracellular; Biological process=regulation of transcription, DNA-dependent
  Homolog annotation: Hit_ID=Q2L3T9; Match level="QueryCoverage=38%, HitCoverage=69%, E-value=3e-51, Identity=77%"; Hit description=Hap5 -like protein
  Pfam annotation: Domain name=CBFD_NFYB_HMF; Domain location=235-299; Score=87.2; E_value=5.2e-23; Accession=PF00808.13; Description =Histone-like transcription factor (CBFNF-Y) and archaeal histone
  Pfam annotation: Domain name=Histone; Domain location=229-302; Score =43.0; E_value=1.1e-09; Accession=PF00125.14; Description=Core histone H2AH2BH3H4
  Pfam module annotation: Pfam domain module=CBFD_NFYB_HMF::Histone; Domain location=235-299::229-302
  Subcellular localization annotation: CTP_CleavageSite=20; ConfidenceScore=5.10e-01
MVLAIRDLSSGASYNPDQARRSIASVTSLTSTSNVIQIPDRPLPWTPYSTAPPPPPVMGAPIAYPPPPGAAYPAGPYVHAPAAALYPPPPLPPAPPSSQQNGDADSPPQHTTPVTISSPALPEHQRHHPLKAPPSSSSSAPNPPRLTTLAAPESMDPNKSSTPPPPPVMGAPVAYPPPAYPPGVAAGAGAYPPQLYAPPAAAAAQQAAAAQQQQLQIFWAEQYREIEATTDFKNHNLPLARIKKIMKADEDVRMIAAEAPVVFARACEMFILELTHRGWAHAEENKRRTLQKSDIAAAIARTEVFDFLVDIVPRDDGKDADAAAAAAAAAAGIPRPAAGVPATDPLAYYYVPQQ

SEQ ID NO: 12947 - protein, 80 aa, Zea mays
  Coding DNA Sequence Number=SeqID_7624
MAIVGAGRSVVVYLHIHPRLRPAAQVHHRRFLFHSGTKSSAAELLQQLPSMNNWLATVLPYLRRSEIQSRRVLLLAPQAQ

SEQ ID NO: 12948 - protein, 119 aa, Zea mays
  misc_feature (32)..(32): Xaa can be any naturally occurring amino acid
  misc_feature (41)..(41): Xaa can be any naturally occurring amino acid
  misc_feature (46)..(46): Xaa can be any naturally occurring amino acid
  misc_feature (65)..(65): Xaa can be any naturally occurring amino acid
  Coding DNA Sequence Number=SeqID_7626
  Gene Ontology: Mol. function=serine-type endopeptidase activity; Cellular component=intracellular; Biological process=protein modification process
  Homolog annotation: Hit_ID=Q0WRN6; Match level="QueryCoverage=91%, HitCoverage=99%, E-value=2e-41, Identity=80%"; Hit description =Polyubiquitin 4 UBQ4
  Pfam annotation: Domain name=ubiquitin; Domain location=1-60; Score =35.8; E_value=1.5e-07; Accession=PF00240.13; Description=Ubiquitin family
  Pfam annotation: Domain name=ubiquitin; Domain location=70-118; Score= 45.7; E_value=1.6e-10; Accession=PF00240.13; Description=Ubiquitin family
  Pfam module annotation: Pfam domain module=ubiquitin::ubiquitin; Domain location=1-60::70-118
GGTRDTIDNVKAKIQDKEGIPPDQQRLIFAGXQLEDGRTLXADYNXHFCMSTLHLGASAVRGGMXQIFVKTLTGKTITLEVESSDTIDNVKAKIQDKEGIPPDQQRLIFAGKQPGRMGR

SEQ ID NO: 12949 - protein, 183 aa, Zea mays
  misc_feature (166)..(167): Xaa can be any naturally occurring amino acid
  misc_feature (170)..(171): Xaa can be any naturally occurring amino acid
  misc_feature (177)..(177): Xaa can be any naturally occurring amino acid
  misc_feature (181)..(181): Xaa can be any naturally occurring amino acid
  Coding DNA Sequence Number=SeqID_7627
  Gene Ontology: Mol. function=nucleotide binding; Cellular component =intracellular; Biological process=small GTPase mediated signal transduction
  Homolog annotation: Hit_ID=Q677H6; Match level="QueryCoverage=98%, HitCoverage=90%, E-value=2e-93, Identity=94%"; Hit description=ADP -ribosylation factor
  Pfam annotation: Domain name=Arf; Domain location=7-179; Score=394.8; E_value=1.4e-115; Accession=PF00025.11; Description=ADP-ribosylation factor family
  Pfam annotation: Domain name=MMR_HSR1; Domain location=20-131; Score=- 10.8; E_value=0.01; Accession=PF01926.13; Description=GTPase of unknown function
  Pfam annotation: Domain name=Miro; Domain location=21-131; Score=9.9; E_value=0.0012; Accession=PF08477.3; Description=Miro-like protein
  Pfam annotation: Domain name=Ras; Domain location=21-152; Score= -68.3; E_value=0.00033; Accession=PF00071.12; Description=Ras family
  Pfam annotation: Domain name=SRPRB; Domain location=17-179; Score= -40.4; E_value=0.00012; Accession=PF00071.12; Description=Signal recognition particle receptor bet
  Pfam module annotation: Pfam domain module=Arf::MMR_HSR1::Miro::Ras::S RPRB; Domain location=7-179::20-131::21-131::21-152::17-179
GKMGLSFTKLFSRLFANKEMRILMVGLDAAGKATILYKPKLGEIVTTIPTIGFNVETVEYKNISFTVWDVGGQDKIRPLWRHYFQNTQGLIFVVDSNDRDRVVEARDELHRMLNEDELRDAVLLVFANKQDLPNAMNAAEITDKLGLHSLRQRHWYIQSTCATSGXXLYXXLDWLSXNIAXKA

SEQ ID NO: 12950 - protein, 73 aa, Zea mays
  misc_feature (44)..(44): Xaa can be any naturally occurring amino acid
  Coding DNA Sequence Number=SeqID_7628
  Homolog annotation: Hit_ID=Q5W7C9; Match level="QueryCoverage=63%, HitCoverage=17%, E-value=5e-18, Identity=91%"; Hit description =Unknow protein
PRCLCPYRLCLGLGLLGSLIPFAPLAFVSQCQCRPSKMLSPVVXFPISMHFTAPPEIPSAPTVLQFILVPVAS

SEQ ID NO: 12951 - protein, 73 aa, Zea mays
  Coding DNA Sequence Number=SeqID_7629
NGAKAHQPQIQADSLKTNTETDGAHQAPTPHTDGQSQAAARPNLAVEDLPMTAKPPPQSPAPQGETQRRVSEA

SEQ ID NO: 12952 - protein, 62 aa, Zea mays
  Coding DNA Sequence Number=SeqID_7631
RDSSCSCTHSLGSCWCLRYMHARTDGRPLVLIRYVHAFQPVSQADRERERERQREREIFTHA

SEQ ID NO: 12953 - protein, 71 aa, Zea mays
  Coding DNA Sequence Number=SeqID_7633
  Gene Ontology: Mol. function=structural constituent of ribosome; Cellular component=intracellular; Biological process=protein modification process
  Homolog annotation: Hit_ID=Q0CR75; Match level="QueryCoverage=90%, HitCoverage=15%, E-value=2e-18, Identity=70%"; Hit description=60S ribosomal protein L40
  Pfam annotation: Domain name=ubiquitin; Domain location=15-71; Score =36.0; E_value=1.4e-07; Accession=PF00240.13; Description=Ubiquitin family
SKLAHPGKDADHCVKALREKRITVEMESCDTIDNVKGKIQDKEGISPDQQRMVFAGKQHEDGPTLADYNIQ

SEQ ID NO: 12954 - protein, 225 aa, Zea mays
  Coding DNA Sequence Number=SeqID_7634
  Homolog annotation: Hit_ID=Q8H993; Match level="QueryCoverage=47%, HitCoverage=12%, E-value=2e-08, Identity=34%"; Hit description =Retrotransposon Karma DNA, complete sequence
  Pfam annotation: Domain name=zf-CCHC; Domain location=133-150; Score =10.3; E_value=0.042; Accession=PF00098.13; Description=Zinc knuckle
  Pfam annotation: Domain name=zf-CCHC; Domain location=152-169; Score =22.5; E_value=0.00059; Accession=PF00098.13; Description=Zinc knuckle
  Pfam module annotation: Pfam domain module=zf-CCHC::zf-CCHC; Domain location=133-150::152-169
AAEAAARWPPVLVTKDEHRVQACSGGPTSVARVNPLGRGKSSSGHPAAAGPACSVNAVWLYNSSLPPLLDSPRVPSHHLAAGTSPSISTPAALSSESELLNKPSFRDVLLHGVVEPHPSPSDPRGPHIKIHPNSCFRCFATDHQIAACRDPIRCRSCGRQGHRSRQCSAPPLPVSKSHSPPPSLSALPALSPALVADAPTAIPSVSLRHRASPHSFACSRLSLPL

SEQ ID NO: 12955 - protein, 53 aa, Zea mays
  Coding DNA Sequence Number=SeqID_7635
  Homolog annotation: Hit_ID=Q9SM38; Match level="QueryCoverage=73%, HitCoverage=19%, E-value=4e-08, Identity=69%"; Hit description =Putative glycine and proline-rich protein
MGGAKDMLDESDKGFFSNMMHGDAGGHGYLHQGYTSQVYPPQPGAYPSPPCAY

SEQ ID NO: 12956 - protein, 228 aa, Zea mays
  Coding DNA Sequence Number=SeqID_7636
  Homolog annotation: Hit_ID=Q8SA86; Match level="QueryCoverage=100%, HitCoverage=28%, E-value=6e-20, Identity=30%"; Hit description =Putative retrotransposon protein
MDALHFEYPDYERLNKGAEGQKRKRVVSVVGRQAARMVKEDEEKLKKRKLSPEPTTVAPKKRKATAPKQKATDIEEETPASPSATDVAEILKTPPPASAPKIPITETAGAAEGAGGTEAAATGAEGARAETAEDSDLETTLGDIDNILLKMAEEEAAGAAMDTTIEKGKEQIKDTLEEENFNFQDILGQELSETEKEELKKYAVSCGYKPGALLFGGVNEGKLRCLRN

SEQ ID NO: 12957 - protein, 89 aa, Zea mays
  Coding DNA Sequence Number=SeqID_7637
MNKYALALALVKVPKPLAIDRTHPVPVLSIITLRRKVLASGLMSTLVAHALTARPNHGGAACPHQSSAVKISKVRYTDIQGTSASQVAV

SEQ ID NO: 12958 - protein, 112 aa, Zea mays
  Coding DNA Sequence Number=SeqID_7638
PQVMMVRTKNVSVPGGGDDEDPPRPFSQVKGKTVYLEQQEGRKKRRLDRAARAALAAAAAAEQAKRLQSLQSHPPLLPYPPPPPLPLPLFLLPLPFPLHPFHQPAFGSEIRP

SEQ ID NO: 12959 - protein, 98 aa, Zea mays
  misc_feature (10)..(10): Xaa can be any naturally occurring amino acid
  misc_feature (21)..(21): Xaa can be any naturally occurring amino acid
  Coding DNA Sequence Number=SeqID_7640
  Subcellular localization annotation: CTP_CleavageSite=83; ConfidenceScore=5.16e-01
GLCCLASPLXYSRSVLLDLAXSQPPCLPVSLTHHARTKQSRQRHSSAQREKRGAKKLSNNSSPEKRRGRQEAAARRKSRARCCAGARACWGSSTSSPS

SEQ ID NO: 12960 - protein, 114 aa, Zea mays
  misc_feature (25)..(25): Xaa can be any naturally occurring amino acid
  misc_feature (33)..(33): Xaa can be any naturally occurring amino acid
  misc_feature (100)..(100): Xaa can be any naturally occurring amino acid
  Coding DNA Sequence Number=SeqID_7642
  Gene Ontology: Mol. function=sugar binding
  Homolog annotation: Hit_ID=Q10M13; Match level="QueryCoverage=92%, HitCoverage=29%, E-value=2e-37, Identity=69%"; Hit description =Expressed protein
LLRQNSPTNGRVHQRSFKIFCKADXGYCLIVRXGKCGVARAQSRDEHQYWYKVMRLSTQVKDEDGHAAFALVNKATGLAIKHSLGQSHPVKLRAFNSEYXDESVLWTESGDVGQ

SEQ ID NO: 12961 - protein, 65 aa, Zea mays
  Coding DNA Sequence Number=SeqID_7643
FFFFFWGIRAVFFYVRFLISLSLSLSPLSLQRAVGVKVHRAHTCIAHTLSHQHHAFPSQIKLTVV

SEQ ID NO: 12962 - protein, 82 aa, Zea mays
  Coding DNA Sequence Number=SeqID_7645
LKEMDDITAKTVLLVLRNLENNLSAPQFEPVLILLALLCSALLSTEKAAVDLTRTDGRTFFPQVVLFDERSKEEAETQQNRW

SEQ ID NO: 12963 - protein, 95 aa, Zea mays
  Coding DNA Sequence Number=SeqID_7647
  Homolog annotation: Hit_ID=Q2R051; Match level="QueryCoverage=46%, HitCoverage=10%, E-value=5e-07, Identity=46%"; Hit description =Lipase family protein
QHEYAGSDSVLLDGAEKPYDVFLEYGGYGHNDVLIRKPKARVRKCIASVQTSSPCFFLPAADVELWFQAKLVGGSALDAIILVCHSLTRRSTRPK

SEQ ID NO: 12964 - protein, 166 aa, Zea mays
  Coding DNA Sequence Number=SeqID_7648
  Subcellular localization annotation: CTP_CleavageSite=45; ConfidenceScore=5.75e-01
RQLPVVGSSPAPSSGAPQPSVRPQPRRSSCPGPSMVELSLSGQLAAATTPNASLAALWLAPTQADRQVASATSQAALLGFPTSGALWLTPGANTTPLGTAHLQEMTPPLSPASDLSPEPSHPRSSALVDPRWASPSLLPRGPTWLPLRRLLHPHPPRWSKGLANPG

SEQ ID NO: 12965 - protein, 91 aa, Zea mays
  Coding DNA Sequence Number=SeqID_7650
LSTYDIIRGIIVVLKLVFGPFLKLRFWRLIVIAHVDVVVIVVRLCSARASADAPVVCLLGFWLAAAGTRGKVGNWRKRCHGEVPSSRIGSR

SEQ ID NO: 12966 - protein, 161 aa, Zea mays
  Coding DNA Sequence Number=SeqID_7652
  Subcellular localization annotation: CTP_CleavageSite=40; ConfidenceScore=5.16e-01
LAGWGVSDQSCAPPSHRAHAFAGEPGLLGRRGRQAGSFLVATTTSRSLDQYVPTLALLHRPLRLWEEKGRGDHFGAGSETTQVHCVGKVHVGHRVLRTYVRASSDAIAARVARGARRITGRRRARASCEALAFDSVVHWWGGNLAMEACNCASNLGISCPS

SEQ ID NO: 12967 - protein, 95 aa, Zea mays
  misc_feature (12)..(12): Xaa can be any naturally occurring amino acid
  misc_feature (48)..(48): Xaa can be any naturally occurring amino acid
  Coding DNA Sequence Number=SeqID_7654
  Homolog annotation: Hit_ID=Q9M582; Match level="QueryCoverage=100%, HitCoverage=32%, E-value=3e-13, Identity=52%"; Hit description =Hypersensitive-induced response protein
QLSDTRSQIQGXVLGMIRAGVQAPFGPCGRAERTEIGKGRWREEALRXAMVGLMALDIVQTLIVDIEPYEHVNRAMYEIDAASMVKAAANEKAEA

SEQ ID NO: 12968 - protein, 115 aa, Zea mays
  misc_feature (2)..(2): Xaa can be any naturally occurring amino acid
  misc_feature (43)..(43): Xaa can be any naturally occurring amino acid
  misc_feature (47)..(47): Xaa can be any naturally occurring amino acid
  misc_feature (50)..(52): Xaa can be any naturally occurring amino acid
  Coding DNA Sequence Number=SeqID_7655
  Subcellular localization annotation: CTP_CleavageSite=33; ConfidenceScore=5.00e-01
LXCREKNSSSSQDLLSGHNRTRVDCRARARCLLCAVRRAPACXRLLXGFXXXRGWPSAPFGPSPIALDRCGSSLEAGSGCGFGSGRLAGAWSLGQQVTPVKQGEKGLRPRVWLVA

SEQ ID NO: 12969 - protein, 143 aa, Zea mays
  Coding DNA Sequence Number=SeqID_7657
  Subcellular localization annotation: CTP_CleavageSite=35; ConfidenceScore=5.01e-01
ACLQVVVRNDKYLFAVTPPTTVDCLESQANAGLPRTASVPSLSRSCCTPRFCWQPLRKPDVWSGYTDSGAQKPGGGCAYLYSDPGMQAEQSEAKPADQVEEWKGVSEVRESDASMRRAPTGSLVKYVGDDADVLAADSDCQRA

SEQ ID NO: 12970 - protein, 67 aa, Zea mays
  Coding DNA Sequence Number=SeqID_7658
  Gene Ontology: Mol. function=calcium-dependent protein binding; Cellular component=troponin complex; Biological process=regulation of striated muscle contraction
  Homolog annotation: Hit_ID=Q9TS30; Match level="QueryCoverage=58%, HitCoverage=16%, E-value=3e-13, Identity=92%"; Hit description =Troponin T alpha isoform
RKRRPRRKKSRRKLPEPEEVQEEEKPRPRLTAPKIPEGEKVDFDDIQKKRQNKDLMELQALIDSHLK

SEQ ID NO: 12971 - protein, 125 aa, Zea mays
  Coding DNA Sequence Number=SeqID_7659
  Subcellular localization annotation: CTP_CleavageSite=28; ConfidenceScore=5.22e-01
CSVACTRSRSADARSRSRSRRSRTLPPRLSRRWSLRGRLPRHLNKRCPLHHHRASWLLEETLTEMETTPVMTPVAARATTRNFRRSRSQRDGSQDPSLVTPLAGVTSTTLSIPCYVGPSANTLGP

SEQ ID NO: 12972 - protein, 124 aa, Zea mays
  Coding DNA Sequence Number=SeqID_7661
SRVDLQSLCLQFRPRSDGPRACIALGQGNGSHHLPCRHQPPRRHPPKGFNDAPPPVRRYGQGQGRTGLTLLHYINRAPEEGAGAQLKQGANGSYQELSPRRPGSQRAPTLRPTTVPPDDDHWLL

SEQ ID NO: 12973 - protein, 88 aa, Zea mays
  Coding DNA Sequence Number=SeqID_7663
  Subcellular localization annotation: CTP_CleavageSite=69; ConfidenceScore=5.64e-01
SAERRAWHHRVTGRSNRRRFKLACYAAPNPSATTRQSAVVRVTSARGSARAAPTPSPSRVRPSLGIAVRRAALGPALESGDGRNHKGR

SEQ ID NO: 12974 - protein, 179 aa, Zea mays
  Coding DNA Sequence Number=SeqID_7665
  Subcellular localization annotation: CTP_CleavageSite=38; ConfidenceScore=5.49e-01
LPRLPPPPWHPRPRARFSAVRFVAPEIRPHPPRPARLPASSSPRPPTPVSSAFFNQSSAPHNPKQLPLIVPFPSLSRRGQQWSVTAIGLLHRRFLRRRAGFSVTCELDLTAPTWRRAGSVLGILGAGLGSGAIGTHLRSAYRGSRHPTIFSGKGRRCPFLLAPFGFQKITRLKLVAFSL

SEQ ID NO: 12975 - protein, 125 aa, Zea mays
  Coding DNA Sequence Number=SeqID_7667
MLGGGGGGFLIVYAGRYPRFCAEWARLLRIGPGGAGLVTTRPPLSPTTAEGGRSGWRGLWCGDCGGVVRRRHLQDGGGTSRTGGWWEFEKGAHLVEAGADSETDGERQWGGAGATRLCCCGQRRL

SEQ ID NO: 12976 - protein, 122 aa, Zea mays
  misc_feature (99)..(99): Xaa can be any naturally occurring amino acid
  Coding DNA Sequence Number=SeqID_7669
  Gene Ontology: Mol. function=protein dimerization activity; Biological process=RNA-dependent DNA replication
  Homolog annotation: Hit_ID=O49010; Match level="QueryCoverage=90%, HitCoverage=30%, E-value=3e-47, Identity=88%"; Hit description =Herbicide safener binding protein
  Pfam annotation: Domain name=Dimerisation; Domain location=38-86; Score=71.1; E_value=3.6e-18; Accession=PF08100.2; Description =Dimerisation domain
MHKRTLAMASEVVRPSDAELLKAQADIWRLSLSYLTPLSLRCAVELGIPTAIYRHGGAASAAELVTVLTLPSTKLTFLRRLLRILAATGVFTVHKYSTXEERYRITPAVYLLLDGIPPRGTP

SEQ ID NO: 12977 - protein, 90 aa, Zea mays
  Coding DNA Sequence Number=SeqID_7670
  Gene Ontology: Mol. function=enzyme inhibitor activity; Biological process=specification of floral organ number
  Homolog annotation: Hit_ID=Q8GT95; Match level="QueryCoverage=68%, HitCoverage=19%, E-value=4e-16, Identity=60%"; Hit description =Polygalacturonase inhibitor 1 precursor
  Pfam annotation: Domain name=LRRNT_2; Domain location=34-73; Score =23.3; E_value=0.00089; Accession=PF08263.3; Description=Leucine rich repeat N-terminal domain
  Subcellular localization annotation: CTP_CleavageSite=39; ConfidenceScore=5.25e-01
TRSSSPITLSHGVHHPPRRLADRGCVLSPARSCSPRYLQAMLIVKQALGNTSTLSTWTPASPDSCSWDHIRCNDDGRVNNVFIDGSDDVL

SEQ ID NO: 12978 - protein, 490 aa, Zea mays
  Coding DNA Sequence Number=SeqID_7671
  Gene Ontology: Mol. function=aspartic-type endopeptidase activity; Cellular component=plasma membrane; Biological process=chromatin assembly or disassembly
  Homolog annotation: Hit_ID=A2Y253; Match level="QueryCoverage=92%, HitCoverage=66%, E-value=8e-77, Identity=40%"; Hit description =Putative uncharacterized protein
SSIFDLQEWNVWETQIMVLLSFMLQLFLLSTGSLRRRHISGLLRALIWLSYMGADVVAVYALGLFSQYEDKYRLGGREAFANTLPFLWVPFLLVHLGGQDSISAFSLEDNNLWLRHLLNLGTQGVLALYVLWKSFDRISVSILVPAMLVFVSGIIKYGERVWALKNASRDSLIGRSSPNFMSLVRELGSNDVTGSKEWYARLTVLLARGLFVGRTVLQVGAVGPAILDNGFKKCQGIEEKLKMVAMELNMMFNLLYTKAIVLQRSSGVLFRCASQALMVVALVLFMIRREEGAHNNKVNVAITYTLFSGAIFVETCCVAAAIASHWTRAHLENESSYLHGLYNFATSFFGAIHQCNKRHKMTLLLSTTATLGQFNLMDYCFAMNSQPRVFSYALSFIGLGKQWRNSWYVHHIDDAGGNDMYWWIINRVLEYLATSSDDDLTHTLPPHHPAAFGQLHVRRLNSIFSLPFEDALYRLHLYTDLHLSRHFNNC

SEQ ID NO: 12979 - protein, 168 aa, Zea mays
  misc_feature (163)..(164): Xaa can be any naturally occurring amino acid
  Coding DNA Sequence Number=SeqID_7672
  Gene Ontology: Mol. function=serine-type endopeptidase activity; Cellular component=chloroplast; Biological process=proteolysis
  Homolog annotation: Hit_ID=Q0G9T7; Match level="QueryCoverage=100%, HitCoverage=85%, E-value=2e-87, Identity=93%"; Hit description=ATP -dependent Clp protease proteolytic subunit
  Pfam annotation: Domain name=CLP_protease; Domain location=13-167; Score=259.2; E_value=8.8e-75; Accession=PF00574.13; Description=Clp protease
MPIGVPKVPFRSPGEEDASWVDIYNRLYRERLLFLGQEVNSEISNQLIGLMVYLSIEDDNKDLYLFINSPGGWVIPGIAIYDTMQFVQPDVQTICMGLAASMGSFILAGGEITKRLAFPHARVMIHQPASSFYEAQTGEFILEAEELLKLRETITRVYAQRTXXPLWL

SEQ ID NO: 12980 - protein, 233 aa, Zea mays
  misc_feature (74)..(74): Xaa can be any naturally occurring amino acid
  Coding DNA Sequence Number=SeqID_7673
  Gene Ontology: Mol. function=acyltransferase activity
  Homolog annotation: Hit_ID=A7PAR6; Match level="QueryCoverage=100%, HitCoverage=69%, E-value=4e-95, Identity=72%"; Hit description =Chromosome chr14 scaffold_9, whole genome shotgun sequence
GLSMELIEQKGVDRNVEKLPPLVFVHGSYHAAWCWAQHWLPFFSASGYDCYALSLLGQGESDAPADSVAGTLQXTHASDVADFIYQNIRSPPVLLGHSFGGLIIQYYISHLGNDKFKENLYPKLRGAVLVCSVPPSGNGGLVRRYLFSKPIAAFKVTWSLAAKGFQSSLSLCKETFFSATMEDHVIKRYQDLMKESSRMPLFDLRKLNAPLPVPSVPNCPLEVLVLGASNDFI

SEQ ID NO: 12981 - protein, 131 aa, Zea mays
  Coding DNA Sequence Number=SeqID_7674
  Gene Ontology: Mol. function=cysteine-type endopeptidase activity; Cellular component=vacuole; Biological process=proteolysis
  Homolog annotation: Hit_ID=Q5QL07; Match level="QueryCoverage=100%, HitCoverage=27%, E-value=3e-62, Identity=88%"; Hit description =Vacuolar processing enzyme 2
DKFRKAPENSPKKDTAQKQVLEAMSHRMHIDNNVKLIGKLLFGIVKGPEVLNTVRPAGLPLVDDWDCLKTMVRTFETHCGSLSQYGMKHMRSFANICNVGIHHEQMAEASAQACVSIPTNPWSSLQGGFSA

SEQ ID NO: 12982 - protein, 166 aa, Zea mays
  misc_feature (128)..(129): Xaa can be any naturally occurring amino acid
  misc_feature (144)..(144): Xaa can be any naturally occurring amino acid
  misc_feature (149)..(149): Xaa can be any naturally occurring amino acid
  misc_feature (153)..(154): Xaa can be any naturally occurring amino acid
  misc_feature (159)..(160): Xaa can be any naturally occurring amino acid
  misc_feature (164)..(164): Xaa can be any naturally occurring amino acid
  Coding DNA Sequence Number=SeqID_7675
  Homolog annotation: Hit_ID=A9PC95; Match level="QueryCoverage=98%, HitCoverage=97%, E-value=2e-46, Identity=64%"; Hit description =Putative uncharacterized protein
  Pfam annotation: Domain name=DUF662; Domain location=5-165; Score =332.9; E_value=5.5e-97; Accession=PF04949.3; Description=Family of unknown function (DUF662)
  Pfam annotation: Domain name=Phasin; Domain location=3-112; Score= -36.2; E_value=0.05; Accession=PF05597.2; Description=Poly(hydroxyalca noate) granule associated protein (phasin)
  Pfam module annotation: Pfam domain module=DUF662::Phasin; Domain location=5-165::3-112
MSEQQTQPNNQLVVQNSGSLSFSSHLSKEDEEMSRSALSNFRAKEEEIERKKMEVREKVQLQLGRVEEETKRLATIREELEALADPMRKEVALVRKKIDSVNKELKPLGHTCQKKEKECKEALEAFNXXNREKVQLITRLMELXSESEXLRMXXLEELXXNIDXMH

SEQ ID NO: 12983 - protein, 180 aa, Zea mays
  misc_feature (163)..(163): Xaa can be any naturally occurring amino acid
  misc_feature (179)..(179): Xaa can be any naturally occurring amino acid
  Coding DNA Sequence Number=SeqID_7676
  Gene Ontology: Mol. function=triacylglycerol lipase activity; Biological process=lipid metabolic process
  Homolog annotation: Hit_ID=A7QU88; Match level="QueryCoverage=100%, HitCoverage=52%, E-value=4e-64, Identity=66%"; Hit description =Chromosome chr2 scaffold_176, whole genome shotgun sequence
MASEREYFDLCGPLHLTYVDWDNADHRRSIAASLVQGVYVLEKDRQERREGPNALAPPWWAFFHFQLLRTLVDDVDSSIFGAIYEFKPPPSMCNDTLHRSPRYVIAFRGTITKADSVSRDIELDLHFVRNGLHQTSRSEIAIQAVRNMVATVGDSNIWLAGHXLGSAMALLTGKTMAKXG

SEQ ID NO: 12984 - protein, 218 aa, Zea mays
  misc_feature (181)..(182): Xaa can be any naturally occurring amino acid
  misc_feature (210)..(214): Xaa can be any naturally occurring amino acid
  Coding DNA Sequence Number=SeqID_7677
  Gene Ontology: Mol. function=catalytic activity; Cellular component =cytoplasm; Biological process=cellular metabolic process
  Homolog annotation: Hit_ID=Q2XPW6; Match level="QueryCoverage=100%, HitCoverage=54%, E-value=1e-115, Identity=90%"; Hit description=NAD -dependent epimerase/dehydratase family protein-like protein
  Pfam annotation: Domain name=Epimerase; Domain location=30-217; Score= 38.2; E_value=5.3e-10; Accession=PF01370.11; Description=NAD dependent epimerasedehydratase family
MGSSGTTEYGAYTYAELEREPYWPSEKLRISITGAGGFIASHIARRLKKEGHYIIASDWKKNEHMTEDMFCHEFHLVDLRVMDNCLKVTKGVDHVFNLAADMGGMGFIQSNHSVIMYNNTMISFNMIEAARINGVKRFFYASSACIYPEFKQLETNVSLKESDAWPAEPQDAYGLEKLATXXLCKHYNKDFGIECRIGRFHNIYGPYGTXXXXXEKAP

SEQ ID NO: 12985 - protein, 172 aa, Zea mays
  misc_feature (13)..(13): Xaa can be any naturally occurring amino acid
  Coding DNA Sequence Number=SeqID_7678
  Gene Ontology: Mol. function=RNA-directed DNA polymerase activity; Cellular component=nucleus; Biological process=RNA-dependent DNA replication
  Homolog annotation: Hit_ID=Q8SA85; Match level="QueryCoverage=100%, HitCoverage=12%, E-value=6e-38, Identity=46%"; Hit description=Prpol
  Pfam annotation: Domain name=RnaseH; Domain location=23-156; Score =30.0; E_value=3.4e-08; Accession=PF00075.14; Description=RNase H
SQVLADFIVDWTXTNKATRRVPRESMTIHYDSAWCHAGAGATTIIISPTGVKYRYAARLSFALESNRCTNNIAEYEAVILGLHKLRALGVTTCIIRTDSKVVTDQVEKEYSAKDPTLMQYLTVVHSLEKQFKGFTLQHVDRAKNEEADALAKAPAKGEALPFDVFYHVIGTP

SEQ ID NO: 12986 - protein, 135 aa, Zea mays
  misc_feature (43)..(43): Xaa can be any naturally occurring amino acid
  misc_feature (49)..(51): Xaa can be any naturally occurring amino acid
  misc_feature (53)..(53): Xaa can be any naturally occurring amino acid
  misc_feature (56)..(60): Xaa can be any naturally occurring amino acid
  misc_feature (76)..(76): Xaa can be any naturally occurring amino acid
  misc_feature (115)..(115): Xaa can be any naturally occurring amino acid
  misc_feature (124)..(124): Xaa can be any naturally occurring amino acid
  misc_feature (128)..(128): Xaa can be any naturally occurring amino acid
  Coding DNA Sequence Number=SeqID_7679
  Subcellular localization annotation: CTP_CleavageSite=26; ConfidenceScore=5.32e-01
GYLEPAGSGSVDSSVYAPTSSPNCRPCSENQNGRRRCLFLASXRPPLPXXXGXGHXXXXXPPPPAPPRPAPRLPPXPPPPPPPPPPPPPPPPPPPPPPPPPPPPPPPPAPPPPPXPPPPPPPPXPPPXPPSPPPP

SEQ ID NO: 12987 - protein, 169 aa, Zea mays
  Coding DNA Sequence Number=SeqID_7681
  Gene Ontology: Mol. function=RNA-directed DNA polymerase activity; Cellular component=chromatin; Biological process=RNA-dependent DNA replication
  Homolog annotation: Hit_ID=Q8S463; Match level="QueryCoverage=82%, HitCoverage=7%, E-value=7e-70, Identity=93%"; Hit description =Putative prpol
  Pfam annotation: Domain name=RnaseH; Domain location=6-120; Score= -22.3; E_value=0.0043; Accession=PF00075.14; Description=RNase H
MRDADDDRLQAHAYSIWRTLKHLRYVLRLHFPASNNVAEYEALVNGLRIAIELGVRRLDARGDSQLVIDRVMKNSHCRDPKMEAYCDEVRRLEDKFYGLELNHIARRYNKTADELAKIASGQTTVPSDVFSRDLHQPSVKTDDTPEPEAPSAQPEVPSAQPEVPSTQSE

SEQ ID NO: 12988 - protein, 158 aa, Zea mays
  misc_feature (43)..(43): Xaa can be any naturally occurring amino acid
  Coding DNA Sequence Number=SeqID_7682
  Gene Ontology: Mol. function=protein serine/threonine kinase activity; Cellular component=cytoplasm; Biological process=protein amino acid phosphorylation
  Homolog annotation: Hit_ID=A3C9K1; Match level="QueryCoverage=91%, HitCoverage=25%, E-value=3e-46, Identity=68%"; Hit description =Putative uncharacterized protein
  Pfam annotation: Domain name=Pkinase; Domain location=4-157; Score= -89.3; E_value=0.0029; Accession=PF00069.15; Description=Protein kinase domain
  Pfam annotation: Domain name=Pkinase_Tyr; Domain location=5-157; Score=-171.9; E_value=0.069; Accession=PF07714.7; Description =Protein tyrosine kinase
  Pfam module annotation: Pfam domain module=Pkinase::Pkinase_Tyr; Domain location=4-157::5-157
ADRPGKTGGSHAAALRQKKQEIALLRQGAHPNIAQNYGSDRAXETLLAYLEHESGGSNHKPRQEYGPPGEAALRNYTAQNLSGQAYLHGRNTGHRDIKGANILVEPNGDIKLAELGMAKQISAYTTIKALKGSPHRKAPEAIRKAKGTSLTKKIRSLG

SEQ ID NO: 12989 - protein, 145 aa, Zea mays
  misc_feature (27)..(27): Xaa can be any naturally occurring amino acid
  Coding DNA Sequence Number=SeqID_7683
  Gene Ontology: Mol. function=protein binding; Cellular component =viral envelope
  Homolog annotation: Hit_ID=A2Z8U8; Match level="QueryCoverage=94%, HitCoverage=15%, E-value=4e-38, Identity=64%"; Hit description =Putative uncharacterized protein
ARNSARAGLSPHVVVGTASGTKKDDSXLLMLQLLAGTLGATHTEAQDVHIKSAETASVHQAEAIFADGKCTQAKADHLDKIQKQVGLPTEHAQKIIKGVTTTKLSSGIEASAARWQIGLQQARGLKEAHFQLDSLIAEPQRESIS

SEQ ID NO: 12990 - protein, 208 aa, Zea mays
  misc_feature (181)..(181): Xaa can be any naturally occurring amino acid
  Coding DNA Sequence Number=SeqID_7684
  Gene Ontology: Mol. function=translation elongation factor activity; Cellular component=eukaryotic translation elongation factor 1 complex; Biological process=translational elongation
  Homolog annotation: Hit_ID=Q0UMG8; Match level="QueryCoverage=100%, HitCoverage=90%, E-value=7e-78, Identity=67%"; Hit description =Putative uncharacterized protein
  Pfam annotation: Domain name=EF1_GNE; Domain location=145-208; Score =74.5; E_value=3.4e-19; Accession=PF00736.9; Description=EF-1 guanine nucleotide exchange doma
MGFTDLVSEAGLTLLNNYVRTRSYIVGYSPSQADVKVYQQIKQIPAPEKYPYAWRWYNHMLTFEAEFDSLPGDPTKDFTAYGPESSELTLNPAKAPEKEAEDDDDEVDLFGSDDEEEDAEAARIKEERLAEYNKKKAGKVKPAAKSIVTLDVKPWDDETNMDELKANVLSIEKDGLVWGAXKLVAVGFGIKKLQINWVVEDRQVSLDE

SEQ ID NO: 12991 - protein, 169 aa, Zea mays
  Coding DNA Sequence Number=SeqID_7685
  Gene Ontology: Mol. function=N-methyl-D-aspartate selective glutamate receptor activity; Cellular component=postsynaptic membrane; Biological process=dendrite development
  Homolog annotation: Hit_ID=Q8TCU5; Match level="QueryCoverage=100%, HitCoverage=15%, E-value=3e-79, Identity=88%"; Hit description =Glutamate [NMDA] receptor subunit 3A precursor
QGVSALLAFPQSLGEMMELDLVSSVLHIPVISIVRYEFPRESQNPLHLQLSLENSLSSDADVTVSILTMNNWYNFSLLLCQEDWNITDFLLLTQNNSKFHLGSIINITINLSSTEDLLSFLQVQLESIKNSTPTMVMFGCDMESIRRIFEITTQFGVMLPELRWVLGDS

SEQ ID NO: 12992 - protein, 148 aa, Zea mays
  misc_feature (82)..(82): Xaa can be any naturally occurring amino acid
  misc_feature (93)..(93): Xaa can be any naturally occurring amino acid
  misc_feature (97)..(99): Xaa can be any naturally occurring amino acid
  misc_feature (108)..(111): Xaa can be any naturally occurring amino acid
  misc_feature (117)..(117): Xaa can be any naturally occurring amino acid
  misc_feature (120)..(124): Xaa can be any naturally occurring amino acid
  Coding DNA Sequence Number=SeqID_7686
  Gene Ontology: Mol. function=heat shock protein binding; Biological process=protein folding
  Homolog annotation: Hit_ID=A2XE23; Match level="QueryCoverage=67%, HitCoverage=18%, E-value=1e-11, Identity=41%"; Hit description =Putative uncharacterized protein
  Subcellular localization annotation: CTP_CleavageSite=62; ConfidenceScore=5.43e-01
CLYIRHEGHTSTLHGRPPCLFLTANPTSTASPANTFRQLTPASTSGKLHFPKISPRFPRHACARTYRSAAFGRGSPVAGRRXTPYYATLNIRXDSTXXXIKSDYRILXXXXHADVSXKPXXXXXNHPLLFPCGGPTNHHPLPKPLPLP

SEQ ID NO: 12993 - protein, 138 aa, Zea mays
  misc_feature (29)..(29): Xaa can be any naturally occurring amino acid
  Coding DNA Sequence Number=SeqID_7687
  Gene Ontology: Mol. function=protein dimerization activity; Cellular component=endoplasmic reticulum lumen; Biological process=proteolysis
  Homolog annotation: Hit_ID=A6TA98; Match level="QueryCoverage=100%, HitCoverage=35%, E-value=4e-46, Identity=63%"; Hit description =Putative metal-dependent amidase/aminoacylase/carboxypeptidase
  Pfam annotation: Domain name=Peptidase_M20; Domain location=24-137; Score=20.9; E_value=7.7e-05; Accession=PF01546.18; Description =Peptidase family M20M25M40
QVFRGLAGSGVIGSLVNGPGPVFGLRADXDALPITEKAEPQWNSSRPGVMHACGLDGRTAILLAAACQLAATRIFKGSVHFLFQPAEDYLGGARKMVEEGLFQRFPMDAVYSMHNCPGLPVGSLSVNPGAMMASLDSF

SEQ ID NO: 12994 - protein, 499 aa, Zea mays
  misc_feature (14)..(14): Xaa can be any naturally occurring amino acid
  misc_feature (34)..(34): Xaa can be any naturally occurring amino acid
  misc_feature (53)..(53): Xaa can be any naturally occurring amino acid
  misc_feature (59)..(59): Xaa can be any naturally occurring amino acid
  misc_feature (65)..(65): Xaa can be any naturally occurring amino acid
  misc_feature (67)..(67): Xaa can be any naturally occurring amino acid
  misc_feature (71)..(71): Xaa can be any naturally occurring amino acid
  misc_feature (73)..(73): Xaa can be any naturally occurring amino acid
  misc_feature (91)..(91): Xaa can be any naturally occurring amino acid
  misc_feature (93)..(93): Xaa can be any naturally occurring amino acid
  misc_feature (115)..(115): Xaa can be any naturally occurring amino acid
  misc_feature (128)..(128): Xaa can be any naturally occurring amino acid
  misc_feature (130)..(130): Xaa can be any naturally occurring amino acid
  misc_feature (138)..(138): Xaa can be any naturally occurring amino acid
  misc_feature (188)..(188): Xaa can be any naturally occurring amino acid
  misc_feature (193)..(193): Xaa can be any naturally occurring amino acid
  misc_feature (197)..(197): Xaa can be any naturally occurring amino acid
  misc_feature (199)..(199): Xaa can be any naturally occurring amino acid
  misc_feature (206)..(206): Xaa can be any naturally occurring amino acid
  misc_feature (218)..(219): Xaa can be any naturally occurring amino acid
  misc_feature (221)..(221): Xaa can be any naturally occurring amino acid
  misc_feature (227)..(227): Xaa can be any naturally occurring amino acid
  misc_feature (235)..(235): Xaa can be any naturally occurring amino acid
  misc_feature (241)..(241): Xaa can be any naturally occurring amino acid
  misc_feature (250)..(250): Xaa can be any naturally occurring amino acid
  misc_feature (270)..(270): Xaa can be any naturally occurring amino acid
  misc_feature (311)..(311): Xaa can be any naturally occurring amino acid
  misc_feature (334)..(334): Xaa can be any naturally occurring amino acid
  misc_feature (361)..(361): Xaa can be any naturally occurring amino acid
  misc_feature (376)..(376): Xaa can be any naturally occurring amino acid
  misc_feature (401)..(401): Xaa can be any naturally occurring amino acid
  misc_feature (406)..(406): Xaa can be any naturally occurring amino acid
  misc_feature (437)..(439): Xaa can be any naturally occurring amino acid
  misc_feature (444)..(444): Xaa can be any naturally occurring amino acid
  misc_feature (448)..(455): Xaa can be any naturally occurring amino acid
  misc_feature (457)..(457): Xaa can be any naturally occurring amino acid
  misc_feature (462)..(463): Xaa can be any naturally occurring amino acid
  misc_feature (479)..(479): Xaa can be any naturally occurring amino acid
  misc_feature (488)..(488): Xaa can be any naturally occurring amino acid
  Coding DNA Sequence Number=SeqID_7688
  Subcellular localization annotation: CTP_CleavageSite=44; ConfidenceScore=5.81e-01
CALSSTASLLTLSXPCRLVPVSRFVSCAFSLSSXSSRCRRACVCARLLLRVCXFFVLSXRCRVWXRXLSLXPXSLPPLLSLLGPSCRVCPXRXCCLAPLSPSAVSPAPPSCFVLXALRPALSSLSLVXCXSSSFFRSXFSCVCCLFCPPVVSPALRLCVCVVFCSRLAVSASPCLVSVPLSCAVFLCXSFACXVRSXRXVCSLSFXRLSLLPLPPCRXXSXSPLSFXLPLFSLFXLFSLLXSLLPSPLFXPFSLLLPSSPLSFFPLFLFXSLPPSLFPLLFLFFSPLLLLLPLPSSSLSSLFSLPLLLSFXSFSLPLLLSPLSLPSPPLFSSLXSLPSPLSLSSLPLLLLPPLLLFLSPSXFFSFSFFLFLSPLFXLSFFFFFSFSFLSLLPLLSSSSLLXFLSFXLLSFLSFLLLSLPLSSPLLFLSLLLSSFSLXXXSPPSXCEKXXXXXXXXAXCGEKXXIFSLSPIFFLPSALCXPLSRGFSLXPPVSATPPHLA

SEQ ID NO: 12995 - protein, 202 aa, Zea mays
  misc_feature (70)..(70): Xaa can be any naturally occurring amino acid
  misc_feature (75)..(75): Xaa can be any naturally occurring amino acid
  misc_feature (92)..(92): Xaa can be any naturally occurring amino acid
  misc_feature (143)..(143): Xaa can be any naturally occurring amino acid
  Coding DNA Sequence Number=SeqID_7690
  Gene Ontology: Mol. function=caffeoyl-CoA O-methyltransferase activity; Cellular component=integral to membrane; Biological process=lignin biosynthetic process
  Homolog annotation: Hit_ID=Q9XGD5; Match level="QueryCoverage=83%, HitCoverage=64%, E-value=2e-61, Identity=71%"; Hit description =Caffeoyl-CoA O-methyltransferase 2
  Pfam annotation: Domain name=Methyltransf_3; Domain location=59-202; Score=70.8; E_value=4.5e-18; Accession=PF01596.8; Description=O -methyltransferase
SFPHRPPPPTAADATRTTEGTQDENPDVNVHLLGENKTRHCEAVHNRLLKSDQLYQYILDTSAYPGYADXRNELXEICDRRPWNQRTTSADXGQYLNMLITFIVAWNTMEIGDDTGYALLATELEVPEDGTILAMDIKRENYXLCLPCINWAGESHKIDFREGPALPVLDDLVEAHDEHGSFDFDFVDADKDNYLGYHERIL

SEQ ID NO: 12996 - protein, 138 aa, Zea mays
  misc_feature (24)..(24): Xaa can be any naturally occurring amino acid
  misc_feature (61)..(61): Xaa can be any naturally occurring amino acid
  Coding DNA Sequence Number=SeqID_7691
  Gene Ontology: Mol. function=S-(hydroxymethyl)glutathione dehydrogenase activity; Cellular component=cytoplasm; Biological process=metabolic process
  Homolog annotation: Hit_ID=P93629; Match level="QueryCoverage=99%, HitCoverage=35%, E-value=2e-50, Identity=72%"; Hit description =Alcohol dehydrogenase class-3 (EC 1.1.1.1) (Alcohol dehydrogenase class-III) ...
  Homolog annotation: Hit description=(S-(hydroxymethyl)glutathione dehydrogenase)
PHTDHYCCSCEDTEGPFPCMLAHXAGCIGKSASERLTDVQPGDHGIPCYPAECKECKCCKXGKTNLCGKARSDTGVGVMMNDMKSRVSENGKPIYHFMRTSTFRQYTVVHDVSDAKINPQAPLDKVCLLGCGVPTGLG

SEQ ID NO: 12997 - protein, 145 aa, Zea mays
  misc_feature (28)..(28): Xaa can be any naturally occurring amino acid
  Coding DNA Sequence Number=SeqID_7692
  Gene Ontology: Mol. function=sulfotransferase activity
  Homolog annotation: Hit_ID=A0Z2I7; Match level="QueryCoverage=86%, HitCoverage=18%, E-value=3e-49, Identity=69%"; Hit description=TPR domain protein
LELHRGGGRSTSGSPGLQGREPMACCFXNFKQLFANGQEFTYSLEDIGRYYRTYVELMQHWDAVLPGKVLRMQHEVVVEDLEGSVRQLLEFCGLPFEAACLEFWKTERNVRTASSEQVRRPIFKEGLDQWRHFEPWLGPLKEALS

SEQ ID NO: 12998 - protein, 240 aa, Zea mays
  misc_feature (2)..(3): Xaa can be any naturally occurring amino acid
  misc_feature (7)..(8): Xaa can be any naturally occurring amino acid
  misc_feature (59)..(60): Xaa can be any naturally occurring amino acid
  misc_feature (225)..(226): Xaa can be any naturally occurring amino acid
  Coding DNA Sequence Number=SeqID_7693
  Gene Ontology: Mol. function=RNA-directed DNA polymerase activity; Cellular component=chromatin; Biological process=chromatin assembly or disassembly
  Homolog annotation: Hit_ID=A4PUT7; Match level="QueryCoverage=98%, HitCoverage=35%, E-value=7e-89, Identity=62%"; Hit description =Polynucleotidyl transferase, Ribonuclease H fold
SXXIGSXXHPRFTSRFWKALQLSFGTKLLFSTAYHPQTDGQTERTIQTLEDMLRACVLXXKESWDRYLPLIEFSYNNSFHASIGMAPYEALYGRKCRSPLCWFEEGEAQLLGPDIVQQTTSKIKDIREKLKVAQDRQKSYADRRRKPLEFNEGEHVFLKLSPTTGVGRTMRIKKLSPRFLGPFQILRKIGPVAYQLALPPQLSKLHDVFHVSQLRKYISDSSHIXXNEALELKADLSYQS

SEQ ID NO: 12999 - protein, 143 aa, Zea mays
  misc_feature (32)..(33): Xaa can be any naturally occurring amino acid
  misc_feature (113)..(114): Xaa can be any naturally occurring amino acid
  Coding DNA Sequence Number=SeqID_7694
  Gene Ontology: Mol. function=NADH dehydrogenase (ubiquinone) activity; Cellular component=respiratory chain complex I; Biological process=photorespiration
  Homolog annotation: Hit_ID=A9PHT8; Match level="QueryCoverage=100%, HitCoverage=100%, E-value=5e-58, Identity=75%"; Hit description =Putative uncharacterized protein
  Pfam annotation: Domain name=GRIM-19; Domain location=16-141; Score =92.4; E_value=1.4e-24; Accession=PF06212.2; Description=GRIM-19 protein
  Subcellular localization annotation: CTP_CleavageSite=58; ConfidenceScore=5.20e-01
MTEAMIRKKPGMASVKDMPVLQDGPPPGGFAXXRFARRIPNTGPSAIVFFLTTFGAFSWGMYQVGQGNQKRRALKEEKYAARRAILPVLQAEEDERFVKEWHKYLEYEAEVMXXVPGWKVGESVYHSGRWMPPASGELRPEVW

SEQ ID NO: 13000 - protein, 226 aa, Zea mays
  misc_feature (187)..(188): Xaa can be any naturally occurring amino acid
  misc_feature (218)..(219): Xaa can be any naturally occurring amino acid
  Coding DNA Sequence Number=SeqID_7695
  Gene Ontology: Mol. function=nucleic acid binding
  Homolog annotation: Hit_ID=A1KYZ0; Match level="QueryCoverage=100%, HitCoverage=68%, E-value=2e-90, Identity=73%"; Hit description =Ca(2+)-dependent DNase
MGNALRFLYSHCCKPTDDSESLGPHGVSSATIGVSALAQDLFHFDITSQVPEGLGKHVVSSKKAQANWYRKLAVAWKEAKPPPRTPEETSRLVIQTLKRHQKADVEGLLTFYGLPLPHTLVEVAAKPPTSLPDGVQFEMHTLPVDAKAVADGDTITVYVSTADRREASVVPGNVHAAAVQRSEARAXXNYAEADAFHKQIIDSGYRMLAFQNEEILAXXYRIRLRG

SEQ ID NO: 13001 - protein, 170 aa, Zea mays
  misc_feature (119)..(119): Xaa can be any naturally occurring amino acid
  misc_feature (141)..(141): Xaa can be any naturally occurring amino acid
  misc_feature (144)..(145): Xaa can be any naturally occurring amino acid
  misc_feature (169)..(169): Xaa can be any naturally occurring amino acid
  Coding DNA Sequence Number=SeqID_7696
  Gene Ontology: Mol. function=heat shock protein binding; Cellular component=membrane; Biological process=protein folding
  Homolog annotation: Hit_ID=P42824; Match level="QueryCoverage=86%, HitCoverage=35%, E-value=2e-49, Identity=67%"; Hit description=DnaJ protein homolog 2
  Pfam annotation: Domain name=DnaJ; Domain location=13-71; Score =118.0; E_value=2.8e-32; Accession=PF00226.21; Description=DnaJ domain
MFGRAPKKSDDTKYYEILGVSKNTSPDDLKKAYKKAAIKNHPDKGGDPEKFKELAQAYEVLSDPEKREIYDQYGEDALKEGMGGGGGGHDPFDIFQSFFGGSPFSSGGGGRGRRQRRGXDVVHPLKVSLEDLYLGTSKKLXLSXXVLCSKCKGKGSKSGASMKCAGCQXT

SEQ ID NO: 13002 - protein, 165 aa, Zea mays
  misc_feature (67)..(68): Xaa can be any naturally occurring amino acid
  misc_feature (139)..(139): Xaa can be any naturally occurring amino acid
  misc_feature (157)..(158): Xaa can be any naturally occurring amino acid
  misc_feature (161)..(163): Xaa can be any naturally occurring amino acid
  Coding DNA Sequence Number=SeqID_7697
  Gene Ontology: Mol. function=cysteine-type peptidase activity; Cellular component=cellular_component; Biological process=amino acid and derivative metabolic process
  Homolog annotation: Hit_ID=Q8LG98; Match level="QueryCoverage=100%, HitCoverage=52%, E-value=3e-50, Identity=63%"; Hit description =Ubiquitin thioesterase otubain-like
MQNKEAVLEDGEIKPVTGAESGFDEWANFGDDDIMQQQFSIQAEEAKKVPFVGDKEPLSSLAAEYQXXSPILLEKIKVLDGQYAAIRRTRGDGNCFFRSFMFSYLEHILECQDQAEIDRIKDNIEKSRKALQTLGYAEXTFEDFFALFLEQLECVIXXKEXXXSH

SEQ ID NO: 13003 - protein, 156 aa, Zea mays
  Coding DNA Sequence Number=SeqID_7698
  Gene Ontology: Mol. function=ATPase activity, coupled to transmembrane movement of substances; Cellular component=integral to membrane; Biological process=proteolysis
  Homolog annotation: Hit_ID=A9ANY4; Match level="QueryCoverage=98%, HitCoverage=23%, E-value=3e-67, Identity=77%"; Hit description=Type I secretion system ATPase
  Pfam annotation: Domain name=ABC_tran; Domain location=37-155; Score=- 13.0; E_value=8.7e-06; Accession=PF00005.17; Description=ABC transporter
GLDNLLAFPFDHDPSVDAFDPHEKPVLSIPNLSIEPGERVAILGRVGAGKSTLLRLFGGLPTPVQGRILFNDTPMPLIDVADVRPHVGMLLQESSLFYGTLRENLLIANPLATDDAMLAAIKVACADQLLLRQPHGLDLKLRETGLGLSAAHKQGF

SEQ ID NO: 13004 - protein, 161 aa, Zea mays
  misc_feature (12)..(12): Xaa can be any naturally occurring amino acid
  Coding DNA Sequence Number=SeqID_7699
  Gene Ontology: Mol. function=oxidoreductase activity, acting on the CH-OH group of donors, NAD or NADP as acceptor; Cellular component =mitochondrion; Biological process=metabolic process
  Homolog annotation: Hit_ID=Q7X9L3; Match level="QueryCoverage=100%, HitCoverage=60%, E-value=2e-59, Identity=73%"; Hit description =Formate dehydrogenase
  Pfam annotation: Domain name=2-Hacid_dh; Domain location=11-133; Score=-17.9; E_value=0.013; Accession=PF00389.20; Description=D -isomer specific 2-hydroxyacid dehydro
NPNFPWWVQGAXGSADELEWQGHQYIVTDDKEGHNCELDKHVGDMHVLITTPFHPDYVTADRIKKEKNLELLLTAGIGSDHSDLPVDAAAGLTVAEVTGSNTVSVGQDELLRILDLLRNFLAGYQQVLQGEWNVAGIAHRGYDLEGKTGGTVGDGPIGRLL

SEQ ID NO: 13005 - protein, 204 aa, Zea mays
  misc_feature (47)..(47): Xaa can be any naturally occurring amino acid
  misc_feature (156)..(157): Xaa can be any naturally occurring amino acid
  misc_feature (185)..(185): Xaa can be any naturally occurring amino acid
  misc_feature (194)..(195): Xaa can be any naturally occurring amino acid
  Coding DNA Sequence Number=SeqID_7700
  Gene Ontology: Mol. function=aminoacyl-tRNA ligase activity; Cellular component=cytoplasm; Biological process=tRNA aminoacylation for protein translation
  Homolog annotation: Hit_ID=A7NVA5; Match level="QueryCoverage=94%, HitCoverage=60%, E-value=5e-84, Identity=80%"; Hit description =Chromosome chr18 scaffold_1, whole genome shotgun sequence
  Pfam annotation: Domain name=YbaK; Domain location=14-164; Score= -16.8; E_value=0.0015; Accession=PF04073.5; Description=YbaK  prolyl -tRNA synthetases associated domain
MGLSKEHLLARLQELQIEFSKYEHPVVLTVEAQANYVGHLGGGISKXLFLKDKKNRFYIVSALADTKVDLKVLSQRLGLGKGGVRMAPEEALSEILQVSLGCVTPFAVVNESARDVSLLLDQGFKTQKHCIFHPLSNDMSISLTAQDLDKFLKSIXXNPAYVDLEANPSVGKDQPPDLAALVPSXSVILPDQPXXQSSPNLVSV

SEQ ID NO: 13006 - protein, 196 aa, Zea mays
  misc_feature (149)..(150): Xaa can be any naturally occurring amino acid
  misc_feature (162)..(162): Xaa can be any naturally occurring amino acid
  misc_feature (174)..(174): Xaa can be any naturally occurring amino acid
  Coding DNA Sequence Number=SeqID_7701
  Homolog annotation: Hit_ID=A7QYN3; Match level="QueryCoverage=98%, HitCoverage=50%, E-value=4e-60, Identity=58%"; Hit description =Chromosome undetermined scaffold_252, whole genome shotgun sequence
MAVSFLAREVSDLCLGKPPLRSLSASATVAEALAVLKNSGESSVSVWICNHSRGIESEEVGRCECVGKLCMVDVICFLCKEENLFSPSSALKAPISEILPKVPGLVVHLEPSSSLLEAIDLIIQGAQNLVVPILPTKRNGISRRKQLQXXSAINSHNGREFXWLTQEDVIRFVXGSIGLFAPLPALSVDTLGIIVL

SEQ ID NO: 13007 - protein, 177 aa, Zea mays
  Coding DNA Sequence Number=SeqID_7702
  Gene Ontology: Mol. function=protein-tyrosine kinase activity; Cellular component=integral to membrane; Biological process=protein amino acid phosphorylation
  Homolog annotation: Hit_ID=A7PG43; Match level="QueryCoverage=93%, HitCoverage=16%, E-value=6e-51, Identity=60%"; Hit description =Chromosome chr6 scaffold_15, whole genome shotgun sequence
  Pfam annotation: Domain name=LRRNT_2; Domain location=18-64; Score =39.2; E_value=1.5e-08; Accession=PF08263.3; Description=Leucine rich repeat N-terminal domain
  Pfam annotation: Domain name=LRR_1; Domain location=115-137; Score =5.7; E_value=27; Accession=PF00560.23; Description=Leucine Rich Repeat
  Pfam annotation: Domain name=LRR_1; Domain location=139-161; Score =19.4; E_value=0.014; Accession=PF00560.23; Description=Leucine Rich Repeat
  Pfam annotation: Domain name=LRR_1; Domain location=163-177; Score =4.9; E_value=37; Accession=PF00560.23; Description=Leucine Rich Repeat
  Pfam annotation: Domain name=LRR_1; Domain location=67-90; Score=2.7; E_value=98; Accession=PF00560.23; Description=Leucine Rich Repeat
  Pfam annotation: Domain name=LRR_1; Domain location=92-113; Score =7.6; E_value=12; Accession=PF00560.23; Description=Leucine Rich Repeat
  Pfam module annotation: Pfam domain module=LRRNT_2::LRR_1::LRR_1::LRR_ 1::LRR_1::LRR_1; Domain location=18-64::115-137::139-161::163-177::67- 90::92-113
MKAMCLMLLLLLVDSALGNSDVDVLLELKKSIQKDPSGLVVNSWDSKSLGSDGCPQNWYGILCSEGNVISINLDNAGLVGEFNFLAINGLTMLQNLSVANNQFTGNISHIGPMKSLEFFDLSLNKFNGPLLSNFLELRNLVYLNLSSNELSGTLPIGFQKLEKLKYLDLHSNNFSGN

SEQ ID NO: 13008 - protein, 193 aa, Zea mays
  Coding DNA Sequence Number=SeqID_7703
  Gene Ontology: Mol. function=ATP binding; Cellular component =equatorial microtubule organizing center; Biological process =microtubule bundle formation
  Homolog annotation: Hit_ID=A2R652; Match level="QueryCoverage=64%, HitCoverage=15%, E-value=1e-57, Identity=87%"; Hit description =Contig An15c0220, complete genome
DFTPAFSDVCSDALLEAHEAEIARLETLKEQRAPTLELIEKHRSILADKQALSASSQDASRLMGRGNKGEKRDPGKLLREEKMRKRIAKELPKVESELRKELEHWEDEFGRPFLVHGERYLDNLTPVVSKPPPRSKTPSAPPSTTKSVTNSIKRDPVSRPGSSLRGPPPPRSATKTPTSGVPVKHNTKDICRQ

SEQ ID NO: 13009 - protein, 139 aa, Zea mays
  misc_feature (25)..(26): Xaa can be any naturally occurring amino acid
  misc_feature (111)..(114): Xaa can be any naturally occurring amino acid
  misc_feature (126)..(126): Xaa can be any naturally occurring amino acid
  Coding DNA Sequence Number=SeqID_7704
  Gene Ontology: Mol. function=inositol or phosphatidylinositol phosphatase activity; Cellular component=cytoplasm; Biological process=phosphatidylinositol biosynthetic process
  Homolog annotation: Hit_ID=A9PIC5; Match level="QueryCoverage=100%, HitCoverage=51%, E-value=2e-59, Identity=79%"; Hit description =Putative uncharacterized protein
  Pfam annotation: Domain name=Inositol_P; Domain location=6-139; Score= 21.6; E_value=1.5e-07; Accession=PF00459.15; Description=Inositol monophosphatase family
MVDNDSLSEFLASAVDAAQKAGEIXXKGFYQTKHVEHKGQVDLVTETDKACEELIFNHLKQLYPTHKLIGEETTAACGATELTDDPTWIVDPLDGTTNFVHGFPFVCVSIXXXXGKTPTAGVVSNXIFNELFTAFRGKG

SEQ ID NO: 13010 - protein, 218 aa, Zea mays
  misc_feature (146)..(146): Xaa can be any naturally occurring amino acid
  Coding DNA Sequence Number=SeqID_7705
  Gene Ontology: Mol. function=protein serine/threonine kinase activity; Cellular component=cytoplasm; Biological process=protein amino acid phosphorylation
  Homolog annotation: Hit_ID=Q0J4I1; Match level="QueryCoverage=97%, HitCoverage=65%, E-value=1e-101, Identity=87%"; Hit description =Cyclin-dependent kinase B2-1
  Pfam annotation: Domain name=Pkinase; Domain location=13-215; Score =82.5; E_value=1.4e-21; Accession=PF00069.15; Description=Protein kinase domain
  Pfam annotation: Domain name=Pkinase_Tyr; Domain location=13-218; Score=-70.8; E_value=4.5e-08; Accession=PF07714.7; Description =Protein tyrosine kinase
  Pfam module annotation: Pfam domain module=Pkinase::Pkinase_Tyr; Domain location=13-215::13-218
PPRVGGLRAMDLYEKLEKVGEGTYGKAYKAREKATGRIVALKKTRLPEDDEGVPPTALREVSLLRMLSQDPHVVRLLDLKQGQNKEGQTILYLVFEYMDTDLKKLIRGHRQNHEKIPAHTVKILMYQLCKGAAFCHGRGVLHRDLXPHNLLMDRKTMALKIADLVLSRDFTAPLEKYTHEILSLWYTAPEVLLGATHYSTPCDMRTESCIFAGVITTT

SEQ ID NO: 13011 - protein, 194 aa, Zea mays
  misc_feature (14)..(14): Xaa can be any naturally occurring amino acid
  misc_feature (28)..(28): Xaa can be any naturally occurring amino acid
  misc_feature (57)..(57): Xaa can be any naturally occurring amino acid
  misc_feature (68)..(68): Xaa can be any naturally occurring amino acid
  Coding DNA Sequence Number=SeqID_7706
  Homolog annotation: Hit_ID=Q8S160; Match level="QueryCoverage=100%, HitCoverage=35%, E-value=1e-48, Identity=57%"; Hit description=BNR repeat domain protein-like
GLGLSPELNFSGNXKGEPFYPIKVPFPXEPKGFKFFGPVQITVEPGHTVPVSGEGYXRRWAWARRLHXLLGKVQIAGRFIPCGVMWATPDENLHEGPKGGSTSRVNYRTSNEVEQKLYAASEEIQFLRSKLTLMERYINILHISIFRKPLDERALTRSLQEYSVFDIRKEFENILDAADTDELNRVEICYRSML

SEQ ID NO: 13012 - protein, 198 aa, Zea mays
  misc_feature (35)..(35): Xaa can be any naturally occurring amino acid
  misc_feature (53)..(53): Xaa can be any naturally occurring amino acid
  misc_feature (71)..(71): Xaa can be any naturally occurring amino acid
  misc_feature (172)..(172): Xaa can be any naturally occurring amino acid
  misc_feature (183)..(183): Xaa can be any naturally occurring amino acid
  misc_feature (185)..(185): Xaa can be any naturally occurring amino acid
  Coding DNA Sequence Number=SeqID_7707
  Gene Ontology: Mol. function=structural constituent of ribosome; Cellular component=ribonucleoprotein complex; Biological process =translation
  Homolog annotation: Hit_ID=Q9AR08; Match level="QueryCoverage=99%, HitCoverage=86%, E-value=3e-57, Identity=68%"; Hit description=9S ribosomal protein
  Pfam annotation: Domain name=Ribosomal_S9; Domain location=84-198; Score=67.3; E_value=5.1e-17; Accession=PF00380.9; Description =Ribosomal protein S9S16
ISTPNADHRPFLRLLSSYRRDDCLTLRASATERSXGGPIMLGRDRLTRRRLEXDALSQIGLQKYAKQRAVXPGGAWQGITRTRARGKTAIARVELQEGTGTVFINLRDAYEYVQGNAMWMEYCKVPLMTLGFENNYDGFVKVHGGGLSGQVQAICLGVAHPLVKISNANRVXPLKPEGLLTRXDXRFVERKKAGLKKA

SEQ ID NO: 13013 - protein, 154 aa, Zea mays
  misc_feature (47)..(48): Xaa can be any naturally occurring amino acid
  misc_feature (63)..(63): Xaa can be any naturally occurring amino acid
  misc_feature (129)..(130): Xaa can be any naturally occurring amino acid
  misc_feature (136)..(137): Xaa can be any naturally occurring amino acid
  misc_feature (142)..(143): Xaa can be any naturally occurring amino acid
  misc_feature (146)..(146): Xaa can be any naturally occurring amino acid
  Coding DNA Sequence Number=SeqID_7708
  Gene Ontology: Mol. function=methionine adenosyltransferase activity; Cellular component=phagocytic vesicle; Biological process=one-carbon compound metabolic process
  Homolog annotation: Hit_ID=P24260; Match level="QueryCoverage=100%, HitCoverage=38%, E-value=4e-71, Identity=83%"; Hit description=S -adenosylmethionine synthetase 2
  Pfam annotation: Domain name=S-AdoMet_synt_M; Domain location=10-132; Score=296.4; E_value=5.4e-86; Accession=PF02772.6; Description=S -adenosylmethionine synthetase, cent
VRGHFTKNPEEIGAGDQGHMFGYATDETPEYMPLSHVLATKLGARLXXVRKNGTCAWLRPDGXTQVTVEYYNENGAMVPVHVHTVLISTQHDETVSNDQIAADLKEHVIKPVIPEKYLNEKTILHLNPXXRFDIGXXHGDAXXTAXNIIIDTYG

SEQ ID NO: 13014 - protein, 160 aa, Zea mays
  misc_feature (111)..(111): Xaa can be any naturally occurring amino acid
  misc_feature (119)..(119): Xaa can be any naturally occurring amino acid
  misc_feature (122)..(122): Xaa can be any naturally occurring amino acid
  misc_feature (130)..(130): Xaa can be any naturally occurring amino acid
  misc_feature (134)..(134): Xaa can be any naturally occurring amino acid
  misc_feature (143)..(143): Xaa can be any naturally occurring amino acid
  misc_feature (149)..(150): Xaa can be any naturally occurring amino acid
  misc_feature (155)..(155): Xaa can be any naturally occurring amino acid
  misc_feature (158)..(159): Xaa can be any naturally occurring amino acid
  Coding DNA Sequence Number=SeqID_7709
  Gene Ontology: Mol. function=glutathione transferase activity; Cellular component=cytoplasm; Biological process=auxin mediated signaling pathway
  Homolog annotation: Hit_ID=Q9FQE9; Match level="QueryCoverage=100%, HitCoverage=80%, E-value=6e-72, Identity=80%"; Hit description =Glutathione S-transferase GST 9
  Pfam annotation: Domain name=GST_N; Domain location=3-76; Score=86.2; E_value=1e-22; Accession=PF02798.10; Description=Glutathione S -transferase, N-terminal domain
MAEEVVLLDTWASMFGMRVRIALAEKDVKYEYKEENPRNKSPFFLQMNPIHKKIPVLIHNGKPICESAIIVQYIDEIWKDETPIMPSDPYERAQARFWVDYIDKKVSDTWXKMWLSKGXEHXVGKKELIXIFKXLEETLGDKXFYGGDXXAFLDXGMXXF

SEQ ID NO: 13015 - protein, 153 aa, Zea mays
  misc_feature (51)..(52): Xaa can be any naturally occurring amino acid
  misc_feature (111)..(111): Xaa can be any naturally occurring amino acid
  misc_feature (134)..(134): Xaa can be any naturally occurring amino acid
  misc_feature (137)..(138): Xaa can be any naturally occurring amino acid
  misc_feature (140)..(140): Xaa can be any naturally occurring amino acid
  misc_feature (143)..(144): Xaa can be any naturally occurring amino acid
  misc_feature (149)..(149): Xaa can be any naturally occurring amino acid
  Coding DNA Sequence Number=SeqID_7710
  Gene Ontology: Mol. function=oxidoreductase activity, acting on the CH-CH group of donors; Cellular component=mitochondrion; Biological process=electron transport
  Homolog annotation: Hit_ID=A7Q8G0; Match level="QueryCoverage=100%, HitCoverage=34%, E-value=2e-60, Identity=78%"; Hit description =Chromosome chr5 scaffold_64, whole genome shotgun sequence
  Pfam annotation: Domain name=Acyl-CoA_dh_1; Domain location=25-152; Score=37.7; E_value=4.3e-08; Accession=PF00441.14; Description=Acyl -CoA dehydrogenase, C-terminal doma
  Pfam annotation: Domain name=Acyl-CoA_dh_2; Domain location=40-152; Score=-33.2; E_value=0.094; Accession=PF08028.2; Description=Acyl -CoA dehydrogenase, C-terminal doma
  Pfam module annotation: Pfam domain module=Acyl-CoA_dh_1::Acyl-CoA_dh_ 2; Domain location=25-152::40-152
APHGPAEVIFENVCVPAKNIILGEGRGFEIAQGRLGPGRLHHCMRLIGAAXXFMHLMVQRAVSRRAFGKLIAQHGSFLSDMAKCRIELEKTRLLVLEAADQLDRLGNKKAXGILAMAKVSAPNMALKVLDMAMXVHXXAXGYXXTQVLXHLWA

SEQ ID NO: 13016 - protein, 165 aa, Zea mays
  misc_feature (52)..(53): Xaa can be any naturally occurring amino acid
  misc_feature (148)..(149): Xaa can be any naturally occurring amino acid
  Coding DNA Sequence Number=SeqID_7711
  Gene Ontology: Mol. function=nucleic acid binding; Cellular component= ribonucleoprotein complex; Biological process=RNA processing
  Homolog annotation: Hit_ID=A7P9E2; Match level="QueryCoverage=80%, HitCoverage=35%, E-value=2e-26, Identity=48%"; Hit description =Chromosome chr3 scaffold_8, whole genome shotgun sequence
  Pfam annotation: Domain name=RRM_1; Domain location=47-130; Score =5.0; E_value=0.051; Accession=PF00076.12; Description=RNA recognition motif. (a.k.a. RRM, RBD, or
KLTRNHSFIVAALKESSLLVVSGDEKRVKRLNPLHFNEFRDHKLYTVLVENXXEDHSKKNIQQIFREAGTIKRIIIHDPHSTVESAKHVKQEKFISNKLHALVEYETIEAAEKAVAMLNDEQDWRKGMRVKLLKQTGKYGHKKQAWKXXNSEKNSSSHVSEPSWG

SEQ ID NO: 13017 - protein, 126 aa, Zea mays
  misc_feature (101)..(101): Xaa can be any naturally occurring amino acid
  Coding DNA Sequence Number=SeqID_7712
  Gene Ontology: Mol. function=magnesium ion binding; Cellular component=integral to membrane; Biological process=photosynthesis, light harvesting
  Homolog annotation: Hit_ID=Q1EP45; Match level="QueryCoverage=97%, HitCoverage=46%, E-value=4e-51, Identity=78%"; Hit description =Chlorophyll A-B binding protein (CAB), putative
  Pfam annotation: Domain name=Chloroa_b-bind; Domain location=2-93; Score=-15.5; E_value=0.0003; Accession=PF00504.12; Description =Chlorophyll A-B binding protein
RVRVEYLGNPSLIHAQSILAIWGCQVVLMGPVQGDRIPGGPLGEVVDPLYPGGRFDPLGVPHDPEGFSELKVKEIKNGPLPKFSKFGFFVQAIVPGKGPVXNLPDPLADPVNNKAWAYGTKFVPGK

SEQ ID NO: 13018 - protein, 166 aa, Zea mays
  misc_feature (103)..(104): Xaa can be any naturally occurring amino acid
  misc_feature (133)..(134): Xaa can be any naturally occurring amino acid
  misc_feature (136)..(136): Xaa can be any naturally occurring amino acid
  misc_feature (141)..(141): Xaa can be any naturally occurring amino acid
  misc_feature (150)..(150): Xaa can be any naturally occurring amino acid
  misc_feature (156)..(158): Xaa can be any naturally occurring amino acid
  misc_feature (165)..(165): Xaa can be any naturally occurring amino acid
  Coding DNA Sequence Number=SeqID_7713
  Gene Ontology: Mol. function=pyroglutamyl-peptidase I activity; Biological process=proteolysis
  Homolog annotation: Hit_ID=A7PRL3; Match level="QueryCoverage=100%, HitCoverage=74%, E-value=1e-61, Identity=69%"; Hit description =Chromosome chr14 scaffold_27, whole genome shotgun sequence
MGSEGPSAAVTTVYLTGFKKFHGVSENPTDTIVNNLTEYMKKKGLPKGLVIGSCNILETAGQAALIPLYQTLQSAISAKDSESSSSNRIIWLHFGVNSGATRXXIERQAVNEATFRCPDEMGWKPQKVPIVPXXGXISRIXETSIPVEEXTKALAXXXYDVMTSXD

SEQ ID NO: 13019 - protein, 143 aa, Zea mays
  misc_feature (33)..(34): Xaa can be any naturally occurring amino acid
  misc_feature (76)..(76): Xaa can be any naturally occurring amino acid
  misc_feature (87)..(87): Xaa can be any naturally occurring amino acid
  misc_feature (126)..(126): Xaa can be any naturally occurring amino acid
  misc_feature (130)..(131): Xaa can be any naturally occurring amino acid
  misc_feature (133)..(134): Xaa can be any naturally occurring amino acid
  misc_feature (142)..(142): Xaa can be any naturally occurring amino acid
  Coding DNA Sequence Number=SeqID_7714
  Gene Ontology: Mol. function=structural constituent of ribosome; Cellular component=ribonucleoprotein complex; Biological process =translation
  Homolog annotation: Hit_ID=Q5I7L3; Match level="QueryCoverage=100%, HitCoverage=65%, E-value=1e-43, Identity=62%"; Hit description =Ribosomal protein L10A
  Pfam annotation: Domain name=Ribosomal_L1; Domain location=10-143; Score=-31.3; E_value=3.6e-07; Accession=PF00687.11; Description =Ribosomal protein L1pL10e family
MSKLQSDALREAISGIMADSKEKNRKFVETIEXXIGLKNYDPQKDKRFFGSVKLPHIPRPKMKIRLLGDAQHVEEXKKIGLDWMDVXEALKKLNKNKKLVKKLAKKYHAFLASEAAIKQIPRLLGXGLNXXGXXPTLVTHQXS

SEQ ID NO: 13020 - protein, 108 aa, Zea mays
  misc_feature (24)..(25): Xaa can be any naturally occurring amino acid
  misc_feature (52)..(52): Xaa can be any naturally occurring amino acid
  misc_feature (66)..(67): Xaa can be any naturally occurring amino acid
  misc_feature (106)..(106): Xaa can be any naturally occurring amino acid
  Coding DNA Sequence Number=SeqID_7715
  Gene Ontology: Mol. function=small conjugating protein ligase activity; Cellular component=nucleus; Biological process=regulation of protein metabolic process
  Homolog annotation: Hit_ID=P25865; Match level="QueryCoverage=82%, HitCoverage=58%, E-value=2e-36, Identity=80%"; Hit description =Ubiquitin-conjugating enzyme E2-17 kDa 1
  Pfam annotation: Domain name=UQ_con; Domain location=27-108; Score =37.5; E_value=4.7e-08; Accession=PF00179.16; Description=Ubiquitin -conjugating enzyme
MILLFPLTSSIGRFFWVVAMSTPXXKRLMRDFKRLQQDPPAGISGAPQDNNXMLWNAAIFGPDDTXXDGGTFKLTLQFTEDYPNKPPTVRFVSRMFHPNIFADGSXCL

SEQ ID NO: 13021 - protein, 202 aa, Zea mays
  misc_feature (184)..(184): Xaa can be any naturally occurring amino acid
  Coding DNA Sequence Number=SeqID_7716
  Gene Ontology: Mol. function=oxidoreductase activity, acting on the CH-OH group of donors, NAD or NADP as acceptor; Cellular component =mitochondrion; Biological process=metabolic process
  Homolog annotation: Hit_ID=Q7X9L3; Match level="QueryCoverage=74%, HitCoverage=56%, E-value=2e-54, Identity=72%"; Hit description =Formate dehydrogenase
  Subcellular localization annotation: CTP_CleavageSite=53; ConfidenceScore=5.29e-01
LHIIVSRHSSHRPSQVCFLSSRVLLPDPPLSSWLMTMWRAAARQLDQRALVSRCAHTSTGSKNIVRMFYNAGEYADENPNFDSCVEGELGIHACVESQGHQYIVTDDEEGPNCELQKHIEDMHVLITTTFHPAYVAVERIKNVNNLELLLTAGIGSDHIDLPADAAAGLTEADDTGSNTVSVAXDELLRILILLRNFLPEYN

SEQ ID NO: 13022 - protein, 99 aa, Zea mays
  Coding DNA Sequence Number=SeqID_7717
  Gene Ontology: Mol. function=transporter activity; Cellular component= integral to membrane; Biological process=transport
  Homolog annotation: Hit_ID=Q8WUG5; Match level="QueryCoverage=100%, HitCoverage=21%, E-value=1e-38, Identity=78%"; Hit description =Solute carrier family 22 member 17
CSLLASGTAALACVFLGVTVERFGRRGILLLYETLTGIASLALLGLWDYLNEAAITTFSVLGLFSSQAAGILSTLLAAEVIPTTVRGRSLGLIMALGAL

SEQ ID NO: 13023 - protein, 204 aa, Zea mays
  Coding DNA Sequence Number=SeqID_7718
  Gene Ontology: Mol. function=cation transmembrane transporter activity; Cellular component=integral to membrane; Biological process=cation transport
  Homolog annotation: Hit_ID=Q1QF85; Match level="QueryCoverage=96%, HitCoverage=18%, E-value=1e-73, Identity=77%"; Hit description=Heavy metal efflux pump CzcA precursor
KNVAPGPNQISREQGKRRIVVTANVRGRDLGSFVADAEQQIEAKVKLPAGYWIGWGGQFEQLVSATQRLTIVVPIALLLIFLLLFMSLGSMADALLVFSGVPLALTGGIIALLLRGIPLSISAGIGFIALSGVAVLNGLVIITFIERLRREGHALVDAVREGALTRLRPVLMTALVASLGFVPMAIATGAGAEVQRPPPRGVSF

SEQ ID NO: 13024 - protein, 229 aa, Zea mays
  misc_feature (24)..(25): Xaa can be any naturally occurring amino acid
  Coding DNA Sequence Number=SeqID_7719
  Gene Ontology: Mol. function=oxidoreductase activity; Cellular component=nucleus; Biological process=aromatic compound metabolic process
  Homolog annotation: Hit_ID=A5E9J7; Match level="QueryCoverage=77%, HitCoverage=32%, E-value=6e-76, Identity=78%"; Hit description =Putative FAD-binding Monooxygenase
  Pfam annotation: Domain name=FAD_binding_3; Domain location=45-229; Score=-148.1; E_value=0.0078; Accession=PF01494.9; Description=FAD binding domain
  Subcellular localization annotation: CTP_CleavageSite=34; ConfidenceScore=5.16e-01
QPHRPRIRSACKRQGQPNPFGYPXXPTRTVGRNVAEHPVSCRCRPMGLSLAIDLAQRGQRVVLLDDADRIGEGSRAICFSKRSLEFWDRLGVGDRMVEKGVVWSVGKIFHGASQLYQFNLLPEEGHKRPAFINLQQFYAEAYLVDRVEQLPEIDLRWRNKVIALESRNDGVALTIATPEGSYQVHASFVVACDGARSSLRQMVGAEFAGQVFLQPGGSTSSRAAATAGS

SEQ ID NO: 13025 - protein, 220 aa, Zea mays
  Coding DNA Sequence Number=SeqID_7720
  Gene Ontology: Mol. function=penicillin amidase activity; Cellular component=periplasmic space; Biological process=antibiotic biosynthetic process
  Homolog annotation: Hit_ID=Q47PE0; Match level="QueryCoverage=76%, HitCoverage=19%, E-value=7e-36, Identity=45%"; Hit description =Penicillin amidase precursor
ADTEGNIGYQAPGRLPILGAGDGWLPQPGWDSAYDWKGYIPFEELPVSYNPPEGYIVTANNAIVGDDYEHFLSRDWDYGYRAARIAHLIERKAAAAPLVAQDLRDIQMDEQMWIGKQLAVAMDAVAVDGKGPKAAVDLLRTWDAQDAPDSAAAAYANVLWSNLVHNVFLDREVPLPVGDQGRLFTVVGRCFRYTSDPLWSNDRIDVDDMGEMLAFSAEQA

SEQ ID NO: 13026 - protein, 212 aa, Zea mays
  misc_feature (5)..(9): Xaa can be any naturally occurring amino acid
  misc_feature (11)..(11): Xaa can be any naturally occurring amino acid
  misc_feature (23)..(24): Xaa can be any naturally occurring amino acid
  misc_feature (26)..(27): Xaa can be any naturally occurring amino acid
  misc_feature (34)..(34): Xaa can be any naturally occurring amino acid
  misc_feature (50)..(50): Xaa can be any naturally occurring amino acid
  Coding DNA Sequence Number=SeqID_7721
  Homolog annotation: Hit_ID=A5AK28; Match level="QueryCoverage=100%, HitCoverage=14%, E-value=2e-68, Identity=61%"; Hit description =Putative uncharacterized protein
  Subcellular localization annotation: CTP_CleavageSite=75; ConfidenceScore=5.17e-01
EEDGXXXXXGXSIKVTGMGVYLXXKXXESFISTXISFQAVFKSLSVSNKXSTQSRGRLSKTSGKGTQMLKFNLVQCSVYVLGETGLENTVVPDPKRVNYGSQGGRVIINVSADGTPRNANIVSTVSNEYQKLKYCISLEIFHFKISVNKEKQSKQIELERARSIYQEYMQENRPVTKVALFDMQNTKFVQRLGGIRENAACSLFSATDITMR

SEQ ID NO: 13027 - protein, 229 aa, Zea mays
  misc_feature (23)..(23): Xaa can be any naturally occurring amino acid
  misc_feature (36)..(36): Xaa can be any naturally occurring amino acid
  Coding DNA Sequence Number=SeqID_7722
  Gene Ontology: Mol. function=ubiquitin-protein ligase activity; Cellular component=ubiquitin ligase complex; Biological process =protein ubiquitination
  Homolog annotation: Hit_ID=A7QBN6; Match level="QueryCoverage=93%, HitCoverage=27%, E-value=7e-83, Identity=75%"; Hit description =Chromosome chr1 scaffold_75, whole genome shotgun sequence
  Pfam annotation: Domain name=U-box; Domain location=190-229; Score =0.6; E_value=0.00044; Accession=PF04564.6; Description=U-box domain
MVLFFYHCQHLTCSVFDFFPLRXSVQIDEIVNELAXTVFALDPSEKQVGDDLIALLQQGRKFNDFNDGNELECFHLAATRLGITSSRAALTERRALKKLIERARAEEDKRKESIIAYLLHLMRKYSKLFRSEFSDDNDSQGSQPCSPTLRLLEDGVPGSHCQAFDRQLSKLSSFNFKPNNRKSGQMLLPPEELRCPISLQLMSDPVIIASGQTYERVCIEKWLSDGHNT

SEQ ID NO: 13028 - protein, 95 aa, Zea mays
  Coding DNA Sequence Number=SeqID_7723
  Gene Ontology: Mol. function=cysteine-type endopeptidase activity; Cellular component=external side of plasma membrane; Biological process=regulation of catalytic activity
  Homolog annotation: Hit_ID=Q03107; Match level="QueryCoverage=96%, HitCoverage=26%, E-value=1e-49, Identity=97%"; Hit description =Cathepsin B
  Pfam annotation: Domain name=Peptidase_C1; Domain location=1-76; Score=-129.4; E_value=0.023; Accession=PF00112.13; Description =Papain family cysteine protease
VYEDFAHYKSGVYKHITGGVMGGHAVKLIGWGTSDAGEDYWLLANQWNRGWGDDGYFKIIRGKNECGIEEDVTAGMPSTKNTARNNDVAFGTAIL

SEQ ID NO: 13029 - protein, 161 aa, Zea mays
  Coding DNA Sequence Number=SeqID_7724
  Homolog annotation: Hit_ID=Q84YF3; Match level="QueryCoverage=97%, HitCoverage=44%, E-value=5e-08, Identity=59%"; Hit description =Putative uncharacterized protein 4B
  Pfam annotation: Domain name=DUF1191; Domain location=3-152; Score= -116.1; E_value=0.014; Accession=PF06697.3; Description=Protein of unknown function (DUF1191)
PSRAAGTAARCVVFGLFCVTRFRDLEDRANVCSSYKQGHVSMVVNSTAGSAPGPPPPPPPAGAIAPPIPTEEGGEKKGGSGSAAWKVAVAVVAGAAALGLVGALVLCLVRYRRDKKLEAMERNAEAGEALRVARVGRAQAQAPVASGTRTQPVIENEYAAS

SEQ ID NO: 13030 - protein, 223 aa, Zea mays
  Coding DNA Sequence Number=SeqID_7725
  Gene Ontology: Mol. function=methyltransferase activity; Biological process=metabolic process
  Homolog annotation: Hit_ID=A0KES3; Match level="QueryCoverage=99%, HitCoverage=30%, E-value=2e-83, Identity=65%"; Hit description =Generic methyltransferase
QQRIDDRIEAMMAIGVDEMSWDDLDDSHYSWPDVAEVRDYRGKVKTVVSEFIRTMPLELPIDWDSPAWVILMGIEHERIHLETSSVLIRQLPLEWVKPQPHWPACPQARHDRASVPANTLVAMPGGRVTQGKTDDTYGWDNEYGSLTTELKPFKASKMLVSNAEFFHFIAANGYNERRWWDDEGWGWREFAQPQMPTFWVGDIAQPDDLRLRLMTEKVAMPWD

SEQ ID NO: 13031 - protein, 96 aa, Zea mays
  Coding DNA Sequence Number=SeqID_7726
  Gene Ontology: Cellular component=integral to membrane
  Homolog annotation: Hit_ID=A7QNA3; Match level="QueryCoverage=92%, HitCoverage=19%, E-value=3e-37, Identity=78%"; Hit description =Chromosome chr2 scaffold_132, whole genome shotgun sequence
CCTFFIYGLGQWWHAGFHLSTAIVGPTILTLPYAFRGLGWELGLFCLTVMGVVTFYAYYLMSKVLEHCERAGRRHIRFRELAADVLGECYLFTLGK

SEQ ID NO: 13032 - protein, 149 aa, Zea mays
  misc_feature (22)..(22): Xaa can be any naturally occurring amino acid
  Coding DNA Sequence Number=SeqID_7727
  Homolog annotation: Hit_ID=P03731; Match level="QueryCoverage=100%, HitCoverage=77%, E-value=2e-58, Identity=80%"; Hit description=Minor tail protein Z
  Pfam annotation: Domain name=Minor_tail_Z; Domain location=1-149; Score=296.7; E_value=4.5e-86; Accession=PF06763.2; Description =Prophage minor tail protein Z (GPZ)
VARETKVRRKLVKERARLKRAXVKNPQARIKVNRGDLPVIKLGNARVVLSRRRRRKKGQRSSLKGGGSVLVVGNRRIPGAFIQQLKNGRWHVMQRVAGKNRYPIDVVKIPMAVPLTTAFKQNIERIRRERLPKELGYALQHQLRMVIKR

SEQ ID NO: 13033 - protein, 162 aa, Zea mays
  Coding DNA Sequence Number=SeqID_7728
  Gene Ontology: Mol. function=aspartic-type endopeptidase activity; Cellular component=chromatin; Biological process=DNA integration
  Homolog annotation: Hit_ID=Q10M70; Match level="QueryCoverage=80%, HitCoverage=13%, E-value=3e-45, Identity=67%"; Hit description =Retrotransposon protein, putative, Ty1-copia subclass, expressed
MSGGAPDTVRWHTGQSGAPDQRSLRCKPNSLSHTPRESHFTSLKRVLRYLWGFLDYDLLLRPFPTSELEGYTDADWAGCSDTPRSTYGYFVFLGANLVTWTAKRQPVVSRSSAEAEYRAVANGVAETSWLRQLLHELHSPLQRATLVYCHNVSAVYLSTNLV

SEQ ID NO: 13034 - protein, 186 aa, Zea mays
  misc_feature (107)..(107): Xaa can be any naturally occurring amino acid
  misc_feature (171)..(171): Xaa can be any naturally occurring amino acid
  Coding DNA Sequence Number=SeqID_7729
  Gene Ontology: Mol. function=transporter activity; Cellular component= mitochondrial inner membrane; Biological process=transport
  Homolog annotation: Hit_ID=P04709; Match level="QueryCoverage=76%, HitCoverage=36%, E-value=5e-45, Identity=69%"; Hit description=ADP ,ATP carrier protein 1, mitochondrial precursor
  Pfam annotation: Domain name=Mito_carr; Domain location=97-186; Score= -0.9; E_value=0.0037; Accession=PF00153.17; Description=Mitochondrial carrier protein
MRAPAMLRWAGGALVTHPTGLNRARWSYLTCAGSYVKDNRDPIICASVSSYERRSDTWILMNHILLCPSMTVSGGINVPVMRTPVCANATAEKGGKNFMIDYHDGSXSAAVANTDAAAIERVKLLIQNQDEMINSGRLSEPNKGIDDCFKRTINDDGVSSLGRGNTDNDNXYFTTKALNFAFKDYL

SEQ ID NO: 13035 - protein, 293 aa, Zea mays
  misc_feature (15)..(15): Xaa can be any naturally occurring amino acid
  misc_feature (201)..(201): Xaa can be any naturally occurring amino acid
  misc_feature (206)..(206): Xaa can be any naturally occurring amino acid
  misc_feature (210)..(210): Xaa can be any naturally occurring amino acid
  Coding DNA Sequence Number=SeqID_7730
  Gene Ontology: Mol. function=transferase activity, transferring phosphorus-containing groups; Cellular component=integral to membrane; Biological process=peptidyl-histidine phosphorylation
  Homolog annotation: Hit_ID=A9AC64; Match level="QueryCoverage=98%, HitCoverage=35%, E-value=1e-125, Identity=81%"; Hit description =Multi-sensor signal transduction histidine kinase precursor
  Pfam annotation: Domain name=HAMP; Domain location=44-113; Score =64.1; E_value=4.8e-16; Accession=PF00672.15; Description=HAMP domain
  Pfam annotation: Domain name=PAS_4; Domain location=136-236; Score =15.9; E_value=0.0057; Accession=PF08448.1; Description=PAS fold
  Pfam module annotation: Pfam domain module=HAMP::PAS_4; Domain location=44-113::136-236
MPAAQQPVPPTLAHXADAVQRAYREYQEKSLGRTGLRKMYIGTLTLALFLATFIAMMLALALGQQLARPLFLLAQGTKEITEGDYTPKREIKSRDELGFLTQSFNAMTRQLSEARLAVEKNRIALEHSKTYLESILANLTAGVFVLDRQFRLTTANRGAERIFRQPFGSMIGTALDRIGVVAEFGAMVRKAFADREAASDXGSGDXGHWXQQFAIEVPGEADPLTLLVRGTRLVSTVEGEADDPQTSGYVVVFDDISDVISAQRSVAWGEVARRLAHEIKNPLTPIQLSAERL

SEQ ID NO: 13036 - protein, 258 aa, Zea mays
  Coding DNA Sequence Number=SeqID_7731
  Gene Ontology: Mol. function=protein binding; Cellular component =integral to membrane; Biological process=protein amino acid phosphorylation
  Homolog annotation: Hit_ID=Q6K7X5; Match level="QueryCoverage=98%, HitCoverage=51%, E-value=2e-38, Identity=35%"; Hit description =Putative uncharacterized protein P0407A09.23
  Pfam annotation: Domain name=LRR_1; Domain location=10-32; Score=9.6; E_value=5.1; Accession=PF00560.23; Description=Leucine Rich Repeat
  Pfam annotation: Domain name=LRR_1; Domain location=108-130; Score =8.7; E_value=7.4; Accession=PF00560.23; Description=Leucine Rich Repeat
  Pfam annotation: Domain name=LRR_1; Domain location=132-154; Score =18.8; E_value=0.02; Accession=PF00560.23; Description=Leucine Rich Repeat
  Pfam annotation: Domain name=LRR_1; Domain location=156-178; Score =8.3; E_value=9; Accession=PF00560.23; Description=Leucine Rich Repeat
  Pfam annotation: Domain name=LRR_1; Domain location=206-228; Score =3.2; E_value=79; Accession=PF00560.23; Description=Leucine Rich Repeat
  Pfam annotation: Domain name=LRR_1; Domain location=230-252; Score =16.9; E_value=0.079; Accession=PF00560.23; Description=Leucine Rich Repeat
  Pfam annotation: Domain name=LRR_1; Domain location=34-55; Score=8.2; E_value=9.2; Accession=PF00560.23; Description=Leucine Rich Repeat
  Pfam annotation: Domain name=LRR_1; Domain location=57-79; Score =10.3; E_value=3.7; Accession=PF00560.23; Description=Leucine Rich Repeat
  Pfam annotation: Domain name=LRR_1; Domain location=83-105; Score =15.3; E_value=0.23; Accession=PF00560.23; Description=Leucine Rich Repeat
  Pfam module annotation: Pfam domain module=LRR_1::LRR_1::LRR_1::LRR _1::LRR_1::LRR_1::LRR_1::LRR_1::LRR_1; Domain location=10-32::108 -130::132-154::156-178::206-228::230-252::34-55::57-79::83-105
  Subcellular localization annotation: CTP_CleavageSite=72; ConfidenceScore=5.32e-01
CSRRPNHPDRVTALYLANLGLSGPIPASLGNLSFLSNLTLSTNYFSGGLPPLNRLRRLQVVDLRNNQLQSTMSDAVTNLPPDNLVALDLSENFITGEVPSSLGLLFKKLFFVQLANNALTGSIPPNLKNASQLKFLNLANNNLTGSIPSELGELSSMLYLFLGGNMLSGGIPGTLFNMSSLAILDVAVNMLGGVMEFPPYIRFSPILSAINMSQNLFEGDIPPALGNASNLIMLDMSQNKFTGQIPASLGNLEALTYL

SEQ ID NO: 13037 - protein, 137 aa, Zea mays
  misc_feature (8)..(8): Xaa can be any naturally occurring amino acid
  Coding DNA Sequence Number=SeqID_7732
  Gene Ontology: Mol. function=two-component response regulator activity; Cellular component=intracellular; Biological process=two -component signal transduction system (phosphorelay)
  Homolog annotation: Hit_ID=Q13WX3; Match level="QueryCoverage=98%, HitCoverage=63%, E-value=8e-63, Identity=94%"; Hit description=Two component transcriptional regulator, LuxR family
  Pfam annotation: Domain name=GerE; Domain location=74-131; Score =85.8; E_value=1.4e-22; Accession=PF00196.10; Description=Bacterial regulatory proteins, luxR family
  Pfam annotation: Domain name=Sigma70_r4; Domain location=73-121; Score=5.6; E_value=0.067; Accession=PF04545.6; Description=Sigma-70, region 4
  Pfam annotation: Domain name=Sigma70_r4_2; Domain location=67-119; Score=29.5; E_value=1.3e-05; Accession=PF08281.2; Description=Sigma -70, region 4
  Pfam module annotation: Pfam domain module=GerE::Sigma70_r4::Sigma70 _r4_2; Domain location=74-131::73-121::67-119
QERLIADXAALPIIFVTGHGDVPMAVSTMKKGAMDFIEKPFDEAELRKLVERMLDKARSESKSVQEQRAASERLSKLTAREQQVLERIIAGRLNKQIADDLGISIKTVEAHRANIMEKLNVNTVADLLRLALSKKQA

SEQ ID NO: 13038 - protein, 212 aa, Zea mays
  misc_feature (61)..(61): Xaa can be any naturally occurring amino acid
  misc_feature (67)..(67): Xaa can be any naturally occurring amino acid
  misc_feature (126)..(126): Xaa can be any naturally occurring amino acid
  misc_feature (203)..(203): Xaa can be any naturally occurring amino acid
  Coding DNA Sequence Number=SeqID_7733
  Gene Ontology: Mol. function=protein dimerization activity; Biological process=RNA-dependent DNA replication
  Homolog annotation: Hit_ID=O49010; Match level="QueryCoverage=96%, HitCoverage=56%, E-value=4e-79, Identity=74%"; Hit description =Herbicide safener binding protein
  Pfam annotation: Domain name=Dimerisation; Domain location=38-86; Score=53.1; E_value=9.6e-13; Accession=PF08100.2; Description =Dimerisation domain
MTIASLAMDSEDVRPNDAELLKEQADIWGVTLSYLTPLTLKCAEELAIPTAIYRHGGAASXAELVTXLSLPSTKLPILRRLLWFLAAMGGLSVDQHSSKEDRYHINPESYLLEDGIPHEDHMNHSXLWLTCTSTIYIKDMIDVYPEIKRDEVTTPLEELHVATLFHDSMASLDTDFHDMASEDLDAHDNFGIEIAMREIMDLXEGIQTMTYC

SEQ ID NO: 13039 - protein, 158 aa, Zea mays
  Coding DNA Sequence Number=SeqID_7734
  Gene Ontology: Mol. function=tetracycline:hydrogen antiporter activity; Cellular component=integral to membrane; Biological process=response to antibiotic
  Homolog annotation: Hit_ID=A6TFT5; Match level="QueryCoverage=100%, HitCoverage=31%, E-value=4e-36, Identity=51%"; Hit description =Multidrug resistance; probably membrane translocase
QVVKNATPTEAGLQLLPLMGGLLVTSIISGRMISRSGKYRLFPIAGTLLATTGMALMTTLTLDAPLWHIYLFSSVLGMGMGMTMQVLVLAVQNAVTPDRIGVATSSVTLFRSVGGSIGVALFGAVFSHVLKSGATRLIEQGNVLPPSLDPVAVNHLPA

SEQ ID NO: 13040 - protein, 198 aa, Zea mays
  misc_feature (181)..(181): Xaa can be any naturally occurring amino acid
  Coding DNA Sequence Number=SeqID_7735
  Gene Ontology: Mol. function=N-isopropylammelide isopropylaminohydrola se activity; Cellular component=cytoplasm
  Homolog annotation: Hit_ID=P77554; Match level="QueryCoverage=93%, HitCoverage=40%, E-value=3e-99, Identity=99%"; Hit description =Uncharacterized protein yahJ
CCGPAPLEQKMLPELQPYTQERAEKLIDLLQSKGTTIARSHCNIEPVSGLKNLQNLQAVLARRQAGFECEIVAFPQHGLLLSKSEPLMREAMQAGAHYVGGLDPTSVDGAMEKSLDTMFQIALDYDKGVDIHLHETTPAGVAAINYMVETVEKTPQLKGKLTISHAFALATLNEQQVDELXNRMVVQQISIAHGADCT

SEQ ID NO: 13041 - protein, 440 aa, Zea mays
  misc_feature (14)..(14): Xaa can be any naturally occurring amino acid
  misc_feature (18)..(18): Xaa can be any naturally occurring amino acid
  misc_feature (24)..(24): Xaa can be any naturally occurring amino acid
  misc_feature (33)..(33): Xaa can be any naturally occurring amino acid
  misc_feature (267)..(267): Xaa can be any naturally occurring amino acid
  misc_feature (294)..(294): Xaa can be any naturally occurring amino acid
  misc_feature (300)..(300): Xaa can be any naturally occurring amino acid
  misc_feature (316)..(316): Xaa can be any naturally occurring amino acid
  misc_feature (342)..(342): Xaa can be any naturally occurring amino acid
  misc_feature (361)..(361): Xaa can be any naturally occurring amino acid
  misc_feature (389)..(389): Xaa can be any naturally occurring amino acid
  misc_feature (392)..(393): Xaa can be any naturally occurring amino acid
  misc_feature (419)..(419): Xaa can be any naturally occurring amino acid
  misc_feature (421)..(421): Xaa can be any naturally occurring amino acid
  misc_feature (423)..(423): Xaa can be any naturally occurring amino acid
  misc_feature (430)..(434): Xaa can be any naturally occurring amino acid
  misc_feature (436)..(436): Xaa can be any naturally occurring amino acid
  Coding DNA Sequence Number=SeqID_7736
  Subcellular localization annotation: CTP_CleavageSite=46; ConfidenceScore=5.20e-01
LLCIVLTFPLSILXHFSXSSLISXPFLSPLSFXLSPLALLSLLHLPLMLHPRSLWLSLLHTPHCAASLIIPPFRLPPRSALVPLPSYLSLIPLVLSPLFCPLRRWPFFHVFLLFFLRFVLFLSLSLLSYSLLLRRTPPHSPSSAPSPGLVLPPSPLLHPYLSLPPYRFTVCCVTLPSILSPHSPTLSPLLYSIHSSHFSSTHPFSSLLSPPPLPSFLSSSSSLFLPLSLLFFHFFSNHSLTLFLSSLPSPPLPHSLLSPPSHLSPLXYLLILLPSPLLLSLPLPLLPHTFPSLXSFSLSXLLSHQNKQPFLSFLPXLSFSSPSFLPFSFPSSISSLLPLSPXPLPPPSPSSFPLFFSSLPXFLPFFFLPLLPPFLFPLPSPSPLLLFFXPPXXLSSPPLSSPPSQHTPLLSLFSLSPPXSXPXPPLFLGXXXXXPXFRVG

SEQ ID NO: 13042 - protein, 123 aa, Zea mays
  misc_feature (1)..(15): Xaa can be any naturally occurring amino acid
  Coding DNA Sequence Number=SeqID_766
XXXXXXXXXXXXXXXVVASSHTVRRIGEREEGRPPRGLITTSRHVVRVVHQRMRKKHSFTTKSSWGKRFIASDGDDAGVRRLAATCAPRRSTLPPSASEVTSYLKSKLVPGISSARSRTGTTG

SEQ ID NO: 13043 - protein, 251 aa, Zea mays
  Coding DNA Sequence Number=SeqID_768
  Gene Ontology: Mol. function=monooxygenase activity; Cellular component=cytoplasmic vesicle membrane; Biological process=electron transport
  Homolog annotation: Hit_ID=Q8W0R4; Match level="QueryCoverage=84%, HitCoverage=86%, E-value=1e-61, Identity=66%"; Hit description =Putative cytochrome P450-like protein
DECIQTNHLVDRIGNGYGLRISCCSVCERFDQRLPPGSRGLPLVGETLEFFTASPTLELLPFFKRRLERYGPIFRTSVVGEDLVVSLDPELSRRALQEEERAFQIWYPPSFLRVLGADSIVSALGPLHRHIRALVLRLFGPESLRLVLLRDVQRSARTELRSWLRRPGPGVDVRAATSRVCRPCVHSLSAFNPWRWKGRTVESAGGSKDFMAFGAGLRLCVGADFAKLQMAIFLHCLVTKYRWRERLAEAQ

SEQ ID NO: 13044 - protein, 313 aa, Zea mays
  misc_feature (248)..(248): Xaa can be any naturally occurring amino acid
  Coding DNA Sequence Number=SeqID_769
  Gene Ontology: Mol. function=L-ascorbate peroxidase activity; Cellular component=chloroplast; Biological process=hydrogen peroxide catabolic process
  Homolog annotation: Hit_ID=P0C0L1; Match level="QueryCoverage=93%, HitCoverage=97%, E-value=1e-144, Identity=85%"; Hit description =Probable L-ascorbate peroxidase 6, chloroplast precursor
  Pfam annotation: Domain name=peroxidase; Domain location=50-282; Score=176.5; E_value=7e-50; Accession=PF00141.13; Description =Peroxidase
MAVHYLLRRGVSGGSLLHPIRGLFLASKELGRRPLGSAAAGDAAAELRGAREDVRQLLKATSCHPILVRLGWHDAGTYDKNITEWPKCGGANGSLRFEVELKHGANAGLVNALKLIQPIKDKFSGVTYADLFQLASATAIEEAGGPKIPMIYGRVDVIAPEQCPPEGRLPAAGPPSPAEHLREVFYRMGLNDKEIVALSGAHTLGRARPERSGWGKSETKYTKDGPGAPGGQSWTSQWLKFDNSYFKXIEERRDEDLLVLPTDAVLFEDSSFKIYATKYAKDQDTFFEDYAEAHAKLSNLGAKFDPPKGISLE

SEQ ID NO: 13045 - protein, 172 aa, Zea mays
  Coding DNA Sequence Number=SeqID_770
  Gene Ontology: Mol. function=lipid binding; Cellular component =extracellular region; Biological process=lipid transport
  Homolog annotation: Hit_ID=A2YDU2; Match level="QueryCoverage=62%, HitCoverage=72%, E-value=7e-20, Identity=49%"; Hit description=Non -specific lipid-transfer protein
  Pfam annotation: Domain name=Tryp_alpha_amyl; Domain location=49-136; Score=82.3; E_value=1.6e-21; Accession=PF00234.12; Description =Protease inhibitorseed storageLTP f
  Subcellular localization annotation: CTP_CleavageSite=19; ConfidenceScore=5.06e-01
LLPLLSPGPRPAISLKEKSAAMKTTSSGIAVVLLVAMLAVQSAVADISCSDVLNDLSPCLPFLQGKAAKPSESNNQCCDGVRTLYAAADTRPDRQATCRCLKAAYVQVHAVLSAAQELPGDCGLSLSYNITPDIDCDKFQSEESLASPSSNRTKNDRMKGYCSLTRIHTTGW

SEQ ID NO: 13046 - protein, 67 aa, Zea mays
  Coding DNA Sequence Number=SeqID_771
  Homolog annotation: Hit_ID=Q6ZL32; Match level="QueryCoverage=91%, HitCoverage=74%, E-value=3e-21, Identity=71%"; Hit description =Putative uncharacterized protein OJ1699_E05.1
MAAWMRSLFSPLKKLWIRMHSAHSKRRGIYILYEDVKSCPCEDVHILWSILVDSSHSRPPPMRLDHH

SEQ ID NO: 13047 - protein, 180 aa, Zea mays
  Coding DNA Sequence Number=SeqID_772
  Gene Ontology: Mol. function=DNA binding; Biological process =regulation of transcription, DNA-dependent
  Homolog annotation: Hit_ID=Q2QMT5; Match level="QueryCoverage=53%, HitCoverage=27%, E-value=2e-20, Identity=55%"; Hit description=B3 DNA binding domain containing protein
  Pfam annotation: Domain name=B3; Domain location=2-85; Score=38.4; E _value=2.6e-08; Accession=PF02362.12; Description=B3 DNA binding domain
EKFVSDPNGQLTETLSLKSPSGATWLVDVARNADADELLLGSGWGDFARAHELQEDDLVVFTRGGGGGSGSGCSFDVLVLDSSGCEKAPCFFAANKVHGRFSGGGRRQAARRRVFRGPEPEGLGAQLRLAAAAASTHGASTSKQKCGETDKPSRAERFDIMKRDGCGFNEIEAQARVSPL

SEQ ID NO: 13048 - protein, 202 aa, Zea mays
  misc_feature (94)..(94): Xaa can be any naturally occurring amino acid
  Coding DNA Sequence Number=SeqID_773
  Gene Ontology: Mol. function=metalloendopeptidase activity; Cellular component=mitochondrial matrix; Biological process=protein maturation via proteolysis
  Homolog annotation: Hit_ID=Q10SC2; Match level="QueryCoverage=51%, HitCoverage=15%, E-value=1e-28, Identity=53%"; Hit description=FHA domain containing protein, expressed
MAPPNLHAPARAPANGRRGHPRAMALDPCGDLVVTPKTAAKDKASCSVPMPPKVTPDEVCAVARKFMDQPIQETEPDVWAVLTAISKKARLRPXISGMHCKIYRDTVLGELNHHEPMPVFLKDTSERGLRRKTIQSGSGNLCVHRLQGTFPDNTYGVDSGGNPNEIPKLTFEDSKEFNIKYYHPSNARIWFYGDDDPKEHTF

SEQ ID NO: 13049 - protein, 172 aa, Zea mays
  Coding DNA Sequence Number=SeqID_774
  Gene Ontology: Mol. function=transferase activity, transferring hexosyl groups; Cellular component=endoplasmic reticulum; Biological process=carbohydrate metabolic process
  Homolog annotation: Hit_ID=A5AJP8; Match level="QueryCoverage=96%, HitCoverage=98%, E-value=7e-67, Identity=77%"; Hit description =Putative uncharacterized protein
  Pfam annotation: Domain name=Glyco_tran_28_C; Domain location=8-166; Score=121.6; E_value=2.3e-33; Accession=PF04101.6; Description =Glycosyltransferase family 28 C-terminal domain
MADREHRTVFVTVGTTCFDALVMAVDSPEVKKALLQKGYSNLLIQMGRGTYVPLKVSGDATLQVDHFTFSPSIADNMRTASLVISHAGSGSIFETLRLGKPLIVVVNEDLMDNHQSELAEELAERKHLFCARPQTLGETIRAMDLETLVPYEPGDAKPVVTLINRFLGFPVD

SEQ ID NO: 13050 - protein, 210 aa, Zea mays
  misc_feature (195)..(195): Xaa can be any naturally occurring amino acid
  Coding DNA Sequence Number=SeqID_775
  Homolog annotation: Hit_ID=A2YRI9; Match level="QueryCoverage=15%, HitCoverage=32%, E-value=2e-07, Identity=57%"; Hit description =Putative uncharacterized protein
AGARGGMHCGEAWRRRLNPSEKARGEAADAAVGPRGPAPPPAQGAHRPRHASRINKQQPPLNPNPPSPLLCCRIPTHSHRLQQPTQRHQQRHQQERDRRSHDKGRRRRHEVLLPSAEDARRRCCRRHYQAHWWRLQEGGGAPPQEGRARHQRPPSPRSRRWQPPEAEAEQRERAGREFDMDTRYGPCLDVTRAQXWRRADEQPCLWEGRV

SEQ ID NO: 13051 - protein, 192 aa, Zea mays
  misc_feature (137)..(137): Xaa can be any naturally occurring amino acid
  misc_feature (140)..(140): Xaa can be any naturally occurring amino acid
  misc_feature (151)..(151): Xaa can be any naturally occurring amino acid
  Coding DNA Sequence Number=SeqID_776
  Subcellular localization annotation: CTP_CleavageSite=42; ConfidenceScore=5.01e-01
LAATLSRQVPSRNPRLRRRRSPEMASSPPRAPQLFPFDLNVAQEEVDEEPIEVLEEDVDEEGAPLAQPEEVVVEEVVEKLVEHAVPTTEDEPAEDVIMEEPSEEVIMEDEEPTPSPAEEVVGEGKRRKKRVDYEVFXSAXIRIRSPNPHPXRFPTSLKPRPLQRARPTRRRSLGYLYLLDMPPSSRPPSPQP

SEQ ID NO: 13052 - protein, 111 aa, Zea mays
  Coding DNA Sequence Number=SeqID_778
  Gene Ontology: Mol. function=transcription activator activity; Cellular component=nucleus; Biological process=regulation of transcription, DNA-dependent
  Homolog annotation: Hit_ID=A7P9U2; Match level="QueryCoverage=96%, HitCoverage=89%, E-value=3e-35, Identity=65%"; Hit description =Chromosome chr14 scaffold_9, whole genome shotgun sequence
MRESINRPPTPSAVEDRDKEPSLVEIINIKFVESGEKEKLTELLRERLVECGWMDEMKAFCRDYVRKKGRNNVRVDDLIHVIVPKGRASVPDSVKAELLQRIRSFMATTLQ

SEQ ID NO: 13053 - protein, 96 aa, Zea mays
  Coding DNA Sequence Number=SeqID_779
AMHVQAEPATDLPCLPKHKHHPDDQNNTIVACNGALHVFYQVGSYEYDSPAPCWTGISVASYSKLRFMRLCLHIDLSFLSWQAAEWHASTQKTSPV

SEQ ID NO: 13054 - protein, 302 aa, Zea mays
  Coding DNA Sequence Number=SeqID_781
  Subcellular localization annotation: CTP_CleavageSite=23; ConfidenceScore=5.45e-01
NILIEKHSPSSSWCSLCSLSDARCSSSPNRRAPPRAIPSAGRPWCLASCSPFQLLLPWIVNPSLTKSDLVHGGSPELSLPCRRVLLTCAIAQLAALSACLAMATAPWSLPALAPKLGPPPPFIWIPVLLAVELPARTYLPRYLRRRSSPCRALARLEIPLPSNSPQPSRAHASPYAQSRSSALSTGAQPLLCSSLCLLGRSRRAELSARAQLRGRALLSARWPQLRVSLCNVTKSACCRCRASCIVCSMKISSLWTAHARAEFGLADCSVCSLGPIGVKSLSWRGNVVLIAVAVLATEQSAP

SEQ ID NO: 13055 - protein, 489 aa, Zea mays
  misc_feature (31)..(31): Xaa can be any naturally occurring amino acid
  misc_feature (57)..(57): Xaa can be any naturally occurring amino acid
  misc_feature (60)..(60): Xaa can be any naturally occurring amino acid
  misc_feature (73)..(73): Xaa can be any naturally occurring amino acid
  misc_feature (99)..(99): Xaa can be any naturally occurring amino acid
  misc_feature (141)..(141): Xaa can be any naturally occurring amino acid
  misc_feature (178)..(178): Xaa can be any naturally occurring amino acid
  misc_feature (207)..(207): Xaa can be any naturally occurring amino acid
  misc_feature (214)..(214): Xaa can be any naturally occurring amino acid
  misc_feature (246)..(246): Xaa can be any naturally occurring amino acid
  misc_feature (306)..(306): Xaa can be any naturally occurring amino acid
  misc_feature (313)..(313): Xaa can be any naturally occurring amino acid
  misc_feature (315)..(315): Xaa can be any naturally occurring amino acid
  misc_feature (344)..(344): Xaa can be any naturally occurring amino acid
  misc_feature (350)..(350): Xaa can be any naturally occurring amino acid
  misc_feature (363)..(363): Xaa can be any naturally occurring amino acid
  misc_feature (371)..(371): Xaa can be any naturally occurring amino acid
  misc_feature (393)..(393): Xaa can be any naturally occurring amino acid
  misc_feature (412)..(412): Xaa can be any naturally occurring amino acid
  misc_feature (422)..(422): Xaa can be any naturally occurring amino acid
  misc_feature (425)..(425): Xaa can be any naturally occurring amino acid
  misc_feature (435)..(435): Xaa can be any naturally occurring amino acid
  misc_feature (444)..(444): Xaa can be any naturally occurring amino acid
  misc_feature (471)..(471): Xaa can be any naturally occurring amino acid
  misc_feature (473)..(480): Xaa can be any naturally occurring amino acid
  misc_feature (483)..(485): Xaa can be any naturally occurring amino acid
  misc_feature (488)..(489): Xaa can be any naturally occurring amino acid
  Coding DNA Sequence Number=SeqID_7738
  Subcellular localization annotation: CTP_CleavageSite=103; ConfidenceScore=5.23e-01
FLMRYFTVLRSARVLVVLATSRTPSPLCHYXLYVLSPNLRAPSFLLLFSPRSLTLAXSPXPSFFSLRYTFSTXTSRSLHLRVVYTYLRLLSLLLLPLPXVLFSLSSYSARPFLTPVFLVSFLAYSSFSGLSPSFAFLLSSXLPSLSLLSRPLTLSLLLLLYSSLHSHTLSFRFFSSFXCHFSPSLFFFLFSLSLLLFSFPLLSYSLXSPALPSXFPFLSFSCLASCSSSLFVSSFSLPLLFCSASXALPSLPLLSSSLSPRPLSLSSFSLSSFLLLPLLPPAFVLLSSLSSFPPSLSLALSRPLSXPLSPSLXAXSLPRALLLSPLSVSLSPLWLAASRRRSAXPSFSLXLVSSPLPLLPSSXSLSSPSSXLSPPVLLLVLPSRPSSSLSRRXPCSSSSFPLRSASPPPACXFCLSLSSLLXPVXPLSPSRVVSXLPLLFSLLXLSSPLFSFPLFSLSLLFSPLSFVVLCXIXXXXXXXXLLXXXARXX

SEQ ID NO: 13056 - protein, 192 aa, Zea mays
  misc_feature (68)..(68): Xaa can be any naturally occurring amino acid
  misc_feature (84)..(84): Xaa can be any naturally occurring amino acid
  misc_feature (146)..(146): Xaa can be any naturally occurring amino acid
  Coding DNA Sequence Number=SeqID_7740
  Gene Ontology: Mol. function=structural molecule activity; Cellular component=chloroplast; Biological process=response to abscisic acid stimulus
  Homolog annotation: Hit_ID=Q6K439; Match level="QueryCoverage=97%, HitCoverage=57%, E-value=4e-61, Identity=67%"; Hit description =Probable plastid-lipid-associated protein 2, chloroplast precursor
  Pfam annotation: Domain name=PAP_fibrillin; Domain location=8-187; Score=127.6; E_value=3.6e-35; Accession=PF04755.3; Description=PAP _fibrillin
PSEAREAAAVKEHLKDYLYGTKSCLRASRESRTKVLQLITQLETLNPTPAPTEVLTLLNGKWILAYTXSFSHLFPLLRMVNLPXLLKVQEISQTIDSENFTVQNCIKISRPLSTTSVATSAEFEIIESQASCRSKFDERTVDTPQXTDSIVLPQKFELCGQNINLSPLKGILSSIKNAASSGVQTISDQTPI

SEQ ID NO: 13057 - protein, 188 aa, Zea mays
  misc_feature (84)..(84): Xaa can be any naturally occurring amino acid
  misc_feature (123)..(123): Xaa can be any naturally occurring amino acid
  misc_feature (139)..(139): Xaa can be any naturally occurring amino acid
  misc_feature (149)..(149): Xaa can be any naturally occurring amino acid
  Coding DNA Sequence Number=SeqID_7741
  Gene Ontology: Cellular component=extracellular region; Biological process=response to biotic stimulus
  Homolog annotation: Hit_ID=O82086; Match level="QueryCoverage=86%, HitCoverage=100%, E-value=2e-61, Identity=71%"; Hit description =Pathogenesis related protein-1
  Pfam annotation: Domain name=SCP; Domain location=56-176; Score=20.5; E_value=0.0028; Accession=PF00188.16; Description=SCP-like extracellular protein
MPPITHWTCTRRLLIITSLFTKQQTMGPRLACLLTLAMAAIDVAPCTAQNSPQDYVDPHNTARADVAAGPGSCDDTDAAYAQRXPVQRQGDCQLIHSGGPYAENLFWASAVAHCAGSHVGVSXVAQKQYYDHDTNRWAXGQVCDHYTRXTGLDSTAIACARVDCDNNVGVFIICSYNPPRNSRRREPY

SEQ ID NO: 13058 - protein, 234 aa, Zea mays
  misc_feature (2)..(3): Xaa can be any naturally occurring amino acid
  misc_feature (7)..(9): Xaa can be any naturally occurring amino acid
  misc_feature (218)..(219): Xaa can be any naturally occurring amino acid
  misc_feature (221)..(223): Xaa can be any naturally occurring amino acid
  Coding DNA Sequence Number=SeqID_7742
  Gene Ontology: Mol. function=hydrolase activity, acting on glycosyl bonds; Cellular component=integral to membrane; Biological process =cell wall organization and biogenesis
  Homolog annotation: Hit_ID=A7PDT4; Match level="QueryCoverage=100%, HitCoverage=47%, E-value=1e-113, Identity=82%"; Hit description =Chromosome chr11 scaffold_13, whole genome shotgun sequence
  Pfam annotation: Domain name=Glyco_hydro_28; Domain location=1-230; Score=-100.7; E_value=0.00039; Accession=PF00295.8; Description =Glycosyl hydrolases family 28
TXXPYDXXXITIKNVTILAPTFEAPNTDGIDPDSCEDMLIEDCYISVGDDAIAINSGWDQYGIAYGKPSMNIMIRNLVVRSMVSAGISIGSEMSGGVSNVTVENLLVWDSRRAVRIKTAPGRGGYVRQITYRNLTFENVRVGIVMKTDYNEHPDDGYDPTALPIIRDISFTTVHGHGVRVPVRIHGSEEISVRNVTFRDMSVGLTYKKKHIFQCAFVXXRXXXTIFPAPCENLD

SEQ ID NO: 13059 - protein, 174 aa, Zea mays
  misc_feature (158)..(158): Xaa can be any naturally occurring amino acid
  misc_feature (170)..(170): Xaa can be any naturally occurring amino acid
  misc_feature (174)..(174): Xaa can be any naturally occurring amino acid
  Coding DNA Sequence Number=SeqID_7743
  Gene Ontology: Mol. function=protein serine/threonine kinase activity; Cellular component=cytoplasm; Biological process=protein amino acid phosphorylation
  Homolog annotation: Hit_ID=A0MNJ4; Match level="QueryCoverage=95%, HitCoverage=37%, E-value=3e-68, Identity=77%"; Hit description=CBL -interacting protein kinase 7
  Pfam annotation: Domain name=Pkinase; Domain location=19-173; Score =50.1; E_value=7.8e-12; Accession=PF00069.15; Description=Protein kinase domain
  Pfam annotation: Domain name=Pkinase_Tyr; Domain location=19-174; Score=-69.4; E_value=3.7e-08; Accession=PF07714.7; Description =Protein tyrosine kinase
  Pfam module annotation: Pfam domain module=Pkinase::Pkinase_Tyr; Domain location=19-173::19-174
MCDNKGNSEGHSTLLLGKYELGRVLGHGTFAKVYHARNLQTGKNVAMKVVGKEKVIKVGMMEQIKREIAVMKMVKHPNIVELHEVMATKSKIYIAMELVRGGELFNKVAKGRLKEDIARVYFQQLISAIDFFHSRGVYHRDLRPENLLLDEHGNLKVXDFGLSTFSEHLXQDGX

SEQ ID NO: 13060 - protein, 167 aa, Zea mays
  misc_feature (146)..(146): Xaa can be any naturally occurring amino acid
  misc_feature (151)..(151): Xaa can be any naturally occurring amino acid
  Coding DNA Sequence Number=SeqID_7744
  Gene Ontology: Mol. function=nucleic acid binding; Cellular component= cytoplasm; Biological process=ribosome biogenesis and assembly
  Homolog annotation: Hit_ID=A7PIB7; Match level="QueryCoverage=100%, HitCoverage=45%, E-value=2e-73, Identity=80%"; Hit description =Chromosome chr13 scaffold_17, whole genome shotgun sequence
  Pfam annotation: Domain name=zf-CCCH; Domain location=89-114; Score =22.6; E_value=0.0014; Accession=PF00642.15; Description=Zinc finger C-x8-C-x5-C-x3-H type (and similar)
MPPKQKSKADVAKKQKVVEDKTFGLKNKNKSKQVQKYVQNLQQSVQPRPDASKVDAKKRKEEEKAKDKELNDLFKIAVSQPKVPVGVDPKSILCEFFKVGQCAKGFKCKFSHDLNVQRKGEKIDIYSDKRDQETMEDWDQETLEKXVESKXTEYNQNKPTDIVCKHF

SEQ ID NO: 13061 - protein, 181 aa, Zea mays
  Coding DNA Sequence Number=SeqID_7745
  Gene Ontology: Mol. function=endonuclease activity; Cellular component=cytoplasm; Biological process=regulation of translational termination
  Homolog annotation: Hit_ID=A7P0Q8; Match level="QueryCoverage=100%, HitCoverage=100%, E-value=4e-72, Identity=75%"; Hit description =Chromosome chr19 scaffold_4, whole genome shotgun sequence
  Pfam annotation: Domain name=Ribonuc_L-PSP; Domain location=63-181; Score=214.8; E_value=2e-61; Accession=PF01042.11; Description =Endoribonuclease L-PSP
  Subcellular localization annotation: CTP_CleavageSite=47; ConfidenceScore=5.29e-01
MASWCAARTFQIPGMNVAVLRRRASWASGIGGVSVAGTAMWRCSPAKCMSISTDTRIREAVQTEKAPAALGPYSQAIKTNDLLFVSGVLGLVPETGKFISDNVEDQTEQLLRNMGEILKAGGASYSSVVKTTILLADLKDFKQVNEIYAKYFPSPAPARSTYQVAALPLDAKIEIECIAAL

SEQ ID NO: 13062 - protein, 210 aa, Zea mays
  misc_feature (185)..(186): Xaa can be any naturally occurring amino acid
  Coding DNA Sequence Number=SeqID_7746
  Gene Ontology: Mol. function=fructose-bisphosphate aldolase activity; Cellular component=cytoplasm; Biological process=metabolic process
  Homolog annotation: Hit_ID=A9P9L3; Match level="QueryCoverage=100%, HitCoverage=58%, E-value=1e-102, Identity=90%"; Hit description =Putative uncharacterized protein
  Pfam annotation: Domain name=Glycolytic; Domain location=11-210; Score=296.1; E_value=6.8e-86; Accession=PF00274.9; Description =Fructose-bisphosphate aldolase class-I
MSNFKSKYHDELIANAAYIGTPGKGILAADESTGTIGKRLASIKVENVESNRRALRELLFTAPGALQYLSGVILFEETLYQSTAAGKPFVDVLKEAGVLPGIKVDKGTVELAGTNGETTTQGLDGLAQRCQKYYEAGARFAKWRAVLKIGPNEPSQLAINENAYGLARYAVICQENGLVPIVEPXXLVDGPHDIHKCADVTERVLAACYK

SEQ ID NO: 13063 - protein, 194 aa, Zea mays
  misc_feature (119)..(119): Xaa can be any naturally occurring amino acid
  misc_feature (127)..(127): Xaa can be any naturally occurring amino acid
  misc_feature (156)..(156): Xaa can be any naturally occurring amino acid
  misc_feature (165)..(165): Xaa can be any naturally occurring amino acid
  misc_feature (174)..(176): Xaa can be any naturally occurring amino acid
  misc_feature (180)..(182): Xaa can be any naturally occurring amino acid
  misc_feature (193)..(194): Xaa can be any naturally occurring amino acid
  Coding DNA Sequence Number=SeqID_7747
  Gene Ontology: Mol. function=protein binding; Cellular component =cytoplasm; Biological process=porphyrin biosynthetic process
  Homolog annotation: Hit_ID=Q0UVK8; Match level="QueryCoverage=98%, HitCoverage=58%, E-value=1e-74, Identity=70%"; Hit description =Putative uncharacterized protein
  Pfam annotation: Domain name=Carb_kinase; Domain location=31-192; Score=-3.3; E_value=1.5e-06; Accession=PF01256.8; Description =Carbohydrate kinase
MASVRKEVLSKVHKMIPPMLESFHKGQLGRVGVIGGSEDYTGAPYFSGMASARLGCDMSHVICEPGAAAVIKTYSPNLMVHPYMRSSKHLDDKDTQDSVSEMVISMLSRLHVLVIGPGXGRDEAMQXTCARVIKEARKLNLPFVLDADGLFIAQTXPELVEGYKXCILTPNVVXXXRLAXXXGVHISGGDPTXX

SEQ ID NO: 13064 - protein, 206 aa, Zea mays
  misc_feature (151)..(151): Xaa can be any naturally occurring amino acid
  misc_feature (173)..(173): Xaa can be any naturally occurring amino acid
  misc_feature (181)..(182): Xaa can be any naturally occurring amino acid
  misc_feature (185)..(187): Xaa can be any naturally occurring amino acid
  misc_feature (190)..(190): Xaa can be any naturally occurring amino acid
  misc_feature (197)..(198): Xaa can be any naturally occurring amino acid
  misc_feature (201)..(203): Xaa can be any naturally occurring amino acid
  Coding DNA Sequence Number=SeqID_7748
  Gene Ontology: Mol. function=oxidoreductase activity; Biological process=aromatic compound metabolic process
  Homolog annotation: Hit_ID=A7P5K6; Match level="QueryCoverage=94%, HitCoverage=45%, E-value=3e-60, Identity=60%"; Hit description =Chromosome chr4 scaffold_6, whole genome shotgun sequence
MVGEGGKPKAVIVGGSIAGMSCAHTLTLAGWEVLVLEKTTSPPTGSPTGAGLGLNPLSLRIIQSWLPQPQLLHNTTVPLTIDQNQATNSEKNVSCTLTRDESFNFKAAHWADLHGLLYDALPPYVFLWGHLSLSFHVADDKGSVMIKAKVXKTGEVIEIVGDLLVAADGCLSXIRQKYIPXXKLXXXGYXAWRGVLXXSEXXXYQS

SEQ ID NO: 13065 - protein, 133 aa, Zea mays
  misc_feature (12)..(12): Xaa can be any naturally occurring amino acid
  misc_feature (29)..(29): Xaa can be any naturally occurring amino acid
  Coding DNA Sequence Number=SeqID_7749
  Gene Ontology: Mol. function=actin binding; Cellular component=actin cytoskeleton; Biological process=actin cytoskeleton organization and biogenesis
  Homolog annotation: Hit_ID=O04725; Match level="QueryCoverage=100%, HitCoverage=100%, E-value=4e-41, Identity=64%"; Hit description =Profilin
  Pfam annotation: Domain name=Profilin; Domain location=2-128; Score =113.4; E_value=7e-31; Accession=PF00235.9; Description=Profilin
MSWQAYVDEHLXMCEIEGHHLVEGVMRPXHTSAAWAHSTAFPEFKTDDMANIMKDFDKPGHLAPTGLFLGPTNHMCIQCEPGVFIPGHKGSRGITWNNTRQALVGGIYDEAMTPGHCNMVVEMLGDYLLEQGM

SEQ ID NO: 13066 - protein, 249 aa, Zea mays
  Coding DNA Sequence Number=SeqID_7750
  Gene Ontology: Mol. function=monosaccharide-transporting ATPase activity; Cellular component=plasma membrane; Biological process =carbohydrate transport
  Homolog annotation: Hit_ID=B0J8U2; Match level="QueryCoverage=94%, HitCoverage=45%, E-value=5e-52, Identity=45%"; Hit description=ABC transporter related
  Pfam annotation: Domain name=ABC_tran; Domain location=1-80; Score= -20.6; E_value=3.6e-05; Accession=PF00005.17; Description=ABC transporter
LIAGLSVAEQQLVHICRVLQRAPRVVVLDEPTAALARHEVQALFRVIERMRQQGIALIYVSHYLDEIQALCQRVTVLRDGKDVAHFTGDALSPQALINAMIGETQQAIAPRGLPPDGEPVLTVDALSAPGRFHNVCFSARRGEIVGITGLLGSGGKALISALFGLERGVSGTLRVGETHGVPASPHAAVKRGIALVPEDRRANGIALDVSLRDNITLTTGQRLLRWGGVFRNRRDRASGGQHPPDGDPH

SEQ ID NO: 13067 - protein, 112 aa, Zea mays
  misc_feature (33)..(33): Xaa can be any naturally occurring amino acid
  misc_feature (66)..(67): Xaa can be any naturally occurring amino acid
  misc_feature (98)..(98): Xaa can be any naturally occurring amino acid
  misc_feature (102)..(105): Xaa can be any naturally occurring amino acid
  Coding DNA Sequence Number=SeqID_7751
  Gene Ontology: Mol. function=threonine endopeptidase activity; Cellular component=proteasome core complex; Biological process =ubiquitin-dependent protein catabolic process
  Homolog annotation: Hit_ID=Q45NI9; Match level="QueryCoverage=100%, HitCoverage=61%, E-value=1e-47, Identity=83%"; Hit description =Proteasome subunit
  Pfam annotation: Domain name=Proteasome; Domain location=1-105; Score= -44.6; E_value=0.0046; Accession=PF00227.16; Description=Proteasome A- type and B-type
VTLADKARVCTQRSWKLPYGVGLLVRGLNESRXHLYYNCPSGNYFEYQAFAIGSRSQSAKTYLERXXGNFMGSSREDLIKDALIATRESLQGEKLRSXVCTXXXXGVGEPFH

SEQ ID NO: 13068 - protein, 330 aa, Zea mays
  Coding DNA Sequence Number=SeqID_7752
  Gene Ontology: Mol. function=aspartic-type endopeptidase activity; Cellular component=chromatin; Biological process=chromatin assembly or disassembly
  Homolog annotation: Hit_ID=Q8SA91; Match level="QueryCoverage=100%, HitCoverage=13%, E-value=1e-111, Identity=56%"; Hit description =Putative gag-pol polyprotein
  Pfam annotation: Domain name=RVT_1; Domain location=124-293; Score =140.5; E_value=4.9e-39; Accession=PF00078.17; Description=Reverse transcriptase (RNA-dependent
MEIHWKNKWMLLPYNNTKVLLQGNLPEHPPHTVVQLLPLTAACFAVDFSQFPEDLQAVLSEFSDLFQQPEGLPPSRACDHAIPLIPGARPVSIRPYRYPPTLKTEIETQVQAMLSSGIIQHSTSEFNSPVLMVKKKDNSWRFCVDFRHLNAMTVKRQFPIPVIEDIFQELAGASWFTKLDLWSGFHQIMLQPGEEHKTAFSTHEGHFEFRVLAFGLTGAPATFQGAMNATLKPLLRRCVLVFFDDILVYSTDYQSHLLHLHQVLSLLAAEHWKIKFSKCSFAQRQTTYLGHLISSNGIATDPTKISTIVSWPVPSSVKELRSFLGLAGYY

SEQ ID NO: 13069 - protein, 131 aa, Zea mays
  Coding DNA Sequence Number=SeqID_7753
  Homolog annotation: Hit_ID=A0B1R1; Match level="QueryCoverage=100%, HitCoverage=28%, E-value=2e-43, Identity=69%"; Hit description=Type III secretion apparatus protein, YscD/HrpQ family
QVGALAVTVQNHGGDGGAPVLFNDEPLGAGRRSMTPQDVVTVGSIKLGIARHAQASVAVPDEADAPDAAREAAWLGWLTGGLRRLGSRRLVIALVALWIGVLLGALGYGFVAWSGRLPWQHESVLARTHRL

SEQ ID NO: 13070 - protein, 192 aa, Zea mays
  misc_feature (4)..(4): Xaa can be any naturally occurring amino acid
  misc_feature (14)..(14): Xaa can be any naturally occurring amino acid
  misc_feature (50)..(50): Xaa can be any naturally occurring amino acid
  misc_feature (72)..(72): Xaa can be any naturally occurring amino acid
  misc_feature (150)..(150): Xaa can be any naturally occurring amino acid
  Coding DNA Sequence Number=SeqID_7754
  Gene Ontology: Mol. function=voltage-gated anion channel activity; Cellular component=mitochondrial outer membrane; Biological process =anion transport
  Homolog annotation: Hit_ID=P42057; Match level="QueryCoverage=98%, HitCoverage=68%, E-value=2e-61, Identity=65%"; Hit description=Outer plastidial membrane protein porin
  Pfam annotation: Domain name=Porin_3; Domain location=1-185; Score= -16.6; E_value=7.4e-06; Accession=PF01459.12; Description=Eukaryotic porin
VGTXGLKSIINLVXPDQSQGKLKFQSLQELCWLNASVGFNYNPMVTCSGXLGSKALSVAVDVSYDTQSSDFXKYIDVLSFISPDIMTCLHLNTHGDSVVASYYRVVKNHSGDHDGDELSHSRSRNESAIILGSELSLDPLTSIKSRFTIXVMGSVLVQHEWRSKSFVSICGDVDTKGRETSTKIAICVVLYL

SEQ ID NO: 13071 - protein, 130 aa, Zea mays
  Coding DNA Sequence Number=SeqID_7755
  Gene Ontology: Mol. function=ion channel activity; Cellular component= integral to membrane; Biological process=ion transport
  Homolog annotation: Hit_ID=Q5E9U1; Match level="QueryCoverage=94%, HitCoverage=31%, E-value=2e-68, Identity=99%"; Hit description=P2X purinoceptor 4
  Pfam annotation: Domain name=P2X_receptor; Domain location=2-130; Score=-23.9; E_value=1.5e-17; Accession=PF00864.9; Description=ATP P2X receptor
QYVIIFFRPAFLKAAENFTLLVKNNIWYPKFNFSKRNILPNITTAYLKTCIYDAKTDPFCPIFRLGKIVESAGHSFQDIAIEGGIMGIQIKWNCNLDRAASFCLPRYSFRRLDTRDLAHNVSPGYNFRFA

SEQ ID NO: 13072 - protein, 172 aa, Zea mays
  misc_feature (138)..(138): Xaa can be any naturally occurring amino acid
  misc_feature (156)..(156): Xaa can be any naturally occurring amino acid
  Coding DNA Sequence Number=SeqID_7756
  Gene Ontology: Mol. function=glutamate-cysteine ligase activity; Biological process=glutathione biosynthetic process
  Homolog annotation: Hit_ID=Q83M14; Match level="QueryCoverage=91%, HitCoverage=42%, E-value=3e-77, Identity=88%"; Hit description =Carboxylate-amine ligase ybdK
  Pfam annotation: Domain name=GCS2; Domain location=2-173; Score=52.1; E_value=2e-12; Accession=PF04107.4; Description=Glutamate-cysteine ligase family 2(GCS2)
WIPRAAGAAGQFSAMQKVVLQAATDHHLEICGGGTHPFQKWQRQEVCDNERYQRTLENFGYLIQQATVFGQHVHVGCASGDDAIYLLHGLSRFVPHFIALSAASPYMQGTDTRFASSRPNIFSAFPDNGRCRGVNNWXQFEPCFAAEYTTMIDTFXDLHWDIRPVLFCTKVG

SEQ ID NO: 13073 - protein, 164 aa, Zea mays
  Coding DNA Sequence Number=SeqID_7757
  Gene Ontology: Mol. function=ATP-dependent helicase activity; Cellular component=alpha DNA polymerase:primase complex; Biological process=DNA replication
  Homolog annotation: Hit_ID=A9HY53; Match level="QueryCoverage=100%, HitCoverage=23%, E-value=9e-77, Identity=80%"; Hit description =Primosomal protein
YLRLALPARARSSSLPAMKLVDTRRLPMKHGMSPQLLEALGERLARKEQSLIFLNRRGFAPVLHCQSCGWVSNCPRCTAFTVLHRTAGRGHRLQCHHCGYQAPVPHACPECGDQDLAPMGRGTQRVEEHLAELFPEARILRIDADSTRKKGSAEALFASVHAGE

SEQ ID NO: 13074 - protein, 236 aa, Zea mays
  Coding DNA Sequence Number=SeqID_7758
  Gene Ontology: Mol. function=signal transducer activity; Cellular component=membrane; Biological process=regulation of transcription, DNA-dependent
  Homolog annotation: Hit_ID=A7MJ29; Match level="QueryCoverage=99%, HitCoverage=28%, E-value=2e-72, Identity=57%"; Hit description =Putative uncharacterized protein
  Pfam annotation: Domain name=GGDEF; Domain location=55-216; Score =213.7; E_value=4.5e-61; Accession=PF00990.12; Description=GGDEF domain
SGGQLTLNGCRYLSAQHQPRYCNLTLKRVSLAHGVSGFRGSASDVTLEVEAQARAHYLSHFDELTGLANRVQMREFLTGQLSLPLPAQPLLAMIMIDLDKFKPVNDLYGHAAGDQVLHAVSDRIRRTLNGNGLVARLGGDEFVVILPEAGSREQVDALCQQLIAQLNLPFPVYDNDIHIGGSLGIALAPQDADNASDLLRFADIALYKAKNNGNNQWIFFDRDMEEKIVQRREMEH

SEQ ID NO: 13075 - protein, 371 aa, Zea mays
  Coding DNA Sequence Number=SeqID_7759
  Gene Ontology: Mol. function=ATP binding; Cellular component =membrane; Biological process=apoptosis
  Homolog annotation: Hit_ID=A2ZFZ9; Match level="QueryCoverage=92%, HitCoverage=24%, E-value=1e-92, Identity=55%"; Hit description =Putative uncharacterized protein
LYIDLQKLYSTLEGLQQRSYRSIAMMMLKFSYRDVKKEYQSCLLYLAIFPPGHRIRRSTLIARWVVERTVTTEDWRWSSAESIGEQCFDALVIRGLVHPTEISATGRVKSCMVGDVTYDFITKMAKKQRILEPRLSHHLACHFSVFSDLHLSVSDNISNFLNRLSESSQWPRLKVLDLEGCRGFRENRHYLPNICNKIVLLKYLSLRRTDVDKLPHEINNLRELEVLDIQQTEVPASCTMDLLLLKLKRLLAGNRNPSPRTHGHVLVPGKIDKMSDMEVLSNVRVKSDKDLEGIGRLWQLRKLGVVINVKDKDTLLKAVTNLHECLRSLSITLDATTSHKGTFSTIRGRRELEGSSTGRDEKKIMKEHPKV

SEQ ID NO: 13076 - protein, 225 aa, Zea mays
  misc_feature (35)..(35): Xaa can be any naturally occurring amino acid
  misc_feature (96)..(96): Xaa can be any naturally occurring amino acid
  misc_feature (114)..(114): Xaa can be any naturally occurring amino acid
  misc_feature (159)..(159): Xaa can be any naturally occurring amino acid
  misc_feature (207)..(207): Xaa can be any naturally occurring amino acid
  Coding DNA Sequence Number=SeqID_7760
  Gene Ontology: Mol. function=glutathione transferase activity; Cellular component=cytoplasm; Biological process=response to stress
  Homolog annotation: Hit_ID=Q9FQA9; Match level="QueryCoverage=100%, HitCoverage=97%, E-value=3e-89, Identity=75%"; Hit description =Glutathione S-transferase GST 30
  Pfam annotation: Domain name=GST_C; Domain location=105-203; Score =2.4; E_value=0.062; Accession=PF00043.15; Description=Glutathione S -transferase, C-terminal domain
  Pfam annotation: Domain name=GST_N; Domain location=4-77; Score=43.6; E_value=6.9e-10; Accession=PF02798.10; Description=Glutathione S -transferase, N-terminal domain
  Pfam module annotation: Pfam domain module=GST_C::GST_N; Domain location=105-203::4-77
SGDNDLKVLGVWTSPFVIRVRIVFKLNGLANEYVXDDLSNKSALLLGSNPAHKRVSVLLHAGCAIYESQVILQYIDEVWAVTRPNVLPDDPYERAXARFWGAYIYDEVQSEWLXMLFRCSNDEDKAAAVAYAREALYALQGAFRDCSNGRPFFGGDDIXVVDACLGAYLGCFGDVGRIIGSRLIDTARTPLLDAWEDRFRAADWAKXVVPDDLDEMLAFLQTLSA

SEQ ID NO: 13077 - protein, 184 aa, Zea mays
  Coding DNA Sequence Number=SeqID_7761
  Gene Ontology: Mol. function=structural molecule activity
  Homolog annotation: Hit_ID=Q94EV4; Match level="QueryCoverage=89%, HitCoverage=64%, E-value=2e-65, Identity=71%"; Hit description=RIRE2 orf3
  Pfam annotation: Domain name=Transposase_28; Domain location=1-152; Score=55.2; E_value=2.2e-13; Accession=PF04195.3; Description =Putative gypsy type transposon
LQPEWMAPSSEADPTPPLGYVLSFIPIHERGFGVPASRFMRALLHHYGVELHNLNPNSIVQAAIFMAVCEGFLGIDPHWDLWTHFFSTEFFAATTEAKKVRMAVRAGGCTLQLRSGHVQQYMPATLASSNKGWQSRWFYLRNDDERLPAFTHRVVLGADERWRWGLPRELQTHLKSLLEARRKI

SEQ ID NO: 13078 - protein, 564 aa, Zea mays
  misc_feature (1)..(1): Xaa can be any naturally occurring amino acid
  misc_feature (16)..(16): Xaa can be any naturally occurring amino acid
  misc_feature (20)..(21): Xaa can be any naturally occurring amino acid
  misc_feature (53)..(53): Xaa can be any naturally occurring amino acid
  misc_feature (60)..(60): Xaa can be any naturally occurring amino acid
  misc_feature (64)..(64): Xaa can be any naturally occurring amino acid
  misc_feature (74)..(75): Xaa can be any naturally occurring amino acid
  misc_feature (80)..(80): Xaa can be any naturally occurring amino acid
  misc_feature (89)..(89): Xaa can be any naturally occurring amino acid
  misc_feature (119)..(119): Xaa can be any naturally occurring amino acid
  misc_feature (129)..(129): Xaa can be any naturally occurring amino acid
  misc_feature (141)..(141): Xaa can be any naturally occurring amino acid
  misc_feature (156)..(156): Xaa can be any naturally occurring amino acid
  misc_feature (168)..(168): Xaa can be any naturally occurring amino acid
  misc_feature (489)..(490): Xaa can be any naturally occurring amino acid
  misc_feature (493)..(493): Xaa can be any naturally occurring amino acid
  misc_feature (502)..(509): Xaa can be any naturally occurring amino acid
  misc_feature (514)..(514): Xaa can be any naturally occurring amino acid
  misc_feature (517)..(518): Xaa can be any naturally occurring amino acid
  misc_feature (522)..(525): Xaa can be any naturally occurring amino acid
  misc_feature (527)..(532): Xaa can be any naturally occurring amino acid
  misc_feature (543)..(547): Xaa can be any naturally occurring amino acid
  misc_feature (549)..(549): Xaa can be any naturally occurring amino acid
  misc_feature (553)..(554): Xaa can be any naturally occurring amino acid
  Coding DNA Sequence Number=SeqID_7762
  Subcellular localization annotation: CTP_CleavageSite=68; ConfidenceScore=5.47e-01
XSACLVVSSALLVTAXSRFXXLLCISFVALLHARRLATSALVPLSPLSSSYLXCRRSLSXRFLXLPPSSSHRPXXFSRLXHPLRCLCSXCLRSARHLLHAAPLASTLVLRLYSPAVVSXLFVVLSSSLXLPTLGRLSLLSXFLSSSLSASLSVASXAASSLSAHSSFXLDICLYLSTSLPLPLLLLSSRRLLCPHLLSLLPFAPLSAPLCYIALPLSSRSSAVFPPPAPSLASLFPPTLLLALSLPSSPPPPFSLASPPLSFSGSLLSSRSLAPLASSSSRPLSLPCSLRPFSLSLTRLRLLCFSLLRSPPPLVFSSSLFVLSFLLLFSLSHFLPPPLSPSPLASCLRPFPPFLPSSPPFSPGSFLPLSSSSLFPFSFSAPPAPPSLSLLLSSSPSSPFPSSSSLPPSPFCASLLRVFSPSPLLPSLPFSLPPHILFVSSLVSPAPLLPRSPSFASLPLLSFLCCGGAMSSSCWLRSPSSSLFFLSSPXXLSXPSLLSAAKXXXXXXXXPPSPXLLXXVEKXXXXKXXXXXXYFPSSSLGEWXXXXXLXILLXXYSLSSVCVLF

SEQ ID NO: 13079 - protein, 153 aa, Zea mays
  misc_feature (74)..(74): Xaa can be any naturally occurring amino acid
  Coding DNA Sequence Number=SeqID_7764
  Gene Ontology: Mol. function=RNA-directed DNA polymerase activity; Biological process=RNA-dependent DNA replication
  Homolog annotation: Hit_ID=Q8W0Y2; Match level="QueryCoverage=98%, HitCoverage=7%, E-value=1e-30, Identity=51%"; Hit description =Putative gag-pol
MGSLQQPLQPGTLLRFGSLEFMSLDGSYDMVLLPLQRDSENDGHHLARRRRTRRRLPPVAEEQHPGLPRPPPRXRRRRSNHGQARGGTSLAVGPERVDDAGTPVGDMSGVILAPGTTTGVASQQCANLRRTNDANTFARDLSGISLAPEITAH

SEQ ID NO: 13080 - protein, 142 aa, Zea mays
  Coding DNA Sequence Number=SeqID_7765
  Gene Ontology: Mol. function=sequence-specific DNA binding; Cellular component=nucleus; Biological process=regulation of transcription, DNA-dependent
  Homolog annotation: Hit_ID=A7P7U4; Match level="QueryCoverage=74%, HitCoverage=18%, E-value=1e-36, Identity=69%"; Hit description =Chromosome chr3 scaffold_8, whole genome shotgun sequence
  Pfam annotation: Domain name=POX; Domain location=1-39; Score=-23.0; E_value=5.9e-05; Accession=PF07526.2; Description=Associated with HOX
IVVSSFDMVAGCGAAEPYTTLALRTISRHFRCLRDAISGQIQVTQRSLGEQEGIPRLRYVDQQLRQQKALQQLGVMRQAWRPQRGLPESSVSILRAWLFEHFLHPYVLRHPVLVFSNYSNGVIIISVYVYFNKFLIQLSFDN

SEQ ID NO: 13081 - protein, 156 aa, Zea mays
  misc_feature (2)..(3): Xaa can be any naturally occurring amino acid
  Coding DNA Sequence Number=SeqID_7766
  Gene Ontology: Mol. function=aspartic-type endopeptidase activity; Cellular component=intracellular; Biological process=RNA-dependent DNA replication
  Homolog annotation: Hit_ID=Q2HW89; Match level="QueryCoverage=99%, HitCoverage=15%, E-value=1e-61, Identity=75%"; Hit description =Integrase, catalytic region; Ribonuclease H
AXXGYRTSVRTSTGATPFSLVYGMEAVLPIEVEIPSLRVLMETKREEAEWIQTRFFQLNLIDGKRLSALCHGQLYQRRLKKAHEKKVRPREFQEGELVLKKILPIQKDHRGKWTPNYEGPYVVKKAFSGGALIPTKMDGEDLRLPVNYDAVKKYYA

SEQ ID NO: 13082 - protein, 180 aa, Zea mays
  misc_feature (118)..(119): Xaa can be any naturally occurring amino acid
  Coding DNA Sequence Number=SeqID_7767
  Gene Ontology: Mol. function=protein serine/threonine kinase activity; Biological process=protein amino acid phosphorylation
  Homolog annotation: Hit_ID=P15792; Match level="QueryCoverage=80%, HitCoverage=22%, E-value=3e-25, Identity=47%"; Hit description =Protein kinase PVPK-1
MVKQYYINGSDHVKTVESCLGEDISSMETRLHIDRPFDNSKDCDFSGRLESDNSILGSSKGVAHQTKSSCNSEITLCPSAQDSFHPATVYSEAKESFTNVGVSECVSIDKSVESGDVXXSCEFKKSRKTSIYRESTGSDVSDESSTSSLSSALYKPLKANDIQWEAILAIRALDGGFKMS

SEQ ID NO: 13083 - protein, 141 aa, Zea mays
  Coding DNA Sequence Number=SeqID_7768
  Homolog annotation: Hit_ID=Q39I89; Match level="QueryCoverage=100%, HitCoverage=66%, E-value=2e-54, Identity=74%"; Hit description =Putative uncharacterized protein
  Pfam annotation: Domain name=DUF177; Domain location=1-133; Score =40.6; E_value=5.7e-09; Accession=PF02620.7; Description =Uncharacterized ACR, COG1399
DGTDGQQPYLRLAVHGHAWLTCQRCMTPYDQTFDVDMTYRVVATEDEAEEFPLDDDEADVIVGSRQFDLVDLIEEELLLSLPLVPKHEVCPAVHESLVSGASGPSEDADDESAEDEDEGKRPNPFAALEALKKDGDGSKKH

SEQ ID NO: 13084 - protein, 153 aa, Zea mays
  misc_feature (138)..(138): Xaa can be any naturally occurring amino acid
  misc_feature (143)..(146): Xaa can be any naturally occurring amino acid
  misc_feature (151)..(151): Xaa can be any naturally occurring amino acid
  Coding DNA Sequence Number=SeqID_7769
  Gene Ontology: Mol. function=branched-chain-amino-acid transaminase activity; Cellular component=cytoplasm; Biological process=branched chain family amino acid metabolic process
  Homolog annotation: Hit_ID=Q2UIB4; Match level="QueryCoverage=100%, HitCoverage=38%, E-value=3e-57, Identity=67%"; Hit description =Branched chain aminotransferase BCAT1
TASPRAVPDEATANAGAETICTDHMVTATWTADSGWGTPELKPYGPLSLMPTASCLHYATECFEGLKVFRGFDGKLRIFRPSKNTARMRMSASRISLPVFEPAELEKLMIALCGVDGPRWLPKDRAGSFLYLRPTMIXTQSQXXXXAPKEXML

SEQ ID NO: 13085 - protein, 174 aa, Zea mays
  misc_feature (103)..(103): Xaa can be any naturally occurring amino acid
  misc_feature (111)..(111): Xaa can be any naturally occurring amino acid
  misc_feature (128)..(128): Xaa can be any naturally occurring amino acid
  misc_feature (139)..(139): Xaa can be any naturally occurring amino acid
  Coding DNA Sequence Number=SeqID_7770
  Gene Ontology: Mol. function=catalytic activity; Biological process =metabolic process
  Homolog annotation: Hit_ID=Q84R45; Match level="QueryCoverage=100%, HitCoverage=100%, E-value=5e-59, Identity=67%"; Hit description =Putative uncharacterized protein OSJNBb0016H12.23
MNDERQKGEALQILGLLQVLPRLGVFYLDYSLWSFYWEGRSKRDSPSLFKDARGIMDTLKEKGIHMVIVSRSPTPDIAQVFLDKVEYQPMYVDQEIFYMWNHXTEHFQNRXHRKTEIPYKSMLFFHDXNRNIEAVSEMXVTSDLLQNVVNLDMIKLGVSNFATNCAASSRKDDE

SEQ ID NO: 13086 - protein, 112 aa, Zea mays
  misc_feature (27)..(27): Xaa can be any naturally occurring amino acid
  misc_feature (35)..(53): Xaa can be any naturally occurring amino acid
  misc_feature (57)..(57): Xaa can be any naturally occurring amino acid
  misc_feature (60)..(61): Xaa can be any naturally occurring amino acid
  misc_feature (65)..(66): Xaa can be any naturally occurring amino acid
  misc_feature (68)..(77): Xaa can be any naturally occurring amino acid
  misc_feature (79)..(79): Xaa can be any naturally occurring amino acid
  misc_feature (83)..(85): Xaa can be any naturally occurring amino acid
  misc_feature (90)..(91): Xaa can be any naturally occurring amino acid
  misc_feature (93)..(99): Xaa can be any naturally occurring amino acid
  Coding DNA Sequence Number=SeqID_7771
  Gene Ontology: Mol. function=tryptophan synthase activity; Biological process=aromatic amino acid family biosynthetic process
  Homolog annotation: Hit_ID=Q3KK59; Match level="QueryCoverage=82%, HitCoverage=22%, E-value=6e-16, Identity=54%"; Hit description =Tryptophan synthase beta chain
YVAETLMPLILDLAREYEAAKIDPAFXEELAYFQXXXXXXXXXXXXXXXXXXXCGGXKIXXKREXXNXXXXXXXXXXIXQILXXXRMGKXXIXXXXXXXCGQRAMARICKNG

SEQ ID NO: 13087 - protein, 209 aa, Zea mays
  Coding DNA Sequence Number=SeqID_7772
  Gene Ontology: Mol. function=glucan 1,4-alpha-glucosidase activity; Biological process=polysaccharide metabolic process
  Homolog annotation: Hit_ID=A7MLR9; Match level="QueryCoverage=100%, HitCoverage=37%, E-value=1e-68, Identity=59%"; Hit description =Putative uncharacterized protein
MNNQTFQSPVRERGFARLGDYAAIGEGRSVALIAPDGAIDWWCAPNLDSAPLFDRLLDPEIGGFFQIEPNAPYRTERAYRADSNVLETRFFTDDGSVLLTESLNSTLAGRLPWSELARRVEGVEGEVTLRLTLRFGTVAETRSPWQDSTEQGDVYHVGDLMAMLRTSEDWQIEQRDDEQICATLRTAEGSRSLVALLVTEPEPLAVPPL

SEQ ID NO: 13088 - protein, 118 aa, Zea mays
  misc_feature (101)..(101): Xaa can be any naturally occurring amino acid
  Coding DNA Sequence Number=SeqID_7773
  Gene Ontology: Mol. function=protein binding; Cellular component =spliceosome; Biological process=dorsal/ventral axis specification
  Homolog annotation: Hit_ID=A7QJ94; Match level="QueryCoverage=88%, HitCoverage=18%, E-value=2e-39, Identity=72%"; Hit description =Chromosome chr8 scaffold_106, whole genome shotgun sequence
KKPKFFNRGPPGYEWNKYTPAPFGPDNPPPKIVQGSKFNIFYPDFVGKSKAPPSSIKKNGSAGKTFFIRFPPGPPYEDIAFRIVNKEWEYSPKKGFKCTFXRGIFPFYFNFKRFRYRR

SEQ ID NO: 13089 - protein, 217 aa, Zea mays
  Coding DNA Sequence Number=SeqID_7774
  Gene Ontology: Mol. function=aspartic-type endopeptidase activity; Cellular component=chromatin; Biological process=DNA integration
  Homolog annotation: Hit_ID=Q7XEA3; Match level="QueryCoverage=98%, HitCoverage=10%, E-value=6e-40, Identity=41%"; Hit description =Retrotransposon protein, putative, Ty1-copia subclass
WLWGEVVATTVYILNRSPTQSVEGSTPYEVWHGSKPTVSHLRTFGCVAHVKQGSKRLTKLEDRCTPMVFVGYERGSKACRFYDPNTRRVHVSRDVLFEEDRSWNWEEETGTDIPFGVEVVPGGSPTWLDMGASTNSPSSTTSSPSSSSDSPSSSRSTQFGGGVTHPGSLEDAQEQQPATAPGAVGVDFATPPTASPALDADHNNMPIRFRTLKNIQT

SEQ ID NO: 13090 - protein, 181 aa, Zea mays
  misc_feature (54)..(54): Xaa can be any naturally occurring amino acid
  misc_feature (70)..(70): Xaa can be any naturally occurring amino acid
  misc_feature (74)..(74): Xaa can be any naturally occurring amino acid
  misc_feature (89)..(89): Xaa can be any naturally occurring amino acid
  misc_feature (159)..(159): Xaa can be any naturally occurring amino acid
  Coding DNA Sequence Number=SeqID_7775
  Gene Ontology: Mol. function=structural constituent of ribosome; Cellular component=ribonucleoprotein complex; Biological process =translation
  Homolog annotation: Hit_ID=Q5I7L1; Match level="QueryCoverage=97%, HitCoverage=84%, E-value=3e-63, Identity=68%"; Hit description =Ribosomal protein L13a
  Pfam annotation: Domain name=Ribosomal_L13; Domain location=15-126; Score=47.7; E_value=3.9e-11; Accession=PF00572.8; Description =Ribosomal protein L13
PPLRACAHKRITPHARHHMLGRLSSIISKELLYAHKAVVLRCEEICMSSALVRXQMKYLRFLRKRMNTKXSHGXIHFRAPAKILCGTIXSMIPHKTKTHDACLMRINTYEGMPTSYDKTKRMFIPDALKVLRLQTGHKYCLLDELSKEVFWNYHDTIMXLEDKRQDKANVAYDMKNQLDKL

SEQ ID NO: 13091 - protein, 146 aa, Zea mays
  misc_feature (51)..(51): Xaa can be any naturally occurring amino acid
  misc_feature (109)..(109): Xaa can be any naturally occurring amino acid
  Coding DNA Sequence Number=SeqID_7776
  Gene Ontology: Cellular component=endoplasmic reticulum
  Homolog annotation: Hit_ID=A2WJM9; Match level="QueryCoverage=92%, HitCoverage=9%, E-value=3e-40, Identity=64%"; Hit description =Putative uncharacterized protein
  Pfam annotation: Domain name=TRAP_beta; Domain location=1-147; Score=- 46.6; E_value=0.0015; Accession=PF05753.5; Description=Translocon -associated protein beta (TRAPB)
LALVALLVLGHADADSAGDAPFDVAHNKISLSRPKPIVERVPDSLDLYDQXSATVYDESINDDSMPIEKFELDAVEKSKTLERLEPVAAASHTYDLETKTQGRLQGSPXAIITYRDPAKTALHEAYSTPVFPVDILCGRPPETMFE

SEQ ID NO: 13092 - protein, 246 aa, Zea mays
  misc_feature (2)..(2): Xaa can be any naturally occurring amino acid
  misc_feature (11)..(11): Xaa can be any naturally occurring amino acid
  misc_feature (15)..(15): Xaa can be any naturally occurring amino acid
  misc_feature (17)..(17): Xaa can be any naturally occurring amino acid
  misc_feature (24)..(24): Xaa can be any naturally occurring amino acid
  misc_feature (29)..(29): Xaa can be any naturally occurring amino acid
  misc_feature (46)..(46): Xaa can be any naturally occurring amino acid
  misc_feature (48)..(48): Xaa can be any naturally occurring amino acid
  misc_feature (57)..(57): Xaa can be any naturally occurring amino acid
  misc_feature (66)..(66): Xaa can be any naturally occurring amino acid
  misc_feature (75)..(75): Xaa can be any naturally occurring amino acid
  misc_feature (90)..(90): Xaa can be any naturally occurring amino acid
  misc_feature (95)..(95): Xaa can be any naturally occurring amino acid
  misc_feature (122)..(122): Xaa can be any naturally occurring amino acid
  misc_feature (126)..(126): Xaa can be any naturally occurring amino acid
  misc_feature (142)..(142): Xaa can be any naturally occurring amino acid
  misc_feature (164)..(164): Xaa can be any naturally occurring amino acid
  misc_feature (186)..(186): Xaa can be any naturally occurring amino acid
  misc_feature (193)..(193): Xaa can be any naturally occurring amino acid
  misc_feature (197)..(197): Xaa can be any naturally occurring amino acid
  misc_feature (227)..(227): Xaa can be any naturally occurring amino acid
  misc_feature (229)..(230): Xaa can be any naturally occurring amino acid
  misc_feature (237)..(237): Xaa can be any naturally occurring amino acid
  Coding DNA Sequence Number=SeqID_7777
  Gene Ontology: Mol. function=phosphoprotein phosphatase activity; Cellular component=nucleus; Biological process=termination of RNA polymerase II transcription, poly(A)-independent
  Homolog annotation: Hit_ID=Q60EX6; Match level="QueryCoverage=100%, HitCoverage=27%, E-value=4e-85, Identity=66%"; Hit description =Serine/threonine protein phosphatase BSL1 homolog
AXKMEYPENVXLMRXNXEVAEINXFFCFXLECIERMGESDGIWVWXRXNQVLNYFQXGAMIEKKIXCMHGGIGRXINRVEQIEKFERPIXMDVGXIVLMDLLWFDLKENDSVEGLRLNERGXGLVXFGPDRVKEFCKRKKLXLIIRANECVMDGFEGLANGKLXTLFSETNYCGTAKKAGAIFVVXRGLVMVXKLIXPLPLPVNSLESSPERGDAKWMQELKIQGQXTXXRGRQKVXGDRNFLVYI

SEQ ID NO: 13093 - protein, 518 aa, Zea mays
  misc_feature (327)..(327): Xaa can be any naturally occurring amino acid
  Coding DNA Sequence Number=SeqID_7778
  Gene Ontology: Mol. function=icosanoyl-CoA synthase activity; Cellular component=integral to membrane; Biological process =metabolic process
  Homolog annotation: Hit_ID=A5AYN9; Match level="QueryCoverage=73%, HitCoverage=74%, E-value=1e-119, Identity=56%"; Hit description =Putative uncharacterized protein
  Pfam annotation: Domain name=ACP_syn_III_C; Domain location=431-517; Score=9.2; E_value=1.7e-06; Accession=PF08541.1; Description=3 -Oxoacyl-[acyl-carrier-protein (ACP)
  Pfam annotation: Domain name=Chal_sti_synt_C; Domain location=376 -519; Score=6.8; E_value=0.00049; Accession=PF02797.6; Description =Chalcone and stilbene synthases, C-te
  Pfam annotation: Domain name=FAE1_CUT1_RppA; Domain location=128-420; Score=522.0; E_value=6.9e-154; Accession=PF08392.2; Description =FAE1Type III polyketide synthase-lik
  Pfam module annotation: Pfam domain module=ACP_syn_III_C::Chal_sti _synt_C::FAE1_CUT1_RppA; Domain location=431-517::376-519::128-420
MATQQQASTTPPNKPDVFELKEEEKKKFLDTYAKSKDTSRLSRKPNGLVLSFLSYAILQVLPIVALVIFAKHMLVQHYGKFWNGTQLANSGLERYALFSPVPTPLGFDISMTLLDLLVVLVLLVLQAVVVRNKKNNIYLVEFATLNNLDSKWCCPHEEFMFKTERTGWFTADTIEFQKRVLAKSCIGDEAFFPEGVKTNPPTINMEMARKEADFVFENVLDDLFRLTNVKPKQIDMLIVNCSLFCPTPSLSSMIVRKYKMREDILTYNLGGMGCSAGLIAIDLAKDLLTAHKNKLCVVVSTENITQNWYTGNQKNMLLSNTLFRMGXSAVLLSNKPSDAVRAKYQLMHLVRVHKGCDEESYQSVVQEEDAQGKIGVRLSRDLMVVAGKAITSNIKRLGPLILPLSEQLNYAYYNMILPRLTGKKGEYVPNFRKAVNHFCIHAGGRAVLEALKDKLGLSLYDVEPSRATLYRYGNTSSSSVWYEMDFIEKSRKVRAGEKIWQIAFGSGFKCNSAVWKAL

SEQ ID NO: 13094 - protein, 256 aa, Zea mays
  Coding DNA Sequence Number=SeqID_7779
  Gene Ontology: Mol. function=nucleic acid binding; Cellular component= chromatin; Biological process=DNA integration
  Homolog annotation: Hit_ID=Q8SA86; Match level="QueryCoverage=94%, HitCoverage=26%, E-value=6e-81, Identity=59%"; Hit description =Putative retrotransposon protein
  Pfam annotation: Domain name=Transposase_28; Domain location=71-252; Score=-3.5; E_value=1.6e-06; Accession=PF04195.3; Description =Putative gypsy type transposon
MARVRSTARVTRDGEEAEATKTAPISEVMKQSGMVVTEVAADEGAPAAEAEYADIEEDVVDEEEEDYNTLMPAKPSHLDFGKFIVSEADMPMMVKLGYFGETEKKLIRFAGEETTPAPKDDEVVVFKSFFRAGFRFPLNEMLGEVLKKFEIYLHQLTPNAIIRLSVFIWALRSQGMSPDAEAFCLVHELHYQTKARATGLHENFGCYNFAYRKDTKAPVLSYRTKWPTGWKGEWFYIKADEKKRGKLMTMVMCESI

SEQ ID NO: 13095 - protein, 137 aa, Zea mays
  misc_feature (101)..(101): Xaa can be any naturally occurring amino acid
  misc_feature (125)..(125): Xaa can be any naturally occurring amino acid
  Coding DNA Sequence Number=SeqID_7780
  Gene Ontology: Mol. function=transporter activity; Cellular component= intracellular; Biological process=transport
  Homolog annotation: Hit_ID=A2Z2F2; Match level="QueryCoverage=86%, HitCoverage=20%, E-value=2e-48, Identity=80%"; Hit description =Putative uncharacterized protein
MGTLVVRFRVHCIGSVKVDPNKLMQITSGDRYIKYHVQELERAFRERLPACTLSGKRHIDCTTTMLDVHGAGLKNGSKTVRELAQRMQRIDSDYYPETLHXMYVANARSVFKLICNTAKGFLDPXTCCKIHVLGRRL

SEQ ID NO: 13096 - protein, 203 aa, Zea mays
  misc_feature (173)..(173): Xaa can be any naturally occurring amino acid
  Coding DNA Sequence Number=SeqID_7781
  Gene Ontology: Mol. function=nucleic acid binding; Cellular component= nucleus; Biological process=DNA recombination
  Homolog annotation: Hit_ID=P27078; Match level="QueryCoverage=76%, HitCoverage=43%, E-value=3e-79, Identity=98%"; Hit description =Integrase
  Pfam annotation: Domain name=Phage_integ_N; Domain location=6-67; Score=75.2; E_value=2.2e-19; Accession=PF09003.1; Description =Bacteriophage lambda integrase, N-term
  Pfam annotation: Domain name=Phage_integr_N; Domain location=71-149; Score=34.9; E_value=2.9e-07; Accession=PF02899.8; Description=Phage integrase, N-terminal SAM-like domain
  Pfam module annotation: Pfam domain module=Phage_integ_N::Phage _integr_N; Domain location=6-67::71-149
VGLPAVAARSLVDPPGCRDPRTGKEFGLGRDRRIAITEAIQANIELFSGHKHKPLTARINSDNSVTLHSWLDRYEKILASRGIKQKTLINYMSKIKAIRRGLPDAPLEDITTKEIAAMLNGYIDEGKAASAKLIRSTLSDAFREAIAEGHITTNHVAATRAAKSEVRRSRLTXANPENYQANYPMLALAWTGCCTGTSWDYAK

SEQ ID NO: 13097 - protein, 166 aa, Zea mays
  misc_feature (17)..(17): Xaa can be any naturally occurring amino acid
  misc_feature (50)..(50): Xaa can be any naturally occurring amino acid
  Coding DNA Sequence Number=SeqID_7782
  Gene Ontology: Mol. function=oxidoreductase activity; Cellular component=endoplasmic reticulum; Biological process=electron transport
  Homolog annotation: Hit_ID=Q8LGN4; Match level="QueryCoverage=92%, HitCoverage=29%, E-value=6e-49, Identity=65%"; Hit description =Cytochrome P450 monooxygenase CYP72A26
PPAGCGPRRLLACTAPXVTPFMHRLLLEHGTTSMSCFHPIHKVTIVYPTXAKDGCHKPNLRAQVPSLTKMLDYGVPNHEDDMSVKHLKILNHAFHLEKLKRMLSRLSTCCEQLVTRWPADSLGSDRSCELDVWPELQILTGDIISRTVFSSIYSEGRRIFHLQVEQ

SEQ ID NO: 13098 - protein, 539 aa, Zea mays
  misc_feature (31)..(31): Xaa can be any naturally occurring amino acid
  misc_feature (75)..(75): Xaa can be any naturally occurring amino acid
  misc_feature (114)..(114): Xaa can be any naturally occurring amino acid
  misc_feature (130)..(130): Xaa can be any naturally occurring amino acid
  misc_feature (150)..(150): Xaa can be any naturally occurring amino acid
  misc_feature (194)..(194): Xaa can be any naturally occurring amino acid
  misc_feature (222)..(222): Xaa can be any naturally occurring amino acid
  misc_feature (227)..(227): Xaa can be any naturally occurring amino acid
  misc_feature (496)..(500): Xaa can be any naturally occurring amino acid
  misc_feature (503)..(505): Xaa can be any naturally occurring amino acid
  misc_feature (511)..(511): Xaa can be any naturally occurring amino acid
  misc_feature (529)..(530): Xaa can be any naturally occurring amino acid
  misc_feature (534)..(535): Xaa can be any naturally occurring amino acid
  Coding DNA Sequence Number=SeqID_7783
  Subcellular localization annotation: CTP_CleavageSite=56; ConfidenceScore=5.09e-01
SLPISLHSLLYIIPHASLFLLFIPTLFVSFXPTHTLISFPLSYHSSHISLPFFLTLLSQLSHSFPLSPHRHFPIXLYSTSTQIFSLLCIFSLSLHSIFSTSAPSSSPSLSSPLXFLSSLRSLSATPSFSXPSPRPLSSLTSHPIILSSPXPSPSPHSLLLHFISSLSIPLFASSSSLFSLSFTPSHLPLSLPPXRVFFLLPPSYLPLSLLCSFIAHSSSPSXFSSSXPPFPPPLSSSLYFLPPPLLLPSLSPFSIFLPLSLLSSASSPSPLSLPLPSLPPCSSLPPLPLPSSFLSSLLTPVSSSFSSLSFIFPLSILPLLFFAPLLSPLSPFLSFPSSPLSFPSCSFLLPSSSLFLSSSLPPSLLLFILLSSPLSSSSLHFPSFLSLPCFFPLSFLPPPLFLPPSSPPSSSPPLSPSSSPLLSSPLASLPLPSPLPLLPPPLVSLSSPLLLLLFFFPLLSSSFSSLPLPLPLFSSSPSSPFRLLLPSLFFFLVKTXXXXXLLXXXVSNPPXFCFFFFLHQTFFFFVSAXXPPFXXASPL

SEQ ID NO: 13099 - protein, 200 aa, Zea mays
  misc_feature (36)..(36): Xaa can be any naturally occurring amino acid
  misc_feature (46)..(46): Xaa can be any naturally occurring amino acid
  Coding DNA Sequence Number=SeqID_7785
  Gene Ontology: Mol. function=nucleotide binding; Biological process =response to stress
  Homolog annotation: Hit_ID=Q89QH6; Match level="QueryCoverage=82%, HitCoverage=37%, E-value=4e-59, Identity=70%"; Hit description=Hsp70 family molecular chaperone
GGTGPPTDALQGSGRERPQSLLFELARWHQLAMMRXNGDLRELQQXARTALDPAPLHDFITIVDHDLGFALYRAVSDTKVALSSRDRVEFRFAREGIDIGATVTRDEFESWIADDIERLGATVDEALAKSGITARDVEKVFLTGGTSFVPAVQRLFAERFGEARLTSADQFESIAYGLAFLQPGGSTSSRAAATAVESSL

SEQ ID NO: 13100 - protein, 187 aa, Zea mays
  Coding DNA Sequence Number=SeqID_7786
  Gene Ontology: Mol. function=protein transporter activity; Cellular component=membrane; Biological process=protein secretion
  Homolog annotation: Hit_ID=A7MEZ8; Match level="QueryCoverage=99%, HitCoverage=50%, E-value=6e-43, Identity=49%"; Hit description =Putative uncharacterized protein
MSENHNPPSADEQKDNNTSDSSQDNEQSPRKRPGKKPLIILAIVVVIMLLVGFWFWFSTRNIETTDDAFTEGDAVTIAPKASGYVVQLLVKDNQRVKKGDLLVLIDPRDNAAQRDQAKAQLGLAQAQLHQAQAQLALARVQYPAQRDQALADQERAQANLLNAQEDYSSQRGVDPRATSQRNIGTAL

SEQ ID NO: 13101 - protein, 166 aa, Zea mays
  misc_feature (20)..(20): Xaa can be any naturally occurring amino acid
  misc_feature (32)..(32): Xaa can be any naturally occurring amino acid
  misc_feature (49)..(49): Xaa can be any naturally occurring amino acid
  misc_feature (83)..(83): Xaa can be any naturally occurring amino acid
  misc_feature (157)..(157): Xaa can be any naturally occurring amino acid
  Coding DNA Sequence Number=SeqID_7787
  Gene Ontology: Cellular component=integral to membrane
  Homolog annotation: Hit_ID=A3BUG8; Match level="QueryCoverage=98%, HitCoverage=19%, E-value=4e-58, Identity=71%"; Hit description =Putative uncharacterized protein
PAGAWYMLGRCLHTYSQGRXRHAKANSLTAIXMTEMRCNYYSLTYWRRXGGIKKRADNIGELLMGDQIDSSPYRVHENENESXSLCTTEGLNENDAKLLKQCTRDLYQVNMMLDNLPVMRFTKQNDVTVQRTGFTAGYCPPGAWDDYIINHLKVKDXVHEYEGRNV

SEQ ID NO: 13102 - protein, 148 aa, Zea mays
  misc_feature (138)..(138): Xaa can be any naturally occurring amino acid
  Coding DNA Sequence Number=SeqID_7788
  Gene Ontology: Mol. function=protein binding; Biological process =regulation of ethylene biosynthetic process
  Homolog annotation: Hit_ID=Q2R1Z8; Match level="QueryCoverage=97%, HitCoverage=53%, E-value=1e-65, Identity=58%"; Hit description=ETO1 -like protein 1, putative, expressed
DLGDTIEGLARVHFLRNNRVGAYDEMTKLIEEARNNASAYEKRSEYCERELTKTDLQMVTKLDPLRVYPYRYRAAVLMDNHKEKEAVAELTRAIAFKAGLDLLHLRAGFHEHIGDISSALRDCRAGLLVGPNHQEMLXLHHRGNRPEP

SEQ ID NO: 13103 - protein, 109 aa, Zea mays
  Coding DNA Sequence Number=SeqID_7789
HCGTVIMFGIIIYDGMLGIIIGGVRIGIIIGGIILVVIVSGIMLGIITAVIMFGIIIGGFILAIVITAIIVGTIINGIILGIGIIVIVRHQCLHHHWHMARLSWLVQPL

SEQ ID NO: 13104 - protein, 277 aa, Zea mays
  Coding DNA Sequence Number=SeqID_7791
  Gene Ontology: Mol. function=protein serine/threonine kinase activity; Cellular component=cell cortex; Biological process=protein amino acid phosphorylation
  Homolog annotation: Hit_ID=A2WU53; Match level="QueryCoverage=90%, HitCoverage=81%, E-value=1e-75, Identity=59%"; Hit description =Putative uncharacterized protein
  Pfam annotation: Domain name=APH; Domain location=8-184; Score=5.8; E_ value=0.0024; Accession=PF01636.13; Description=Phosphotransferase enzyme family
  Pfam annotation: Domain name=Kdo; Domain location=3-190; Score=-86.0; E_value=0.075; Accession=PF06293.4; Description=Lipopolysaccharide kinase (Kdo)
  Pfam annotation: Domain name=Pkinase; Domain location=6-257; Score =230.4; E_value=4.2e-66; Accession=PF00069.15; Description=Protein kinase domain
  Pfam annotation: Domain name=Pkinase_Tyr; Domain location=6-257; Score=89.9; E_value=8.2e-24; Accession=PF07714.7; Description =Protein tyrosine kinase
  Pfam module annotation: Pfam domain module=APH::Kdo::Pkinase::Pkinase_ Tyr; Domain location=8-184::3-190::6-257::6-257
MTTKQLRRVRTLGRGASGAVVWLASDEASGELVAVKSARAAGAAAQLRREGRVLRGLSSPHIVPCVGARAAAGGEYQLLLEFAPGGSLADAAARGGGRLAERDIRAYAGDVARALAYLHGRSLVHGDVKARNVVVGGDDRARLTDFGCARPAAAGSARPFGGTPAFMAPEVARGEGQGPAADVWALGCTVVELATGRAPWGDADGLLAAVHRIGYTDDVPEAPAWMSADARDFLARCFERRAAARPTAAQLLAHPFVADLDERPKRQEEGLPSPKST

SEQ ID NO: 13105 - protein, 159 aa, Zea mays
  misc_feature (57)..(57): Xaa can be any naturally occurring amino acid
  misc_feature (148)..(149): Xaa can be any naturally occurring amino acid
  misc_feature (158)..(158): Xaa can be any naturally occurring amino acid
  Coding DNA Sequence Number=SeqID_7792
  Gene Ontology: Mol. function=translation initiation factor activity; Cellular component=nucleolus; Biological process=translational initiation
  Homolog annotation: Hit_ID=Q9AXJ4; Match level="QueryCoverage=98%, HitCoverage=98%, E-value=3e-78, Identity=89%"; Hit description =Eukaryotic translation initiation factor 5A
  Pfam annotation: Domain name=KOW; Domain location=29-63; Score=18.6; E_value=0.024; Accession=PF00467.19; Description=KOW motif
  Pfam annotation: Domain name=eIF-5a; Domain location=85-154; Score =117.0; E_value=5.4e-32; Accession=PF01287.10; Description=Eukaryotic initiation factor 5A hypusine, DNA-binding OB fold
  Pfam module annotation: Pfam domain module=KOW::eIF-5a; Domain location=29-63::85-154
MSDEEHHFESKADAGASKTYPQQAGTIRKNGYIVINNRPCKVVEVSTSKTGKHGHAXCHFVGIDIFTGKKLEDIVPSSHNCDVPHVNRTDYQVIDISQDGFLSLLTDSGGTKDDLRLSTDENLLTQIKDGFAEGKDLAVSVMSAMGEXXICALKDIGXM

SEQ ID NO: 13106 - protein, 126 aa, Zea mays
  misc_feature (121)..(121): Xaa can be any naturally occurring amino acid
  Coding DNA Sequence Number=SeqID_7793
  Homolog annotation: Hit_ID=Q8LKG1; Match level="QueryCoverage=100%, HitCoverage=100%, E-value=1e-34, Identity=62%"; Hit description=Drm3
  Pfam annotation: Domain name=Auxin_repressed; Domain location=7-121; Score=169.8; E_value=7e-48; Accession=PF05564.3; Description =Dormancyauxin associated protein
MGLLDHLWDDTDAGPRPENGLGKLRKHHTFASRSSFGKESDAGSVRSYGEDLPEEGMRVTRSIMIVKPPGYQSQSGSAPASPAGSTPPVSPLSGAREPFRFRRRSTSDAYEKTGQNKPSTXPCFDV

SEQ ID NO: 13107 - protein, 153 aa, Zea mays
  misc_feature (22)..(22): Xaa can be any naturally occurring amino acid
  misc_feature (41)..(42): Xaa can be any naturally occurring amino acid
  misc_feature (46)..(46): Xaa can be any naturally occurring amino acid
  misc_feature (61)..(62): Xaa can be any naturally occurring amino acid
  misc_feature (112)..(112): Xaa can be any naturally occurring amino acid
  misc_feature (119)..(119): Xaa can be any naturally occurring amino acid
  misc_feature (123)..(123): Xaa can be any naturally occurring amino acid
  misc_feature (125)..(125): Xaa can be any naturally occurring amino acid
  Coding DNA Sequence Number=SeqID_7794
  Gene Ontology: Mol. function=oxidoreductase activity; Cellular component=extracellular region; Biological process=response to oxidative stress
  Homolog annotation: Hit_ID=Q40367; Match level="QueryCoverage=99%, HitCoverage=46%, E-value=2e-57, Identity=75%"; Hit description =Peroxidase precursor
  Pfam annotation: Domain name=peroxidase; Domain location=42-153; Score=-49.7; E_value=0.00056; Accession=PF00141.13; Description =Peroxidase
MLNLILGWVLCLTLWLNLCPTXAQLIRHHYAKTCPNVEHIXXRSMXKKKFPQTFVTVPATXXLFFHDCFVQGWDASVLVASTSNNRAYKDHPDNLSLAGDGFDTVIKAKASXDAVPLCXNKVXCXDILAMATRDVILLAGGPYYEVELGRCDG

SEQ ID NO: 13108 - protein, 168 aa, Zea mays
  misc_feature (116)..(117): Xaa can be any naturally occurring amino acid
  misc_feature (128)..(131): Xaa can be any naturally occurring amino acid
  misc_feature (134)..(134): Xaa can be any naturally occurring amino acid
  misc_feature (142)..(142): Xaa can be any naturally occurring amino acid
  misc_feature (144)..(146): Xaa can be any naturally occurring amino acid
  misc_feature (151)..(165): Xaa can be any naturally occurring amino acid
  misc_feature (167)..(167): Xaa can be any naturally occurring amino acid
  Coding DNA Sequence Number=SeqID_7795
  Gene Ontology: Mol. function=signal transducer activity; Cellular component=plasma membrane; Biological process=response to light stimulus
  Homolog annotation: Hit_ID=Q10Q86; Match level="QueryCoverage=89%, HitCoverage=33%, E-value=2e-69, Identity=84%"; Hit description =Transposon protein, putative, Mutator sub-class, expressed
MKFMKLGSNPDTFQDDGSEVRIVETELVSDITVRLGNTKFYLHKFPLLSKCARFQKLIPTTGDENIDIHIHDIPGGPKAFEICAKFCYGMVVTLNAYNVVAARCAAEYLEMNETVXXGNLIYKIDVFXXXXIFXSWKDSIIXLXXXKAHLXXXXXXXXXXXXXXXIXL

SEQ ID NO: 13109 - protein, 156 aa, Zea mays
  Coding DNA Sequence Number=SeqID_7796
  Gene Ontology: Mol. function=glutathione transferase activity; Cellular component=cytoplasm; Biological process=response to stress
  Homolog annotation: Hit_ID=A2WU01; Match level="QueryCoverage=99%, HitCoverage=64%, E-value=4e-44, Identity=56%"; Hit description =Putative uncharacterized protein
  Pfam annotation: Domain name=GST_C; Domain location=20-127; Score =24.3; E_value=0.00028; Accession=PF00043.15; Description=Glutathione S-transferase, C-terminal domain
DETWAGPGTPFLPAEAFDRAMACFWAAFVGAKFFKEWNRLFWLPTTEKAAEALGVFVPVVETLEPAFRECSKGKPFFGGDPVGLVDIALGSFVVWIRVVDKAAGVKLLDEARFPAFTGWAERFLAVDPLKEVIPDPGRLLEPSRGFLAKRAPPPGF

SEQ ID NO: 13110 - protein, 158 aa, Zea mays
  Coding DNA Sequence Number=SeqID_7797
  Gene Ontology: Mol. function=carbon-sulfur lyase activity; Cellular component=nucleus; Biological process=metabolic process
  Homolog annotation: Hit_ID=A7Q621; Match level="QueryCoverage=86%, HitCoverage=79%, E-value=8e-59, Identity=73%"; Hit description =Chromosome chr14 scaffold_54, whole genome shotgun sequence
  Pfam annotation: Domain name=GFA; Domain location=51-145; Score=69.8; E_value=8.8e-18; Accession=PF00043.15; Description=Glutathione -dependent formaldehyde-acti
SQSNSPHPPTLQIVTHLIRSEMDAETVVHTGGCHCKRVRWKVVAPSSVVAWDCNCSNCYMRANTHFIVPADNFELLGDSGKFLTTYTFGTNTAKHTFCKVCGITSFYYPRSNPDGVAVSFRCVDPGTLTNIEIRHADGKNWERTMKEIGISSYSKVHK

SEQ ID NO: 13111 - protein, 211 aa, Zea mays
  Coding DNA Sequence Number=SeqID_7798
PAGPANVNVKQCLFSSSRPEETPTGRRAVAAAGRICAAMPNVEHGADGGPRRRPAQHPHDLPYHPPCLPPLHAHCPPGPPPPPLPRSAPHPPRLHTPPASRHLLPLPPPPPPPPPPPPPPPSAPPLLSSLSPPPPPPPHPPPFLPPTPLPPLPLPTPPPPPPPSPPPPSPPPPPPPPPFPPHPIPSPSPPPLPPPPLPPSLLLFSLSPPPP

SEQ ID NO: 13112 - protein, 213 aa, Zea mays
  Coding DNA Sequence Number=SeqID_7800
  Gene Ontology: Mol. function=oxidoreductase activity; Cellular component=cytoplasm; Biological process=metabolic process
  Homolog annotation: Hit_ID=A6SWS9; Match level="QueryCoverage=100%, HitCoverage=84%, E-value=8e-79, Identity=67%"; Hit description=Short- chain dehydrogenase/reductase SDR
  Pfam annotation: Domain name=Epimerase; Domain location=8-208; Score=- 71.5; E_value=0.076; Accession=PF01370.11; Description=NAD dependent epimerasedehydratase family
  Pfam annotation: Domain name=KR; Domain location=6-177; Score=-50.8; E_value=0.00022; Accession=PF08659.1; Description=KR domain
  Pfam annotation: Domain name=adh_short; Domain location=6-171; Score =89.3; E_value=1.2e-23; Accession=PF00106.15; Description=short chain dehydrogenase
  Pfam module annotation: Pfam domain module=Epimerase::KR::adh_short; Domain location=8-208::6-177::6-171
MKLTNNTLLITGATSGIGRRLAEVFHDRGNRVIITGRRQALLDEIIAQRPAITGFALDVNDTTALARCSAAIHAQFPHINVLIANAGISQPETVTADEWTSDIAEQIVMTNILGVIRVTAAFLPLLRRQPQATLMATSSALAFLPLASFPTYCASKAFLHSWLVSLRHQLRDTSVEVLEMLPPYLQTALTGNQQLSDPRAMPLDDYIAQILQV

SEQ ID NO: 13113 - protein, 160 aa, Zea mays
  misc_feature (15)..(15): Xaa can be any naturally occurring amino acid
  misc_feature (18)..(18): Xaa can be any naturally occurring amino acid
  misc_feature (23)..(23): Xaa can be any naturally occurring amino acid
  misc_feature (34)..(34): Xaa can be any naturally occurring amino acid
  misc_feature (40)..(40): Xaa can be any naturally occurring amino acid
  misc_feature (47)..(48): Xaa can be any naturally occurring amino acid
  misc_feature (61)..(61): Xaa can be any naturally occurring amino acid
  misc_feature (64)..(65): Xaa can be any naturally occurring amino acid
  misc_feature (67)..(68): Xaa can be any naturally occurring amino acid
  misc_feature (71)..(71): Xaa can be any naturally occurring amino acid
  misc_feature (73)..(73): Xaa can be any naturally occurring amino acid
  misc_feature (77)..(77): Xaa can be any naturally occurring amino acid
  misc_feature (87)..(87): Xaa can be any naturally occurring amino acid
  misc_feature (92)..(93): Xaa can be any naturally occurring amino acid
  misc_feature (99)..(99): Xaa can be any naturally occurring amino acid
  misc_feature (102)..(102): Xaa can be any naturally occurring amino acid
  misc_feature (106)..(106): Xaa can be any naturally occurring amino acid
  misc_feature (109)..(110): Xaa can be any naturally occurring amino acid
  misc_feature (117)..(117): Xaa can be any naturally occurring amino acid
  misc_feature (121)..(121): Xaa can be any naturally occurring amino acid
  misc_feature (138)..(139): Xaa can be any naturally occurring amino acid
  misc_feature (141)..(141): Xaa can be any naturally occurring amino acid
  misc_feature (153)..(153): Xaa can be any naturally occurring amino acid
  Coding DNA Sequence Number=SeqID_7801
  Gene Ontology: Mol. function=nutrient reservoir activity
  Homolog annotation: Hit_ID=Q41884; Match level="QueryCoverage=90%, HitCoverage=60%, E-value=7e-33, Identity=59%"; Hit description=Zein
DQPATYNVEYGIATXAAXIFSIXMLLALSACVGXATIFPXYSEAPIXXLLPPYLPSMTASXCEXXAXXPYXFXQAIXRSNLPLSPLXFQQSXXLSLVQXLVXTIRXQQXXQLVLPVXSRVXLANLSPYSQQQQFLPFXXLXTLNPAAYLQQQXLLPFSQL

SEQ ID NO: 13114 - protein, 125 aa, Zea mays
  Coding DNA Sequence Number=SeqID_7802
  Gene Ontology: Mol. function=protein transporter activity; Cellular component=membrane; Biological process=protein secretion
  Homolog annotation: Hit_ID=Q0M1H2; Match level="QueryCoverage=98%, HitCoverage=34%, E-value=2e-16, Identity=36%"; Hit description =Secretion protein HlyD
QVAGLKATYRQQQADLQAAKDSVEFDARNYARQNALVASSATSRIAYDRAETDLKVAQQHVASIQQQIASTVAALNGDPNIEIDRHPLVRAAQAQLDRARLNLSYATVVAPEDGIVTEVDNLQAC

SEQ ID NO: 13115 - protein, 213 aa, Zea mays
  Coding DNA Sequence Number=SeqID_7803
  Gene Ontology: Mol. function=transcription factor activity; Biological process=regulation of transcription, DNA-dependent
  Homolog annotation: Hit_ID=Q7VXX3; Match level="QueryCoverage=100%, HitCoverage=67%, E-value=1e-79, Identity=67%"; Hit description=LysR -family transcriptional regulator
  Pfam annotation: Domain name=LysR_substrate; Domain location=14-210; Score=50.9; E_value=4.4e-12; Accession=PF03466.10; Description=LysR substrate binding domain
QSLDDLACRVKRIATGWEVELRIAVSAVLPWRPLYDLVEEFQALGSATTLRFSTEVLSGNWDALTSNRADLVIGAGAAGEPTGPYRSQTMGQAQFGFCVAAHHPLASLPQPLSRADITRYCAVVVADTSRNLPPQSRGILAEQPTLVMPTMQAKIEAQIRGLGCGYLPLTLAAPYLAQGVLVVCDTDEGMSLTEHVAYAWRAEAPGEALKWWL

SEQ ID NO: 13116 - protein, 216 aa, Zea mays
  misc_feature (202)..(205): Xaa can be any naturally occurring amino acid
  misc_feature (213)..(214): Xaa can be any naturally occurring amino acid
  Coding DNA Sequence Number=SeqID_7804
  Gene Ontology: Mol. function=GDP-mannose 4,6-dehydratase activity; Cellular component=intracellular; Biological process=GDP-mannose metabolic process
  Homolog annotation: Hit_ID=A7QE03; Match level="QueryCoverage=93%, HitCoverage=54%, E-value=1e-106, Identity=90%"; Hit description =Chromosome chr4 scaffold_83, whole genome shotgun sequence
  Pfam annotation: Domain name=Epimerase; Domain location=21-212; Score= 157.2; E_value=4.5e-44; Accession=PF01370.11; Description=NAD dependent epimerasedehydratase family
  Pfam annotation: Domain name=adh_short; Domain location=19-195; Score= -54.6; E_value=0.049; Accession=PF00106.15; Description=short chain dehydrogenase
  Pfam module annotation: Pfam domain module=Epimerase::adh_short; Domain location=21-212::19-195
MAHTESGSTNGDVTPPPRKVALITGITGQDGSYLTEFLLNKGYEVHGLIRRSSNFNTQRIDHIYVDPHNAHKARMKLHYADLSDASSLRRWLDTVLPDEVYNLAAQSHVAVSFEIPDYTADVVATGALRLLEAVRSHIAASGRSHIRYYQAGSSEMFGATAPPQSETSPFHPRSPYAASKCAAHWYTVNYREAYGIFACNGXXXXHESPRRGXXFV

SEQ ID NO: 13117 - protein, 143 aa, Zea mays
  Coding DNA Sequence Number=SeqID_7805
  Gene Ontology: Mol. function=binding; Cellular component=membrane
  Homolog annotation: Hit_ID=Q0BC15; Match level="QueryCoverage=100%, HitCoverage=26%, E-value=3e-59, Identity=78%"; Hit description =Tetratricopeptide TPR_2 repeat protein
QCARLVAPLAERVHRDGGRLAWNTFPQVGTLMQRSLGAHADVFSAGGDVDELPAFDYEVPLIGLPLMLGMETSTLGASVPYLHADPDARDAWRARLAGERRLKVGLVWTGSAGHQRNPFRRVGLERYADAFRGVDHVAFYSVE

SEQ ID NO: 13118 - protein, 120 aa, Zea mays
  misc_feature (2)..(2): Xaa can be any naturally occurring amino acid
  misc_feature (6)..(6): Xaa can be any naturally occurring amino acid
  misc_feature (59)..(59): Xaa can be any naturally occurring amino acid
  Coding DNA Sequence Number=SeqID_7806
  Gene Ontology: Mol. function=damaged DNA binding; Cellular component =nucleus; Biological process=proteasomal ubiquitin-dependent protein catabolic process
  Homolog annotation: Hit_ID=Q84L30; Match level="QueryCoverage=100%, HitCoverage=32%, E-value=9e-49, Identity=79%"; Hit description =Putative DNA repair protein RAD23-4
  Pfam annotation: Domain name=UBA; Domain location=75-111; Score=39.6; E_value=1.1e-08; Accession=PF00627.21; Description=UBATS-N domain
  Pfam annotation: Domain name=XPC-binding; Domain location=1-55; Score= 79.1; E_value=1.4e-20; Accession=PF09280.1; Description=XPC-binding domain
  Pfam module annotation: Pfam domain module=UBA::XPC-binding; Domain location=75-111::1-55
RXNQQXQALRAMVQANPQILQPMLQELGKQNPHLMQLIQEHQADFLRLINEPEGEENLXSQVASGMPQTITVTPEEHEAIQRLEDMGFDRDLVLEVFFACNKNEDLAANYLLDHQNEFDD

SEQ ID NO: 13119 - protein, 201 aa, Zea mays
  Coding DNA Sequence Number=SeqID_7807
  Gene Ontology: Mol. function=structural constituent of ribosome; Cellular component=ribonucleoprotein complex; Biological process =translation
  Homolog annotation: Hit_ID=Q1DRV0; Match level="QueryCoverage=96%, HitCoverage=93%, E-value=4e-80, Identity=74%"; Hit description=60S ribosomal protein L6
  Pfam annotation: Domain name=Ribosomal_L6e; Domain location=90-201; Score=141.5; E_value=2.3e-39; Accession=PF01159.9; Description =Ribosomal protein L6e
QETPAPTNKKFGKGERSVPHSSQKASKYYPAEDDSKPKQVRKSIRPTKLRPSLQPGTVLILLAGRFRGKRVVLLKHLSQGVLLVTGPFKVNGVPLRRVNARYVIATSTQVDLKGVDEKIVEKASADDYFTKDKPAKGKGEDAFFKQGEKPEPKKIESSRAEDQKSVDKGLLSNIKKEPFLSSYLASTFSLRKGDRPHEMKF

SEQ ID NO: 13120 - protein, 219 aa, Zea mays
  misc_feature (197)..(200): Xaa can be any naturally occurring amino acid
  misc_feature (211)..(212): Xaa can be any naturally occurring amino acid
  misc_feature (214)..(216): Xaa can be any naturally occurring amino acid
  Coding DNA Sequence Number=SeqID_7808
  Gene Ontology: Mol. function=cycloeucalenol cycloisomerase activity; Cellular component=integral to membrane
  Homolog annotation: Hit_ID=Q9M643; Match level="QueryCoverage=80%, HitCoverage=63%, E-value=5e-85, Identity=81%"; Hit description =Cycloeucalenol cycloisomerase
MMVVTQQAKCEVGRVMMSESESERKEASDSISHLTDPNSKMASVSPSLWLAPNPSKRWGEIFFLLYTPFWLTLSLGIVVPFKLYENFTELEYLLLGLVSALPSFFIPMLLVGKADRGMSWKDRYWVKANLWIIIFSYVGNYFWTHYFFTVLGASYTFPSWKMNNVPHTTFLLTHVCFLFYHVASNMTLRRLRHFTAXXXXTIRWATEAAWXXAXXXFLA

SEQ ID NO: 13121 - protein, 172 aa, Zea mays
  Coding DNA Sequence Number=SeqID_7809
  Gene Ontology: Mol. function=protein binding; Cellular component =membrane; Biological process=meiosis
  Homolog annotation: Hit_ID=A7QMK1; Match level="QueryCoverage=100%, HitCoverage=49%, E-value=3e-84, Identity=84%"; Hit description =Chromosome chr19 scaffold_126, whole genome shotgun sequence
  Pfam annotation: Domain name=CDC50; Domain location=1-161; Score =117.5; E_value=4.1e-32; Accession=PF03381.6; Description=LEM3 (ligand-effect modulator 3) family  CDC50 family
SLFNDTYSFSRNNKNLTVNKKGISWKSDREHKFGKDVFPKNFQNSSIIGGKHLNESIPLSEQEDLIVWMRTAALPTFRKLYGKIGVDLNEGENITVTLQNNYNTYSFNGKKKLVLSTTSWLGGKNDFLGIAYLTVGGLCFFLALAFTIVYFVKPRQLGDPSYLSWNRNPGGH

SEQ ID NO: 13122 - protein, 257 aa, Zea mays
  misc_feature (45)..(45): Xaa can be any naturally occurring amino acid
  misc_feature (50)..(50): Xaa can be any naturally occurring amino acid
  misc_feature (66)..(66): Xaa can be any naturally occurring amino acid
  misc_feature (116)..(116): Xaa can be any naturally occurring amino acid
  misc_feature (128)..(128): Xaa can be any naturally occurring amino acid
  misc_feature (138)..(138): Xaa can be any naturally occurring amino acid
  misc_feature (147)..(147): Xaa can be any naturally occurring amino acid
  misc_feature (171)..(171): Xaa can be any naturally occurring amino acid
  misc_feature (175)..(175): Xaa can be any naturally occurring amino acid
  Coding DNA Sequence Number=SeqID_7810
  Gene Ontology: Mol. function=carbohydrate binding; Cellular component= cytoplasm; Biological process=carbohydrate metabolic process
  Homolog annotation: Hit_ID=Q33AZ5; Match level="QueryCoverage=94%, HitCoverage=65%, E-value=3e-60, Identity=51%"; Hit description =Aldose 1-epimerase family protein, expressed
  Pfam annotation: Domain name=Aldose_epim; Domain location=16-257; Score=-19.4; E_value=3.7e-05; Accession=PF01263.10; Description =Aldose 1-epimerase
EAGRAGIICHNARRTQILYVSNGKINKKISNWGATITSLLVPDAXGSVAXDVAAPDTRTLDPYMKXMTPYFGCLVGRVANRIYDGKFTIKALEYSLSAYKAPNRLPAATKRSDNVXWASPREKKDTQXPSITVHYHSXEGKQRYPGXDVTLRATYSLPGATNRRFDMEGTXRTKXAPIRLWQDSYWNLAGHACGDILKHSLHICGKDITPGDENTIATGEIMPDDGTPFDFTTDRRIGESIDSVPGGYDHNYLLNCG

SEQ ID NO: 13123 - protein, 244 aa, Zea mays
  misc_feature (207)..(211): Xaa can be any naturally occurring amino acid
  misc_feature (216)..(217): Xaa can be any naturally occurring amino acid
  misc_feature (222)..(222): Xaa can be any naturally occurring amino acid
  misc_feature (226)..(229): Xaa can be any naturally occurring amino acid
  misc_feature (234)..(241): Xaa can be any naturally occurring amino acid
  Coding DNA Sequence Number=SeqID_7811
  Gene Ontology: Mol. function=small protein activating enzyme activity; Cellular component=nucleus; Biological process=protein modification process
  Homolog annotation: Hit_ID=Q2R3X8; Match level="QueryCoverage=94%, HitCoverage=70%, E-value=1e-101, Identity=79%"; Hit description =Ubiquitin activating enzyme, putative, expressed
  Pfam annotation: Domain name=ThiF; Domain location=38-175; Score =12.0; E_value=1.3e-07; Accession=PF00899.11; Description=ThiF family
MGGGGGGGAEEEELTAQETALYDRQIRVWGVDAQKRLSKAHVLVCGVNGTTIEFCKNIVLAGVGSLSLMDDHIVTEDDLNSNFLIPHDESVYGGKSRAEVCCESLKDFNPMVRVAVAKGDPSLIDGTFIDRFDIIVLSRASLKTKLFINDNCRKRSKHIAFYSVDCKDSCGEIFVDLQNHSYLQKKPGGEPEQQELKYPSLQEAISXXXXXLSKKXXKLYYXMRVXXXXESSEXXXXXXXXLSD

SEQ ID NO: 13124 - protein, 140 aa, Zea mays
  misc_feature (124)..(124): Xaa can be any naturally occurring amino acid
  misc_feature (135)..(137): Xaa can be any naturally occurring amino acid
  Coding DNA Sequence Number=SeqID_7812
  Gene Ontology: Mol. function=protein disulfide oxidoreductase activity; Cellular component=extracellular region; Biological process=cell redox homeostasis
  Homolog annotation: Hit_ID=Q1PCR8; Match level="QueryCoverage=71%, HitCoverage=85%, E-value=7e-41, Identity=80%"; Hit description =Glutaredoxin
  Pfam annotation: Domain name=Glutaredoxin; Domain location=66-130; Score=64.5; E_value=3.5e-16; Accession=PF00462.14; Description =Glutaredoxin
MASSLSSILFKGIAARSLTSPLTRSSYYGMRNFNDTHDDFKPANKLESSGISLSDVIEQDVKDNPVMIYMKGVPDFPQCGFSSLAVRVLKHYDVPLSARNILEDPELKNAAKAFSIWSTFSQVXITGEFVGGSHXXXNMH

SEQ ID NO: 13125 - protein, 180 aa, Zea mays
  misc_feature (25)..(25): Xaa can be any naturally occurring amino acid
  misc_feature (85)..(85): Xaa can be any naturally occurring amino acid
  misc_feature (143)..(143): Xaa can be any naturally occurring amino acid
  Coding DNA Sequence Number=SeqID_7813
  Gene Ontology: Mol. function=structural constituent of ribosome; Cellular component=ribonucleoprotein complex; Biological process =translation
  Homolog annotation: Hit_ID=Q943F3; Match level="QueryCoverage=100%, HitCoverage=100%, E-value=2e-60, Identity=67%"; Hit description=60S ribosomal protein L18a
  Pfam annotation: Domain name=Ribosomal_L18ae; Domain location=5-180; Score=213.6; E_value=4.7e-61; Accession=PF01775.7; Description =Ribosomal L18ae protein family
MVAHRFHQYQVVVRALPTPTDEHPXIYRMKFWATNDVRAKSKFWYFLINMKKVKKSNVQMLAIIEIFKRNPTTIKNYGTLASGTXHRTMYHNMYDDYLYTTLDVIVEHMYNDMDSRHRVMSPCIQIINTLMAHFKLCKRDNTXKQLHNSAIEFPLVYRKENAATTEFTITFESSRTNLLM

SEQ ID NO: 13126 - protein, 209 aa, Zea mays
  misc_feature (30)..(32): Xaa can be any naturally occurring amino acid
  misc_feature (35)..(36): Xaa can be any naturally occurring amino acid
  misc_feature (166)..(168): Xaa can be any naturally occurring amino acid
  misc_feature (180)..(180): Xaa can be any naturally occurring amino acid
  misc_feature (194)..(195): Xaa can be any naturally occurring amino acid
  misc_feature (198)..(199): Xaa can be any naturally occurring amino acid
  Coding DNA Sequence Number=SeqID_7814
  Gene Ontology: Mol. function=serine-type endopeptidase activity; Cellular component=intracellular; Biological process=protein modification process
  Homolog annotation: Hit_ID=P93501; Match level="QueryCoverage=100%, HitCoverage=81%, E-value=1e-101, Identity=93%"; Hit description =Ubiquitin-like protein
  Pfam annotation: Domain name=ubiquitin; Domain location=158-209; Score=27.7; E_value=4.2e-05; Accession=PF00240.13; Description =Ubiquitin family
  Pfam annotation: Domain name=ubiquitin; Domain location=6-74; Score =118.1; E_value=2.7e-32; Accession=PF00240.13; Description=Ubiquitin family
  Pfam annotation: Domain name=ubiquitin; Domain location=82-150; Score= 132.2; E_value=1.5e-36; Accession=PF00240.13; Description=Ubiquitin family
  Pfam module annotation: Pfam domain module=ubiquitin::ubiquitin::ubiqu itin; Domain location=158-209::6-74::82-150
MQIFVKTLTGKTITLEVESSDTIDNVKAKXXXKEXXPPDQQRLIFAGKQLEDGRTLADYNIQKESTLHLVLRLRGGMQIFVKTLTGKTITLEVESSDTIDNVKAKIQDKEGIPPYQQRLIFAGKQLEDGRTLADYNIQKESTLHLVLRLRGGMQIFVKTLTGKTIXXXVESSDTIDNVKXKIQDKEGIPPDQQXXIFXXKHLEDGRTLA

SEQ ID NO: 13127 - protein, 107 aa, Zea mays
  misc_feature (2)..(3): Xaa can be any naturally occurring amino acid
  misc_feature (7)..(7): Xaa can be any naturally occurring amino acid
  Coding DNA Sequence Number=SeqID_7815
  Gene Ontology: Mol. function=peptidyl-prolyl cis-trans isomerase activity; Cellular component=intracellular; Biological process =protein folding
  Homolog annotation: Hit_ID=Q3MST6; Match level="QueryCoverage=47%, HitCoverage=27%, E-value=6e-19, Identity=86%"; Hit description =Peptidyl-prolyl cis-trans isomerase
VXXIAKXTCKPEYAYGSAGSPPDIPPDATLVFEVELVACRPRKGSSLGSVSEERALLEELKKQRELAAAAKEEEKKKREEAKAAAAARVQAKLEAKKGQGKGKGKAK

SEQ ID NO: 13128 - protein, 555 aa, Zea mays
  misc_feature (27)..(27): Xaa can be any naturally occurring amino acid
  misc_feature (32)..(32): Xaa can be any naturally occurring amino acid
  misc_feature (53)..(53): Xaa can be any naturally occurring amino acid
  misc_feature (59)..(59): Xaa can be any naturally occurring amino acid
  misc_feature (71)..(71): Xaa can be any naturally occurring amino acid
  misc_feature (133)..(133): Xaa can be any naturally occurring amino acid
  misc_feature (231)..(231): Xaa can be any naturally occurring amino acid
  misc_feature (250)..(250): Xaa can be any naturally occurring amino acid
  misc_feature (269)..(269): Xaa can be any naturally occurring amino acid
  misc_feature (320)..(320): Xaa can be any naturally occurring amino acid
  misc_feature (348)..(348): Xaa can be any naturally occurring amino acid
  misc_feature (356)..(356): Xaa can be any naturally occurring amino acid
  misc_feature (401)..(402): Xaa can be any naturally occurring amino acid
  misc_feature (478)..(478): Xaa can be any naturally occurring amino acid
  misc_feature (498)..(498): Xaa can be any naturally occurring amino acid
  misc_feature (526)..(526): Xaa can be any naturally occurring amino acid
  misc_feature (528)..(528): Xaa can be any naturally occurring amino acid
  misc_feature (540)..(540): Xaa can be any naturally occurring amino acid
  misc_feature (542)..(545): Xaa can be any naturally occurring amino acid
  misc_feature (547)..(547): Xaa can be any naturally occurring amino acid
  Coding DNA Sequence Number=SeqID_7816
  Subcellular localization annotation: CTP_CleavageSite=73; ConfidenceScore=5.67e-01
LVLRALIVFLPPTRDLASTFSCLRVAXRSSTXQFRSSRPSVRDSRALFASLVXVPGCEXGVSRPCCPRSHXLVCVLLSALFSALSSRISFRLLSRCIWCCRRVRHLFFRLSLAVALSARRLALVSPSTFVLAXCSLPVSRLCCPRALATTTSPSVFWSSSLLFSRCHPRSSYLVSALRLRRTLPGPALPRRLFPSSSLVAAGSFAPVLSSRPPFVLFAFSPRSSSFVPSLXLCSSFSAPCLCVFLFFVAXPPVSLCRCVRSSSARARRXFVSFVSRCFVPCRLALAWCVVLPPSFFSVGSVRLLLCSPRSLRFALSAFRXLFFALASPCCPPCFRPCPLFSFSFPPSXFPVPLCSXAFPFLVFSCSSFLGSSRALLSVCPLFCRSSGRLSRLFVAAVSPRXXLVLPRPGAFCRVCGVRVGVSVSFFFFSPLCLCACCPPRRRPRSVRSCAAGPSSSVLGVSSLSLLLRGPSLSSLLLXLSAVCPALSPPLLSAPLLRXAPAFSARLGPLSARRRPPSSVSLRLLRXPXVGPPVCFGGNRXGXXXXPXLSWLSTLL

SEQ ID NO: 13129 - protein, 150 aa, Zea mays
  misc_feature (93)..(93): Xaa can be any naturally occurring amino acid
  misc_feature (113)..(113): Xaa can be any naturally occurring amino acid
  Coding DNA Sequence Number=SeqID_7818
  Gene Ontology: Mol. function=inorganic diphosphatase activity; Cellular component=cytoplasm; Biological process=phosphate metabolic process
  Homolog annotation: Hit_ID=Q75L10; Match level="QueryCoverage=95%, HitCoverage=65%, E-value=2e-50, Identity=73%"; Hit description =Putative inorganic pyrophosphatase
  Pfam annotation: Domain name=Pyrophosphatase; Domain location=47-150; Score=30.0; E_value=2.4e-10; Accession=PF00719.9; Description =Inorganic pyrophosphatase
MRSGLPLPQRILHLNERILSSMSHEVCLLDTLRNDLEIGPGAPTIYNCVIEIPRGNKDKYELDKKTGLINEDRVLYSSHVYPHNYGFIPRTHXEDSDPLDVLGIMHEPEIPDXFLRANAMRLMPMIDHGEAYDKIIAACADDPHCRHYND

SEQ ID NO: 13130 - protein, 170 aa, Zea mays
  misc_feature (142)..(143): Xaa can be any naturally occurring amino acid
  misc_feature (165)..(166): Xaa can be any naturally occurring amino acid
  Coding DNA Sequence Number=SeqID_7819
  Gene Ontology: Mol. function=hydrolase activity; Cellular component =plasma membrane; Biological process=defense response to fungus
  Homolog annotation: Hit_ID=A7PK24; Match level="QueryCoverage=100%, HitCoverage=33%, E-value=8e-69, Identity=79%"; Hit description =Chromosome chr15 scaffold_19, whole genome shotgun sequence
  Pfam annotation: Domain name=Dynamin_N; Domain location=42-170; Score= 116.3; E_value=9.3e-32; Accession=PF00350.13; Description=Dynamin family
MTTMESLIGLVNRIQRACTVLGDYGGADGNAFSSLWEALPSVAVVGGQSSGKSSVLESIAGRDFLPRGSGIVTRRPLVLQLHKMESGSQEYAEFLHLPRRKFTDFALVRQEIQAETDRVTGKTKQISPIPIHLSIYSPNVVXXTLIDLPGLTKVAVEGQPESIVXXIETM

SEQ ID NO: 13131 - protein, 221 aa, Zea mays
  Coding DNA Sequence Number=SeqID_7820
  Gene Ontology: Mol. function=catalytic activity; Biological process =metabolic process
  Homolog annotation: Hit_ID=A7R3X1; Match level="QueryCoverage=96%, HitCoverage=87%, E-value=7e-76, Identity=63%"; Hit description =Chromosome undetermined scaffold_583, whole genome shotgun sequence
  Pfam annotation: Domain name=Isochorismatase; Domain location=30-214; Score=-51.6; E_value=0.016; Accession=PF00857.11; Description =Isochorismatase family
MGSHTPTTLELIKEEIPVKQEPLLLNGDIKTGLVLVDVVNGFCTVGAGNFAPREPDEQISKMVEESVRLSRKFAEKNWPILAFLDCHHPDIPEPPYPPHCLIGTDEGKLVPELLWLENEPNATLRCKECIDGFVGSYEKDGSNVFVDWVKNNQIKQILVGGICTDVCVLDFVCSVLSARNRRFLPPLENVIVSSPACATYDVPLHVAKTNKDWVSHPQGVM

SEQ ID NO: 13132 - protein, 153 aa, Zea mays
  Coding DNA Sequence Number=SeqID_7821
  Gene Ontology: Mol. function=heat shock protein binding; Cellular component=chloroplast; Biological process=protein folding
  Homolog annotation: Hit_ID=P93499; Match level="QueryCoverage=84%, HitCoverage=88%, E-value=9e-44, Identity=65%"; Hit description=DnaJ -like protein
  Pfam annotation: Domain name=DnaJ; Domain location=58-122; Score =106.2; E_value=1e-28; Accession=PF00226.21; Description=DnaJ domain
  Subcellular localization annotation: CTP_CleavageSite=38; ConfidenceScore=5.79e-01
MLLSSFPSLLTTTTTFSGKTVTSPSRQVRSRPVLAFVTATEQRPSYLSHNGMASCTTSFYQILGIAAGASDKEIKAAYRRLARMCHPDVAADDRKDSSADEFMKIHAAYSTLSDPEKRASYDRSLFRRQRPLTMTASRFSGYSGRKWETDQCW

SEQ ID NO: 13133 - protein, 142 aa, Zea mays
  misc_feature (27)..(27): Xaa can be any naturally occurring amino acid
  Coding DNA Sequence Number=SeqID_7822
  Gene Ontology: Mol. function=DNA-directed RNA polymerase activity; Cellular component=RNA polymerase complex; Biological process =transcription, DNA-dependent
  Homolog annotation: Hit_ID=A2Q3E0; Match level="QueryCoverage=77%, HitCoverage=77%, E-value=1e-51, Identity=88%"; Hit description=DNA -directed RNA polymerase, 14 to 18 kDa subunit
  Pfam annotation: Domain name=RNA_pol_Rpb6; Domain location=61-114; Score=86.0; E_value=1.2e-22; Accession=PF01192.13; Description=RNA polymerase Rpb6
MADDDYDDVDMGYEDEPAEPEIEEGAXEDVENKNEDITGEPLETEDKEEEQPVERPRKTSKFMTKYERARILGTRALQISMNAPVMVELEGETDPLEIAMKELRERKIPFTIRRYLPDGSYEDWGVDKLIVEDSWKRQVGGQ

SEQ ID NO: 13134 - protein, 190 aa, Zea mays
  misc_feature (29)..(31): Xaa can be any naturally occurring amino acid
  misc_feature (33)..(34): Xaa can be any naturally occurring amino acid
  misc_feature (141)..(141): Xaa can be any naturally occurring amino acid
  misc_feature (161)..(161): Xaa can be any naturally occurring amino acid
  misc_feature (167)..(168): Xaa can be any naturally occurring amino acid
  misc_feature (178)..(178): Xaa can be any naturally occurring amino acid
  misc_feature (181)..(181): Xaa can be any naturally occurring amino acid
  misc_feature (189)..(189): Xaa can be any naturally occurring amino acid
  Coding DNA Sequence Number=SeqID_7823
  Gene Ontology: Mol. function=ER retention sequence binding; Cellular component=endoplasmic reticulum membrane; Biological process=vesicle- mediated transport
  Homolog annotation: Hit_ID=A7QDG3; Match level="QueryCoverage=100%, HitCoverage=88%, E-value=6e-74, Identity=73%"; Hit description=ER lumen protein retaining receptor
  Pfam annotation: Domain name=ER_lumen_recept; Domain location=1-190; Score=338.2; E_value=1.5e-98; Accession=PF00810.9; Description=ER lumen protein retaining receptor
MNIFRLAGDMTHLLSILVLLLKIYATKSXXXIXXKTQELYAIVFLARYLNLFTDFIFIYNTIMKVVFIASSLAIVWCMRVHPIVRRSYDKELDTFRHYILIGASFVLALILHEKFTIQEIFWAFSIYLEAVAILPQLVLLXRSGNVDNLTGQYVFFLGAYXAFYILXXIYRYLTEPRXTLXIACLSGVXQ

SEQ ID NO: 13135 - protein, 137 aa, Zea mays
  misc_feature (98)..(99): Xaa can be any naturally occurring amino acid
  misc_feature (108)..(109): Xaa can be any naturally occurring amino acid
  misc_feature (113)..(113): Xaa can be any naturally occurring amino acid
  misc_feature (121)..(121): Xaa can be any naturally occurring amino acid
  misc_feature (130)..(130): Xaa can be any naturally occurring amino acid
  Coding DNA Sequence Number=SeqID_7824
  Gene Ontology: Mol. function=transporter activity; Cellular component= integral to membrane; Biological process=transport
  Homolog annotation: Hit_ID=O22588; Match level="QueryCoverage=96%, HitCoverage=51%, E-value=4e-37, Identity=57%"; Hit description =Probable aquaporin TIP3-2
  Pfam annotation: Domain name=MIP; Domain location=13-138; Score=29.9; E_value=8.9e-12; Accession=PF00230.10; Description=Major intrinsic protein
MPPCRYAFGRADEATHPDSMRGTLAEFLSTLVFVFAGEGSVLALEKILIGPSTPAGLVVVALAHAFALFAAVSAAINVSGGHVNPAVTFGALVGGRIXXIRAVYFWVXXILGXIAACLLLXLPTNGMRPXGFHVASG

SEQ ID NO: 13136 - protein, 191 aa, Zea mays
  misc_feature (15)..(16): Xaa can be any naturally occurring amino acid
  misc_feature (188)..(188): Xaa can be any naturally occurring amino acid
  misc_feature (191)..(191): Xaa can be any naturally occurring amino acid
  Coding DNA Sequence Number=SeqID_7825
  Gene Ontology: Mol. function=enoyl-[acyl-carrier-protein] reductase (NADH) activity; Cellular component=chloroplast; Biological process =metabolic process
  Homolog annotation: Hit_ID=A7NZZ8; Match level="QueryCoverage=90%, HitCoverage=44%, E-value=7e-71, Identity=74%"; Hit description =Chromosome chr6 scaffold_3, whole genome shotgun sequence
  Subcellular localization annotation: CTP_CleavageSite=73; ConfidenceScore=5.63e-01
MAASAASSLQMAATXXCISASHRVVKAGANILSVNSKNTAWDKLTSACHVSSLQTLQRNFTSSSGQFSKFTTKAMAESSETKPLSGLPIDLRGERAFIAGIADDNGYGWAIAKSLAAAGAEILVGTWVPALNIFETSLRRGKFDASRVLPDGSLMNITKVYPLDAVFDNLEDVPEDIKTNKRYAGSTXWTX

SEQ ID NO: 13137 - protein, 163 aa, Zea mays
  Coding DNA Sequence Number=SeqID_7826
  Gene Ontology: Mol. function=protein binding; Cellular component =integral to membrane; Biological process=protein amino acid phosphorylation
  Homolog annotation: Hit_ID=A7QL47; Match level="QueryCoverage=91%, HitCoverage=70%, E-value=5e-45, Identity=62%"; Hit description =Chromosome chr3 scaffold_117, whole genome shotgun sequence
  Pfam annotation: Domain name=LRRNT_2; Domain location=12-52; Score =34.1; E_value=5.2e-07; Accession=PF08263.3; Description=Leucine rich repeat N-terminal domain
  Pfam annotation: Domain name=LRR_1; Domain location=104-126; Score =12.2; E_value=1.7; Accession=PF00560.23; Description=Leucine Rich Repeat
  Pfam annotation: Domain name=LRR_1; Domain location=128-150; Score =15.0; E_value=0.29; Accession=PF00560.23; Description=Leucine Rich Repeat
  Pfam annotation: Domain name=LRR_1; Domain location=80-102; Score =18.1; E_value=0.034; Accession=PF00560.23; Description=Leucine Rich Repeat
  Pfam module annotation: Pfam domain module=LRRNT_2::LRR_1::LRR_1::LRR_ 1; Domain location=12-52::104-126::128-150::80-102
LSFVVLIIHASANSESDALLAFKSKVSDPSGAMQSWDGSLVDPCTLLHVIFDSNKHVIRVDLPKQKLAGSLAPELSQLKSLQYLELHGNALTGTIPAELGDLPNLISMDLFDNNLVGGIPTSFGKLKSLKFLRLNNNKLTGSVPREVTALNLPVLDVSNQRKP

SEQ ID NO: 13138 - protein, 140 aa, Zea mays
  misc_feature (130)..(130): Xaa can be any naturally occurring amino acid
  Coding DNA Sequence Number=SeqID_7827
  Gene Ontology: Mol. function=peptidase activity; Biological process =protein targeting
  Homolog annotation: Hit_ID=A7QG62; Match level="QueryCoverage=98%, HitCoverage=56%, E-value=4e-63, Identity=78%"; Hit description =Chromosome undetermined scaffold_91, whole genome shotgun sequence
  Pfam annotation: Domain name=DUF862; Domain location=2-140; Score =153.9; E_value=4.4e-43; Accession=PF05903.5; Description=Eukaryotic protein of unknown function (DUF862)
MTDVILHIYDVTNSESEKANKTILQINKIFKDGIGIGGIFHSAVQVYGDNEWSFGFCEEGTGVFSCPCGSNPMYSYRECIVLGKTTFSILKVNQILREFSKEWPGSSYDLLSKNCNHFCDELCERLEVPXVPGWVNRFAN

SEQ ID NO: 13139 - protein, 204 aa, Zea mays
  misc_feature (36)..(38): Xaa can be any naturally occurring amino acid
  misc_feature (174)..(174): Xaa can be any naturally occurring amino acid
  Coding DNA Sequence Number=SeqID_7828
  Gene Ontology: Mol. function=structural constituent of ribosome; Cellular component=ribonucleoprotein complex; Biological process =translation
  Homolog annotation: Hit_ID=O23515; Match level="QueryCoverage=100%, HitCoverage=100%, E-value=7e-82, Identity=74%"; Hit description=60S ribosomal protein L15-1
  Pfam annotation: Domain name=Ribosomal_L15e; Domain location=2-193; Score=464.4; E_value=1.5e-136; Accession=PF00827.8; Description =Ribosomal L15
MGAYKYVSELWRKKQSDVMRFLQRVRCWEYRQQPSXXXLQRPTRPDRARRLGFKAKQGYVIYRVRVRRGGRKRPVPKGIVYGKPTNQGVTQLKFQRSKRSLAEERAGRKLGGLRVVNSYWLNEDSTYKYFEVILVDPAHNAIRNDPRISWIVNPVHKHRELRGLTSEGKKNRGXRGKGHRNHKMRPSRRATWKRNNSLSLRRYR

SEQ ID NO: 13140 - protein, 152 aa, Zea mays
  Coding DNA Sequence Number=SeqID_7829
  Gene Ontology: Mol. function=superoxide dismutase activity; Cellular component=cytoplasm; Biological process=superoxide metabolic process
  Homolog annotation: Hit_ID=Q1HIU6; Match level="QueryCoverage=100%, HitCoverage=100%, E-value=3e-79, Identity=91%"; Hit description =Superoxide dismutase [Cu-Zn]
  Pfam annotation: Domain name=Sod_Cu; Domain location=1-152; Score =347.2; E_value=2.8e-101; Accession=PF00080.10; Description =Copperzinc superoxide dismutase (SODC)
MVKAVAVLNSSEGVTGTIFFTQEGDAPTTVTGNISGLKPGHHGFHVHALGDTTNGCMSTGPHFNPAGKEHGAPEDEHRHAGDLGNITVGDDGTATFTTVDKQIPLTGPNSIIGRAVVVHADPDDLGKGGHELSKSTGNAGGRVACGIIGLQG

SEQ ID NO: 13141 - protein, 194 aa, Zea mays
  misc_feature (18)..(19): Xaa can be any naturally occurring amino acid
  misc_feature (33)..(35): Xaa can be any naturally occurring amino acid
  misc_feature (155)..(155): Xaa can be any naturally occurring amino acid
  misc_feature (169)..(170): Xaa can be any naturally occurring amino acid
  misc_feature (186)..(187): Xaa can be any naturally occurring amino acid
  misc_feature (192)..(193): Xaa can be any naturally occurring amino acid
  Coding DNA Sequence Number=SeqID_7830
  Gene Ontology: Mol. function=protein binding; Cellular component =integral to membrane; Biological process=ion transport
  Homolog annotation: Hit_ID=Q9FHT4; Match level="QueryCoverage=92%, HitCoverage=30%, E-value=5e-77, Identity=77%"; Hit description =Endosomal protein-like
  Pfam annotation: Domain name=EMP70; Domain location=54-193; Score= -343.0; E_value=0.0054; Accession=PF02990.7; Description=Endomembrane protein 70
MDMVKITPYLVALTVMIXXGVTHVRSDASDHRXXXGDDVPLYANKVGPFHNPSETYRYFDLPFCSSAPIKEKKEALGEVLNGDRLVSAPYKLDFLNDKDSEIACKKRLTVEDVTKFRESVSKDYYFEMYYDDLPIWGFLGKVDKEGKTDSSEYKXYLFTHLQFEIFYNXXRVIEISVRSDPHTLVXXTEDKXXE

SEQ ID NO: 13142 - protein, 227 aa, Zea mays
  misc_feature (16)..(16): Xaa can be any naturally occurring amino acid
  misc_feature (21)..(21): Xaa can be any naturally occurring amino acid
  misc_feature (36)..(36): Xaa can be any naturally occurring amino acid
  misc_feature (39)..(40): Xaa can be any naturally occurring amino acid
  misc_feature (44)..(45): Xaa can be any naturally occurring amino acid
  misc_feature (48)..(48): Xaa can be any naturally occurring amino acid
  misc_feature (52)..(52): Xaa can be any naturally occurring amino acid
  misc_feature (56)..(57): Xaa can be any naturally occurring amino acid
  misc_feature (72)..(72): Xaa can be any naturally occurring amino acid
  misc_feature (74)..(74): Xaa can be any naturally occurring amino acid
  misc_feature (94)..(94): Xaa can be any naturally occurring amino acid
  misc_feature (103)..(103): Xaa can be any naturally occurring amino acid
  misc_feature (105)..(105): Xaa can be any naturally occurring amino acid
  misc_feature (116)..(116): Xaa can be any naturally occurring amino acid
  misc_feature (118)..(118): Xaa can be any naturally occurring amino acid
  misc_feature (128)..(128): Xaa can be any naturally occurring amino acid
  misc_feature (136)..(136): Xaa can be any naturally occurring amino acid
  misc_feature (142)..(143): Xaa can be any naturally occurring amino acid
  misc_feature (147)..(147): Xaa can be any naturally occurring amino acid
  misc_feature (149)..(149): Xaa can be any naturally occurring amino acid
  misc_feature (151)..(151): Xaa can be any naturally occurring amino acid
  misc_feature (171)..(171): Xaa can be any naturally occurring amino acid
  misc_feature (179)..(179): Xaa can be any naturally occurring amino acid
  misc_feature (184)..(184): Xaa can be any naturally occurring amino acid
  misc_feature (192)..(193): Xaa can be any naturally occurring amino acid
  misc_feature (201)..(201): Xaa can be any naturally occurring amino acid
  misc_feature (206)..(206): Xaa can be any naturally occurring amino acid
  misc_feature (212)..(212): Xaa can be any naturally occurring amino acid
  misc_feature (223)..(223): Xaa can be any naturally occurring amino acid
  Coding DNA Sequence Number=SeqID_7831
  Gene Ontology: Mol. function=catalytic activity; Cellular component =membrane; Biological process=metabolic process
  Homolog annotation: Hit_ID=A2ZSM3; Match level="QueryCoverage=100%, HitCoverage=50%, E-value=1e-47, Identity=50%"; Hit description =Putative uncharacterized protein
  Subcellular localization annotation: CTP_CleavageSite=59; ConfidenceScore=5.41e-01
MGLAAVAVRPFCSRLXSSASXAAASKTAAGTATSLXPRXXHPHXXPYXRRLXFLVXXASQSQAGPGTPPTPXPXPVPSDPRAAVSGNLPFFDRXLFPDSFPLXTXPSKEEEDAAPXQXDEAVAPAVPXREETETEXEALRLXXRAVXSXCXEPLGTVAAEDPQFTEMLNYXQVFIRDFXPPALXFLMRRETXXVRNFLLHXLQLQXWEKTVXCYSPWQGFMPXSFKI

SEQ ID NO: 13143 - protein, 171 aa, Zea mays
  misc_feature (22)..(22): Xaa can be any naturally occurring amino acid
  Coding DNA Sequence Number=SeqID_7832
  Gene Ontology: Mol. function=protein phosphatase type 2A regulator activity; Cellular component=protein phosphatase type 2A complex; Biological process=signal transduction
  Homolog annotation: Hit_ID=Q32SG1; Match level="QueryCoverage=90%, HitCoverage=29%, E-value=9e-57, Identity=70%"; Hit description =Protein phosphatase 2A regulatory subunit B'
  Pfam annotation: Domain name=B56; Domain location=21-171; Score= -168.6; E_value=1.6e-07; Accession=PF01603.10; Description=Protein phosphatase 2A regulatory B subunit (B56 family)
SSLRTRTYTRTDDSSDAAFRAXGQFEDPTNTENHNWVNEKVNLCCGQSDFSDRRKNIKDNEILSQTLVELIDYIASSSEKFSHASMQDITQMASANLITTLSTPPRDNKVDGLDVHDDEPVMDPAWPHLQIGYELVLRFMHSQQTDAKLGKRNIDHSVALRLLDLLDSKDP

SEQ ID NO: 13144 - protein, 139 aa, Zea mays
  misc_feature (26)..(27): Xaa can be any naturally occurring amino acid
  misc_feature (91)..(91): Xaa can be any naturally occurring amino acid
  misc_feature (102)..(102): Xaa can be any naturally occurring amino acid
  Coding DNA Sequence Number=SeqID_7833
  Gene Ontology: Mol. function=ATPase activity; Cellular component =protein complex; Biological process=ATP-dependent proteolysis
  Homolog annotation: Hit_ID=Q8W425; Match level="QueryCoverage=93%, HitCoverage=33%, E-value=2e-51, Identity=79%"; Hit description=26S proteasome non-ATPase regulatory subunit 6
MSKSVVPAVVMKRNAALLAEMRGRIXXEIRKLEDKIADADENLDESEVRESHLGKSVYFIRDGEKENVLEQIKVTEGKTVTVEQKMDLVFXTLQIGFFYMEXDLISKSIDKAKNLFEEGGDCETNNRLQVYEGLYCMAT

SEQ ID NO: 13145 - protein, 98 aa, Zea mays
  Coding DNA Sequence Number=SeqID_7834
  Gene Ontology: Mol. function=[glutamate-ammonia-ligase] adenylyltransferase activity; Cellular component=intracellular; Biological process=regulation of transcription, DNA-dependent
  Homolog annotation: Hit_ID=Q8UGQ4; Match level="QueryCoverage=100%, HitCoverage=9%, E-value=5e-41, Identity=86%"; Hit description =Glutamate-ammonia-ligase adenylyltransferase
  Pfam annotation: Domain name=GlnE; Domain location=2-99; Score= -113.5; E_value=0.0085; Accession=PF03710.6; Description=Glutamate -ammonia ligase adenylyltransferase
HGPYPDGRVSVMRMDKLGSFELSAGSHVDLILLYDYNDTAQESTGAKPLDVVRYFTRVTQRLITAVSAPPSEGVLYEVDMWLRPSGNKGAVATRISAF

SEQ ID NO: 13146 - protein, 174 aa, Zea mays
  misc_feature (10)..(10): Xaa can be any naturally occurring amino acid
  Coding DNA Sequence Number=SeqID_7835
  Gene Ontology: Mol. function=transmembrane receptor activity; Cellular component=integral to plasma membrane; Biological process =multicellular organismal development
  Homolog annotation: Hit_ID=O43157-2; Match level="QueryCoverage=100%, HitCoverage=8%, E-value=2e-94, Identity=96%"; Hit description=Isoform 2 of O43157
  Pfam annotation: Domain name=Plexin_cytopl; Domain location=1-174; Score=-101.9; E_value=4.9e-15; Accession=PF08337.2; Description =Plexin cytoplasmic region
LTNWMSICLXTFVRDSVGEPLYMLFRGIKHQVDKGPVDSVTGKAKYTLNDNRLLREDVEYRPLTLNVMLAMGPGAGEAQGVPVKVLDCDTISQAKEKMLDQLYKGVPLAQRPDPRTLDVEWRSGVAGHLILSDEDVTSEVQGLWRRLNTLQHYKVPDGATVALVPCLTKHALRE

SEQ ID NO: 13147 - protein, 187 aa, Zea mays
  misc_feature (49)..(49): Xaa can be any naturally occurring amino acid
  misc_feature (52)..(52): Xaa can be any naturally occurring amino acid
  misc_feature (65)..(65): Xaa can be any naturally occurring amino acid
  Coding DNA Sequence Number=SeqID_7836
  Gene Ontology: Mol. function=serine carboxypeptidase activity; Cellular component=vacuole; Biological process=proteolysis
  Homolog annotation: Hit_ID=P37891; Match level="QueryCoverage=97%, HitCoverage=36%, E-value=1e-57, Identity=61%"; Hit description =Serine carboxypeptidase 3 precursor
TPGVFRRHPEFAKVDASITGQSDAGHYIPTLASRVHQEKQFIFFFSKTXKAXAGGDGLTDPETHXKAYTDYALERNPITTSGYERINRCIPPREWAMNKSGPDRKASCMAAYMVCNNILNSIMNLVGTKNYYDVRNECEAKLSYDFSNLERFSPDKPAKEAPGVSDIDVVSCSTTAHETKLTDWMTN

SEQ ID NO: 13148 - protein, 101 aa, Zea mays
  Coding DNA Sequence Number=SeqID_7837
  Gene Ontology: Mol. function=magnesium ion binding; Cellular component=chloroplast; Biological process=photosynthesis, light harvesting
  Homolog annotation: Hit_ID=O24561; Match level="QueryCoverage=99%, HitCoverage=34%, E-value=2e-43, Identity=87%"; Hit description =Chlorophyll a/b-binding protein CP29 precursor
  Pfam annotation: Domain name=Chloroa_b-bind; Domain location=1-71; Score=-11.9; E_value=0.00016; Accession=PF00504.12; Description =Chlorophyll A-B binding protein
LIWIEVLVIGYIEFQRNPELDPEKRLYPGGSYFYPLALAADPKKKERLQLAEIKHARLPMVAFLGFPVQAPPPGKGPLNNWAPPLRDPLHTPIFDTFGGSF

SEQ ID NO: 13149 - protein, 173 aa, Zea mays
  misc_feature (5)..(7): Xaa can be any naturally occurring amino acid
  Coding DNA Sequence Number=SeqID_7838
  Gene Ontology: Mol. function=transferase activity; Cellular component= endoplasmic reticulum membrane; Biological process=protein amino acid N-linked glycosylation
  Homolog annotation: Hit_ID=Q7XIE1; Match level="QueryCoverage=100%, HitCoverage=33%, E-value=4e-79, Identity=84%"; Hit description =Putative alpha 3 glucosyltransferase
  Pfam annotation: Domain name=Alg6_Alg8; Domain location=35-173; Score= -308.4; E_value=0.049; Accession=PF03155.6; Description=ALG6, ALG8 glycosyltransferase family
  Subcellular localization annotation: CTP_CleavageSite=45; ConfidenceScore=5.14e-01
KPKKXXXSAPDPSVAARLPWQPSAPPLATALLISFAALLLRALVSVGPYSGQGAAPKFGDYEAQRHWMELTLHLPSSDWYRNTSDNDLAYWGLDYPPLSAYQSRLHARLINASLPDAVALRSSRGFESHESKLLMRWTVLSSDLMVFFPAALWFVWAYIKDGVGGSGERREGW

SEQ ID NO: 13150 - protein, 172 aa, Zea mays
  Coding DNA Sequence Number=SeqID_7839
  Homolog annotation: Hit_ID=A1DII6; Match level="QueryCoverage=99%, HitCoverage=22%, E-value=1e-67, Identity=74%"; Hit description =Microtubule associated protein (Ase1), putative
AELVAALESYSSHLETTFLQIELPPTTPGAVIPPSFDLSPAYVTALDSEFSRVYEEYHRRITLVQSISEEIIKLWAELGTPQVQTDSNIVRHYRESPEQLGLHETDLTNLIARRDKLVEEKKGRERKIKELRTNVESLWERFGVEEADRKAFLSANRGCGLRTINEFEEELA

SEQ ID NO: 13151 - protein, 326 aa, Zea mays
  Coding DNA Sequence Number=SeqID_7840
  Gene Ontology: Mol. function=aspartic-type endopeptidase activity; Cellular component=chromatin; Biological process=DNA integration
  Homolog annotation: Hit_ID=Q7XEA3; Match level="QueryCoverage=89%, HitCoverage=20%, E-value=2e-89, Identity=46%"; Hit description =Retrotransposon protein, putative, Ty1-copia subclass
  Pfam annotation: Domain name=rve; Domain location=79-201; Score=54.4; E_value=3.8e-13; Accession=PF00665.16; Description=Integrase core domain
PLEENGYSIVIHGGALKVWDKVGTSMAKVERASNRLYILKLDDEMVRGMPDIEHVDEVCDGCMAGKQHRISFPGEAKYRATKKLELVHGNLCGPVTPSRNKFFLLLVDDLSRYMWLTLLKTKDQAMEAFVTFQAWAEVEAETKNGVVERRNQTVMGMARSMLKAMGVPGTFWGEAVSTAVYLLNRTMTKGNGGKTPYELWHGRTPAVHHLRTFGCVAHVKSTGPRIKKLDDRSKPMIFVGYEPGTKAYRVYDPTSRRVHLSRDIVFDEEAHWSWSDNEQKEDDGEFTISYAGVTYFSNGCYDSISSGDCGSIVFGNSVSILYGGFD

SEQ ID NO: 13152 - protein, 224 aa, Zea mays
  misc_feature (4)..(4): Xaa can be any naturally occurring amino acid
  misc_feature (9)..(9): Xaa can be any naturally occurring amino acid
  misc_feature (36)..(36): Xaa can be any naturally occurring amino acid
  misc_feature (43)..(43): Xaa can be any naturally occurring amino acid
  misc_feature (63)..(63): Xaa can be any naturally occurring amino acid
  misc_feature (87)..(87): Xaa can be any naturally occurring amino acid
  misc_feature (97)..(97): Xaa can be any naturally occurring amino acid
  misc_feature (106)..(106): Xaa can be any naturally occurring amino acid
  misc_feature (112)..(113): Xaa can be any naturally occurring amino acid
  misc_feature (118)..(118): Xaa can be any naturally occurring amino acid
  misc_feature (120)..(120): Xaa can be any naturally occurring amino acid
  misc_feature (127)..(128): Xaa can be any naturally occurring amino acid
  misc_feature (130)..(130): Xaa can be any naturally occurring amino acid
  misc_feature (134)..(134): Xaa can be any naturally occurring amino acid
  misc_feature (140)..(140): Xaa can be any naturally occurring amino acid
  misc_feature (145)..(145): Xaa can be any naturally occurring amino acid
  misc_feature (152)..(152): Xaa can be any naturally occurring amino acid
  misc_feature (156)..(156): Xaa can be any naturally occurring amino acid
  misc_feature (158)..(158): Xaa can be any naturally occurring amino acid
  misc_feature (171)..(171): Xaa can be any naturally occurring amino acid
  misc_feature (181)..(181): Xaa can be any naturally occurring amino acid
  misc_feature (188)..(188): Xaa can be any naturally occurring amino acid
  misc_feature (200)..(200): Xaa can be any naturally occurring amino acid
  misc_feature (205)..(205): Xaa can be any naturally occurring amino acid
  misc_feature (210)..(210): Xaa can be any naturally occurring amino acid
  Coding DNA Sequence Number=SeqID_7841
  Gene Ontology: Mol. function=serine carboxypeptidase activity; Cellular component=extracellular region; Biological process =proteolysis
  Homolog annotation: Hit_ID=Q9FP87; Match level="QueryCoverage=96%, HitCoverage=48%, E-value=1e-48, Identity=53%"; Hit description =Carboxypeptidase C-like
  Pfam annotation: Domain name=Peptidase_S10; Domain location=5-219; Score=-100.8; E_value=4e-09; Accession=PF00450.12; Description =Serine carboxypeptidase
  Subcellular localization annotation: CTP_CleavageSite=39; ConfidenceScore=5.11e-01
ACRXLVWLXGGPGCSSLIGNFAELGPFLLLNSRSSXLSRNRNXWNRRFGVIFIDNPLGSGFSXPSSLADIPRDEPTIAAHLLAALQXFMALDAAFRXLPLFLAGDXYAGKYXXAAARXIXDANYKLXXGXMVNXQGIVIXNGMTXPVAQVTXHTDXGXFAGLINAKQKATXEGIQNKTVSXVRAGNLXEQGRSRTHHKLXPETTXVATAXNYAPKQVSTRPCQL

SEQ ID NO: 13153 - protein, 211 aa, Zea mays
  Coding DNA Sequence Number=SeqID_7842
  Gene Ontology: Mol. function=transporter activity; Cellular component= integral to membrane; Biological process=transport
  Homolog annotation: Hit_ID=A4W5S2; Match level="QueryCoverage=100%, HitCoverage=49%, E-value=2e-59, Identity=58%"; Hit description=Major facilitator superfamily MFS_1
MATLIAKHFFQLEGESALTSLILTYAAFAVAFFFRPLGAVLFGRLGDRYGRKPVLIAVLVLMTLATVAIGLVPVYASIGVAAPLLITLLRILQGLFAGGEYGGAVSLMTESAPPGKRGFYGAWQSLTVALGLLAGAGVVAVLPLLLGDAAMNAWGWRIPFLLALPLGAVALWLRSGLDESPQFSQTPAAPQQQASLGVTLRAIGLGIGRLM

SEQ ID NO: 13154 - protein, 173 aa, Zea mays
  Coding DNA Sequence Number=SeqID_7843
  Gene Ontology: Mol. function=nucleobase transmembrane transporter activity; Cellular component=membrane; Biological process=nucleobase, nucleoside, nucleotide and nucleic acid transport
  Homolog annotation: Hit_ID=A6T9F0; Match level="QueryCoverage=95%, HitCoverage=33%, E-value=3e-66, Identity=76%"; Hit description =Putative allantoin permease
MKLRGAGFMPNHSEVTSAVASEANAHYSPRLCNDDLAPTRNQSWSWYNIFSFWMSDVHSMGGYVVAASFFTLGLASWQVLLCLLVGICIVQLCANLVAKPSQMAGVPYAVISRQAFGVFGANIPAVIRGLIAFAWYGIQTYLAANALMLVLLKFYPSLSSMTQSSWLGLSQLG

SEQ ID NO: 13155 - protein, 164 aa, Zea mays
  Coding DNA Sequence Number=SeqID_7844
  Gene Ontology: Mol. function=protein kinase activity; Cellular component=cell wall; Biological process=protein amino acid phosphorylation
  Homolog annotation: Hit_ID=Q6K7X0; Match level="QueryCoverage=98%, HitCoverage=15%, E-value=6e-52, Identity=63%"; Hit description =Putative uncharacterized protein P0407A09.33
  Pfam annotation: Domain name=Pkinase; Domain location=2-161; Score= -99.7; E_value=0.012; Accession=PF00069.15; Description=Protein kinase domain
  Pfam annotation: Domain name=Pkinase_Tyr; Domain location=1-159; Score=-141.5; E_value=0.00095; Accession=PF07714.7; Description =Protein tyrosine kinase
  Pfam module annotation: Pfam domain module=Pkinase::Pkinase_Tyr; Domain location=2-161::1-159
MEEEMAVKVFDLEMPGAERSFLAECEALRSIQHRNLLPIRTACSAVDNRGGMFKALLYEFMPNGSLDTWLHPRAAPAAGEKAPKRLGFSQRVNIIVNVADVLDYLHHECGRPTVHCDLKPSNILLDDDLNALLGDFGIARFYADSKSAPSPAVDPTSSVGVRGT

SEQ ID NO: 13156 - protein, 183 aa, Zea mays
  Coding DNA Sequence Number=SeqID_7845
  Gene Ontology: Mol. function=nucleic acid binding; Cellular component= chromatin; Biological process=chromatin assembly or disassembly
  Homolog annotation: Hit_ID=Q10B82; Match level="QueryCoverage=98%, HitCoverage=48%, E-value=3e-53, Identity=57%"; Hit description =Retrotransposon protein, putative, unclassified
  Pfam annotation: Domain name=Chromo; Domain location=115-169; Score =59.4; E_value=1.2e-14; Accession=PF00385.14; Description='chromo' (CHRromatin Organisation MOdifier)
MLKAKLAAAQNRMKIQADKHRLDREFQVGDRVLLKLQPYVQNSVVSRSHPKIAFKFFGPFTVLQRVGSVAYKLELPATALIHPVFHVSQLKPFIPKYTPVFSDISQLVDLSAVEVKPVQFVDRRLVKKGNKPVVQVQVVWSGLPSDATTWEDFDVLKTRFPEVLDWGQSTLEGGEDVSTVVRA

SEQ ID NO: 13157 - protein, 251 aa, Zea mays
  Coding DNA Sequence Number=SeqID_7846
  Homolog annotation: Hit_ID=A5B731; Match level="QueryCoverage=85%, HitCoverage=23%, E-value=8e-56, Identity=55%"; Hit description =Putative uncharacterized protein
SVPLLLQGEKEEEKEEVKTISGIINLARLLDDDDDDVLFEIESLLSGDIEIPIPSDRFNVNGWSRYNTYMANKASEIEGLRSLVKEMEEREAKLEGELLEYYGMKEMEIDVAELQKLLKIKTVEIDMLNNTINSLQEERKKLQDDVERGAVTKKELEVARTKIKELQRQIQVEAGQTKDQLMLLKQQVIGLKAKEEEAVKKEAEVERKLKKLKQLEVEVLELRRKNKELLYEKRDLIVKLDAAEGKITEVS

SEQ ID NO: 13158 - protein, 145 aa, Zea mays
  misc_feature (15)..(15): Xaa can be any naturally occurring amino acid
  misc_feature (120)..(120): Xaa can be any naturally occurring amino acid
  misc_feature (128)..(128): Xaa can be any naturally occurring amino acid
  Coding DNA Sequence Number=SeqID_7847
  Gene Ontology: Mol. function=unfolded protein binding; Cellular component=cytoplasm; Biological process=cellular protein metabolic process
  Homolog annotation: Hit_ID=P40412; Match level="QueryCoverage=100%, HitCoverage=26%, E-value=5e-49, Identity=69%"; Hit description=T -complex protein 1 subunit epsilon
MTVLFDECGRSFIIXLRKQKNKTRLRGLDAHKGDIASSKADGRILRTSIGPKGMDKMLQSPDGDVIITNDGATILEQMDVDNQIAKLMVELSRSQDYEIGDGTTAWVIMSRTLLKLPINXLERGIPPXRVPEGYEMTSYVSFEHV

SEQ ID NO: 13159 - protein, 179 aa, Zea mays
  misc_feature (54)..(54): Xaa can be any naturally occurring amino acid
  misc_feature (71)..(71): Xaa can be any naturally occurring amino acid
  misc_feature (134)..(134): Xaa can be any naturally occurring amino acid
  Coding DNA Sequence Number=SeqID_7848
  Gene Ontology: Mol. function=histone acetyltransferase activity; Cellular component=cytoplasm; Biological process=metabolic process
  Homolog annotation: Hit_ID=Q8LPU4; Match level="QueryCoverage=100%, HitCoverage=37%, E-value=2e-72, Identity=79%"; Hit description =Histone acetyltransferase type B catalytic subunit
MQLMEEDTDAGIAAIGNEKRRRVFFSDTDAGAEANDGMTVPLVCNLGEVSSANXTAIRAFDLHHFFGEDGXKIYGYKNLKISVWISAKSFHGYADASFDETSDGGKGITDLKFDIQNIFGENLVEKEEFLHTFXSKECEYITTALTNDSVIKHDGSYESDPAVDIVRVEHQGVAAFLYS

SEQ ID NO: 13160 - protein, 332 aa, Zea mays
  Coding DNA Sequence Number=SeqID_7849
  Gene Ontology: Mol. function=pyridoxal phosphate binding; Cellular component=cytoplasm; Biological process=amino acid metabolic process
  Homolog annotation: Hit_ID=B0JAE8; Match level="QueryCoverage=61%, HitCoverage=57%, E-value=1e-50, Identity=46%"; Hit description =Cystathionine beta-lyase
  Pfam annotation: Domain name=Beta_elim_lyase; Domain location=156 -332; Score=-117.5; E_value=0.01; Accession=PF01212.11; Description =Beta-eliminating lyase
  Pfam annotation: Domain name=Cys_Met_Meta_PP; Domain location=131 -332; Score=-5.6; E_value=1.4e-20; Accession=PF01053.10; Description =CysMet metabolism PLP-dependent enzyme
  Pfam annotation: Domain name=FCD; Domain location=3-124; Score=116.4; E_value=8.7e-32; Accession=PF07729.2; Description=FCD domain
  Pfam module annotation: Pfam domain module=Beta_elim_lyase::Cys_Met _Meta_PP::FCD; Domain location=156-332::131-332::3-124
MLHALEVRRIIESESCVLAAQRASADDLLEIERRLEEMERVHLAIGSAGPEDWAFHTSIYRAAGNPLLLQMLNGVYDTLHAFFESPPEQALFSDSFPLHRELFNAIRARDSQAARALCHQILDITERDMKDTLLTHDQRHEQGAVTPPIYQSSLFTFSDYDSMIARFRGESDQPLYSRVDNPTVKALQDKVAALEGGDACLAFASGMAAISNAILSVVQPGAKVRFGITTQFVDGDDEAAMAAALPGASLLYLESPSSWVMSEQNLRQLATLARDAGVVTLIDNSWASPIFQQPLLCGIDIVVHSASKYISGHSDVVAGLVIASPQHINNIA

SEQ ID NO: 13161 - protein, 281 aa, Zea mays
  Coding DNA Sequence Number=SeqID_7850
  Gene Ontology: Mol. function=aspartic-type endopeptidase activity; Cellular component=chromatin; Biological process=DNA integration
  Homolog annotation: Hit_ID=Q8SAW7; Match level="QueryCoverage=92%, HitCoverage=21%, E-value=8e-40, Identity=34%"; Hit description =Putative pol polyprotein
  Pfam annotation: Domain name=zf-CCHC; Domain location=221-238; Score =25.9; E_value=0.00015; Accession=PF00098.13; Description=Zinc knuckle
MKVMLQARNLWDAVSTGAGSFVDDRNALEVISKAVPPELMGAVASKATARDTWDMLRVRNIGVDRVRKAKASTLKRDFDALKFNDGESVDDFSARIGRITGELAVLGNEYTEEEVVRKFLQALPSRFDQIAASIETLLNLSEISVDELVGRLKAAEERLVQELSRITSRLKIAGNGGSSSTGGSSALGNDQAHGRGRGRGRNGGHRGGARSGRGGRSIANDECRYCGNAGHWARECKKKKRDEQAHATQADEGDEALLVADACIDVAPVEDDVVIQSSDVK

SEQ ID NO: 13162 - protein, 260 aa, Zea mays
  Coding DNA Sequence Number=SeqID_7851
  Gene Ontology: Mol. function=oxidoreductase activity; Cellular component=cytoplasm; Biological process=cell redox homeostasis
  Homolog annotation: Hit_ID=Q3KJY1; Match level="QueryCoverage=99%, HitCoverage=50%, E-value=7e-61, Identity=47%"; Hit description=FAD -dependent pyridine nucleotide-disulphide oxidoreductase
  Pfam annotation: Domain name=Pyr_redox; Domain location=69-161; Score= 74.0; E_value=5.1e-19; Accession=PF00070.17; Description=Pyridine nucleotide-disulphide oxidor
  Pfam annotation: Domain name=Pyr_redox_2; Domain location=69-202; Score=-12.2; E_value=0.0002; Accession=PF07992.4; Description =Pyridine nucleotide-disulphide oxidoreduc
  Pfam module annotation: Pfam domain module=Pyr_redox::Pyr_redox_2; Domain location=69-161::69-202
QGEVVQLKAQEQTLVLKDGQQVKFDQLLIATGGVPQPLDIPGKDLDGVHLLRSLRQADTLISQVDEAQQLVIIGNSFIGMEVAGALRNRDIDVTVVARHPLPFASQFGEEIGHHFYELHRSNGVKFVEGEPEALTGEGAVSGVRLKGGKTVPASQVLFATGIVPATHFIHDLPLQKDGSLLADSQLRVSENIWVAGDIASYLTPRGVQRIEHYRVAHQQGRIAALNMLGKRIMYDRVPFFWTAHYGTRYEYLGHAEEWDD

SEQ ID NO: 13163 - protein, 347 aa, Zea mays
  Coding DNA Sequence Number=SeqID_7852
  Gene Ontology: Mol. function=helicase activity; Biological process =viral genome replication
  Homolog annotation: Hit_ID=Q2QRJ4; Match level="QueryCoverage=99%, HitCoverage=39%, E-value=3e-98, Identity=50%"; Hit description=AT hook motif-containing protein, putative
LVSYKDRSFYGTPDFECRYCKAVFWYRERARGKHIDASILYNNCCKGGKIAIPPYKPHPEPLATLARFDGDSISKKFMRNIRQYNCLFAFTSMGANIDNSVNDGRGPPLFKICGQVHHRIGSLLPPDGSPPKFLQLYIYDTADEITNRLQCLDTNREYNGDLNPNIVQSLTRMLDIHNPFVKKFRMARDHLAGNEPGDFIIRIVGAKEGDPVQYNLPTTNELAMLVVGDFSLDTFKRDIVIETHGRDLKRISSLHPVFMPLQYPLLFPYGERGFQVGVLYNGINSIDANKRQYMTMQEYFCYQFHYRKNQRNPYLCYGLLSSQAKVDARACIEENRLNYIAHNQEKI

SEQ ID NO: 13164 - protein, 258 aa, Zea mays
  Coding DNA Sequence Number=SeqID_7853
  Gene Ontology: Mol. function=sugar:hydrogen symporter activity; Cellular component=integral to membrane; Biological process =carbohydrate transport
  Homolog annotation: Hit_ID=Q7XBT2; Match level="QueryCoverage=21%, HitCoverage=10%, E-value=2e-15, Identity=72%"; Hit description=Sugar transporter family protein, expressed
PVRRSSGPARCLFRLRGQASPDLVSEQIDLILQELSYIDPDKQATFGEIFHGKCLTPLIIACALRSLRPPSAPPTIPSSAATPSPHCAPPPPPLLPPPESTLSRPPPIRAAAPPPPPPPPPPRPLACAPPPPAPPAPPPPPPPPPPPTPPPPPPPPAPPPPAPPPPPAPRPPPPPPPPPPPSPPPPPPPPPPPPRPPHPPPPPPPPPPPPRPPPRSPRPPPPPPPPPPARPPPPPTPPPPPAPPPPPPPPPSPPPPPP

SEQ ID NO: 13165 - protein, 192 aa, Zea mays
  misc_feature (67)..(67): Xaa can be any naturally occurring amino acid
  misc_feature (87)..(87): Xaa can be any naturally occurring amino acid
  misc_feature (110)..(110): Xaa can be any naturally occurring amino acid
  Coding DNA Sequence Number=SeqID_7854
  Gene Ontology: Mol. function=succinate-CoA ligase (ADP-forming) activity; Cellular component=mitochondrion; Biological process =tricarboxylic acid cycle
  Homolog annotation: Hit_ID=Q6ZL94; Match level="QueryCoverage=99%, HitCoverage=57%, E-value=8e-59, Identity=63%"; Hit description =Probable succinyl-CoA ligase [GDP-forming] subunit alpha, mitochondrial precursor
  Pfam annotation: Domain name=CoA_binding; Domain location=38-135; Score=87.2; E_value=5.2e-23; Accession=PF02629.9; Description=CoA binding domain
MNGSSRRAAYLMVTAVSLLFLVRGLRVRAAAAASSLVLPDKRTRVICQGMTGKNGKFHAEEDIEYGXKMGGGVTHKKGGTEHVRGPXWLDSVEEAKDETKANVSVYIWTXPFAAVAIMEVMEDEIELVVCITEGITQHDMEKVKAALHRQSKTRLIGPNCPGIIKSGECKIGIMPGYIHKPGRIGIVSRFGP

SEQ ID NO: 13166 - protein, 140 aa, Zea mays
  Coding DNA Sequence Number=SeqID_7855
  Gene Ontology: Mol. function=nucleic acid binding; Biological process= DNA integration
  Homolog annotation: Hit_ID=Q8W0X3; Match level="QueryCoverage=96%, HitCoverage=14%, E-value=3e-47, Identity=64%"; Hit description =Putative gag protein
MRMMVKEARYVDDALNRPLPLHKPQPVALKATSSMEALPSKVAQVEATRLNEDEMALIIKRFKTALKGHKEFPNKNKSRGKHSCFKCGRKERKKNYRKAKGEAHIGKEWDSDCSSSDSDDEGLAALAFDKSSLFPNCNTP

SEQ ID NO: 13167 - protein, 192 aa, Zea mays
  misc_feature (30)..(30): Xaa can be any naturally occurring amino acid
  misc_feature (64)..(64): Xaa can be any naturally occurring amino acid
  misc_feature (88)..(88): Xaa can be any naturally occurring amino acid
  misc_feature (179)..(179): Xaa can be any naturally occurring amino acid
  misc_feature (181)..(181): Xaa can be any naturally occurring amino acid
  Coding DNA Sequence Number=SeqID_7856
  Gene Ontology: Mol. function=structural molecule activity; Cellular component=cytoskeleton; Biological process=phagocytosis, engulfment
  Homolog annotation: Hit_ID=A2XZH4; Match level="QueryCoverage=93%, HitCoverage=34%, E-value=1e-64, Identity=71%"; Hit description =Putative uncharacterized protein
  Pfam annotation: Domain name=Actin; Domain location=18-192; Score= -65.2; E_value=4.4e-11; Accession=PF00022.9; Description=Actin
YWPLRRRRAPSSVERAGGEDIQPLVCDNGXGMVKAGSAGDDAPRAAYPSIVGHHLRVSDGSFLXKDAHVGDEAQSKRGSLTLKHPIEXHGIESTWDDLEKIWHHTFYNELRVAPKEHPASLTEAPLNPNAIRENMTQIMLETFNAPAMYVALQAALSLSASGRTTAIVLDSGHGGSHTXPXYERHALPHAIV

SEQ ID NO: 13168 - protein, 215 aa, Zea mays
  Coding DNA Sequence Number=SeqID_7857
  Gene Ontology: Mol. function=transporter activity; Biological process= transport
  Homolog annotation: Hit_ID=A6T9L4; Match level="QueryCoverage=98%, HitCoverage=39%, E-value=2e-94, Identity=80%"; Hit description =Nickel transport protein
RSDQLGDARHIIGYRPLVVSDEKLGREVDLTARKDYQWGPKNSTQQGPANLAGIKFIVTPEDSVRIGALLAGQADFIRQVQAYDEKQAQQQAFPVYAAPTRGVNDSISFRPDNPLVSDLRVRQALLHATNAQQVVQTLFSPNYPQATSVIAASAAGYVNLADKLKYDPARARQLLDEAGWQPGSDGIRAKAGQKLALTVYESLPQPQNKEVLQVD

SEQ ID NO: 13169 - protein, 117 aa, Zea mays
  Coding DNA Sequence Number=SeqID_7858
  Gene Ontology: Mol. function=nucleotide binding; Cellular component =chloroplast; Biological process=response to stress
  Homolog annotation: Hit_ID=Q41816; Match level="QueryCoverage=99%, HitCoverage=52%, E-value=9e-33, Identity=65%"; Hit description=Heat shock protein 70 kDa
SEAEGPKKKVESKNSLEKYASNMRNPIKDEKIASKLAPPAKKKIEGAIDAAISWVDPNQLPEAGEFDAKMKELESLFNPIIAKMFQGAGAPMGGSGGMDEDPPAGNGGPGPKIEEVA

SEQ ID NO: 13170 - protein, 177 aa, Zea mays
  misc_feature (27)..(27): Xaa can be any naturally occurring amino acid
  misc_feature (51)..(51): Xaa can be any naturally occurring amino acid
  misc_feature (85)..(85): Xaa can be any naturally occurring amino acid
  misc_feature (121)..(121): Xaa can be any naturally occurring amino acid
  Coding DNA Sequence Number=SeqID_7859
  Gene Ontology: Mol. function=oxidoreductase activity; Cellular component=integral to membrane; Biological process=electron transport
  Homolog annotation: Hit_ID=Q9FVM9; Match level="QueryCoverage=85%, HitCoverage=29%, E-value=7e-47, Identity=62%"; Hit description =Cytochrome P450
MDSMDLALLKKALLGLFAAPVVAIVTXKLSGKRYRLPPGAPGARAMGNWLXVVGDMDHRYLLDMVKQIGDIFLLGMGVRNLEGVXTPKLVKGVLHMHGLELGSRTRNVLFDMFTDKGQDMXITVYGDHWRKMLQHHDRPAVFTDKEVAQNRAAWEEEARLVVEDLRKDPQADVGRIL

SEQ ID NO: 13171 - protein, 142 aa, Zea mays
  Coding DNA Sequence Number=SeqID_7860
  Gene Ontology: Mol. function=RNA splicing factor activity, transesterification mechanism; Cellular component=spliceosome; Biological process=spliceosome assembly
  Homolog annotation: Hit_ID=A7NWV6; Match level="QueryCoverage=100%, HitCoverage=100%, E-value=5e-78, Identity=97%"; Hit description =Chromosome chr5 scaffold_2, whole genome shotgun sequence
  Pfam annotation: Domain name=DIM1; Domain location=4-136; Score =328.1; E_value=1.6e-95; Accession=PF02966.7; Description=Mitosis protein DIM1
MSYLLPHLHSGWAVDQAILAEEERLVVIRFGHDWDETCMQMDEVLASVAETIKNFAVIYLVDITEVPDFNTMYELYDPSTVMFFFRNKHIMIDLGTGNNNKINWAMKDKQEFIDIIETVFRGARKGRGLVIAPKDYSTKYRY

SEQ ID NO: 13172 - protein, 200 aa, Zea mays
  misc_feature (130)..(130): Xaa can be any naturally occurring amino acid
  Coding DNA Sequence Number=SeqID_7861
  Homolog annotation: Hit_ID=P03736; Match level="QueryCoverage=79%, HitCoverage=18%, E-value=2e-60, Identity=80%"; Hit description=Minor tail protein H [Contains: Minor tail protein H*]
  Pfam annotation: Domain name=ETC_C1_NDUFA5; Domain location=35-84; Score=3.6; E_value=0.0094; Accession=PF04716.4; Description=ETC complex I subunit conserved regio
GFNTLMAAAKKDYEATLRKPKQSSVKVSAGDRQEDSAHAALLTLQAELRTLEKHAGANEKISQQRRDLWKAESQFAVLEEAAQRRQLSAQEKSLLAHKDETLEYKRQLAALGDKVTYQERLNALAQQADXFAQQQRAKRPHCAKSRGLLPARPRTALTDGIIPLIRMSTKKTGGETLDLWIRWTPAFAPQPFWEWKWPLL

SEQ ID NO: 13173 - protein, 148 aa, Zea mays
  misc_feature (22)..(22): Xaa can be any naturally occurring amino acid
  misc_feature (47)..(47): Xaa can be any naturally occurring amino acid
  misc_feature (56)..(56): Xaa can be any naturally occurring amino acid
  misc_feature (59)..(59): Xaa can be any naturally occurring amino acid
  misc_feature (102)..(102): Xaa can be any naturally occurring amino acid
  Coding DNA Sequence Number=SeqID_7862
  Gene Ontology: Mol. function=transferase activity, transferring phosphorus-containing groups; Cellular component=Tor2-Mei2-Ste11 complex; Biological process=cell cycle arrest in response to nitrogen starvation
  Homolog annotation: Hit_ID=Q5EFI5; Match level="QueryCoverage=93%, HitCoverage=5%, E-value=8e-53, Identity=77%"; Hit description=Target of rapamycin
  Pfam annotation: Domain name=PI3_PI4_kinase; Domain location=7-145; Score=-3.2; E_value=8.5e-05; Accession=PF00454.17; Description =Phosphatidylinositol 3- and 4-kinase
GINPKKGGRGEHARQNTEGNDXAEGQGQKSRTTEARPERRTNYARSXADMSMAGYXLDXGDRHPSNLNVDRYSGKILHIDFGDCLEASMNREKFPEKEPIRXTRMLEKAMEVSGIEGTFRTTCENEMQGLRTNRDSGMAMKEASEHDP

SEQ ID NO: 13174 - protein, 162 aa, Zea mays
  Coding DNA Sequence Number=SeqID_7863
  Gene Ontology: Mol. function=electron carrier activity; Cellular component=integral to membrane; Biological process=electron transport
  Homolog annotation: Hit_ID=Q0BG86; Match level="QueryCoverage=98%, HitCoverage=34%, E-value=4e-90, Identity=95%"; Hit description=Di -haem cytochrome c peroxidase
ACLQLFNDEKKGNCASCHVSQRTLEGGPPQFSDFGLIAIAVPRNRALPVNRDPRFHDLGACGPERTDLKGRDEFCGLFRTPSLRNVALRKTFFHNGVYHSLEDVMRFYAERDIHPEKFYPVVHGKVQLYDDLPKRYWPNINREPPFDRKRGDAPALNAAEIR

SEQ ID NO: 13175 - protein, 178 aa, Zea mays
  Coding DNA Sequence Number=SeqID_7864
  Gene Ontology: Mol. function=protein disulfide oxidoreductase activity; Cellular component=chloroplast; Biological process=cell redox homeostasis
  Homolog annotation: Hit_ID=A9NLE0; Match level="QueryCoverage=66%, HitCoverage=66%, E-value=2e-51, Identity=74%"; Hit description =Putative uncharacterized protein
  Pfam annotation: Domain name=Glutaredoxin; Domain location=89-153; Score=116.2; E_value=9.9e-32; Accession=PF00462.14; Description =Glutaredoxin
  Subcellular localization annotation: CTP_CleavageSite=67; ConfidenceScore=5.64e-01
MFCSLGVKPLQLQLQLQPKTTSCFHSQVSGVTTTSSLSLPPRTPLVLTHPIFHFQPRQLKRSSTTIRCSSALTPQLKSTLDKVVTSNKVVLFMKGTKDFPMCGFSNTVVQILKSLNVPFETINVLDNDILRQGLKEYTNWPTFPQLYIEGEFFGGCDITVEAYKSGELQELLEKAMCS

SEQ ID NO: 13176 - protein, 151 aa, Zea mays
  misc_feature (38)..(39): Xaa can be any naturally occurring amino acid
  misc_feature (42)..(42): Xaa can be any naturally occurring amino acid
  Coding DNA Sequence Number=SeqID_7865
  Gene Ontology: Mol. function=copper ion binding; Cellular component =chloroplast; Biological process=response to metal ion
  Homolog annotation: Hit_ID=A7NUP8; Match level="QueryCoverage=78%, HitCoverage=62%, E-value=8e-53, Identity=88%"; Hit description =Chromosome chr18 scaffold_1, whole genome shotgun sequence
  Pfam annotation: Domain name=CutA1; Domain location=49-150; Score =199.9; E_value=6.2e-57; Accession=PF03091.6; Description=CutA1 divalent ion tolerance protein
  Subcellular localization annotation: CTP_CleavageSite=26; ConfidenceScore=5.57e-01
INNTLSLYLSLFCSFFLCFRSKFGSRSFSKNSLSIRMXXEYXNTTTVPSIVVYVTVPNKEAGKKLAESIVKEKLAACVNRVPGIESVYQWQGEIQTDSEELLIIKTRQSLLEALTEHVKANHEYDVPEVISLPITGGNLKYLEWIKESTRE

SEQ ID NO: 13177 - protein, 96 aa, Zea mays
  Coding DNA Sequence Number=SeqID_7866
  Gene Ontology: Mol. function=cyclin-dependent protein kinase activity; Cellular component=cyclin-dependent protein kinase holoenzyme complex; Biological process=protein amino acid phosphorylation
  Homolog annotation: Hit_ID=P79432; Match level="QueryCoverage=100%, HitCoverage=31%, E-value=1e-41, Identity=89%"; Hit description=Cell division protein kinase 4
GLPLSPVREVALLRRLEAFEHATVVRLMDVCATTRTDRETKVTLVFEHVDQHLRTVVRNKAPPPGLPVETIKDLMRQFLRGLDFLHANCIVHRDLK

SEQ ID NO: 13178 - protein, 340 aa, Zea mays
  Coding DNA Sequence Number=SeqID_7867
  Gene Ontology: Mol. function=transferase activity, transferring phosphorus-containing groups; Cellular component=integral to membrane; Biological process=two-component signal transduction system (phosphorelay)
  Homolog annotation: Hit_ID=A0FN37; Match level="QueryCoverage=79%, HitCoverage=55%, E-value=5e-44, Identity=34%"; Hit description =Sensor protein
  Pfam annotation: Domain name=HAMP; Domain location=56-125; Score =24.1; E_value=0.00053; Accession=PF00672.15; Description=HAMP domain
  Pfam annotation: Domain name=HATPase_c; Domain location=239-337; Score=82.5; E_value=1.4e-21; Accession=PF02518.16; Description =Histidine kinase-, DNA gyrase B-, and HSP90-like ATPase
  Pfam annotation: Domain name=HisKA; Domain location=129-194; Score =56.9; E_value=6.9e-14; Accession=PF00512.15; Description=His Kinase A (phosphoacceptor) domain
  Pfam module annotation: Pfam domain module=HAMP::HATPase_c::HisKA; Domain location=56-125::239-337::129-194
QSKKGWSDLKVGDCGDDCQWRFYTRPGELGSEIGNIQVLHNVGYMKSLMVKRVLSAIIPLILMMPLSLLVIWLVVRAITRDLRVASRQIAAQETLHPHSVSPDGLPDEVLPLVDAYNSLLDKLRAAWSSQRQFLEDAAHELRTPVTAVTLQLENLRQHILPGEASRQFDQLEAGVTRTRHLVTQLLNISRQEDQSVVASVETIELDDLLKESIEQLMVVADKRGIDIGFNGTAHYRLHASRSDLRSLFDNLIGNAMLHTPEGSLVDVLLHRVGHHTVVDIVDNGPGMPESFIERAFDRFTRSPDVQAQGSGLGLSIVRSVAQKHQMQVALSNCLNPQGEV

SEQ ID NO: 13179 - protein, 128 aa, Zea mays
  misc_feature (24)..(25): Xaa can be any naturally occurring amino acid
  misc_feature (28)..(29): Xaa can be any naturally occurring amino acid
  misc_feature (64)..(64): Xaa can be any naturally occurring amino acid
  misc_feature (77)..(77): Xaa can be any naturally occurring amino acid
  Coding DNA Sequence Number=SeqID_7868
  Gene Ontology: Mol. function=DNA binding; Biological process =induction of apoptosis
  Homolog annotation: Hit_ID=A9PGX0; Match level="QueryCoverage=100%, HitCoverage=100%, E-value=7e-36, Identity=66%"; Hit description =Putative uncharacterized protein
  Pfam annotation: Domain name=dsDNA_bind; Domain location=9-117; Score= 108.9; E_value=1.5e-29; Accession=PF01984.10; Description=Double -stranded DNA-binding domain
MADPELEAIRQRRMQELMAQHGVXXQQXXEQQKAQEDAKMEAEERRQMMLSQILSAEARERLAXIALVKPEKARGVXDVILRAAQMGQITEKVSEERLITLLEQINNQTTRQTKVTIQRRRSVLEDDD

SEQ ID NO: 13180 - protein, 126 aa, Zea mays
  misc_feature (16)..(16): Xaa can be any naturally occurring amino acid
  misc_feature (68)..(68): Xaa can be any naturally occurring amino acid
  misc_feature (87)..(87): Xaa can be any naturally occurring amino acid
  misc_feature (104)..(104): Xaa can be any naturally occurring amino acid
  Coding DNA Sequence Number=SeqID_7869
  Gene Ontology: Mol. function=nucleoside-triphosphatase activity; Cellular component=signal recognition particle, endoplasmic reticulum targeting; Biological process=SRP-dependent cotranslational protein targeting to membrane
  Homolog annotation: Hit_ID=P49968; Match level="QueryCoverage=99%, HitCoverage=25%, E-value=6e-42, Identity=72%"; Hit description =Signal recognition particle 54 kDa protein 1
  Pfam annotation: Domain name=SRP54_N; Domain location=3-88; Score =28.0; E_value=3.6e-05; Accession=PF02881.9; Description=SRP54-type protein, helical bundle domain
MGLPHLGGSVGRALAXMSNATGTDEKGLNEGLNESSRALLQAEVQVKMGRDMQANIKRIVNREALAAXTNKRGIMRQAVFTELCTMXDPGKPSFTPKKGKPSVXMGGGLQGAGKTTTWAKYAYYHA

SEQ ID NO: 13181 - protein, 139 aa, Zea mays
  misc_feature (52)..(52): Xaa can be any naturally occurring amino acid
  Coding DNA Sequence Number=SeqID_7870
  Gene Ontology: Mol. function=structural constituent of ribosome; Cellular component=ribonucleoprotein complex; Biological process =translation
  Homolog annotation: Hit_ID=A2YSC5; Match level="QueryCoverage=93%, HitCoverage=25%, E-value=7e-54, Identity=76%"; Hit description =Putative uncharacterized protein
  Pfam annotation: Domain name=Ribosomal_S17; Domain location=55-123; Score=99.4; E_value=1.1e-26; Accession=PF00366.10; Description =Ribosomal protein S17
RSAKGKKPGMGANPVWKTIALGVKTPTQAIDGTYIDKKCAFTATVSIEGRIXAATCHSARMNRTIIVHTNYLHFVNIYQRYEERHSNIPAHISPCFRVKEGDHVFIGHCRPLSATVRYNGAKVIPAGSAAAGKNAFTVD

SEQ ID NO: 13182 - protein, 144 aa, Zea mays
  misc_feature (45)..(45): Xaa can be any naturally occurring amino acid
  Coding DNA Sequence Number=SeqID_7871
  Gene Ontology: Cellular component=photosystem I reaction center; Biological process=photosynthesis
  Homolog annotation: Hit_ID=Q7XA96; Match level="QueryCoverage=86%, HitCoverage=86%, E-value=4e-47, Identity=77%"; Hit description =Photosystem I psaH protein
  Pfam annotation: Domain name=PSI_PsaH; Domain location=6-144; Score =331.4; E_value=1.6e-96; Accession=PF03244.4; Description=Photosystem I reaction centre subunit VI
  Subcellular localization annotation: CTP_CleavageSite=48; ConfidenceScore=5.56e-01
MASMASLAVVQPATIKGLAGSSITGTKLSFKPSRQSFRPKNFRSXVVVAKYGDKSVYFDLEDLGNTTGQWDLYGSDAPSPYNPLQSKFFETFAAPFTKRGLLLKFLILGGGSTLAYLSATASDDILPIKKGPQLPPKLGPRGKI

SEQ ID NO: 13183 - protein, 179 aa, Zea mays
  misc_feature (47)..(49): Xaa can be any naturally occurring amino acid
  misc_feature (130)..(130): Xaa can be any naturally occurring amino acid
  misc_feature (168)..(168): Xaa can be any naturally occurring amino acid
  misc_feature (171)..(171): Xaa can be any naturally occurring amino acid
  Coding DNA Sequence Number=SeqID_7872
  Gene Ontology: Mol. function=nucleic acid binding; Cellular component= intracellular
  Homolog annotation: Hit_ID=A7R4B5; Match level="QueryCoverage=99%, HitCoverage=32%, E-value=2e-63, Identity=68%"; Hit description =Chromosome undetermined scaffold_644, whole genome shotgun sequence
PESQLKFITEAWLQIVECRRVLKWTYSYGYYLPEHEHAKKQFFEYLXXXAESGLERLHQCAEKELQLFLNADGPSGEFNDFRTKLAGLTSVTRNYFENLVRALENGLSDVDGNGAASSKATSSKNAAGSXKGRGGRGKGTIRASMFSRMTDDNHWSCEHCTYANVRSXTTXQMCNQQRR

SEQ ID NO: 13184 - protein, 201 aa, Zea mays
  misc_feature (3)..(4): Xaa can be any naturally occurring amino acid
  misc_feature (53)..(56): Xaa can be any naturally occurring amino acid
  misc_feature (83)..(83): Xaa can be any naturally occurring amino acid
  misc_feature (169)..(170): Xaa can be any naturally occurring amino acid
  Coding DNA Sequence Number=SeqID_7873
  Gene Ontology: Mol. function=translation elongation factor activity; Cellular component=cytoplasm; Biological process=translational elongation
  Homolog annotation: Hit_ID=Q4G498; Match level="QueryCoverage=87%, HitCoverage=43%, E-value=2e-81, Identity=83%"; Hit description =Elongation factor 1-alpha
  Pfam annotation: Domain name=GTP_EFTU_D2; Domain location=5-72; Score= 76.2; E_value=1.1e-19; Accession=PF03144.15; Description=Elongation factor Tu domain 2
  Pfam annotation: Domain name=GTP_EFTU_D3; Domain location=79-187; Score=191.8; E_value=1.7e-54; Accession=PF03143.7; Description =Elongation factor Tu C-terminal domain
  Pfam module annotation: Pfam domain module=GTP_EFTU_D2::GTP_EFTU_D3; Domain location=5-72::79-187
IVXXGTVPVGRVETGVLKPGMIVTFSPAALSTEVKSVEMHHTAMPEAVPGDNXXXXVKNLSIKDIRRGMVAGDSKNDPPQEVXDFTSQVIILNHPGQIHNGYAPVLDCHTAHIACKFAELLSKVDRRTGHETEKEPKNVKNGDAAMVRLVPSKPMCVEPFAEYPPLGRXXVRDMRQTVAVGVIKSVTRKAPGKVAAKGGKK

SEQ ID NO: 13185 - protein, 145 aa, Zea mays
  Coding DNA Sequence Number=SeqID_7874
  Gene Ontology: Mol. function=structural constituent of ribosome; Cellular component=ribonucleoprotein complex; Biological process =translation
  Homolog annotation: Hit_ID=P46293; Match level="QueryCoverage=100%, HitCoverage=100%, E-value=2e-73, Identity=94%"; Hit description=40S ribosomal protein S16
  Pfam annotation: Domain name=Ribosomal_S9; Domain location=13-145; Score=302.9; E_value=6.2e-88; Accession=PF00380.9; Description =Ribosomal protein S9S16
MAQGALEQVQCFGRKKTAVAVTHCKRGRGLIKINGCPIELVEPEILRFKAFEPILLLGRHRFAGVDMRIRVKGGGHTSQIYAIRQSIAKALVAFYQKYVDEQSKKEIKDILVSYDRTLLVADPRRCEPKKFGGRGARARFQKSYR

SEQ ID NO: 13186 - protein, 118 aa, Zea mays
  misc_feature (2)..(3): Xaa can be any naturally occurring amino acid
  misc_feature (6)..(7): Xaa can be any naturally occurring amino acid
  misc_feature (54)..(56): Xaa can be any naturally occurring amino acid
  misc_feature (60)..(61): Xaa can be any naturally occurring amino acid
  Coding DNA Sequence Number=SeqID_7875
  Gene Ontology: Mol. function=magnesium chelatase activity; Biological process=chlorophyll biosynthetic process
  Homolog annotation: Hit_ID=A7PWG0; Match level="QueryCoverage=100%, HitCoverage=8%, E-value=7e-54, Identity=87%"; Hit description =Chromosome chr8 scaffold_34, whole genome shotgun sequence
VXXDAXXNLLNPKWDEGMLSTGYEGVREIEKRLTNTVGWSATSGQVDNWVYEEXXXTFIXXEEMLKKLMNTNPNSFRKLVQTFLEANGRGYWETSEQNIEKLRQLYSEVEDKIEGIDR

SEQ ID NO: 13187 - protein, 516 aa, Zea mays
  Coding DNA Sequence Number=SeqID_7876
  Gene Ontology: Mol. function=aspartic-type endopeptidase activity; Cellular component=chromatin; Biological process=chromatin assembly or disassembly
  Homolog annotation: Hit_ID=Q2R8S5; Match level="QueryCoverage=77%, HitCoverage=29%, E-value=1e-135, Identity=55%"; Hit description =Retrotransposon protein, putative, Ty3-gypsy subclass
  Pfam annotation: Domain name=zf-H2C2; Domain location=160-201; Score =5.1; E_value=0.08; Accession=PF09337.1; Description=His(2)-Cys(2) zinc finger
MDGVAIFSAEAGRRAQRPRQAPTIAQPHGPPCPHYQAQDLEIHYHPGKAKLVADALSRKEHVHSAIVAQLPDEIVEDFRRLNLGIVAHTKGVTIDVEPTLEQEICKGPTGDARIQEINDLITEGRGPEFTKDEQGTVWFKDRLCVPDIESLRETILKEAHDSDYSIHPRSTKMYQDLKQRYWWHGLKRDVAAHVAMCDVCQRVKAEHQRLAGLLHPLKIPEWKWKENDMLRACALKHGGSWDKSLPYAEFSYNNSYQASLKMSPFEALYGRKCRTPLYWDQTGERQLFGPEIIQEAEEQVQQIRENLRTAQSRQKSYADTRRRLLEFKEGDYVYLKVSPLRGMRRFKVKGKLSPRFIGLFLILKRVGEVAYQLELPDHLADVHDVFHVSQLKKCLRVPEEQLSMEDLSVQDDLTYAEYPIKILDTLTRVTRNKVIKMWAHGLSLTPAACQPRSCALESLGVGRMDGVAIFSAEAGRRAQRPRQAPTIAQPHGPPCPHYQAQNAKAGSSGELAAAVE

SEQ ID NO: 13188 - protein, 119 aa, Zea mays
  Coding DNA Sequence Number=SeqID_7877
  Gene Ontology: Mol. function=lactoylglutathione lyase activity; Cellular component=cytosol; Biological process=carbohydrate metabolic process
  Homolog annotation: Hit_ID=A8I2T9; Match level="QueryCoverage=100%, HitCoverage=85%, E-value=5e-42, Identity=72%"; Hit description =Lactoylglutathione lyase
  Pfam annotation: Domain name=Glyoxalase; Domain location=2-118; Score= 89.4; E_value=1.1e-23; Accession=PF00903.15; Description =GlyoxalaseBleomycin resistance proteinDioxygenase superfamily
MKYLHSMVRVRDLDASLRFYCEGLGLREVRRKEVPEGKFTLIFLAADESPEAEVELTWNWGSTEDYGSARNFGHLAFRVEDIYATCARLQSMGYTIHRPPRDGHMAFVRSPDLVSVELL

SEQ ID NO: 13189 - protein, 124 aa, Zea mays
  Coding DNA Sequence Number=SeqID_7878
  Gene Ontology: Mol. function=unfolded protein binding; Cellular component=cytoplasm; Biological process=protein folding
  Homolog annotation: Hit_ID=A0TWX3; Match level="QueryCoverage=100%, HitCoverage=36%, E-value=4e-50, Identity=77%"; Hit description=Hsp33 protein
PRNAYTDADTWERVCTLGGTLSVMELLEVEPEVVFRRLFWQENVQHFDPAGTLFLCSCSREKVGAMLRMLGREEVDSVIVERGHVEIHCEFCNQRYEFDPVDVAQLFAAPELTTGITPATDQRH

SEQ ID NO: 13190 - protein, 189 aa, Zea mays
  Coding DNA Sequence Number=SeqID_7879
  Gene Ontology: Mol. function=aspartic-type endopeptidase activity; Biological process=proteolysis
  Homolog annotation: Hit_ID=Q8SA85; Match level="QueryCoverage=56%, HitCoverage=8%, E-value=4e-41, Identity=82%"; Hit description=Prpol
  Subcellular localization annotation: CTP_CleavageSite=21; ConfidenceScore=5.09e-01
MTLQGDQAASPSATKLVFTIRGSSSSELANKKQKKEAQRRVQHVGVQGPFIKSKWSHVSIIFSQEDLQLKDYPHNDAMVISSVIKVFLVHNVLVDISSAADIIFAKAFRQIYHLIMVLLMCMEAKRLLEGSKGIGQIPWPSCSVAGTDFLSVGCSGGTTAAAKGTTSDTAGASADAGVLEKQRQLLLRA

SEQ ID NO: 13191 - protein, 198 aa, Zea mays
  misc_feature (29)..(29): Xaa can be any naturally occurring amino acid
  misc_feature (39)..(39): Xaa can be any naturally occurring amino acid
  Coding DNA Sequence Number=SeqID_7880
  Homolog annotation: Hit_ID=P03736; Match level="QueryCoverage=82%, HitCoverage=19%, E-value=2e-64, Identity=80%"; Hit description=Minor tail protein H [Contains: Minor tail protein H*]
  Pfam annotation: Domain name=Tape_meas_lam_C; Domain location=92-169; Score=52.6; E_value=1.4e-12; Accession=PF00903.15; Description=Lambda phage tail tape-measure protei
DETLSTNASCCTCDKVTYQERLNALAQQXDKFAQQQRQXAAIDAKSRGLTDRQAEREATEQRLKEQYGDNPLALNNVMSEQKKTWAAEDQLRGNWMAGLKSGWSEWEESATDSMSQVKSAATQTFDGIAQNMAAMLTGSEQNWRSFTRSVLSMMTEILLKQAMVGIVGSIGSAIGGAVGGGASASGGTAIQGGPVQLL

SEQ ID NO: 13192 - protein, 482 aa, Zea mays
  misc_feature (4)..(4): Xaa can be any naturally occurring amino acid
  misc_feature (8)..(8): Xaa can be any naturally occurring amino acid
  misc_feature (32)..(32): Xaa can be any naturally occurring amino acid
  misc_feature (72)..(72): Xaa can be any naturally occurring amino acid
  misc_feature (86)..(86): Xaa can be any naturally occurring amino acid
  misc_feature (91)..(91): Xaa can be any naturally occurring amino acid
  misc_feature (122)..(122): Xaa can be any naturally occurring amino acid
  misc_feature (225)..(225): Xaa can be any naturally occurring amino acid
  misc_feature (232)..(232): Xaa can be any naturally occurring amino acid
  misc_feature (248)..(248): Xaa can be any naturally occurring amino acid
  misc_feature (282)..(284): Xaa can be any naturally occurring amino acid
  misc_feature (323)..(323): Xaa can be any naturally occurring amino acid
  misc_feature (326)..(327): Xaa can be any naturally occurring amino acid
  misc_feature (342)..(342): Xaa can be any naturally occurring amino acid
  misc_feature (368)..(368): Xaa can be any naturally occurring amino acid
  misc_feature (380)..(380): Xaa can be any naturally occurring amino acid
  misc_feature (394)..(394): Xaa can be any naturally occurring amino acid
  misc_feature (405)..(407): Xaa can be any naturally occurring amino acid
  misc_feature (409)..(409): Xaa can be any naturally occurring amino acid
  misc_feature (415)..(415): Xaa can be any naturally occurring amino acid
  misc_feature (417)..(421): Xaa can be any naturally occurring amino acid
  misc_feature (424)..(424): Xaa can be any naturally occurring amino acid
  misc_feature (431)..(437): Xaa can be any naturally occurring amino acid
  misc_feature (446)..(450): Xaa can be any naturally occurring amino acid
  misc_feature (464)..(465): Xaa can be any naturally occurring amino acid
  misc_feature (473)..(473): Xaa can be any naturally occurring amino acid
  Coding DNA Sequence Number=SeqID_7881
  Subcellular localization annotation: CTP_CleavageSite=37; ConfidenceScore=5.06e-01
WARXPLSXCPPLLLIHLLCRSLALCALSSLLXPQLLSSSLRVSRSRRHSLPSDMLCCGHPPPVFYLVLVSLXCQLLPVLVLCVLVXWCVSXSVVSVSVLSPYSTFLSRPLPSSLRALSLLPXTLCVASPCLLACGSRLSPLSFIPLRLTVPSPLVSCARSSPRLLPCRSVCLACVALASRGLIPFLLRVGRSFLPPWSVLRCVSRVWFPLVILLRAPLAAFLVCXFCSLRVXSSRSRLVACALLSFLXSLLSSSLSLSVLYSVWVGGRLLYLFPRVSVVLSXXXRSLSFSASDDIFPLPLFLSPLLPFLPLSFPSSPSLFSPXSFXXLFFFFSLLLFSFLLXFFSFSLSLSFSFLSPSFFSLSFSFFXPFSFLSLLLPSXLLPSLSLLLSPLLXLLSLLVAFHTXXXLXPFLSPXFXXXXXLLXPPLFCWXXXXXXXFCGAGSLQXXXXXLFSLLASPPDCRGXXPPAPFSLXPRSAAHDPP

SEQ ID NO: 13193 - protein, 137 aa, Zea mays
  misc_feature (64)..(64): Xaa can be any naturally occurring amino acid
  Coding DNA Sequence Number=SeqID_7882
  Gene Ontology: Mol. function=aspartic-type endopeptidase activity; Cellular component=chromatin; Biological process=DNA integration
  Homolog annotation: Hit_ID=Q2QMT9; Match level="QueryCoverage=100%, HitCoverage=14%, E-value=1e-52, Identity=74%"; Hit description =Retrotransposon protein, putative, unclassified
  Subcellular localization annotation: CTP_CleavageSite=34; ConfidenceScore=5.07e-01
AGCPDTRKSTSGYAVFLGNNLISWLFKCQNTVFRSSAEAEYRAVAESSWLRQLLTELQTPLRRXVVLCDNINTIYMASNPVQHQRTEHIEIDLHFVRECVACGDIRVLHVPTSSQYLDKFTKGLPSSVFTEFRTSLN

SEQ ID NO: 13194 - protein, 226 aa, Zea mays
  misc_feature (64)..(64): Xaa can be any naturally occurring amino acid
  misc_feature (69)..(69): Xaa can be any naturally occurring amino acid
  Coding DNA Sequence Number=SeqID_7883
  Gene Ontology: Mol. function=methionyl aminopeptidase activity; Cellular component=cytoplasm; Biological process=proteolysis
  Homolog annotation: Hit_ID=Q7N194; Match level="QueryCoverage=100%, HitCoverage=51%, E-value=6e-95, Identity=75%"; Hit description=Xaa -Pro aminopeptidase
  Pfam annotation: Domain name=AMP_N; Domain location=1-121; Score =137.3; E_value=4.4e-38; Accession=PF05195.6; Description =Aminopeptidase P, N-terminal domain
MAPDSAVIIFAAPPAMRNSDCEYPYRQHSDLLYLTGFNEPEACLVLIKSDENHNHSVLFNRRSXDLTAXIWLGRRLGQDAALEKLGVDRALPFDDLSKQLYLLLNGLDVYYHARGEFEYADNIVFSALDTLRKNNRRNLSAPSMMVDWRSWLHEMRLFKSVAELDIMREGGDISANAHTRAMHNCRPGMFEYHLDAEIHHEFTRQVARYPAYNTIVGAGAYACILH

SEQ ID NO: 13195 - protein, 126 aa, Zea mays
  misc_feature (48)..(48): Xaa can be any naturally occurring amino acid
  misc_feature (72)..(72): Xaa can be any naturally occurring amino acid
  misc_feature (96)..(96): Xaa can be any naturally occurring amino acid
  misc_feature (112)..(112): Xaa can be any naturally occurring amino acid
  Coding DNA Sequence Number=SeqID_7884
  Gene Ontology: Biological process=lipid transport
  Homolog annotation: Hit_ID=Q01595; Match level="QueryCoverage=100%, HitCoverage=97%, E-value=7e-25, Identity=49%"; Hit description =Cortical cell-delineating protein precursor
  Pfam annotation: Domain name=Tryp_alpha_amyl; Domain location=49-125; Score=13.2; E_value=0.015; Accession=PF00234.12; Description=Protease inhibitorseed storageLTP f
MSPKVALFLALSLLFAATAHDCEPDCSGPVVPTPPVVTTPSTHYHASXPIDALKLKVCADELGLDKGGLPQXSNECPLMEGLEDLDGELCLCTVIXVNDLDIHLNVPLRLNXILNNCGRICPEDFT

SEQ ID NO: 13196 - protein, 324 aa, Zea mays
  Coding DNA Sequence Number=SeqID_7885
  Gene Ontology: Mol. function=calcium ion binding; Cellular component =nucleus; Biological process=mRNA modification
  Homolog annotation: Hit_ID=Q10E67; Match level="QueryCoverage=39%, HitCoverage=51%, E-value=8e-47, Identity=71%"; Hit description =Pentatricopeptide, putative, expressed
  Pfam annotation: Domain name=PPR; Domain location=125-159; Score =24.9; E_value=0.00029; Accession=PF01535.11; Description=PPR repeat
  Pfam annotation: Domain name=PPR; Domain location=160-194; Score =38.5; E_value=2.5e-08; Accession=PF01535.11; Description=PPR repeat
  Pfam annotation: Domain name=PPR; Domain location=265-299; Score =26.5; E_value=9.9e-05; Accession=PF01535.11; Description=PPR repeat
  Pfam module annotation: Pfam domain module=PPR::PPR::PPR; Domain location=125-159::160-194::265-299
CSRRLISAFAVDQPIRCHPPTDSAVPWNKLLRDHIAGSRPGLALALYRLMRALSPALPNSYTLPLALRAAPSWRLAAAVHGHALHLGLHTHPDVAGQVLAAYARLGRAAEARCVFDALPLRRSTLSWNTLISAYSAGCDPDAAWVAFARMVAAGARPDAVTWTALLSAHARCGRHPEALRLFGAMHRSGCEGNAEAVAVALSACPYAGGPALGRGRSIHAYGFVKGVVHGYLFVTNSLVCMYGKLGEMEEAEKVFWDAGAKKNAVTWNALITSYAAAGLCGKALGVLVQMEQCGGMIAPNVVSWSAVIGGFASSGDMEQALQAC

SEQ ID NO: 13197 - protein, 176 aa, Zea mays
  misc_feature (23)..(23): Xaa can be any naturally occurring amino acid
  Coding DNA Sequence Number=SeqID_7886
  Homolog annotation: Hit_ID=Q8H6I5; Match level="QueryCoverage=93%, HitCoverage=17%, E-value=1e-49, Identity=68%"; Hit description =Putative RIRE2 orf3
ALERRRRRQERDGLPREPSPETXPDDDDDDDDDDDEDDDMAARLGLSPDLRLGQGLSSQPPSGLAPPVSGAGTSGSRSEEQWQAEGVLDPLAEVVEVTSGSQADPPVPQEPLPVPTAQEADPRVVVAAPGQFIPLVPRAPEARMVPKPAAGLTSVVPAGTEARGASPQARLVVARS

SEQ ID NO: 13198 - protein, 255 aa, Zea mays
  misc_feature (116)..(116): Xaa can be any naturally occurring amino acid
  misc_feature (197)..(197): Xaa can be any naturally occurring amino acid
  Coding DNA Sequence Number=SeqID_7887
  Gene Ontology: Mol. function=metal ion binding
  Homolog annotation: Hit_ID=A3B3K9; Match level="QueryCoverage=91%, HitCoverage=18%, E-value=4e-51, Identity=55%"; Hit description =Putative uncharacterized protein
FLRNAWYVTDSRYIWGGSGKWLNAQLSRLAPMESFRHLDTRYSNKNKKVEFNSACDSPEFNVSSHGSGLIIARTFSPALGSSKNVFSKSGPGLRIVSRKMFSILIRASPPRATTPXPTVCDLMSHRVPTDCQTTNDALSQEALNLTSHVKSLTTKSPLLRMELVTTTKQLKVVISIAGEETAKSRAAKEVIKSLTAXLNEIAERLPVREGTNTKLPALSGISIPSDISSLAMESVGSPSSSGEQIMNGHNGLLAS

SEQ ID NO: 13199 - protein, 194 aa, Zea mays
  Coding DNA Sequence Number=SeqID_7888
  Subcellular localization annotation: CTP_CleavageSite=55; ConfidenceScore=5.81e-01
TDARAGTSFFFFFFFFFFFFFFFFFFFFFFFFFFFFFFFFLFFLPLGALFPFFGRASVALYFLFFFFNWPAFFHFFYGAHFASLLFFSILTLFRFSTFCSLKYSVNTLFFRFFSFFFFFWAYFLGPFLKLSSLFLFRPFFPFIFPFFSPSFFLVFFFFFSPLFFLFFSLFFFLILFFFFCRSSFFSPVFPLSPL

SEQ ID NO: 13200 - protein, 285 aa, Zea mays
  misc_feature (28)..(28): Xaa can be any naturally occurring amino acid
  misc_feature (30)..(30): Xaa can be any naturally occurring amino acid
  misc_feature (33)..(33): Xaa can be any naturally occurring amino acid
  misc_feature (35)..(35): Xaa can be any naturally occurring amino acid
  misc_feature (55)..(55): Xaa can be any naturally occurring amino acid
  misc_feature (63)..(63): Xaa can be any naturally occurring amino acid
  misc_feature (75)..(75): Xaa can be any naturally occurring amino acid
  misc_feature (83)..(83): Xaa can be any naturally occurring amino acid
  misc_feature (86)..(86): Xaa can be any naturally occurring amino acid
  misc_feature (92)..(92): Xaa can be any naturally occurring amino acid
  misc_feature (94)..(94): Xaa can be any naturally occurring amino acid
  misc_feature (101)..(101): Xaa can be any naturally occurring amino acid
  misc_feature (112)..(112): Xaa can be any naturally occurring amino acid
  misc_feature (126)..(126): Xaa can be any naturally occurring amino acid
  misc_feature (138)..(138): Xaa can be any naturally occurring amino acid
  misc_feature (155)..(155): Xaa can be any naturally occurring amino acid
  misc_feature (158)..(158): Xaa can be any naturally occurring amino acid
  misc_feature (169)..(169): Xaa can be any naturally occurring amino acid
  misc_feature (172)..(172): Xaa can be any naturally occurring amino acid
  misc_feature (176)..(176): Xaa can be any naturally occurring amino acid
  misc_feature (205)..(205): Xaa can be any naturally occurring amino acid
  misc_feature (225)..(225): Xaa can be any naturally occurring amino acid
  misc_feature (231)..(232): Xaa can be any naturally occurring amino acid
  misc_feature (239)..(240): Xaa can be any naturally occurring amino acid
  misc_feature (247)..(248): Xaa can be any naturally occurring amino acid
  misc_feature (264)..(266): Xaa can be any naturally occurring amino acid
  misc_feature (281)..(281): Xaa can be any naturally occurring amino acid
  Coding DNA Sequence Number=SeqID_7890
  Gene Ontology: Mol. function=sucrose transmembrane transporter activity; Cellular component=integral to plasma membrane; Biological process=sucrose transport
  Homolog annotation: Hit_ID=Q9SXM0; Match level="QueryCoverage=68%, HitCoverage=37%, E-value=5e-26, Identity=34%"; Hit description =Sucrose Transporter
TYTPYKYFITLSYSIPIPLPNTITLPPXKXNNXIXSKPPKPLTILKNFKTLPPKXPSILLISXLLLTLIIPILPXHPHLIKPXILXQHPPKXTXTQFSTFXKNIHINTFKLXLNSIFLKFNSFLFXPLYQKIKPKIIXYHTPSLIYITLTTPTLXNFXSLKISHKSIQXTFXTNTXFKTIYLILFTFLNIPLTFLYNIPFTIPTXLTTPKNNKQKLYPNILNISXIIPQIXXTLNTNPXXTLFKKNXXPTFNITSTFTLINNIXXXFLLPKISKRQFRAVXAGGH

SEQ ID NO: 13201 - protein, 172 aa, Zea mays
  Coding DNA Sequence Number=SeqID_7891
  Gene Ontology: Mol. function=sequence-specific DNA binding; Biological process=signal transduction
  Homolog annotation: Hit_ID=Q39DW7; Match level="QueryCoverage=100%, HitCoverage=63%, E-value=1e-71, Identity=79%"; Hit description =Transcriptional regulator, XRE family
QLSKAERAYLFELAAQRDPAEPDVAAGDLPPTLAATVAAIATPAYVLDRQWNALAWNAPAAALFTGWLDGDHDRNLLRFTFMAPAARTLIVDWETRARRLAAEFRADSIRHLADAPTRALIDALMAGSDAFAQYWASQDVFEREGGMREFDHPADGRVVYQQITLKPAHRED

SEQ ID NO: 13202 - protein, 135 aa, Zea mays
  Coding DNA Sequence Number=SeqID_7892
MGKKRKREPTPPSEDFGDSEYSEEEFSSKSEGSPAPIPLRESSDDSDDSQGLAAEVWTYIRVVERFGLAGSDESEDSSDEEDSSEEDGGDGGEGGDDDDDDDDGGGGGRGGNGSSRGSNSGRGGSGGSRGGKASG

SEQ ID NO: 13203 - protein, 190 aa, Zea mays
  misc_feature (10)..(10): Xaa can be any naturally occurring amino acid
  misc_feature (42)..(42): Xaa can be any naturally occurring amino acid
  misc_feature (83)..(83): Xaa can be any naturally occurring amino acid
  misc_feature (86)..(88): Xaa can be any naturally occurring amino acid
  misc_feature (92)..(92): Xaa can be any naturally occurring amino acid
  misc_feature (94)..(94): Xaa can be any naturally occurring amino acid
  misc_feature (96)..(97): Xaa can be any naturally occurring amino acid
  misc_feature (102)..(102): Xaa can be any naturally occurring amino acid
  misc_feature (104)..(105): Xaa can be any naturally occurring amino acid
  misc_feature (107)..(107): Xaa can be any naturally occurring amino acid
  misc_feature (109)..(110): Xaa can be any naturally occurring amino acid
  misc_feature (115)..(115): Xaa can be any naturally occurring amino acid
  misc_feature (117)..(117): Xaa can be any naturally occurring amino acid
  misc_feature (120)..(120): Xaa can be any naturally occurring amino acid
  misc_feature (124)..(124): Xaa can be any naturally occurring amino acid
  misc_feature (126)..(126): Xaa can be any naturally occurring amino acid
  misc_feature (129)..(129): Xaa can be any naturally occurring amino acid
  misc_feature (142)..(142): Xaa can be any naturally occurring amino acid
  misc_feature (148)..(148): Xaa can be any naturally occurring amino acid
  misc_feature (152)..(152): Xaa can be any naturally occurring amino acid
  misc_feature (155)..(156): Xaa can be any naturally occurring amino acid
  misc_feature (159)..(159): Xaa can be any naturally occurring amino acid
  misc_feature (163)..(165): Xaa can be any naturally occurring amino acid
  misc_feature (175)..(175): Xaa can be any naturally occurring amino acid
  misc_feature (177)..(178): Xaa can be any naturally occurring amino acid
  Coding DNA Sequence Number=SeqID_7893
  Gene Ontology: Mol. function=nucleotide binding; Cellular component =intracellular; Biological process=small GTPase mediated signal transduction
  Homolog annotation: Hit_ID=P36397; Match level="QueryCoverage=91%, HitCoverage=96%, E-value=2e-58, Identity=67%"; Hit description=ADP -ribosylation factor 1
  Pfam annotation: Domain name=Arf; Domain location=1-177; Score=177.1; E_value=4.7e-50; Accession=PF00025.11; Description=ADP-ribosylation factor family
MGLSFGKLFXRLLANKETRILMGGLDAAGKTTILYKLKLGEXVTTIPTIRYNAETVEYKSISLTAWDLGGHDKTRPLWRHYFXNTXXXIFVXDXHXXEHVVXAXXDXHXXLNDDXPXSRXAACXAXKQXLPNAMNAAEITDXLGLLSXRQRXWYXXSTXATSXXXLYEGLDWLTXTXXASLESFTDAPNM

SEQ ID NO: 13204 - protein, 220 aa, Zea mays
  Coding DNA Sequence Number=SeqID_7894
  Gene Ontology: Mol. function=aspartic-type endopeptidase activity; Cellular component=chromatin; Biological process=chromatin assembly or disassembly
  Homolog annotation: Hit_ID=Q2QZQ5; Match level="QueryCoverage=99%, HitCoverage=16%, E-value=7e-82, Identity=66%"; Hit description =Retrotransposon protein, putative, unclassified
SLYSTLPAELQALVTKFQSVFALPVGLPPVRDCDHHISLVPGAQPFNVRPYRYAPALKTEIERQVQEMLSSGIIQHSNSEFSSSVILVKKKDDSYRFCVDYRHLNALTVKTRFPVPIMDELLDELYGAAWFSTLDLRAGFHQIRMAPEDQHKTAFQTHHGHFEFRVMAFGLTGAPATFQGAMNKTLAPLLRKCVLVFFDDILVYSPTWETHLQHNELVLQ

SEQ ID NO: 13205 - protein, 483 aa, Zea mays
  misc_feature (2)..(2): Xaa can be any naturally occurring amino acid
  misc_feature (19)..(19): Xaa can be any naturally occurring amino acid
  misc_feature (74)..(74): Xaa can be any naturally occurring amino acid
  misc_feature (170)..(170): Xaa can be any naturally occurring amino acid
  misc_feature (233)..(233): Xaa can be any naturally occurring amino acid
  misc_feature (469)..(469): Xaa can be any naturally occurring amino acid
  Coding DNA Sequence Number=SeqID_7895
  Subcellular localization annotation: CTP_CleavageSite=34; ConfidenceScore=5.33e-01
RXACPACRYLCFIASVLIXFFALPRLSPSVLSLRLYTSVAASSILLLSRCLLSFVSLAFCLLSFLPLALIFLFXLSSLALAPSESLLSVRLSSCGVSPRPSVLSSSFRASPLFYHLGCSCSAPRRVCSHRPCCVLLLSLVDAAGRLLMLVFFLVVGRHCVLSPLLVASIXSLFLLSSCVLRVCLLLSFCAFLLSRLSASSSSLPRAVVVCSSVPLALSILAAPRGAYVRLFFXLSFCRFFVLCFSSCLFFSVFVARSAALVSRGCRRGRLRVRPRFSSALFGWRRFCSVWFCCPPPFALFALSLVCLALVICSFPPAPSLSRLSPLFACSPFSPSRRGVFVFCPCPPLSLLPGSFSARLALPPPLSLLFSFLFSPPLSFRVFLIFSFVRFFCVVGYIHFSVPPFVAFLCIFSFLPVLSFALLSGGKSLFCFPLPLPLFWGTTSFLPSPLRVVLPPLFSMPSFSLVLPFXRPVRWFPPARCCSA

SEQ ID NO: 13206 - protein, 224 aa, Zea mays
  Coding DNA Sequence Number=SeqID_7897
  Gene Ontology: Mol. function=adenylate cyclase activity; Biological process=cAMP biosynthetic process
  Homolog annotation: Hit_ID=A8GJU5; Match level="QueryCoverage=99%, HitCoverage=51%, E-value=5e-50, Identity=44%"; Hit description =Adenylate cyclase
QKIAPKATVEQGMVHAMSAALGHWQYHEEVWLRGNEDARARVIEALETLRQAFSLFGTLVPRKANSELRQKLTRLEELLADSEASAETVCFSPTSVEAQLALTHWLVESQWQPWLDEKNKSKLQGSFKRFSDIMLGRIGADLRETFVDVQLFNEFQDKATRLNRQLLAVHLLAGAYPAEEVSQWLAGWQELQHAIREKQERGLIQLVNLAIRQPPFWLNNGAKR

SEQ ID NO: 13207 - protein, 90 aa, Zea mays
  Coding DNA Sequence Number=SeqID_783
LVLALQMILLVCFARSWPYMTYILEAEAMAGGGRGRRGRGERKLGNMPGSLYATRTATTPPVGRCGWRARCQAWPSYISLSHFSLRRISW

SEQ ID NO: 13208 - protein, 177 aa, Zea mays
  Coding DNA Sequence Number=SeqID_785
  Gene Ontology: Mol. function=protein binding; Cellular component =cytoplasm; Biological process=protein transport
  Homolog annotation: Hit_ID=A7PBZ6; Match level="QueryCoverage=100%, HitCoverage=100%, E-value=2e-76, Identity=75%"; Hit description =Chromosome chr2 scaffold_11, whole genome shotgun sequence
  Pfam annotation: Domain name=ESCRT-II; Domain location=7-176; Score =272.7; E_value=7.8e-79; Accession=PF05871.2; Description=ESCRT-II complex subunit
MQRLGDFRLPPFFNYPPYFTLQPMRETREKQVQLWKNMILDYCRSQKIHTISLEEDFPMFSNPKIERSLTYEAKEVFLAALVSEGRAEWMDKGHKKCLVLWLRIQDWANFILNFVKNNGLEVMTIEEIRSGIDTRGTELEGIDRGVLMRALRHLKQKGKAAIFKGTSADDEGVKFSV

SEQ ID NO: 13209 - protein, 446 aa, Zea mays
  Coding DNA Sequence Number=SeqID_786
  Gene Ontology: Mol. function=phosphodiesterase I activity; Biological process=metabolic process
  Homolog annotation: Hit_ID=Q69L73; Match level="QueryCoverage=88%, HitCoverage=87%, E-value=0.0, Identity=82%"; Hit description =Phosphodiesterase/alkaline phosphatase D-like protein
  Pfam annotation: Domain name=PhoD; Domain location=1-357; Score= -192.7; E_value=0.00014; Accession=PF05871.2; Description=PhoD-like phosphatase
MADTFALLLLLILSSSVRAAPDAVVSRIAFGSCANQSEPQPIWNAVAGFDPQVFVWLGDNVYGDNKRPFRVFGRERTVGPWKNVPRFYPSTEEELRRRYQLARAQPGYARLRERAQVLGTWDDHDYGLNDAGKELSGKVIAQRLMLDFLDEPEDSKRRKQAGVYASYMFGPEGKRVKVILLDTRYHRDPLLSDGTILGDPQWQWLERELHGPQSEITIIGSSIQVVSNLSATTGPLFYVESWARFPRERERLFRLIDSSKRPGVLFISGDVHFGEITRFDCGAQYPSYDVTSSGLTQSVENSVPEVFQPLMRLLAILTPTTMRVLSPNCQYKSCTIGQPNFGAIEIDWNAVPPRIKLELRDVEGHSVHSVEFPISELQPSEAHAIKRQTHTFQRHCTLETELPWLTRYRLALMLFVIIAVFAVVVVMLAIACLSNFTKSSKKSKKE

SEQ ID NO: 13210 - protein, 128 aa, Zea mays
  misc_feature (55)..(56): Xaa can be any naturally occurring amino acid
  misc_feature (99)..(99): Xaa can be any naturally occurring amino acid
  misc_feature (124)..(124): Xaa can be any naturally occurring amino acid
  Coding DNA Sequence Number=SeqID_787
  Gene Ontology: Mol. function=serine-type endopeptidase inhibitor activity; Cellular component=extracellular region
  Homolog annotation: Hit_ID=Q84LH6; Match level="QueryCoverage=95%, HitCoverage=97%, E-value=2e-30, Identity=51%"; Hit description =Putative Bowman-Birk serine protease inhibitor
  Pfam annotation: Domain name=Bowman-Birk_leg; Domain location=62-88; Score=24.3; E_value=0.00046; Accession=PF00228.10; Description =Bowman-Birk serine protease inhibitor family
  Pfam annotation: Domain name=Bowman-Birk_leg; Domain location=90-117; Score=14.6; E_value=0.034; Accession=PF00228.10; Description=Bowman -Birk serine protease inhibitor family
  Pfam module annotation: Pfam domain module=Bowman-Birk_leg::Bowman -Birk_leg; Domain location=62-88::90-117
MRTQALFFLALALIGSVLAQSSNRHHHHYHHAHVQSKGQGAGGGGGGELASRAKXXARAWPCCDSCGGCTRSEPPRCQCLDAAPRGCHPACRDCVKSSXSADPPVYQCMDRVPNFCQHRCTARXAAAH

SEQ ID NO: 13211 - protein, 164 aa, Zea mays
  misc_feature (1)..(1): Xaa can be any naturally occurring amino acid
  Coding DNA Sequence Number=SeqID_788
  Gene Ontology: Mol. function=DNA binding; Cellular component=nucleus; Biological process=regulation of transcription, DNA-dependent
  Homolog annotation: Hit_ID=A3ARU7; Match level="QueryCoverage=89%, HitCoverage=45%, E-value=1e-46, Identity=59%"; Hit description =Putative uncharacterized protein
XFYVHSITGLRLLSKQDVLLYINEAKVSGCDTNGQRDTTSEDNILSKVDFRPSGLPEGWVKELVYRKTKEGLIRRDPYYTDPVSSYTFHTLKSASSFLETGKVSERAFIQRTSVHDLYSFEISADMHESLPNKLGINEKPYQEPTKSWRFVSISKHQETRCNVS

SEQ ID NO: 13212 - protein, 147 aa, Zea mays
  misc_feature (71)..(71): Xaa can be any naturally occurring amino acid
  Coding DNA Sequence Number=SeqID_789
  Gene Ontology: Mol. function=structural constituent of ribosome; Cellular component=ribonucleoprotein complex; Biological process =translation
  Homolog annotation: Hit_ID=P49397; Match level="QueryCoverage=53%, HitCoverage=30%, E-value=9e-35, Identity=89%"; Hit description=40S ribosomal protein S3a
  Pfam annotation: Domain name=Ribosomal_S3Ae; Domain location=11-142; Score=81.8; E_value=2.2e-21; Accession=PF01015.8; Description =Ribosomal S3Ae family
MAVGKNKRISKGKKVGKKKTVDPFSKKDWYDIKAPSVFSVRNIGKTLVSRTQGTRIASDGLKHRVFEVCLXDLQGDEDQAYRKIRLRAEDVQGRNVLTNFCQIASSFCVLCASRRLAALLYFCFRITAAVRTFHLWLLPEPEARFYC

SEQ ID NO: 13213 - protein, 148 aa, Zea mays
  Coding DNA Sequence Number=SeqID_790
  Subcellular localization annotation: CTP_CleavageSite=72; ConfidenceScore=5.64e-01
LTCALRKKHGQQPWPTSSSLYSYTTARKGVVKAARRRSSGTRAPSRPHGRASKPPPRGHVDTVTSQPSPKARASTLPRRHQNASSPARVYGLEARAPSPRCLASRSVGVLSWSPRAHRQAAAAAAASRQAGTHDRPGLFSFEQRRRKR

SEQ ID NO: 13214 - protein, 69 aa, Zea mays
  Coding DNA Sequence Number=SeqID_792
AQPPAMEPVVRHSLSRFPRESNPALMKNVVPQQGQMHKSLFSKHRSDKKGREREREREREHIWRMLGDI

SEQ ID NO: 13215 - protein, 132 aa, Zea mays
  Coding DNA Sequence Number=SeqID_794
KGQNHRCAASGRVRLRPPPLLLLPTRTGHCPRLLCHPHLPPPPRAPPQVWPLHPPAPHHRRPTHLSTVAGRRPTCSPTDTGRGIISPWVKLHPTAPITPNQTHPSAYTQQKSGHIFYSLGFPLRPLFSKSFP

SEQ ID NO: 13216 - protein, 137 aa, Zea mays
  misc_feature (1)..(13): Xaa can be any naturally occurring amino acid
  Coding DNA Sequence Number=SeqID_796
  Subcellular localization annotation: CTP_CleavageSite=64; ConfidenceScore=5.28e-01
XXXXXXXXXXXXXIVSTCAAPSPIVVLPVKPSVEPPPSHVASMSAQTCLARHPAVFLPATPWPVSSPRSSSSRRCRLPGTPSGLLPCLHFDLFGHRRGYTSSIVEIGRRQELRRVPGAAAIYTRASFRVHFCTCECG

SEQ ID NO: 13217 - protein, 149 aa, Zea mays
  misc_feature (48)..(48): Xaa can be any naturally occurring amino acid
  Coding DNA Sequence Number=SeqID_798
  Subcellular localization annotation: CTP_CleavageSite=74; ConfidenceScore=5.31e-01
NLLSPPPCHSAPRAPLGGPPMEPPRPAPGTPDCAARPRAGPTPPRTAXFDACRTCAAPCAPRRARSTPEPCLVSSSRAPDRPSARPGHQPDRDTRQTEAQATPTPFFSSPSYEASMPRLFFFTLPLQPPPLMAFLLQLNPQPRTPRPRL

SEQ ID NO: 13218 - protein, 202 aa, Zea mays
  Coding DNA Sequence Number=SeqID_7898
  Gene Ontology: Mol. function=nucleoside-triphosphatase activity; Cellular component=intracellular; Biological process=regulation of transcription, DNA-dependent
  Homolog annotation: Hit_ID=A7FHW0; Match level="QueryCoverage=99%, HitCoverage=33%, E-value=1e-87, Identity=78%"; Hit description=Sigma- 54 dependent transcriptional regulator
  Pfam annotation: Domain name=GAF; Domain location=1-136; Score=51.5; E_value=2.8e-12; Accession=PF01590.16; Description=GAF domain
QQFAQPVIRQLAQQMAETQSVVILSDASGLVLNTFGDMQALEKAQRFALAPGNLWSECGRGTNAIGTALAIDDGCEIDGQQHFLTRNQGLYCAAMPLQMPNGQIAGVLDISGPAHFPHPHTLNRVKAAAKQIEYLWVKQSLHPQQWLLSLHPQPQGIDTSDELLLVFSDNVLTAANRLAMRELALSADRFASLTFQQLFPQL

SEQ ID NO: 13219 - protein, 176 aa, Zea mays
  misc_feature (18)..(18): Xaa can be any naturally occurring amino acid
  Coding DNA Sequence Number=SeqID_7899
  Homolog annotation: Hit_ID=Q8SA86; Match level="QueryCoverage=80%, HitCoverage=15%, E-value=1e-31, Identity=51%"; Hit description =Putative retrotransposon protein
MRTALSRAAVVRSTARVXREGEETEATEAASISEVMRQSKLVVTEGAIDEGTFGAEAEQADIKEEENADEEEEDYSTLIPSKPSHLDFEKSIVSEADVSMMMKLGYFREAERKLIRFAGEETTPMSKDDEVVVFKSFFRAGLHFPLNEMIGEVLDNSEIFLHQLTPNAIVRLNIFI

SEQ ID NO: 13220 - protein, 255 aa, Zea mays
  misc_feature (128)..(128): Xaa can be any naturally occurring amino acid
  misc_feature (238)..(238): Xaa can be any naturally occurring amino acid
  Coding DNA Sequence Number=SeqID_7900
  Gene Ontology: Mol. function=unfolded protein binding; Cellular component=cytoplasm; Biological process=response to stress
  Homolog annotation: Hit_ID=P55737; Match level="QueryCoverage=86%, HitCoverage=31%, E-value=4e-90, Identity=78%"; Hit description=Heat shock protein 81-2
  Pfam annotation: Domain name=HATPase_c; Domain location=59-214; Score= 25.9; E_value=9.2e-05; Accession=PF02518.16; Description=Histidine kinase-, DNA gyrase B-, and HSP90-like ATPase
  Subcellular localization annotation: CTP_CleavageSite=23; ConfidenceScore=5.16e-01
RSSTLANPSRLPHASPPLPAPPRAAQGRAQPWSTETETFAFQGEINQLLSLIINTFYSNKESFLRELMSNSSDGLDKIRVESLTDKSKIDAQPEIVIHIIPDKATNTLTIADSGIGMTKSDLVNKLGXTIARSGTKEIVEDLVDGGDVSMSGQIGVGCYSGYLVAERGVGTTKHNDDEQDVWESQGGGCFTVTRDTCGEQLGRGTKMVLYLKDDQMEYLEERRIKDLVKKHSEYISYXPCSGWTEKTTEYAVSDD

SEQ ID NO: 13221 - protein, 211 aa, Zea mays
  Coding DNA Sequence Number=SeqID_7901
  Gene Ontology: Mol. function=nucleoside-triphosphatase activity; Biological process=riboflavin biosynthetic process
  Homolog annotation: Hit_ID=Q7W9Q0; Match level="QueryCoverage=98%, HitCoverage=15%, E-value=2e-71, Identity=65%"; Hit description =Putative ATP-dependent helicase
KLKTLPRHLFMNFRVVDEHERMLAAGRNLAQLKAEFGRQAQADFQQLAARDAQVAQALAQDGLTSWSFGELPEIMEIKRKGQSVIGYPALVDRGAHCDLDVFDDPEEARKHHRAGLLRLFRLGLREQIKFLEKNLPDLTRISMLFMPLGTQEALRDQIIDCALERACLAEPWPVNQEEFESRRLEGKGRLGLLAQEVARLAGAVLAEWPPC

SEQ ID NO: 13222 - protein, 155 aa, Zea mays
  misc_feature (34)..(34): Xaa can be any naturally occurring amino acid
  Coding DNA Sequence Number=SeqID_7902
  Gene Ontology: Cellular component=cellulose and pectin-containing cell wall
  Homolog annotation: Hit_ID=Q6ER87; Match level="QueryCoverage=100%, HitCoverage=69%, E-value=3e-37, Identity=53%"; Hit description =Harpin-induced protein-like
  Pfam annotation: Domain name=Hin1; Domain location=38-154; Score =15.8; E_value=7.4e-05; Accession=PF07320.4; Description=Harpin -induced protein 1 (Hin1)
MSKENDHRDWILRRCCGSGADCILTFDDVGGFIXLVIYLALRPSKPTFYLQEVQLRSIDLRDPELSLDLQVTIASRNPNERRYEYYKTLDSFTTYRDYEATVPVSMPQVYHGHRHTSCVMPDDVGATLCPCRSTSRDVMRQDISSVYVLLHITVD

SEQ ID NO: 13223 - protein, 118 aa, Zea mays
  Coding DNA Sequence Number=SeqID_7903
  Gene Ontology: Mol. function=aspartic-type endopeptidase activity; Cellular component=chromatin; Biological process=chromatin assembly or disassembly
  Homolog annotation: Hit_ID=Q8SA91; Match level="QueryCoverage=100%, HitCoverage=4%, E-value=2e-44, Identity=70%"; Hit description =Putative gag-pol polyprotein
MGHFEFRVMAFGLTGAPNTFLDAMNTTLAPVLRKCALVFFDDILIYSPTFDSHIAHLNSVLQLLQQDQWKVKLSKCAFAQTSISYLGHIISDHGIATDPAKILVVKEWPIPTSTKELR

SEQ ID NO: 13224 - protein, 333 aa, Zea mays
  Coding DNA Sequence Number=SeqID_7904
  Gene Ontology: Mol. function=oxidoreductase activity; Cellular component=mitochondrion; Biological process=metabolic process
  Homolog annotation: Hit_ID=A8G9C7; Match level="QueryCoverage=93%, HitCoverage=82%, E-value=1e-101, Identity=59%"; Hit description=Iron- containing alcohol dehydrogenase
  Pfam annotation: Domain name=Fe-ADH; Domain location=15-322; Score =25.4; E_value=3.5e-17; Accession=PF00465.9; Description=Iron -containing alcohol dehydrogenase
ACLQVSENLIELYSNQQTLFGRGSIERLVPLLAANPQPTLLFCGRSFLNSAAWARLGATLNDHILGYEIVSHEASPDEIDGWVTRWRGHVDRVVAIGGGSVLDAAKAFGAMMQHPLNIARYLEKVGDTPVQAVTLPLIAIPTTAGTGSEVTQNAVVTDQQHIKVKASLRHPVFVPQVAILDPDLLKGAPDRVLATCAIDAFTHLFEAYLSRKGNLFSQQNALNGLQLFMQAWPYLNLDDSRGDAAREAMMMASWLGGVSLSSAGLGVIHGIAGELGAIKPFHHGEVCGRLLFPFLDVLAESAHPEQQRLMAALAERLLPDETAPPALALKAWL

SEQ ID NO: 13225 - protein, 525 aa, Zea mays
  misc_feature (76)..(76): Xaa can be any naturally occurring amino acid
  misc_feature (84)..(84): Xaa can be any naturally occurring amino acid
  misc_feature (105)..(105): Xaa can be any naturally occurring amino acid
  misc_feature (358)..(358): Xaa can be any naturally occurring amino acid
  misc_feature (415)..(415): Xaa can be any naturally occurring amino acid
  misc_feature (439)..(439): Xaa can be any naturally occurring amino acid
  misc_feature (441)..(441): Xaa can be any naturally occurring amino acid
  misc_feature (446)..(446): Xaa can be any naturally occurring amino acid
  misc_feature (449)..(453): Xaa can be any naturally occurring amino acid
  misc_feature (463)..(464): Xaa can be any naturally occurring amino acid
  misc_feature (466)..(469): Xaa can be any naturally occurring amino acid
  misc_feature (478)..(486): Xaa can be any naturally occurring amino acid
  misc_feature (488)..(488): Xaa can be any naturally occurring amino acid
  misc_feature (490)..(490): Xaa can be any naturally occurring amino acid
  misc_feature (492)..(494): Xaa can be any naturally occurring amino acid
  misc_feature (505)..(506): Xaa can be any naturally occurring amino acid
  misc_feature (509)..(509): Xaa can be any naturally occurring amino acid
  misc_feature (512)..(514): Xaa can be any naturally occurring amino acid
  Coding DNA Sequence Number=SeqID_7905
  Subcellular localization annotation: CTP_CleavageSite=92; ConfidenceScore=5.72e-01
CLSLLSLSVAVASRVSSLSSSPALIFSLTLPRAPSSLSPSSFISPYLSPSNLSPFITPSPSSPRSAPCRLLLCPPXHLCRLFFXYFSSLLPLSSSPSSPSSLSSXPRPPLALLSLPPVFSFSLVPPPRCRPFSSLLVPLSVERSGPLSSRALLPLVPSFPRPSSSRLLLPLSSPSSSPLSLISLLLPPRSPVLSSRLSSPSPPSLPLLPLLRVLLSSSVSRLAPSVNTPVLPPFSSSPSLSASFLPHSRSLLLSLLSPLLPSLRRLLPPSPSLFSPSPLSPLSLLPSPLSAPSVSSSSPRGFVLLPPSPLLPLRVVPPPFPRVCSFVVVLCFFFCFVRIGGVVCWGIVFFFCFVCLYXFVVFFCFCFVCWLFFVCCFVVVGFCLRGKEVEVWVFLFCVLLFFCVVCFLFVVCFYXFFFLFCLFVCVVFCFCCCCCVGCXVXCVLGXVLXXXXXLFFVCCGKIXXCXXXXFPPPSGATXXXXXXXXXEXEXKXXXCIDPPSPSPPXXVGXVLXXXVFPPLRPGSLH

SEQ ID NO: 13226 - protein, 137 aa, Zea mays
  Coding DNA Sequence Number=SeqID_7907
MGKNNKRKREPTPPSEEFGDSEYSEEEFSSEFEGSPAPVSPPASSDDSDDSQGIATEVWTYIRAVERAGLEGSDESEYSSDEEDSDGGDEGEDDDDDGDGDGSGSGRGGGDGSRDSTKGSSRGSTEGGGGGRGRASG

SEQ ID NO: 13227 - protein, 479 aa, Zea mays
  misc_feature (17)..(17): Xaa can be any naturally occurring amino acid
  misc_feature (22)..(22): Xaa can be any naturally occurring amino acid
  misc_feature (90)..(90): Xaa can be any naturally occurring amino acid
  misc_feature (124)..(124): Xaa can be any naturally occurring amino acid
  misc_feature (147)..(147): Xaa can be any naturally occurring amino acid
  misc_feature (157)..(157): Xaa can be any naturally occurring amino acid
  misc_feature (175)..(175): Xaa can be any naturally occurring amino acid
  misc_feature (177)..(177): Xaa can be any naturally occurring amino acid
  misc_feature (349)..(349): Xaa can be any naturally occurring amino acid
  Coding DNA Sequence Number=SeqID_7908
  Subcellular localization annotation: CTP_CleavageSite=43; ConfidenceScore=5.40e-01
SSHSAPSLPCRLLIFPXSLSSXAHLLISQLSHLPSLLSLTFSSASSRSLLFYSHHPLLCSPLSFHLFFSAHFSLAFSHLLSLSSSLLQSXLVYHLIISSLPLPSFVLLIFLLLHSSSSLVCSLXLLLPLTLFTLLVSLLSPHTSTSXSLSHHHSHSXTYSLSPLSSHSLVALIYXLXPTSPFSIPCSSPFSFAPLYRLSPSSSPPVPPSLAHSSPSISLNFLLPSYPSPLPSLPLSSPSSFPLFSPLSLLFFLSPLSSLSPLPLPPSFPPLSLSSPPFLFSSFPLLSLLPLLFLTPLSPLSSRFPLPPLPSLSPLHPSLFSSLLSSPVSPAPPLPPPPSSFPSLFLLLXPAPPPPSLSSLPSLSSLSSFFSSLPFLFFPSSPLPLLSFSLSLLFPLSFFPSPPLPPLPPPLPLSPPPSSPFSPSPPPPSPSLFFCGGHKTSFSPSPPLSLPFPSPLSPPLSFFLVTNPLLPFSCPLLFL

SEQ ID NO: 13228 - protein, 131 aa, Zea mays
  misc_feature (50)..(50): Xaa can be any naturally occurring amino acid
  misc_feature (58)..(58): Xaa can be any naturally occurring amino acid
  misc_feature (62)..(62): Xaa can be any naturally occurring amino acid
  misc_feature (70)..(70): Xaa can be any naturally occurring amino acid
  misc_feature (74)..(74): Xaa can be any naturally occurring amino acid
  misc_feature (76)..(76): Xaa can be any naturally occurring amino acid
  misc_feature (79)..(79): Xaa can be any naturally occurring amino acid
  misc_feature (82)..(83): Xaa can be any naturally occurring amino acid
  misc_feature (86)..(87): Xaa can be any naturally occurring amino acid
  misc_feature (99)..(99): Xaa can be any naturally occurring amino acid
  misc_feature (101)..(102): Xaa can be any naturally occurring amino acid
  misc_feature (108)..(109): Xaa can be any naturally occurring amino acid
  misc_feature (112)..(115): Xaa can be any naturally occurring amino acid
  misc_feature (118)..(120): Xaa can be any naturally occurring amino acid
  misc_feature (123)..(123): Xaa can be any naturally occurring amino acid
  misc_feature (125)..(125): Xaa can be any naturally occurring amino acid
  Coding DNA Sequence Number=SeqID_7910
  Gene Ontology: Mol. function=nucleoside diphosphate kinase activity; Cellular component=mitochondrial intermembrane space; Biological process=CTP biosynthetic process
  Homolog annotation: Hit_ID=Q0UAM1; Match level="QueryCoverage=100%, HitCoverage=85%, E-value=2e-35, Identity=58%"; Hit description =Nucleoside diphosphate kinase
  Pfam annotation: Domain name=NDK; Domain location=4-131; Score=152.9; E_value=8.9e-43; Accession=PF00334.9; Description=Nucleoside diphosphate kinase
MTTEQTFIAVKPDGVQRGLIGPIITRFENRGFKLAGIKMVQPSKEHLEKXYEDLKEKXFFPXLIAYMSSXPICXMXWEXRDXXKTXXSILGGTNPLGSXPXXIRGDYXXDGXXXXWHXXXSGXNXKKEISL

SEQ ID NO: 13229 - protein, 121 aa, Zea mays
  misc_feature (52)..(53): Xaa can be any naturally occurring amino acid
  Coding DNA Sequence Number=SeqID_7911
  Gene Ontology: Mol. function=cysteine-type endopeptidase activity; Cellular component=lysosome; Biological process=proteolysis
  Homolog annotation: Hit_ID=A7P7V6; Match level="QueryCoverage=100%, HitCoverage=32%, E-value=1e-52, Identity=79%"; Hit description =Chromosome chr3 scaffold_8, whole genome shotgun sequence
  Pfam annotation: Domain name=Peptidase_C1; Domain location=1-114; Score=-39.5; E_value=8.4e-09; Accession=PF00112.13; Description =Papain family cysteine protease
IAAFVSNFSVVSLDEDQISANLVKNGPLAIGINAVFMQTYIGGVSCPYICGXXLDHGVLLVGYGKAGYAPIRLKEKPYWIIKNSWGESWGENGYYKICRGRNVCGVDSMVSTVAAVHTSHN

SEQ ID NO: 13230 - protein, 157 aa, Zea mays
  Coding DNA Sequence Number=SeqID_7912
  Gene Ontology: Cellular component=endoplasmic reticulum
  Homolog annotation: Hit_ID=A9PE25; Match level="QueryCoverage=99%, HitCoverage=99%, E-value=1e-49, Identity=64%"; Hit description =Putative uncharacterized protein
  Pfam annotation: Domain name=DoxX; Domain location=4-104; Score=-9.1; E_value=0.083; Accession=PF07681.2; Description=DoxX
  Pfam annotation: Domain name=HR_lesion; Domain location=1-138; Score =244.4; E_value=2.6e-70; Accession=PF05514.2; Description=HR-like lesion-inducing
  Pfam module annotation: Pfam domain module=DoxX::HR_lesion; Domain location=4-104::1-138
MAFASFLGRVLFASVFILSAYQEFNEYGVVGGPAAKAIRPKFDAFMHQVHSRVGFHLPEIDMKFLVAGAIALKGVGGILFIFGSSFGAFLLLLHQMIATPIFYDFYNHDNEDQQFFQLFNKFTQNMALAGALLFFIGMKNSIPRRQPKKNVPKTKTF

SEQ ID NO: 13231 - protein, 217 aa, Zea mays
  misc_feature (52)..(53): Xaa can be any naturally occurring amino acid
  Coding DNA Sequence Number=SeqID_7913
  Gene Ontology: Mol. function=acid phosphatase activity; Cellular component=extracellular region; Biological process=biological_process
  Homolog annotation: Hit_ID=Q6YGT9; Match level="QueryCoverage=100%, HitCoverage=42%, E-value=1e-117, Identity=90%"; Hit description =Purple acid phosphatase-like protein
  Pfam annotation: Domain name=Metallophos; Domain location=11-209; Score=84.0; E_value=4.9e-22; Accession=PF00149.18; Description =Calcineurin-like phosphoesterase
TPPEVAPDAPYKFGIIGDLGQTFNSLSTLEHYIQSGAQTVLFVGDLSYADRXXYTDVGLRWDTWGRFVERSTAYQPWIWSAGNHEIDYMPYMGEIVPFKNYLHRYTTPYLASKSSSPLWYSIRRASAHIIVLSSYSPFVKYTPQWMWLKEEQERVDREKTPWLIVLMHVPLYNSNEAHYMEGESMRVVFESWFIKYKVDVIFAGHVHAYERSYRFSN

SEQ ID NO: 13232 - protein, 88 aa, Zea mays
  Coding DNA Sequence Number=SeqID_7914
  Gene Ontology: Mol. function=metal ion binding; Cellular component =nucleus; Biological process=regulation of transcription, DNA -dependent
  Homolog annotation: Hit_ID=A9P8R4; Match level="QueryCoverage=82%, HitCoverage=82%, E-value=2e-35, Identity=94%"; Hit description =Putative uncharacterized protein
  Pfam annotation: Domain name=Elf1; Domain location=8-68; Score=94.4; E_value=3.6e-25; Accession=PF05129.4; Description=Transcription elongation factor Elf1 like
MGKRKSKTKPPPKKRMDKLDTVFSCPFCNHGTSVECRIDMKNLIGEASCGICQESFSTTITALSEPIDIYSEWIDECERVNNLEDDGA

SEQ ID NO: 13233 - protein, 139 aa, Zea mays
  misc_feature (63)..(63): Xaa can be any naturally occurring amino acid
  Coding DNA Sequence Number=SeqID_7915
  Gene Ontology: Mol. function=ribulose-bisphosphate carboxylase activity; Cellular component=chloroplast ribulose bisphosphate carboxylase complex; Biological process=carbon utilization by fixation of carbon dioxide
  Homolog annotation: Hit_ID=A7Q6D7; Match level="QueryCoverage=94%, HitCoverage=77%, E-value=1e-64, Identity=84%"; Hit description =Ribulose bisphosphate carboxylase small chain
  Pfam annotation: Domain name=RuBisCO_small; Domain location=24-133; Score=219.5; E_value=7.6e-63; Accession=PF00101.10; Description =Ribulose bisphosphate carboxylase, small chain
KKKIISNGSKIHCMKTWNPINNRKFETLSYLPPLSDDSIAKEIDYMLKKGWIPCLEFDEEVGXICRENSQMPGYYDGRYWTLWKLPMFGCTDSSQVLNEIHECKRTYPNAYIRCIAFDNKRHMQSIAFVIQKPASTTST

SEQ ID NO: 13234 - protein, 197 aa, Zea mays
  misc_feature (2)..(2): Xaa can be any naturally occurring amino acid
  misc_feature (68)..(68): Xaa can be any naturally occurring amino acid
  misc_feature (182)..(184): Xaa can be any naturally occurring amino acid
  misc_feature (191)..(191): Xaa can be any naturally occurring amino acid
  Coding DNA Sequence Number=SeqID_7916
  Gene Ontology: Mol. function=4-aminobutyrate transaminase activity; Cellular component=cytosol; Biological process=amino acid metabolic process
  Homolog annotation: Hit_ID=Q84P54; Match level="QueryCoverage=100%, HitCoverage=38%, E-value=2e-79, Identity=73%"; Hit description=Gamma- aminobutyrate transaminase subunit isozyme 1
GXLGSMFGCDKYGIKPDLVSLAKALSCAYLPIGAGLGSPEVSEVIHSQSNKLGNFSHGSTYSGHPVPXAVALEAGIIYRERNIVDRVNKISPRVQDGLKALSDSPIFGEIRGTGLILGTEFTDNKSPNDPFPPEWGVGAYFGAQCDKHGMVLRVPGDNIMMSPPFIISPAEVDESMRIHGIXXXETEKKVXELKSQR

SEQ ID NO: 13235 - protein, 115 aa, Zea mays
  misc_feature (22)..(22): Xaa can be any naturally occurring amino acid
  Coding DNA Sequence Number=SeqID_7917
  Gene Ontology: Mol. function=nutrient reservoir activity
  Homolog annotation: Hit_ID=Q00919; Match level="QueryCoverage=97%, HitCoverage=42%, E-value=2e-39, Identity=75%"; Hit description=22 kD alpha-zein protein
RAIKHPIGQPYRLQQALAGTVXQHPFAQLQQQSLAHLTIQTIATQLKQQFVPPLTHLPPGNPVSYLKQQLFASNPNSLANTAAYQKQLQLQQFLPAFIQLPMGNPATYLKQKQLF

SEQ ID NO: 13236 - protein, 164 aa, Zea mays
  Coding DNA Sequence Number=SeqID_7918
  Gene Ontology: Mol. function=structural constituent of ribosome; Cellular component=ribonucleoprotein complex; Biological process =translation
  Homolog annotation: Hit_ID=O65743; Match level="QueryCoverage=72%, HitCoverage=72%, E-value=8e-60, Identity=94%"; Hit description=60S ribosomal protein L24
  Pfam annotation: Domain name=Ribosomal_L24e; Domain location=3-73; Score=174.8; E_value=2.2e-49; Accession=PF01246.10; Description =Ribosomal protein L24e
MVLKTELCRFSGAKIYPGRGIRFVRGDSQVFLFANSKCKRYFHNRLKPSKLTWTAMYRKQHKKDIAQEAVKKRRRATKKPYSRSIVGATLEVIQKKRSEKPEVRDAAREAALREIKERVKKTKDEKRAKKAGVQAKVQKSRGKGSVSKAAAAKGPKLGGGGGKR

SEQ ID NO: 13237 - protein, 102 aa, Zea mays
  misc_feature (46)..(46): Xaa can be any naturally occurring amino acid
  misc_feature (83)..(83): Xaa can be any naturally occurring amino acid
  misc_feature (93)..(94): Xaa can be any naturally occurring amino acid
  Coding DNA Sequence Number=SeqID_7919
  Gene Ontology: Cellular component=mitochondrial respiratory chain; Biological process=electron transport
  Homolog annotation: Hit_ID=A9P8N3; Match level="QueryCoverage=99%, HitCoverage=94%, E-value=1e-35, Identity=70%"; Hit description =Putative uncharacterized protein
MGRKKGFVEFDESPPDDFDPANPYKDPVAMLEMRERIVREKWIQIXKAMIIREKLRWCYRIEGVNHLQKCRHLVNQYLESTRXIGWGKDGRHXXLHGPKVEL

SEQ ID NO: 13238 - protein, 165 aa, Zea mays
  misc_feature (49)..(50): Xaa can be any naturally occurring amino acid
  misc_feature (140)..(142): Xaa can be any naturally occurring amino acid
  misc_feature (159)..(160): Xaa can be any naturally occurring amino acid
  misc_feature (163)..(163): Xaa can be any naturally occurring amino acid
  Coding DNA Sequence Number=SeqID_7920
  Gene Ontology: Mol. function=sequence-specific DNA binding; Cellular component=nucleus; Biological process=regulation of transcription, DNA-dependent
  Homolog annotation: Hit_ID=A7QBT7; Match level="QueryCoverage=93%, HitCoverage=93%, E-value=7e-42, Identity=53%"; Hit description =Chromosome chr1 scaffold_75, whole genome shotgun sequence
  Subcellular localization annotation: CTP_CleavageSite=32; ConfidenceScore=5.36e-01
MVIRINSLTLPSALPKIELRGGNSRSPSLRVSSQMMPQMRKEGRGRRVXXRRTLIKKDEYLPYRMERIPFLEEQVRRLKDERKILQLDVERLMLSEDNKFDFVNEIAAEANSYVESNMDEYGLEKKAILHVLSNRVNDSXXXRPEAYYEPDPFKPGPHXXREXHT

SEQ ID NO: 13239 - protein, 129 aa, Zea mays
  misc_feature (37)..(37): Xaa can be any naturally occurring amino acid
  Coding DNA Sequence Number=SeqID_7921
  Gene Ontology: Mol. function=structural constituent of ribosome; Cellular component=ribonucleoprotein complex; Biological process =translation
  Homolog annotation: Hit_ID=Q9ZT03; Match level="QueryCoverage=69%, HitCoverage=72%, E-value=6e-37, Identity=82%"; Hit description=Clone MS56 unknown mRNA
  Pfam annotation: Domain name=Ribosomal_S26e; Domain location=1-114; Score=233.0; E_value=6.8e-67; Accession=PF01283.9; Description =Ribosomal protein S26e
MTFKRRNGGRNKHGRGHVKFIRCSNCGKCCPKDKAIXRFLVRNIVEQAAVRDVQEACVYEQYTLPKLYVKMQYCVSCAIHSHVVRVRSRTDRRKRDPPQRFIRRRDDAPRPGQPGQAPRPAGVGAPART

SEQ ID NO: 13240 - protein, 119 aa, Zea mays
  misc_feature (4)..(4): Xaa can be any naturally occurring amino acid
  misc_feature (51)..(52): Xaa can be any naturally occurring amino acid
  misc_feature (66)..(68): Xaa can be any naturally occurring amino acid
  Coding DNA Sequence Number=SeqID_7922
  Gene Ontology: Mol. function=electron carrier activity; Cellular component=anchored to membrane; Biological process=electron transport
  Homolog annotation: Hit_ID=Q9ZRV5; Match level="QueryCoverage=94%, HitCoverage=92%, E-value=2e-39, Identity=68%"; Hit description=Basic blue copper protein
  Pfam annotation: Domain name=Cu_bind_like; Domain location=34-112; Score=119.8; E_value=8.2e-33; Accession=PF02298.8; Description =Plastocyanin-like domain
LCNXNVTVISLLCLLVLVEHAHATTYTVGGPGGWTFNTNTWPNGKKFRAGXXLIFNYDSTTHNVVXXXRSGYNSCKTPAGAKVFSSGKDQIRLARGLNYFICNNAGHCESGMKVAINAV

SEQ ID NO: 13241 - protein, 159 aa, Zea mays
  misc_feature (46)..(47): Xaa can be any naturally occurring amino acid
  Coding DNA Sequence Number=SeqID_7923
  Gene Ontology: Mol. function=hydrolase activity, acting on glycosyl bonds; Cellular component=beta-galactosidase complex; Biological process=carbohydrate metabolic process
  Homolog annotation: Hit_ID=O65761; Match level="QueryCoverage=99%, HitCoverage=22%, E-value=6e-85, Identity=90%"; Hit description=Beta -galactosidase
  Pfam annotation: Domain name=Gal_Lectin; Domain location=81-158; Score=173.1; E_value=7.5e-49; Accession=PF02140.8; Description =Galactose binding lectin domain
RSNCGEASQRWYHVPHSWLKPTGNLLVVFEEMGGDPNGIFLVRRVXXSVCADIYEWQPNLVSYQMQASGKVKTPVRPKAHLSCGPGQKISSIKFASFGTPVGSCGNYHEGSCHAHKSYDAFQKNCVGQNSCAVTVAPEIFGGDPCPNVMKKLSVEAICT

SEQ ID NO: 13242 - protein, 108 aa, Zea mays
  misc_feature (37)..(38): Xaa can be any naturally occurring amino acid
  Coding DNA Sequence Number=SeqID_7924
  Gene Ontology: Mol. function=glutathione transferase activity; Cellular component=cytoplasm; Biological process=response to stress
  Homolog annotation: Hit_ID=P32110; Match level="QueryCoverage=100%, HitCoverage=48%, E-value=1e-42, Identity=75%"; Hit description =Probable glutathione S-transferase
  Pfam annotation: Domain name=GST_N; Domain location=6-79; Score=67.3; E_value=5.1e-17; Accession=PF02798.10; Description=Glutathione S -transferase, N-terminal domain
MAADEEDVKLFGAVGSPFVIRVQIALKLKGIEYKYQXXKLGNLSDTLLKYNPVYKMVPVFVHSGKPISESLVILEYIEETWKNNPILPSQPFQRAMARFWAKFIDDKV

SEQ ID NO: 13243 - protein, 169 aa, Zea mays
  misc_feature (8)..(8): Xaa can be any naturally occurring amino acid
  misc_feature (16)..(16): Xaa can be any naturally occurring amino acid
  Coding DNA Sequence Number=SeqID_7925
  Gene Ontology: Mol. function=sulfopyruvate decarboxylase activity; Biological process=coenzyme M biosynthetic process
  Homolog annotation: Hit_ID=A4YN60; Match level="QueryCoverage=76%, HitCoverage=71%, E-value=8e-42, Identity=63%"; Hit description =Putative sulfopyruvate decarboxylase alpha subunit
FASRPDRXMHARADAXDTAPNWPDDIFATLERFDVRQVPYVPDAGHSKLIQRVLASSTMRGIPLTTEEEGVALLAGAWTGGQRGVLLMQSSGVGNCINMLSLIPILRFPFLTLVTMRGEWGEFNPWQVPMGSTTQGVLELSGIKVLRASNAAEVPAVLEAAATAVESSN

SEQ ID NO: 13244 - protein, 319 aa, Zea mays
  Coding DNA Sequence Number=SeqID_7926
  Gene Ontology: Mol. function=protein kinase activity; Cellular component=nucleus; Biological process=protein amino acid phosphorylation
  Homolog annotation: Hit_ID=A7Q9M8; Match level="QueryCoverage=83%, HitCoverage=23%, E-value=1e-19, Identity=59%"; Hit description =Chromosome chr5 scaffold_67, whole genome shotgun sequence
  Pfam annotation: Domain name=Pkinase_Tyr; Domain location=197-293; Score=-170.9; E_value=0.06; Accession=PF07714.7; Description=Protein tyrosine kinase
  Pfam annotation: Domain name=WRKY; Domain location=259-304; Score =47.2; E_value=5.6e-11; Accession=PF03106.6; Description=WRKY DNA -binding domain
  Pfam module annotation: Pfam domain module=Pkinase_Tyr::WRKY; Domain location=197-293::259-304
LGGLENLLAVNISHNRLVGRLPASGVFQSLDASALEGNLGICSPLVAERCMMNVPKPLVLDPNEYTHGGGGDNNNMGTNGGGVGAPRKRRFLSVSAMVAICAAVAIVLGVIVITLLNVSARRRAEAAGGVGPGHGQKKEVDESVVTSSSSTTKSSPAPAPGGKGNGKGKLAAGKMVTFGPGSSLRSEDLVAGADALLGKATEIGRGAFGTVYRAPVGDGRVVAVKKLAAASMVRSREEFEREVRVLGKARHPNLLPLKGYYWTPQWSYYRCTHSNCRVKKRVERLSEDCRMVITTYEGRHTHSPCSDDADADAAGDHTG

SEQ ID NO: 13245 - protein, 147 aa, Zea mays
  Coding DNA Sequence Number=SeqID_7927
  Homolog annotation: Hit_ID=A7Q179; Match level="QueryCoverage=95%, HitCoverage=46%, E-value=4e-52, Identity=72%"; Hit description =Chromosome chr10 scaffold_43, whole genome shotgun sequence
  Pfam annotation: Domain name=mTERF; Domain location=2-140; Score= -52.7; E_value=0.00012; Accession=PF02536.5; Description=mTERF
TSSVVDQLRPALFYLKRLGFKDLEALAYQDSVLLVSNVERTLIPKLKYLENLGFSKGEVRCMVLRCPALLTFSIENNFQPKFEYFSVEMGRKLEELKEFPQYFTFSLENRIKPRHMEVVQSGVNFPLSVMLRSTDEEFRELIKPRDG

SEQ ID NO: 13246 - protein, 146 aa, Zea mays
  misc_feature (17)..(18): Xaa can be any naturally occurring amino acid
  Coding DNA Sequence Number=SeqID_7928
  Gene Ontology: Mol. function=small conjugating protein ligase activity; Cellular component=cytosol; Biological process=regulation of protein metabolic process
  Homolog annotation: Hit_ID=Q3EAL0; Match level="QueryCoverage=100%, HitCoverage=100%, E-value=7e-72, Identity=87%"; Hit description =Uncharacterized protein At3g52560.2
  Pfam annotation: Domain name=UQ_con; Domain location=17-138; Score= -21.9; E_value=0.0014; Accession=PF00179.16; Description=Ubiquitin -conjugating enzyme
MTLGSGGSSVVVPRNFXXLEELERGEKGIGDGTVSYGMDGGDDIYMRSWTGTIIGPHNTVHEGRIYQLKLFCDKDYPEKPPSVRFHSRINMTCVNHETGVVEPKKFGLLANWQREYTMEDILTQLKKEMAAPHNRKLVQPPEGTYF

SEQ ID NO: 13247 - protein, 226 aa, Zea mays
  misc_feature (223)..(223): Xaa can be any naturally occurring amino acid
  Coding DNA Sequence Number=SeqID_7929
  Gene Ontology: Mol. function=molecular_function; Cellular component =cellular_component; Biological process=biological_process
  Homolog annotation: Hit_ID=A9PAY0; Match level="QueryCoverage=100%, HitCoverage=88%, E-value=4e-63, Identity=55%"; Hit description =Putative uncharacterized protein
  Pfam annotation: Domain name=UBX; Domain location=104-182; Score=9.3; E_value=0.01; Accession=PF00789.11; Description=UBX domain
MFVGGSSPLTSKRRRVTNIYSTHMDTEAANAKIAAMKERFGREIHVFETSALSPSSNAVSSNEEETDDFYEFTAEDYHRILATKKEDKFLKTRKIREAEEASRRSRITKAVIRVRFPDNHTLEATFHPSETVQSLIDLLSKVIAKPEQPFHIYTTPPKKLINDMSQDFYTAGFCPGAIVYFSYNVPKGDSTVVDHIGPYLREEILSLKGLDVANDQGQQSEPXQCA

SEQ ID NO: 13248 - protein, 162 aa, Zea mays
  misc_feature (32)..(33): Xaa can be any naturally occurring amino acid
  misc_feature (135)..(137): Xaa can be any naturally occurring amino acid
  misc_feature (147)..(148): Xaa can be any naturally occurring amino acid
  misc_feature (151)..(152): Xaa can be any naturally occurring amino acid
  misc_feature (159)..(161): Xaa can be any naturally occurring amino acid
  Coding DNA Sequence Number=SeqID_7930
  Gene Ontology: Mol. function=peptidyl-prolyl cis-trans isomerase activity; Cellular component=cytoplasm; Biological process=protein folding
  Homolog annotation: Hit_ID=A9P8B6; Match level="QueryCoverage=100%, HitCoverage=94%, E-value=4e-69, Identity=77%"; Hit description =Putative uncharacterized protein
  Pfam annotation: Domain name=Pro_isomerase; Domain location=5-160; Score=336.1; E_value=6.3e-98; Accession=PF00160.11; Description =Cyclophilin type peptidyl-prolyl cis-tr
MANPRVFFDMAIGGQPVGRIVIELFADTTPRXXENFRALCTGEKGVGRSGKPLHYKGSSFHRVIPNFMCQGGDFTAGNGTGGESIYGAKFADENFIKKHTGPGVLSMANAGPGTNGSQFFICTTKTEWLDGKHVXXXQVVEGLNVVXXIEXXGSSSGKXXXP

SEQ ID NO: 13249 - protein, 186 aa, Zea mays
  misc_feature (101)..(101): Xaa can be any naturally occurring amino acid
  misc_feature (123)..(123): Xaa can be any naturally occurring amino acid
  misc_feature (130)..(130): Xaa can be any naturally occurring amino acid
  Coding DNA Sequence Number=SeqID_7931
  Gene Ontology: Mol. function=structural constituent of ribosome; Cellular component=ribonucleoprotein complex; Biological process =translation
  Homolog annotation: Hit_ID=A2X3I0; Match level="QueryCoverage=73%, HitCoverage=100%, E-value=3e-53, Identity=75%"; Hit description=60S ribosomal protein L27
  Pfam annotation: Domain name=Ribosomal_L27e; Domain location=52-137; Score=101.4; E_value=2.7e-27; Accession=PF01777.8; Description =Ribosomal L27e protein family
MVKFLKPGKGVILLQGRFAVRKGIIVRVFQEGTRNRPYGHCLVRGLSKYPKKVIRKDSVNKTAKKSRVKCFIKLDNFCLLMTTRYTLNVDFKDGATGGSDXLSTQNKNVLVCKTDKVRLEERXKTGKNRXFFTMLRFYMLGLPNRPALAGDLLYRTDSISVFVLHEYFVFSPGGLRDKFAKICRCC

SEQ ID NO: 13250 - protein, 147 aa, Zea mays
  Coding DNA Sequence Number=SeqID_7932
  Gene Ontology: Mol. function=structural constituent of ribosome; Cellular component=intracellular; Biological process=translation
  Homolog annotation: Hit_ID=A2WR66; Match level="QueryCoverage=100%, HitCoverage=24%, E-value=1e-63, Identity=79%"; Hit description =Putative uncharacterized protein
  Pfam annotation: Domain name=PPR; Domain location=20-54; Score=40.4; E_value=6.5e-09; Accession=PF01535.11; Description=PPR repeat
  Pfam annotation: Domain name=PPR; Domain location=55-88; Score=32.2; E_value=1.9e-06; Accession=PF01535.11; Description=PPR repeat
  Pfam module annotation: Pfam domain module=PPR::PPR; Domain location =20-54::55-88
QDALHLFDVMPHRRVPPDLVSHTILMDGLCKAWRLKDARRMFDRMVHGGLRPDAVAYSVLITGYCNEGQLKEARSLLMEMAGSGLLDIAFALRVVVQGHVKFGKLLTCLNMVAPLRKYGIVIPSQSYSCLIGALCEDMRPNAARGLL

SEQ ID NO: 13251 - protein, 196 aa, Zea mays
  misc_feature (16)..(16): Xaa can be any naturally occurring amino acid
  misc_feature (33)..(33): Xaa can be any naturally occurring amino acid
  misc_feature (41)..(41): Xaa can be any naturally occurring amino acid
  misc_feature (56)..(56): Xaa can be any naturally occurring amino acid
  misc_feature (58)..(58): Xaa can be any naturally occurring amino acid
  misc_feature (61)..(61): Xaa can be any naturally occurring amino acid
  misc_feature (78)..(78): Xaa can be any naturally occurring amino acid
  misc_feature (88)..(88): Xaa can be any naturally occurring amino acid
  misc_feature (120)..(120): Xaa can be any naturally occurring amino acid
  misc_feature (129)..(129): Xaa can be any naturally occurring amino acid
  misc_feature (154)..(154): Xaa can be any naturally occurring amino acid
  misc_feature (166)..(166): Xaa can be any naturally occurring amino acid
  misc_feature (169)..(169): Xaa can be any naturally occurring amino acid
  misc_feature (175)..(175): Xaa can be any naturally occurring amino acid
  misc_feature (182)..(184): Xaa can be any naturally occurring amino acid
  Coding DNA Sequence Number=SeqID_7933
  Gene Ontology: Mol. function=protein histidine kinase activity; Cellular component=integral to membrane; Biological process=two -component signal transduction system (phosphorelay)
  Homolog annotation: Hit_ID=P0AFA3; Match level="QueryCoverage=90%, HitCoverage=29%, E-value=2e-87, Identity=90%"; Hit description =Nitrate/nitrite sensor protein narX
  Pfam annotation: Domain name=HisKA_3; Domain location=128-197; Score =14.0; E_value=0.006; Accession=PF07730.3; Description=Histidine kinase
RQGERLSPVLNGLQNXTLLRDIELRVYDTDDEXNHQEFTCXPDMTCDDKGCQLCPXGXLPXGDRGTTLKWRLADSHTXYGILLATLPXGRHLSHDQQQLVDTLVEQLTATLALDRHQERXQQLIVMEEXATIARELHDSIAQSLSCMKMQVSCXQMHGDALPETSXELXSQIRNXLIASWAXXXNCYPFTNLDTSA

SEQ ID NO: 13252 - protein, 223 aa, Zea mays
  misc_feature (61)..(61): Xaa can be any naturally occurring amino acid
  misc_feature (79)..(79): Xaa can be any naturally occurring amino acid
  misc_feature (93)..(93): Xaa can be any naturally occurring amino acid
  misc_feature (97)..(99): Xaa can be any naturally occurring amino acid
  misc_feature (101)..(101): Xaa can be any naturally occurring amino acid
  misc_feature (104)..(105): Xaa can be any naturally occurring amino acid
  misc_feature (111)..(111): Xaa can be any naturally occurring amino acid
  misc_feature (115)..(115): Xaa can be any naturally occurring amino acid
  misc_feature (117)..(117): Xaa can be any naturally occurring amino acid
  misc_feature (121)..(122): Xaa can be any naturally occurring amino acid
  misc_feature (128)..(128): Xaa can be any naturally occurring amino acid
  misc_feature (130)..(130): Xaa can be any naturally occurring amino acid
  misc_feature (134)..(134): Xaa can be any naturally occurring amino acid
  misc_feature (141)..(142): Xaa can be any naturally occurring amino acid
  misc_feature (144)..(144): Xaa can be any naturally occurring amino acid
  misc_feature (151)..(153): Xaa can be any naturally occurring amino acid
  misc_feature (158)..(159): Xaa can be any naturally occurring amino acid
  misc_feature (161)..(161): Xaa can be any naturally occurring amino acid
  misc_feature (163)..(164): Xaa can be any naturally occurring amino acid
  misc_feature (175)..(175): Xaa can be any naturally occurring amino acid
  misc_feature (181)..(181): Xaa can be any naturally occurring amino acid
  misc_feature (183)..(183): Xaa can be any naturally occurring amino acid
  misc_feature (185)..(186): Xaa can be any naturally occurring amino acid
  misc_feature (199)..(199): Xaa can be any naturally occurring amino acid
  misc_feature (204)..(204): Xaa can be any naturally occurring amino acid
  misc_feature (214)..(214): Xaa can be any naturally occurring amino acid
  misc_feature (216)..(216): Xaa can be any naturally occurring amino acid
  Coding DNA Sequence Number=SeqID_7934
  Gene Ontology: Mol. function=protein binding; Cellular component =nucleus; Biological process=ribosome assembly
  Homolog annotation: Hit_ID=A2YPT0; Match level="QueryCoverage=84%, HitCoverage=100%, E-value=7e-55, Identity=61%"; Hit description =Putative uncharacterized protein
MGDWVPRGRPGKPAAARQHQTSIRPELCLRRRRAMRPLDEKETTQVFEKLVKFTGPNLKHXLERPAVEGPDAEPGRYCXRLHRNRVYHASEAXVRRXXXVXRPXXVGVGTXIGKXTXHGAXXLTVHAXDXLVAXARRRVWXXPXTERSFLXXXSVPKXXLXRXXENNKVGDGVVXMVMVDXPXGXXIAARSAQDCRKAXTNGGXVLPSRNAGEXLXRRRSFVR

SEQ ID NO: 13253 - protein, 148 aa, Zea mays
  misc_feature (35)..(35): Xaa can be any naturally occurring amino acid
  misc_feature (122)..(122): Xaa can be any naturally occurring amino acid
  Coding DNA Sequence Number=SeqID_7935
  Gene Ontology: Mol. function=structural constituent of ribosome; Cellular component=cytosolic small ribosomal subunit; Biological process=telomere maintenance
  Homolog annotation: Hit_ID=A1CUJ6; Match level="QueryCoverage=100%, HitCoverage=94%, E-value=2e-59, Identity=79%"; Hit description =Ribosomal protein S13p/S18e
  Pfam annotation: Domain name=Ribosomal_S13; Domain location=16-145; Score=188.9; E_value=1.3e-53; Accession=PF00416.12; Description =Ribosomal protein S13S18
MSLARGEKTNLQFILRDLNTNDDGTQKGMYALDQXSRGVGRRYSNLVCKKADVDLNKRAGELTSEELERIETNMQNPTQYKISCWLLNRQRDIGDCEDSHILCNGVDSELREDLERLKKIRXHRGLRHYWRLRVRGQHTKNTGRRGRT

SEQ ID NO: 13254 - protein, 368 aa, Zea mays
  Coding DNA Sequence Number=SeqID_7936
  Gene Ontology: Mol. function=protein serine/threonine kinase activity; Cellular component=cell surface; Biological process =recognition or rejection of self pollen
  Homolog annotation: Hit_ID=A2XXX8; Match level="QueryCoverage=98%, HitCoverage=86%, E-value=1e-109, Identity=52%"; Hit description =Putative uncharacterized protein
  Pfam annotation: Domain name=B_lectin; Domain location=71-183; Score =117.5; E_value=4.1e-32; Accession=PF01453.15; Description=D-mannose binding lectin
  Pfam annotation: Domain name=S_locus_glycop; Domain location=198-326; Score=56.8; E_value=7.5e-14; Accession=PF00954.11; Description=S -locus glycoprotein family
  Pfam module annotation: Pfam domain module=B_lectin::S_locus_glycop; Domain location=71-183::198-326
MAMVYIHSAFILIFLSSPCQSNDQLTQTKPLLLEDTLISEGGDFALGFFSPTNFSKKLYIGIWYNNVPERERTVVWIANRDSPVTTPATSVKLAVTNDSELVLSDSQGHIFWMATSSTSGGAGAFAVLLNSGNFVLRSPNGTDVWQSFDHPTDTVLPTMRSMIRYRSQPATGLFAWKSPDDPSTGDISSGMDPASSNVQVFIWNGTLPYYRSSFFNDVPASGGTYQANNTSVTYQWMMVDTGDEIYYTFTVLAGSPYMHFSLHHTGKMRLLVWENSTSSWVLISEEPSVGCDLYASCGPFGYCDLTKAMPTCQCPDHFELVDSLNFSRGCQRKEELKCGTESYFMTMPNMKIPDKFLHIRNRTFDQCA

SEQ ID NO: 13255 - protein, 174 aa, Zea mays
  Coding DNA Sequence Number=SeqID_7937
  Gene Ontology: Mol. function=transporter activity; Cellular component= integral to membrane; Biological process=transport
  Homolog annotation: Hit_ID=Q397Y1; Match level="QueryCoverage=100%, HitCoverage=37%, E-value=5e-93, Identity=95%"; Hit description=Major facilitator superfamily (MFS_1) transporter
QGLGLGGELPVAATYINEITRAHGRGRFVLLYEIVFPIGLLVSMALGAWLVPRFGWEIMYFVGGLPLILALVLTHLVPESPRWLASRGRLAEAGRAVGVFESSVRGELPPATQAAAYDEMVRQHPKRRMSDLFSAAYRKRTLAVATLWATCGFIQYGLSTWLPTIYKNFYHAPL

SEQ ID NO: 13256 - protein, 361 aa, Zea mays
  misc_feature (34)..(34): Xaa can be any naturally occurring amino acid
  misc_feature (77)..(77): Xaa can be any naturally occurring amino acid
  Coding DNA Sequence Number=SeqID_7938
  Gene Ontology: Mol. function=ribonuclease H activity; Biological process=DNA integration
  Homolog annotation: Hit_ID=O48967; Match level="QueryCoverage=68%, HitCoverage=69%, E-value=1e-62, Identity=66%"; Hit description =Putative uncharacterized protein
  Pfam annotation: Domain name=Retrotrans_gag; Domain location=54-123; Score=18.8; E_value=0.00081; Accession=PF03732.7; Description =Retrotransposon gag protein
AGEDARVSLERACERRQNIESRNLGYAFAAVAPXTPTGARIQAGVPLVGVGCTALADHLRAASWPSKFRPHLPEKYXAHLHAVRQEPEETLRAFISRFTKVRGTIPRISDASIITAFRQGVRDEKMLEKLATHDVETVPTLFALADKCARATEGRAWHSTPQTRVTQTGGLGAVAQDGKKKKKNRGHERPQTAAPVVTAATGGRGERNKHPGPQGSNSGSCPMHPNARHSATECREIIKLVKRVSGRRDQTSRDGSPPRRQPGKERSDDGEVAAEERDLGYQSPEGVLKDVFTGDSDSSGESDRRKKLYVMYDGSWDITSLRNVKSLRREVLSVTPGVSKAAPHQRWRSTTISFGASDCPD

SEQ ID NO: 13257 - protein, 158 aa, Zea mays
  misc_feature (3)..(4): Xaa can be any naturally occurring amino acid
  misc_feature (12)..(16): Xaa can be any naturally occurring amino acid
  misc_feature (26)..(27): Xaa can be any naturally occurring amino acid
  Coding DNA Sequence Number=SeqID_7939
  Gene Ontology: Mol. function=isomerase activity
  Homolog annotation: Hit_ID=A7PCL2; Match level="QueryCoverage=100%, HitCoverage=64%, E-value=2e-56, Identity=54%"; Hit description =Chromosome chr17 scaffold_12, whole genome shotgun sequence
  Pfam annotation: Domain name=MA3; Domain location=3-114; Score=125.0; E_value=2.1e-34; Accession=PF02847.7; Description=MA3 domain
DQXXKAIVSIIXXXXXTGDVDMAASXXRELGSNEYYPYFIKRLVSMAMDRHDKEKEMASVLLSALYADVISPAQIRDGFFMLIESADDLAVDILDAVDILALFLARAVVDDILPPAFLARAKKALPESSKGYQVIQTAEKSYLSAPHHAELVEKRWGG

SEQ ID NO: 13258 - protein, 121 aa, Zea mays
  misc_feature (9)..(9): Xaa can be any naturally occurring amino acid
  misc_feature (18)..(18): Xaa can be any naturally occurring amino acid
  Coding DNA Sequence Number=SeqID_7940
  Gene Ontology: Mol. function=transferase activity, transferring glycosyl groups; Biological process=metabolic process
  Homolog annotation: Hit_ID=Q8W2B7; Match level="QueryCoverage=99%, HitCoverage=24%, E-value=3e-32, Identity=62%"; Hit description=UDP -glucosyltransferase BX8
GHPAVGGFXFTPNGWNSXVEAISEGVPMVFCPRHGDQFGNIRYVFHVWKVGPELVGEQLEKGQVKAPIDRLFGPKEGEEIKERMKEFKIAAAKGIGIGVDVDENGSPRPDLTDLVDFIKSF

SEQ ID NO: 13259 - protein, 169 aa, Zea mays
  misc_feature (22)..(22): Xaa can be any naturally occurring amino acid
  misc_feature (56)..(56): Xaa can be any naturally occurring amino acid
  misc_feature (141)..(144): Xaa can be any naturally occurring amino acid
  misc_feature (149)..(149): Xaa can be any naturally occurring amino acid
  misc_feature (166)..(169): Xaa can be any naturally occurring amino acid
  Coding DNA Sequence Number=SeqID_7941
  Gene Ontology: Mol. function=aspartic-type endopeptidase activity; Cellular component=oxygen evolving complex; Biological process=DNA integration
  Homolog annotation: Hit_ID=Q9SLF0; Match level="QueryCoverage=97%, HitCoverage=12%, E-value=5e-58, Identity=65%"; Hit description =Putative retroelement pol polyprotein
  Pfam annotation: Domain name=RVT_2; Domain location=1-168; Score =149.8; E_value=7.4e-42; Accession=PF07727.4; Description=Reverse transcriptase (RNA-dependent
FAPVAKMVTVRVFLIVVATKNXEVHQMDVHNAFLHGDLMEEVYMKLPPGFQVGTFXKVCRLKKSLYGLKQAPLCWFAKLLTVLKNYGFKQSYSDYSLFTLGRGSVQLSVIVYVDDLIIFGSHPDDIQKFKDYLSACFHMKXXXXLKYFXGKVARGPNGFVLCQRKXXXX

SEQ ID NO: 13260 - protein, 146 aa, Zea mays
  Coding DNA Sequence Number=SeqID_7942
  Gene Ontology: Mol. function=transcription factor activity; Biological process=regulation of transcription, DNA-dependent
  Homolog annotation: Hit_ID=Q3KCB3; Match level="QueryCoverage=100%, HitCoverage=45%, E-value=5e-41, Identity=57%"; Hit description =Transcriptional regulator, LysR family
  Pfam annotation: Domain name=HTH_1; Domain location=28-87; Score =48.0; E_value=3.4e-11; Accession=PF00126.17; Description=Bacterial regulatory helix-turn-helix protein, lysR family
MESKVSQSGNNANNRGDNAVLALSNIDLKLLRVFKCVVEAGGLTAASHELNIGLAAISKQVSDLEIRLGMTLCSRGREGFELTQYGINVYQATLELFVSLNLFRERLHNSRNELLGDIAICVVDNTISDPHSPVTSAVLTCTRKSP

SEQ ID NO: 13261 - protein, 116 aa, Zea mays
  misc_feature (5)..(5): Xaa can be any naturally occurring amino acid
  misc_feature (11)..(13): Xaa can be any naturally occurring amino acid
  misc_feature (30)..(30): Xaa can be any naturally occurring amino acid
  Coding DNA Sequence Number=SeqID_7943
  Gene Ontology: Mol. function=structural constituent of ribosome; Cellular component=ribonucleoprotein complex; Biological process =translation
  Homolog annotation: Hit_ID=Q2PMP9; Match level="QueryCoverage=100%, HitCoverage=95%, E-value=8e-53, Identity=91%"; Hit description =Chloroplast 50S ribosomal protein L14
  Pfam annotation: Domain name=Ribosomal_L14; Domain location=1-116; Score=210.2; E_value=5e-60; Accession=PF00238.10; Description =Ribosomal protein L14pL23e
HLNVXDNSGAXXXMCIRIIGASNRRYAYIXDIVVAVIKEAVPNTPLEKSEVIRAVIVRTCKELKRSNGIIIQYDDNAAVVIDQEGNPKGTRIFCAIARELRQFNFTKIVSLAPEVL

SEQ ID NO: 13262 - protein, 163 aa, Zea mays
  misc_feature (102)..(102): Xaa can be any naturally occurring amino acid
  Coding DNA Sequence Number=SeqID_7944
  Gene Ontology: Mol. function=nitrate reductase (NADH) activity; Cellular component=endoplasmic reticulum; Biological process=nitrate assimilation
  Homolog annotation: Hit_ID=P17571; Match level="QueryCoverage=95%, HitCoverage=24%, E-value=1e-51, Identity=67%"; Hit description =Nitrate reductase [NADH]
  Pfam annotation: Domain name=Cyt-b5; Domain location=31-104; Score =61.9; E_value=2.2e-15; Accession=PF00173.18; Description=Cytochrome b5-like HemeSteroid binding doma
FPGSRAHTAGAPGLKRRWFIPFMNTTDLGKQFTMSEVRKHASQESEWIDVHGHVYNCTKILKDHPGGADSILINAGTDCTEDVDAIHSDKAKVLLDTYLIGXLITTGTGYRFDNFVHGGYVLSHLVAIREARRGPGFFNLSEKIHWRLVSMKGLSRDVRLYRF

SEQ ID NO: 13263 - protein, 126 aa, Zea mays
  misc_feature (35)..(35): Xaa can be any naturally occurring amino acid
  misc_feature (77)..(77): Xaa can be any naturally occurring amino acid
  misc_feature (92)..(92): Xaa can be any naturally occurring amino acid
  Coding DNA Sequence Number=SeqID_7945
  Gene Ontology: Mol. function=aspartic-type endopeptidase activity; Cellular component=chromatin; Biological process=chromatin assembly or disassembly
  Homolog annotation: Hit_ID=Q7XFZ5; Match level="QueryCoverage=100%, HitCoverage=8%, E-value=4e-53, Identity=76%"; Hit description =Retrotransposon protein, putative, unclassified, expressed
SIVSDRDPVFTSTFWRELMRLMGTQLHMTTAFHPXFDGQTEAANRVIAMYLRCFIGDRPRDWMRWLPWAEYTDNTAXQSSLWETPFRVVYGXDPPTIRSYEDGNTRVATVDKTMAERDEFLADVRH

SEQ ID NO: 13264 - protein, 217 aa, Zea mays
  Coding DNA Sequence Number=SeqID_7946
  Gene Ontology: Mol. function=RNA-directed DNA polymerase activity; Biological process=RNA-dependent DNA replication
  Homolog annotation: Hit_ID=O48967; Match level="QueryCoverage=100%, HitCoverage=46%, E-value=2e-77, Identity=69%"; Hit description =Putative uncharacterized protein
MIVQIVEHRAETLEDFLVEDEAASSTPRVPNRPVLGIAAVHAAQQHTTAQTSRTPSRAAPGALSAARELLRHPPSSMASPGAMKQWRDDVDRLLGMAHSTSSKSRSWSSWRQHEASASVRSPSVRGAQTNDLRAELNRRRTREDARISLERARERRQNIEDRNLNQDFAAVAPQTPVCARFQTGVPLTGMGCAALADHLRAASWPSKFRPHLPEKYD

SEQ ID NO: 13265 - protein, 126 aa, Zea mays
  misc_feature (13)..(13): Xaa can be any naturally occurring amino acid
  misc_feature (86)..(86): Xaa can be any naturally occurring amino acid
  Coding DNA Sequence Number=SeqID_7947
  Gene Ontology: Mol. function=metalloendopeptidase activity; Cellular component=membrane; Biological process=proteolysis
  Homolog annotation: Hit_ID=Q94DI2; Match level="QueryCoverage=99%, HitCoverage=37%, E-value=1e-44, Identity=75%"; Hit description =Peptidase M48-like
HYTSAINGKKPTXVTYTHALVELLTPRELQPDLAHELRHLKCDHGVWHTIANILTMGAYTVPGFGMIAGFLEEQLYRWLRAAELTXDRSALIVVQDPKVVIYVLTNLPVGCPYLGLKLNGDAFLVQ

SEQ ID NO: 13266 - protein, 218 aa, Zea mays
  Coding DNA Sequence Number=SeqID_7948
  Gene Ontology: Biological process=intein-mediated protein splicing
  Homolog annotation: Hit_ID=A8GCR3; Match level="QueryCoverage=100%, HitCoverage=37%, E-value=1e-114, Identity=88%"; Hit description =Putative uncharacterized protein
IDLSCIPLYFNADAPLACAMHEAFTMNVARLWLRLPGDMDRRPLDGYFTALGFGDNDDLWPKGSSSFSGYQLLLEYFTFREKFMFTGLRGLETVVFPAELPWFEIDVVLAERWEHDFSFTEKHLRQNCVPVINLFPLESDPLTLNSLQTEYMLRPMRVQDGHTEIYAVDSVMSSSQHSYVPFSSFRHKGGMMRHQAPEYWYNGRVRNGPTGLHNTWLV

SEQ ID NO: 13267 - protein, 188 aa, Zea mays
  misc_feature (84)..(84): Xaa can be any naturally occurring amino acid
  misc_feature (107)..(107): Xaa can be any naturally occurring amino acid
  misc_feature (115)..(115): Xaa can be any naturally occurring amino acid
  misc_feature (120)..(120): Xaa can be any naturally occurring amino acid
  misc_feature (134)..(134): Xaa can be any naturally occurring amino acid
  misc_feature (139)..(139): Xaa can be any naturally occurring amino acid
  misc_feature (143)..(143): Xaa can be any naturally occurring amino acid
  misc_feature (151)..(151): Xaa can be any naturally occurring amino acid
  misc_feature (163)..(163): Xaa can be any naturally occurring amino acid
  misc_feature (168)..(168): Xaa can be any naturally occurring amino acid
  misc_feature (174)..(174): Xaa can be any naturally occurring amino acid
  Coding DNA Sequence Number=SeqID_7949
  Gene Ontology: Mol. function=structural molecule activity; Cellular component=viral capsid; Biological process=metabolic process
  Homolog annotation: Hit_ID=P03713; Match level="QueryCoverage=91%, HitCoverage=50%, E-value=2e-75, Identity=83%"; Hit description=Major head protein
  Pfam annotation: Domain name=Phage_cap_E; Domain location=16-189; Score=162.7; E_value=9.7e-46; Accession=PF03864.6; Description=Phage major capsid protein E
APRGGGRSRTSGSPGLAANEQKFKFDPLFLRLFFRESYPFTTEKVYLSQIPGLVNMALYVSPIVSGEVIRSRGGSTSEFTPGYXKPKHEVNPQMTLRRLPDEDPQNXADPAYRRXRIIMXNMRDEELAIAHVEXMQAVXAVLXGKYTMTGXAFDPVEVDMGRXEENNXTHFGGXDWNKRDKFLLPPTI

SEQ ID NO: 13268 - protein, 194 aa, Zea mays
  Coding DNA Sequence Number=SeqID_7950
  Gene Ontology: Mol. function=nucleic acid binding; Cellular component= chromatin; Biological process=DNA integration
  Homolog annotation: Hit_ID=Q2QMT9; Match level="QueryCoverage=91%, HitCoverage=17%, E-value=4e-72, Identity=71%"; Hit description =Retrotransposon protein, putative, unclassified
MRRLTGATSPSPGLTGALQYLTISRPDIAYTVQQLCLHMHTPREPHLTTLKWILRYLWGSLDYDLLLRPSSTSELVVYVDSDWAGCPDTHRFTSGYAVFLGANLVSWAAKWQSIVSRSSAEAEYRVVANSVAEASWMRQLLHELYNPLQRATLVYCDNVSAVYLSTNPVQHQRTKHVEIDLHFIQECVAVGNVR

SEQ ID NO: 13269 - protein, 249 aa, Zea mays
  misc_feature (25)..(25): Xaa can be any naturally occurring amino acid
  misc_feature (51)..(51): Xaa can be any naturally occurring amino acid
  misc_feature (60)..(60): Xaa can be any naturally occurring amino acid
  misc_feature (67)..(68): Xaa can be any naturally occurring amino acid
  misc_feature (78)..(78): Xaa can be any naturally occurring amino acid
  misc_feature (92)..(92): Xaa can be any naturally occurring amino acid
  misc_feature (97)..(97): Xaa can be any naturally occurring amino acid
  misc_feature (107)..(107): Xaa can be any naturally occurring amino acid
  Coding DNA Sequence Number=SeqID_7951
LAAPLLKVAHRLASVRQQIKAVALXEERPWPLRSWPEAAGLFPWGEGMDPXLKEEVINAXDDARGAXXPLCLVGRIIXHNKDATDSSSTDHXGKEAXGARPGAPGPXARGDREAQGGAAPLPSVPGRTTTARGPPSTRLPPHARPPPPQPAPGPPLAPPYPPPPHPPSPQPIVPPHPHHPPPPPHPHPPPPPPGPARPPPHPPPPPPPPPFHPGAPFAPPPPPPPPRPLPPPPPRRPRPPPPRPPPAPP

SEQ ID NO: 13270 - protein, 239 aa, Zea mays
  misc_feature (2)..(2): Xaa can be any naturally occurring amino acid
  misc_feature (164)..(164): Xaa can be any naturally occurring amino acid
  misc_feature (174)..(176): Xaa can be any naturally occurring amino acid
  misc_feature (180)..(180): Xaa can be any naturally occurring amino acid
  misc_feature (190)..(190): Xaa can be any naturally occurring amino acid
  misc_feature (209)..(212): Xaa can be any naturally occurring amino acid
  misc_feature (215)..(218): Xaa can be any naturally occurring amino acid
  misc_feature (221)..(221): Xaa can be any naturally occurring amino acid
  misc_feature (233)..(234): Xaa can be any naturally occurring amino acid
  Coding DNA Sequence Number=SeqID_7953
  Gene Ontology: Mol. function=ARF guanyl-nucleotide exchange factor activity; Cellular component=intracellular; Biological process =regulation of ARF protein signal transduction
  Homolog annotation: Hit_ID=Q8S566; Match level="QueryCoverage=95%, HitCoverage=19%, E-value=5e-90, Identity=73%"; Hit description =Guanine nucleotide-exchange protein GEP1
YXLMGRFSQLLYLDAEEPRSQPTEEQLAAQRNALETVKKCQIGTIFTESKFLQADSLSNLARALIQAAGRPQRITSSLDDEGTAVFCLELLITVTLNNRDRIVLLWQGVYEHITHIVQSTVMPCNLVEKAVFGLLHICQRLLPYKENLVDDLLRSLQLILKLDXRVADAYCENXXXRSHXLVKANATHIXSQMGWRTIISLLCVTARHXXXXDAXXXXLVXIMSEGAHLSPAXXIKAML

SEQ ID NO: 13271 - protein, 128 aa, Zea mays
  Coding DNA Sequence Number=SeqID_7954
  Gene Ontology: Mol. function=identical protein binding; Cellular component=integral to membrane
  Homolog annotation: Hit_ID=Q10QI6; Match level="QueryCoverage=94%, HitCoverage=44%, E-value=5e-50, Identity=79%"; Hit description =Possible metal-binding domain in RNase L inhibitor, RLI family protein, expressed
  Pfam annotation: Domain name=DUF367; Domain location=1-111; Score =159.1; E_value=1.2e-44; Accession=PF04034.4; Description=Domain of unknown function (DUF367)
MVHIYLLAAVDCSWARLSDAPFVKLRWGAPCLLPWLVATNPVNYGRPCELSCVEALSAALIICGEEDTAHSLLETFKWGHSFLSLSRDLLNASSQCENGPAIITVQKSWLSSNSSVPKPTCNGAQESC

SEQ ID NO: 13272 - protein, 394 aa, Zea mays
  misc_feature (10)..(10): Xaa can be any naturally occurring amino acid
  misc_feature (14)..(14): Xaa can be any naturally occurring amino acid
  misc_feature (61)..(61): Xaa can be any naturally occurring amino acid
  misc_feature (381)..(381): Xaa can be any naturally occurring amino acid
  misc_feature (383)..(386): Xaa can be any naturally occurring amino acid
  Coding DNA Sequence Number=SeqID_7955
  Subcellular localization annotation: CTP_CleavageSite=45; ConfidenceScore=5.35e-01
SYRSVLFALXVCLXSVLCALDSYFVVSCRRLTPSRLASVCRSALTARLVPPPYAPVTCLPXAHACSLRSIAPLMSSSRLRFMPRHHPVPSQSALLLVSSSLFPSSSRLLFLFSSIVPLSSSRPLAASASRGLSPLLAVAVLLSSALSRSPLPLSPRLPLPAFFSFFSLSCPSPLLFLVVAYFFASVCVSLWSSLFVPRGSLRPSPPLLLHLSPLSSPCRSPSLLLLSYSLSLSSPSPLPLPPRLAARLRSTLSSPLFCSLSFPPLPVSLSGLLPLLLPSPSLPSLLSPAPFVLLPSPRAGARALTLLCLPFAPPLAPPPRSSPPLAPCRLSCPPSRPVVVCSLVFVSFFFSVFSSLLPLSSPFPPLVLFWVATPLLLLSSXPXXXXSPLSLLSG

SEQ ID NO: 13273 - protein, 166 aa, Zea mays
  misc_feature (31)..(31): Xaa can be any naturally occurring amino acid
  misc_feature (72)..(72): Xaa can be any naturally occurring amino acid
  Coding DNA Sequence Number=SeqID_7957
  Gene Ontology: Mol. function=protein binding; Cellular component =membrane; Biological process=protein amino acid phosphorylation
  Homolog annotation: Hit_ID=P93529; Match level="QueryCoverage=100%, HitCoverage=67%, E-value=6e-45, Identity=59%"; Hit description =Leucine-rich repeat-containing extracellular glycoprotein precursor
  Pfam annotation: Domain name=LRR_1; Domain location=101-123; Score =12.7; E_value=1.4; Accession=PF00560.23; Description=Leucine Rich Repeat
  Pfam annotation: Domain name=LRR_1; Domain location=125-147; Score =10.6; E_value=3.3; Accession=PF00560.23; Description=Leucine Rich Repeat
  Pfam annotation: Domain name=LRR_1; Domain location=29-51; Score=0.5; E_value=2.5e+02; Accession=PF00560.23; Description=Leucine Rich Repeat
  Pfam annotation: Domain name=LRR_1; Domain location=53-74; Score=5.9; E_value=25; Accession=PF00560.23; Description=Leucine Rich Repeat
  Pfam annotation: Domain name=LRR_1; Domain location=77-99; Score =20.2; E_value=0.0078; Accession=PF00560.23; Description=Leucine Rich Repeat
  Pfam module annotation: Pfam domain module=LRR_1::LRR_1::LRR_1::LRR _1::LRR_1; Domain location=101-123::125-147::29-51::53-74::77-99
NLNNSGVRAHLGKARIYVPLLPDLGALEHAXVLVLFLNSLNVSIPSTLVNLTDLIRLDLCDNLVTGPIPTTXGSISRLRYLRLYENNLTGPIPPSFGNLTSLLELKLHRNSLSGSIPASLGDIKSLQFLKLNENMLTGTVPLEVLSLVVVGNLTELNIARNNLDGT

SEQ ID NO: 13274 - protein, 131 aa, Zea mays
  misc_feature (35)..(35): Xaa can be any naturally occurring amino acid
  misc_feature (44)..(44): Xaa can be any naturally occurring amino acid
  misc_feature (49)..(49): Xaa can be any naturally occurring amino acid
  Coding DNA Sequence Number=SeqID_7958
  Gene Ontology: Mol. function=structural molecule activity; Cellular component=protein complex; Biological process=microtubule-based movement
  Homolog annotation: Hit_ID=P29512; Match level="QueryCoverage=100%, HitCoverage=29%, E-value=5e-47, Identity=72%"; Hit description =Tubulin beta-2/beta-3 chain
MREILRFQGGQCGCLIGAVFWAVICDEHGIDQTGXYAGDSDLQXERINXYYYEVSGGRCVPRAVLLFLESGTMESLRSGSYGQILRPDMFVFGQSGDVLLWAKGHYTQGVELIDSVLDGVRMVAEICHCLQ

SEQ ID NO: 13275 - protein, 135 aa, Zea mays
  misc_feature (19)..(19): Xaa can be any naturally occurring amino acid
  misc_feature (59)..(59): Xaa can be any naturally occurring amino acid
  misc_feature (96)..(96): Xaa can be any naturally occurring amino acid
  misc_feature (117)..(117): Xaa can be any naturally occurring amino acid
  Coding DNA Sequence Number=SeqID_7959
  Gene Ontology: Mol. function=structural constituent of ribosome; Cellular component=ribonucleoprotein complex; Biological process =translation
  Homolog annotation: Hit_ID=A9P8K6; Match level="QueryCoverage=97%, HitCoverage=82%, E-value=8e-42, Identity=65%"; Hit description =Putative uncharacterized protein
  Pfam annotation: Domain name=Ribosomal_S17; Domain location=74-133; Score=24.7; E_value=2e-05; Accession=PF00366.10; Description =Ribosomal protein S17
  Subcellular localization annotation: CTP_CleavageSite=47; ConfidenceScore=5.04e-01
MATHTDNAFLKQPNVFLTXNKSGKGKKPGKGGNRFLKSIGLAFKTPREAIEGTYIDKKXPFTGTVSITGIIIAGTCHNANMNRTIIVRMNYLHFVXKKYQTYEKRHSNIPTHISPCXPVKESDHVLFSTACPYKN

SEQ ID NO: 13276 - protein, 187 aa, Zea mays
  Coding DNA Sequence Number=SeqID_7960
  Gene Ontology: Mol. function=transcription factor activity; Cellular component=membrane; Biological process=regulation of transcription, DNA-dependent
  Homolog annotation: Hit_ID=A1JRQ5; Match level="QueryCoverage=96%, HitCoverage=58%, E-value=5e-67, Identity=70%"; Hit description =Putative LysR family transcriptional regulator
  Pfam annotation: Domain name=LysR_substrate; Domain location=7-187; Score=93.9; E_value=5e-25; Accession=PF03466.10; Description=LysR substrate binding domain
AQISDINQLKTGELRLGIPPMVGMQIAGSISAFRRRYPGVQLKISEFGGLTVQQAVLSGGLDIALTALPIDAELPLNTLELMRHPLCVLLPRSARWLNRTSLTLAELAQHPLLILNEEFSLNRQLMKAFQRQGVMPDIALRSAQWDFLAAMVQADMGLAILPEPICQRLDKQALLWLPLESELQACK

SEQ ID NO: 13277 - protein, 139 aa, Zea mays
  Coding DNA Sequence Number=SeqID_7961
  Gene Ontology: Mol. function=oxidoreductase activity
  Homolog annotation: Hit_ID=Q10CV5; Match level="QueryCoverage=94%, HitCoverage=47%, E-value=2e-43, Identity=71%"; Hit description=RNA recognition motif family protein, expressed
MHPRSSEFGSAACTGPVYMAQAFDETHRGMSYASVRINSFDKRVGLSEKINNGISVANERVKSAYQRWHVSDKTMVVLLAAQRKLNDTGSAVKTNTYVSAATSSLDGAFSKVAKAAHVAGSRTREMFQTVVSNVTDKGP

SEQ ID NO: 13278 - protein, 248 aa, Zea mays
  misc_feature (224)..(224): Xaa can be any naturally occurring amino acid
  Coding DNA Sequence Number=SeqID_7962
  Gene Ontology: Mol. function=protein transporter activity; Cellular component=type II protein secretion system complex; Biological process=protein secretion by the type II secretion system
  Homolog annotation: Hit_ID=A8ALJ1; Match level="QueryCoverage=77%, HitCoverage=47%, E-value=4e-41, Identity=45%"; Hit description =Putative uncharacterized protein
  Pfam annotation: Domain name=GSPII_F; Domain location=25-148; Score =69.8; E_value=8.8e-18; Accession=PF00482.13; Description=Bacterial type II secretion system protein F domain
MLVVSWQRGKCWRARDWFWQQKIDLMRQLATLLKAGLPLAESLKLLASGHPHAGWRVLLSLLQQRVMAGEPFSQALRAWPDIFPPLFPALMQVGELTGQLDECCRQLALQQSRQQFLRQKVVKALRYPLFILLVALAVSAGMLLFVLPEFVAVYASFDAPLPAFTAGVMALSALLQQAALPLLLCGVASGWLARLTYRRSVAWQKRSQQWLLRLPLLAPLWRGXNTVHIYAILQLTQQAGLSLLLSLQ

SEQ ID NO: 13279 - protein, 190 aa, Zea mays
  misc_feature (29)..(29): Xaa can be any naturally occurring amino acid
  Coding DNA Sequence Number=SeqID_7963
  Gene Ontology: Mol. function=transporter activity; Cellular component= membrane; Biological process=transport
  Homolog annotation: Hit_ID=A7MEZ6; Match level="QueryCoverage=100%, HitCoverage=37%, E-value=3e-71, Identity=72%"; Hit description =Putative uncharacterized protein
QLRCAEASLATLQQQINVVQQTWEPTQSXQRNGLAPLTDVENARAQLASLNAQLPQYQAQERQAMNGLAVLLGKTPGALDNELMSSKALPALPKLVAVGIPSTLARRRPDIRQAEANLHAQTANIGVSVANLFPSLSLTGQLGVRNTDASYLDDWSSHFFSVGPALSIPIFQGGRLVSSVKLARAQQASA

SEQ ID NO: 13280 - protein, 145 aa, Zea mays
  misc_feature (77)..(77): Xaa can be any naturally occurring amino acid
  misc_feature (85)..(85): Xaa can be any naturally occurring amino acid
  misc_feature (111)..(111): Xaa can be any naturally occurring amino acid
  Coding DNA Sequence Number=SeqID_7964
  Gene Ontology: Mol. function=transporter activity; Cellular component= integral to membrane; Biological process=transport
  Homolog annotation: Hit_ID=Q9MSB4; Match level="QueryCoverage=96%, HitCoverage=35%, E-value=2e-45, Identity=62%"; Hit description =Glucose-6P/phosphate translocator
  Pfam annotation: Domain name=TPT; Domain location=4-145; Score=65.0; E_value=2.6e-16; Accession=PF03151.7; Description=Triose-phosphate Transporter family
SARGAAMIFFLAFVVRTIFSKMGMKGKPVSGMNYYACLSIMSMVILLPFNLYMEGPKVWALGCPTALSKISSNFFWXVAAQSVFXHLYNQLSYMSMDKISPITFSIGNTMXRICAMATSMIMLQTPLQTINLLRDSMAILSTLIY

SEQ ID NO: 13281 - protein, 195 aa, Zea mays
  misc_feature (30)..(30): Xaa can be any naturally occurring amino acid
  misc_feature (39)..(39): Xaa can be any naturally occurring amino acid
  misc_feature (109)..(109): Xaa can be any naturally occurring amino acid
  misc_feature (164)..(164): Xaa can be any naturally occurring amino acid
  misc_feature (185)..(185): Xaa can be any naturally occurring amino acid
  Coding DNA Sequence Number=SeqID_7965
  Gene Ontology: Mol. function=transferase activity, transferring phosphorus-containing groups; Cellular component=chloroplast; Biological process=phosphorylation
  Homolog annotation: Hit_ID=P11155; Match level="QueryCoverage=100%, HitCoverage=20%, E-value=1e-61, Identity=66%"; Hit description =Pyruvate, phosphate dikinase, chloroplast precursor
  Pfam annotation: Domain name=PEP-utilizers_C; Domain location=1-195; Score=-59.5; E_value=3.4e-10; Accession=PF02896.8; Description=PEP -utilising enzyme, TIM barrel domain
LAISYPELTDMQDRAIFEAVIAVTNLGVQXFHQIMAPLXVETPHELVNQETLIHQIADKVFANVNKTIDYEIATMIDIPRAALVCDDIAHHVEFFSFGTNDVTLMTFGXYSTHDEQKLIPVYLDQGILQHDPFEVLNQNAVSELMKSATERSRRATTNLKVFIXVQLRAEPSSVTFFAKAVLDYXSCSPVRATSA

SEQ ID NO: 13282 - protein, 130 aa, Zea mays
  misc_feature (23)..(23): Xaa can be any naturally occurring amino acid
  Coding DNA Sequence Number=SeqID_7966
  Gene Ontology: Mol. function=nutrient reservoir activity
  Homolog annotation: Hit_ID=P04702; Match level="QueryCoverage=71%, HitCoverage=38%, E-value=2e-29, Identity=73%"; Hit description=Zein -alpha M6 precursor
  Subcellular localization annotation: CTP_CleavageSite=22; ConfidenceScore=5.34e-01
LFPYYQQQQFLPFNQLFTLNPVXFLQQQLFPFSQVGFAYFHQQQLFPFNQLAALNPAVYLQQQILLPFSQLVAASRVSFLTQQQLLPFYQQFGANPATLLQLQQLLPFVQLVLTNPAASYQQHIIGGALF

SEQ ID NO: 13283 - protein, 189 aa, Zea mays
  misc_feature (29)..(29): Xaa can be any naturally occurring amino acid
  misc_feature (34)..(34): Xaa can be any naturally occurring amino acid
  misc_feature (36)..(36): Xaa can be any naturally occurring amino acid
  misc_feature (39)..(39): Xaa can be any naturally occurring amino acid
  misc_feature (45)..(45): Xaa can be any naturally occurring amino acid
  misc_feature (52)..(53): Xaa can be any naturally occurring amino acid
  misc_feature (70)..(70): Xaa can be any naturally occurring amino acid
  Coding DNA Sequence Number=SeqID_7967
  Gene Ontology: Mol. function=ribonuclease activity; Cellular component=ribosome; Biological process=RNA metabolic process
  Homolog annotation: Hit_ID=A2SHA2; Match level="QueryCoverage=75%, HitCoverage=19%, E-value=1e-58, Identity=79%"; Hit description =Exoribonuclease II
  Pfam annotation: Domain name=RNB; Domain location=13-185; Score=13.6; E_value=6.9e-13; Accession=PF00773.9; Description=RNB-like protein
MRKNDKSPGETRRNPYTASLSTGPRQEAXRGWRXLXAIXDVSHYXKPGEPLXXDAYERATSVYFPRRVIXMLPEKLSNGLCSLNPYEDRLSMVCDMVVAADGTVAAYQFYPAVICSHARFTYTEVAAILANTHGPEAAKRRELVPHLMHLHEVYRALLAERQRRGAIDFLQPGGSTSSRAAATAGSPVT

SEQ ID NO: 13284 - protein, 520 aa, Zea mays
  misc_feature (1)..(12): Xaa can be any naturally occurring amino acid
  misc_feature (16)..(16): Xaa can be any naturally occurring amino acid
  misc_feature (22)..(24): Xaa can be any naturally occurring amino acid
  misc_feature (26)..(26): Xaa can be any naturally occurring amino acid
  misc_feature (36)..(36): Xaa can be any naturally occurring amino acid
  misc_feature (80)..(80): Xaa can be any naturally occurring amino acid
  misc_feature (84)..(84): Xaa can be any naturally occurring amino acid
  misc_feature (99)..(99): Xaa can be any naturally occurring amino acid
  misc_feature (255)..(255): Xaa can be any naturally occurring amino acid
  misc_feature (488)..(488): Xaa can be any naturally occurring amino acid
  misc_feature (498)..(498): Xaa can be any naturally occurring amino acid
  misc_feature (520)..(520): Xaa can be any naturally occurring amino acid
  Coding DNA Sequence Number=SeqID_7968
  Subcellular localization annotation: CTP_CleavageSite=34; ConfidenceScore=5.48e-01
XXXXXXXXXXXXGGFXSFVCGXXXFXVLFFMFCSLXLFSSLSFCGLLLAGFLVLPLLSPRSLALSPLQFRSVVPSPLSPXPRLXLPPSTPSPPRPPAPXASSLSLSPPLPLCNPPFHAPLLPSLSSSPLLPPLFSSSSPFPPLPPLPLFSLPFFSVSLSFLSSFFLSLSLSLPFLLASLLSCLVSLFRFFSFFVCVLSSSPPLCPPLSLALLSSLSVFFLSLSPLLSLSLLSPRSLSSLFFFALPRGSSGFCCLXSSCSSFLLSASAALRLAVLFCLSRRSVSVRLPRVFCSRSLSRPRSAALPRSSPSSSLAPRSLVSVLLSPSRLSCRSLRCSLWRSLVCSSAPSRPLPPRPLSLLLSLVALLCRPRLSRRAAAARSRSLPSLAVLPLSFALFLALGAPRCARAVGLELACLLSALSFVPFSVFRLRSSARSSHLLSARSSPSARLVSFFVASASPLRPHFCLLSHVLLSLPCDVSLLRLSCLPGXRASSISALHXLYACSMPSAPVPLLRLSLHCPX

SEQ ID NO: 13285 - protein, 282 aa, Zea mays
  Coding DNA Sequence Number=SeqID_7970
  Gene Ontology: Mol. function=isomerase activity
  Homolog annotation: Hit_ID=A6T9F6; Match level="QueryCoverage=99%, HitCoverage=89%, E-value=1e-115, Identity=70%"; Hit description =Putative epimerase/isomerase
  Pfam annotation: Domain name=AP_endonuc_2; Domain location=17-247; Score=125.1; E_value=2.1e-34; Accession=PF01261.14; Description=AP endonuclease family 2
GVNNPDNPFLPPWQTVLREAAQAGYRSIELGPWRYLPTDAAELRQQLEAHQLSLVAGTIFDDLVSEANFPAMVELTHNICRNLSQVPCAARTHGDNRPAPYLVIIDFGNPQRAQFAGQTEKAPRLAPADWQRMMQHITQLSHIAWHDYGVRPVIHPHAGGCIEFADELEQLVQDIPHEVAGLCLDTGHLFYSGMDPQTWLQRYWSRIDYLHFKDINAAVWRDVIARGVDFFTACAEGVMCPLGQGAIDYPELRAFLAERHNQGWITIEQERDPRNAATSLQV

SEQ ID NO: 13286 - protein, 158 aa, Zea mays
  Coding DNA Sequence Number=SeqID_7971
  Gene Ontology: Mol. function=cinnamyl-alcohol dehydrogenase activity; Cellular component=cytoplasm; Biological process=lignin biosynthetic process
  Homolog annotation: Hit_ID=O24562; Match level="QueryCoverage=99%, HitCoverage=42%, E-value=2e-49, Identity=65%"; Hit description =Cinnamyl alcohol dehydrogenase
RECIPCKNNVEQFCHKKMWSYTDVYTDGRHTQGGFASTMVVDQKFVAKIPAGLAPEQAAPLLCAGVPVFIPRKHSDKATAALRGGILGLGGVVHMGVKVAKPMAHRVTVISWSYKKRAEAMVLLGAGAYLVSSDRASMAAAAGSMEYILDSVSVHLPS

SEQ ID NO: 13287 - protein, 124 aa, Zea mays
  Coding DNA Sequence Number=SeqID_7972
  Gene Ontology: Mol. function=aspartic-type endopeptidase activity; Cellular component=chromatin; Biological process=chromatin assembly or disassembly
  Homolog annotation: Hit_ID=Q8SA91; Match level="QueryCoverage=100%, HitCoverage=5%, E-value=1e-41, Identity=64%"; Hit description =Putative gag-pol polyprotein
MNATLAALLRQCVLVFFDEILVYIASFEEHLQHIREVMQLLLKDHWKVKWSKCTFAKTELAYLGHIISAHGVATDPGKIKAVTNWKSPSFIKELRSFLGLAGYYRRFVRHFGIIAKPLTTSLKK

SEQ ID NO: 13288 - protein, 290 aa, Zea mays
  Coding DNA Sequence Number=SeqID_7973
  Gene Ontology: Mol. function=ATPase activity, coupled to transmembrane movement of substances; Cellular component=integral to membrane; Biological process=proteolysis
  Homolog annotation: Hit_ID=A4WDK5; Match level="QueryCoverage=99%, HitCoverage=39%, E-value=1e-103, Identity=64%"; Hit description=ABC transporter related
EISSWRLPLAVELSDGQVGVITSFDGDDTVRVHLAGDEQPAPIALNTLLPQIRYAAALRPVTAAKDSRVDRYLATVRPDWLRRLVLHDMRPYGYVMLGSFLINLLALVGIIFSMQVYDRVIPAQSYPTLYVLYIGVILSVVFTYILRVGRDHVTDLLGKRADMRVSDRVFGHALRLRNSAVPRSTGTFISQLRELEAVREMVTSTTVTAIVDMPFFLLFMLVMAIIAPQLAWIAPVAVLLMILPGVLSQKKLAKLAQQNLKESTLRNAVLVESVQGLEDIKLMQAEDRFL

SEQ ID NO: 13289 - protein, 136 aa, Zea mays
  Coding DNA Sequence Number=SeqID_7974
  Gene Ontology: Mol. function=nutrient reservoir activity
  Homolog annotation: Hit_ID=Q41884; Match level="QueryCoverage=100%, HitCoverage=56%, E-value=7e-35, Identity=58%"; Hit description=Zein
  Subcellular localization annotation: CTP_CleavageSite=4; ConfidenceScore=5.04e-01
QVVLANLFPYYQQQHFFPFNHLFPLNPVVYLQQQLFPFSQVGFAYFYQQKFFPFNQLAALNPAVFLQQQIFLPFSQLVAANRVSFLTQQQLLPFYQQFGANPATLFQLQQLLPFVQLVLTNPAASYQQHIIGGALF

SEQ ID NO: 13290 - protein, 105 aa, Zea mays
  Coding DNA Sequence Number=SeqID_7975
  Gene Ontology: Mol. function=protein serine/threonine kinase activity; Cellular component=cytoplasm; Biological process=protein amino acid phosphorylation
  Homolog annotation: Hit_ID=O82107; Match level="QueryCoverage=100%, HitCoverage=16%, E-value=2e-44, Identity=83%"; Hit description =Calcium-dependent protein kinase
MDPCGGGELFDRIVRRGHYTERKAAELARVIDGVAEACHYMGVMHRDLKPENSLFSDHSEEAPLKTMDWGLSISFRPGQIFTDDVSSRYYVGPEVLKKRYRPQAD

SEQ ID NO: 13291 - protein, 215 aa, Zea mays
  Coding DNA Sequence Number=SeqID_7976
  Homolog annotation: Hit_ID=A9N3T0; Match level="QueryCoverage=99%, HitCoverage=66%, E-value=1e-118, Identity=90%"; Hit description =Putative uncharacterized protein
  Pfam annotation: Domain name=DUF1527; Domain location=1-214; Score =342.5; E_value=7.5e-100; Accession=PF07513.2; Description=Protein of unknown function (DUF1527)
AGVATGGGRQEMKAPGDRKQNLHFYYGDAYGHPATRLIGGMVPGYSCDSAATPFMPYFTSSLDALAWRTGVPESLYPEALIPGQREIGSTASGNMWGNVYPRSGFVTQTDSYKSAAVVVQRVADIITRQGQLHVYSPLTGQRSPGYWPPDPVQENTGTKNHKWQRLSPQLSQSCAVFPDTGGQIAENGNYAWALWQPYSCCKRRGQTFLYSTDFS

SEQ ID NO: 13292 - protein, 202 aa, Zea mays
  misc_feature (16)..(16): Xaa can be any naturally occurring amino acid
  misc_feature (37)..(37): Xaa can be any naturally occurring amino acid
  misc_feature (170)..(170): Xaa can be any naturally occurring amino acid
  Coding DNA Sequence Number=SeqID_7977
  Gene Ontology: Mol. function=structural constituent of ribosome; Cellular component=ribonucleoprotein complex; Biological process =translation
  Homolog annotation: Hit_ID=A2ZJS3; Match level="QueryCoverage=100%, HitCoverage=23%, E-value=2e-75, Identity=69%"; Hit description =Putative uncharacterized protein
  Pfam annotation: Domain name=Ribosomal_S3Ae; Domain location=11-202; Score=273.3; E_value=5.1e-79; Accession=PF01015.8; Description =Ribosomal S3Ae family
MDVGQNERISKGKEGXQKKTVDPFSNKDWNDITAPTXFSARNITNTLISRTQVPPIASEGLKHRAFEACLTDLQGDKDQAYRKIRLRAEYVQGTNVITNFWRMNFTTDELISLLMKSHTLILAPVDDETTDDYMMRLFCIGFANRRPDQVERTCYAHGSQIRQIRRKMPXIMISQATTCDLKELVTNIIPEVIGKDIEKSTS

SEQ ID NO: 13293 - protein, 169 aa, Zea mays
  misc_feature (93)..(93): Xaa can be any naturally occurring amino acid
  misc_feature (130)..(130): Xaa can be any naturally occurring amino acid
  Coding DNA Sequence Number=SeqID_7978
  Gene Ontology: Mol. function=metal ion binding
  Homolog annotation: Hit_ID=A2YLM1; Match level="QueryCoverage=87%, HitCoverage=30%, E-value=4e-56, Identity=72%"; Hit description =Putative uncharacterized protein
RNLRALRKLGSCITGAPHAFGYLLAIWKASRPLNSGEGGETLTRELSVLYSRLNGMVLGGILLMHDLHNFLRPLVLLMHSLRVPQSVTHVIKXTRKPLHPQYILCMTVTPLAIPLNICGCPRNSMRITPXKRWAISVTGFMGLQAAQLLIQHYLESHCFIPRQILPDKY

SEQ ID NO: 13294 - protein, 140 aa, Zea mays
  misc_feature (3)..(3): Xaa can be any naturally occurring amino acid
  misc_feature (16)..(16): Xaa can be any naturally occurring amino acid
  misc_feature (22)..(22): Xaa can be any naturally occurring amino acid
  misc_feature (24)..(24): Xaa can be any naturally occurring amino acid
  misc_feature (30)..(30): Xaa can be any naturally occurring amino acid
  misc_feature (44)..(44): Xaa can be any naturally occurring amino acid
  misc_feature (46)..(46): Xaa can be any naturally occurring amino acid
  misc_feature (56)..(56): Xaa can be any naturally occurring amino acid
  misc_feature (71)..(72): Xaa can be any naturally occurring amino acid
  misc_feature (85)..(85): Xaa can be any naturally occurring amino acid
  misc_feature (90)..(90): Xaa can be any naturally occurring amino acid
  misc_feature (103)..(103): Xaa can be any naturally occurring amino acid
  misc_feature (108)..(108): Xaa can be any naturally occurring amino acid
  misc_feature (110)..(110): Xaa can be any naturally occurring amino acid
  misc_feature (115)..(115): Xaa can be any naturally occurring amino acid
  misc_feature (123)..(124): Xaa can be any naturally occurring amino acid
  misc_feature (129)..(129): Xaa can be any naturally occurring amino acid
  misc_feature (133)..(133): Xaa can be any naturally occurring amino acid
  Coding DNA Sequence Number=SeqID_7979
  Gene Ontology: Mol. function=signal transducer activity; Cellular component=endoplasmic reticulum; Biological process=vesicle-mediated transport
  Homolog annotation: Hit_ID=Q10Q55; Match level="QueryCoverage=100%, HitCoverage=100%, E-value=4e-33, Identity=53%"; Hit description=Got1- like family protein, expressed
  Pfam annotation: Domain name=Got1; Domain location=30-130; Score =105.5; E_value=1.7e-28; Accession=PF04178.3; Description=Got1-like family
MVXLEMNDLKKIGLGXKGFGIXFXFLGIVXFFEKGLMEMGNIFXLXGLGLKIGLKXTMKFLTKQKNYKGTXXFGAGFFLVLIGWXFFGMXLEAYGFIVLFSGXWPTLXVXLKRIXIMGWIFKXXFVKWXLDGXRGKGVRV

SEQ ID NO: 13295 - protein, 233 aa, Zea mays
  misc_feature (44)..(44): Xaa can be any naturally occurring amino acid
  misc_feature (89)..(89): Xaa can be any naturally occurring amino acid
  misc_feature (195)..(195): Xaa can be any naturally occurring amino acid
  Coding DNA Sequence Number=SeqID_7980
  Gene Ontology: Mol. function=transporter activity; Cellular component= integral to membrane; Biological process=transport
  Homolog annotation: Hit_ID=P31224; Match level="QueryCoverage=81%, HitCoverage=18%, E-value=5e-83, Identity=87%"; Hit description =Acriflavine resistance protein B
TKVDCPQTARFRGIGLVLPPLVLITATMLGCAAIGPVVDDAIVXRNVERVCEEGLPPKELPVSRWADSGRLVGIAMVLSAVFVPMAFFXGSTGAIYRQFSITIVSAMALSVLVALILTPALCATMLKPIAKGDHGEGKKGFFGWFNRMFEKSTHHYTDSVGGILRSTGRYLVLYLIIVVGMAYLFVRLPSSFLPXEDQGVFMTMVQLPAGATQEPCGDPLLEPAPAVSPALTH

SEQ ID NO: 13296 - protein, 920 aa, Zea mays
  Coding DNA Sequence Number=SeqID_7981
  Gene Ontology: Mol. function=aspartic-type endopeptidase activity; Cellular component=chromatin; Biological process=chromatin assembly or disassembly
  Homolog annotation: Hit_ID=Q8W1D1; Match level="QueryCoverage=91%, HitCoverage=87%, E-value=0.0, Identity=69%"; Hit description=Gag-pol
  Pfam annotation: Domain name=RVT_1; Domain location=200-374; Score =69.2; E_value=1.3e-17; Accession=PF00078.17; Description=Reverse transcriptase (RNA-dependent
  Pfam annotation: Domain name=Retrotrans_gag; Domain location=90-190; Score=13.4; E_value=0.0027; Accession=PF03732.7; Description =Retrotransposon gag protein
  Pfam annotation: Domain name=rve; Domain location=730-844; Score= -0.5; E_value=0.01; Accession=PF00665.16; Description=Integrase core domain
  Pfam annotation: Domain name=zf-H2C2; Domain location=671-712; Score =8.9; E_value=0.025; Accession=PF09337.1; Description=His(2)-Cys(2) zinc finger
  Pfam module annotation: Pfam domain module=RVT_1::Retrotrans _gag::rve::zf-H2C2; Domain location=200-374::90-190::730-844::671-712
MRQEREEICQELRREREEIRQERRAQQQQQQIPLPPPPPPLPPWDKHREFMSHKPPTFASSPDPLDADDWLKSIEKMLNIAQCSDREKVLYASGCLTGPAADWWDSYVAAHDVVDTITWTEFSTQFRNYHIPAGLMKIKKKEFLSLNQIGHYANACPVGNYGTPAQNRQPTPGKGYSIATVNQVSVDANPDGADIVLAEEFVGDNIRVVRDFPDVFPEELPGMPPEREVEFVIDLLLRTAPISKRPYRMSMRGARVFSKIDLRSGYHQMKIRTSDISKTAFSTRYGLYEFTVMSFGLTNAPAYFMNMMNKVFMEYLDKFVVVFIDDILIYSKNDSEHEVHLRMVLQKLRDNQLYAKFTKCDFWLDEVHFLGHIISKGGIAVDPAKVIAIMDWKTPSTVLKIRSFLGLAGYYRRFIEGFSKIAKPMTSLLEKGKEFKLTEKCQESFDQLRSKLMAAPVLIMPDLQKNFDVYCDASRQGLGCVLMQEGHVIAYASRQLRKHELNYPTHDLELEAVVHALKVWRHYIMGTKCQIYTDHKSLKYIFTQKDLNLRQRRWLELIKDYDLEIHYNLGKANLVADALSRKGQLAEDFERLNLGIIAHTEGITIELEPTLEQEIRKGQIGDAKIQEIKDLITEGRGPDFTEDEQGMIWFKNRMCVPDIDSFRETILKEAHDSVYSIHPGSTKMYQDLKQKYWWHGLKKDVASHVALCDVCQRVKAENQRPAGLLHPLKIPEWKWEEIGMDFIVGLPRTSVGYDSIWVIVDRLTKVAHFIPVKTPYSGAKLAELYMARITDGQTERTNQVLEVMLRACALKHGGSWDKSLPYAEFSYNSSYQASLKMSPFEALYGRKCRTPLYWDQMGERQLFGPEIIEEAEEQVQQIRENLRTAQSRLKQRKPKQGLKLRRENRVQPIVRGSWLGPILA

SEQ ID NO: 13297 - protein, 191 aa, Zea mays
  Coding DNA Sequence Number=SeqID_7982
  Gene Ontology: Mol. function=transmembrane receptor activity; Cellular component=integral to plasma membrane; Biological process =cell surface receptor linked signal transduction
  Homolog annotation: Hit_ID=UPI0000EBF0A4; Match level="QueryCoverage =91%, HitCoverage=71%, E-value=5e-93, Identity=55%"; Hit description =PREDICTED: similar to leukocyte immunoglobulin-like receptor, subfamily B (with TM ...
  Homolog annotation: Hit description=and ITIM domains), member 6
MAPALPALLCLGLSVGLRTQVQAGTLPKPTIWAEPGSVISWGSPVTIWCQGPPGAQEFHLDKEGNRVFWDREKPPGPRNKARFSIHYMGQDHAGSYQCYYRTRTGWSERSDPLQLVVTRPYVKPSLSALPSPVVMSGGNVTLQCGSHQGFNRFLLTKEGEDKSSRALDGQQMLDGQTQALFPVGPVTPGHG

SEQ ID NO: 13298 - protein, 110 aa, Zea mays
  Coding DNA Sequence Number=SeqID_7983
  Gene Ontology: Cellular component=MHC class II protein complex; Biological process=antigen processing and presentation of peptide or polysaccharide antigen via MHC class II
  Homolog annotation: Hit_ID=Q58DW7; Match level="QueryCoverage=100%, HitCoverage=41%, E-value=2e-53, Identity=90%"; Hit description=Major histocompatibility complex, class II, DM beta
  Pfam annotation: Domain name=MHC_II_beta; Domain location=27-106; Score=107.7; E_value=3.5e-29; Accession=PF00969.10; Description =Class II histocompatibility antigen, beta domain
MTVLLSLLLGFNLGCTASCGFVAHVESTCVLDDDGDPKDFSYCISFNKDLLTCWDPLQASMIPLEFGVLNGLARYLSQFLNNNSYLIQRLSNGLQNCAAHTHPFWSSLTH

SEQ ID NO: 13299 - protein, 156 aa, Zea mays
  Coding DNA Sequence Number=SeqID_7984
  Gene Ontology: Mol. function=lipid transporter activity; Cellular component=integral to plasma membrane; Biological process =multicellular organismal development
  Homolog annotation: Hit_ID=Q59FG2; Match level="QueryCoverage=100%, HitCoverage=54%, E-value=1e-97, Identity=45%"; Hit description=Low density lipoprotein-related protein 1 variant
  Pfam annotation: Domain name=Ldl_recept_a; Domain location=104-141; Score=44.3; E_value=4.4e-10; Accession=PF00057.9; Description=Low -density lipoprotein receptor doma
  Pfam annotation: Domain name=Ldl_recept_a; Domain location=25-62; Score=43.0; E_value=1e-09; Accession=PF00057.9; Description=Low -density lipoprotein receptor doma
  Pfam annotation: Domain name=Ldl_recept_a; Domain location=65-101; Score=50.5; E_value=6.1e-12; Accession=PF00057.9; Description=Low -density lipoprotein receptor doma
  Pfam module annotation: Pfam domain module=Ldl_recept_a::Ldl_recept _a::Ldl_recept_a; Domain location=104-141::25-62::65-101
SPGDGHKCACPTNFYLGGDGRNCVSNCTASQFVCKNDKCIPFWWKCDTEDDCGDHSDEPPDCPEFKCRPGQFQCSTGICTNPAFICDGDNDCQDNSDEANCDIHVCLPSQFKCTNTNRCIPGIFRCNGQDNCGDGEDERDCPEVTCAPTQSQCSIT

SEQ ID NO: 13300 - protein, 121 aa, Zea mays
  misc_feature (40)..(40): Xaa can be any naturally occurring amino acid
  Coding DNA Sequence Number=SeqID_7985
  Gene Ontology: Mol. function=ATP-dependent DNA helicase activity; Cellular component=holo TFIIH complex; Biological process=positive regulation of transcription from RNA polymerase II promoter
  Homolog annotation: Hit_ID=P19447; Match level="QueryCoverage=100%, HitCoverage=15%, E-value=3e-57, Identity=88%"; Hit description=TFIIH basal transcription factor complex helicase XPB subunit
WEADRVMEWLRTQEMGPHVSCDEVHTIPTKMFRRVLTIVXAHCKLGLTATLAREDDKIVNLNFLIGPKLYEANWMELQNTGYIAKVQCAEVWCPMSPEFYREYVAIKTNKRILLYTMNPNK

SEQ ID NO: 13301 - protein, 102 aa, Zea mays
  Coding DNA Sequence Number=SeqID_7986
  Gene Ontology: Mol. function=protein binding; Cellular component =dynactin complex; Biological process=microtubule-based process
  Homolog annotation: Hit_ID=UPI0000D9CD53; Match level="QueryCoverage =93%, HitCoverage=25%, E-value=2e-42, Identity=91%"; Hit description =PREDICTED: dynactin 2 isoform 1
RLATVVSLQVHQLYETIQRWSPIAASLPELVQRLVTIKQLHEQAMQFGQLLTHLDTTQQMIAWSLKDNATLLTQVQTTMCENLSTIEGNFANIDERMKKLGK

SEQ ID NO: 13302 - protein, 111 aa, Zea mays
  Coding DNA Sequence Number=SeqID_7987
  Gene Ontology: Mol. function=structural molecule activity; Cellular component=integral to membrane; Biological process=transport
  Homolog annotation: Hit_ID=Q29RM0; Match level="QueryCoverage=90%, HitCoverage=29%, E-value=1e-22, Identity=58%"; Hit description =Solute carrier family 35, member C2
LSWPDYLMRVAPTALATALDVGLCNWSFLYITVSLYTMTKSSAVLFILIFSLIFKLEELRAALVLVVLLIAGGLFMFTYKSTQVNIEGFTLVLGPWQIAGVLGGRQAILWP

SEQ ID NO: 13303 - protein, 87 aa, Zea mays
  Coding DNA Sequence Number=SeqID_7988
  Homolog annotation: Hit_ID=B0KIE1; Match level="QueryCoverage=100%, HitCoverage=100%, E-value=7e-41, Identity=94%"; Hit description =Putative uncharacterized protein
MSFNLANMSFEERAQIEADKARLFELWQNNLGKAKGEAARLIAEKPRRKGKWAEWVRAELDGMSPPEYASMVRSEVNKLMAAASANR

SEQ ID NO: 13304 - protein, 80 aa, Zea mays
  misc_feature (6)..(6): Xaa can be any naturally occurring amino acid
  Coding DNA Sequence Number=SeqID_7989
  Gene Ontology: Mol. function=DNA binding; Cellular component=nucleus; Biological process=regulation of transcription, DNA-dependent
  Homolog annotation: Hit_ID=Q7XLX6; Match level="QueryCoverage=100%, HitCoverage=100%, E-value=6e-18, Identity=58%"; Hit description=DNA -binding protein S1FA2
  Pfam annotation: Domain name=S1FA; Domain location=10-80; Score =132.6; E_value=1.2e-36; Accession=PF04689.4; Description=DNA binding protein S1FA
MADQFXDSANNVIIEDEEQALNPGLVALLRVASFLLLFFVGNYALHVYAQKTLPPKKNKPVSKKKLKREKLKQGVSAPGE

SEQ ID NO: 13305 - protein, 156 aa, Zea mays
  misc_feature (25)..(25): Xaa can be any naturally occurring amino acid
  misc_feature (75)..(75): Xaa can be any naturally occurring amino acid
  misc_feature (82)..(82): Xaa can be any naturally occurring amino acid
  misc_feature (91)..(91): Xaa can be any naturally occurring amino acid
  misc_feature (96)..(96): Xaa can be any naturally occurring amino acid
  misc_feature (109)..(109): Xaa can be any naturally occurring amino acid
  misc_feature (119)..(119): Xaa can be any naturally occurring amino acid
  Coding DNA Sequence Number=SeqID_7990
  Gene Ontology: Cellular component=extracellular region; Biological process=response to biotic stimulus
  Homolog annotation: Hit_ID=O82086; Match level="QueryCoverage=100%, HitCoverage=95%, E-value=1e-41, Identity=55%"; Hit description =Pathogenesis related protein-1
  Pfam annotation: Domain name=SCP; Domain location=24-144; Score=17.4; E_value=0.0053; Accession=PF00188.16; Description=SCP-like extracellular protein
LLPLPMAAIVVAPCTVHNSTHDYVXPHDVARADVRVRPVYWEDTVDAYVQSYVELRQGDCHLIRSGDPYEENLFXGSAGCDXSASDAVCSXVSENXYYDHYSNSCAQVXLCGHYTHLVXRDSTAIVCCRVCCDNCSGVFIICSYNPPGNVVYESPY

SEQ ID NO: 13306 - protein, 219 aa, Zea mays
  misc_feature (30)..(31): Xaa can be any naturally occurring amino acid
  misc_feature (34)..(34): Xaa can be any naturally occurring amino acid
  misc_feature (41)..(41): Xaa can be any naturally occurring amino acid
  misc_feature (46)..(46): Xaa can be any naturally occurring amino acid
  misc_feature (187)..(187): Xaa can be any naturally occurring amino acid
  misc_feature (195)..(197): Xaa can be any naturally occurring amino acid
  Coding DNA Sequence Number=SeqID_7991
  Gene Ontology: Mol. function=oxidoreductase activity; Biological process=electron transport
  Homolog annotation: Hit_ID=Q2J1R6; Match level="QueryCoverage=83%, HitCoverage=33%, E-value=1e-76, Identity=78%"; Hit description =Fumarate reductase/succinate dehydrogenase flavoprotein
RALKYTVIGHASDFAGRDVVDATGTRLPAXXFPXSDTLGQXKYIMXTGYDYSWFILTQAIIKKEFALSGSEQNPDLTGKSWRMTLRRATNKGAPAPVEAFKSHGVDFIVRDKIADLVAAMNKLAGNDLLKLDAIKMQIEARDREIANPYVKDAQVMNIHNARRYIGDRLIRTASPHRILDPAHGPLXAVKLNILXXXTLGGFQPGGSSRAAATAVESSV

SEQ ID NO: 13307 - protein, 192 aa, Zea mays
  Coding DNA Sequence Number=SeqID_7992
  Gene Ontology: Cellular component=integral to membrane
  Homolog annotation: Hit_ID=Q4KIA1; Match level="QueryCoverage=95%, HitCoverage=14%, E-value=1e-88, Identity=83%"; Hit description =Putative uncharacterized protein
INQLFQGPDLVGAWSLKIRPTAKGLAFNNLNLGLKGMQLNGAGGWEGAPGASSSWYKGRLDGKNIADVLKGWGFAPTVTSEDFHLDVDGRWPGSPAWVGPKRFSGSLDASFRKGQFVEVEGGAQALRVFGLLNFNSIGRRLRLDFSDLLGKGLSYDRVKGLLAASDGVFVTREPITMTGPSTNLVPAARGIH

SEQ ID NO: 13308 - protein, 164 aa, Zea mays
  misc_feature (44)..(44): Xaa can be any naturally occurring amino acid
  Coding DNA Sequence Number=SeqID_7993
  Gene Ontology: Mol. function=histone acetyltransferase activity; Cellular component=nucleus; Biological process=regulation of transcription, DNA-dependent
  Homolog annotation: Hit_ID=A2X0N6; Match level="QueryCoverage=82%, HitCoverage=8%, E-value=2e-48, Identity=73%"; Hit description =Putative uncharacterized protein
  Pfam annotation: Domain name=DUF906; Domain location=1-122; Score= -30.8; E_value=1.8e-05; Accession=PF06010.2; Description=Domain of Unknown Function (DUF906)
KTGSGEPWGPFVYHEILIGYLEYGKLRGFPSCYIGAGPPLKGEXDYILYCHPEIQKTPKFDKRGEWDLFMLGKAFKEEMVVELPNLKARFFLSMGEGKVKVTAFRLPYFDGDYWPGAAKNMINQLRQKKNARKLQKKGKPKKKKKTKKKKKKKKKKKKKKNPKG

SEQ ID NO: 13309 - protein, 180 aa, Zea mays
  misc_feature (29)..(29): Xaa can be any naturally occurring amino acid
  misc_feature (57)..(57): Xaa can be any naturally occurring amino acid
  misc_feature (88)..(88): Xaa can be any naturally occurring amino acid
  misc_feature (101)..(101): Xaa can be any naturally occurring amino acid
  Coding DNA Sequence Number=SeqID_7994
  Gene Ontology: Mol. function=protein serine/threonine kinase activity; Cellular component=chloroplast; Biological process=protein amino acid phosphorylation
  Homolog annotation: Hit_ID=Q10NC1; Match level="QueryCoverage=96%, HitCoverage=46%, E-value=5e-60, Identity=66%"; Hit description =Protein kinase APK1B, chloroplast, putative, expressed
  Pfam annotation: Domain name=Pkinase; Domain location=7-179; Score= -101.7; E_value=0.016; Accession=PF00069.15; Description=Protein kinase domain
  Pfam annotation: Domain name=Pkinase_Tyr; Domain location=7-180; Score=-148.4; E_value=0.0025; Accession=PF07714.7; Description =Protein tyrosine kinase
  Pfam module annotation: Pfam domain module=Pkinase::Pkinase_Tyr; Domain location=7-179::7-180
MSAAQPLEPGAIIMEAQELKLDIFQALRXWMAEVNYLGHLSHTYSLNNSLGYCSEGXQKILVYEYIPKGNLEHDILRRSSNFQTLPWXNLRMIVGLKDDRXFAFLHGDHSKVIYRDFKTSNILIDSEDNAKLCDFSLAKDGPSGDKSHVCTMVMGTQGYTAPEYLATGHFTAKSDVYSYS

SEQ ID NO: 13310 - protein, 118 aa, Zea mays
  misc_feature (52)..(52): Xaa can be any naturally occurring amino acid
  misc_feature (97)..(97): Xaa can be any naturally occurring amino acid
  Coding DNA Sequence Number=SeqID_7995
  Gene Ontology: Mol. function=transferase activity, transferring hexosyl groups; Cellular component=integral to membrane; Biological process=carbohydrate biosynthetic process
  Homolog annotation: Hit_ID=A2XKN3; Match level="QueryCoverage=96%, HitCoverage=41%, E-value=1e-51, Identity=83%"; Hit description =Putative uncharacterized protein
NTGVMALDLARWRRAGYTAQIEEGMELQMRERMYELGSLPTLLLVFDGRISXVDHRWNQHGLGGDNYRGLCRGLHAAAVSLLHWSGMGKPWDRLDAXESSPFDGVWAKYDLLRPGDDI

SEQ ID NO: 13311 - protein, 192 aa, Zea mays
  misc_feature (8)..(8): Xaa can be any naturally occurring amino acid
  misc_feature (167)..(167): Xaa can be any naturally occurring amino acid
  misc_feature (169)..(169): Xaa can be any naturally occurring amino acid
  misc_feature (172)..(175): Xaa can be any naturally occurring amino acid
  misc_feature (177)..(179): Xaa can be any naturally occurring amino acid
  misc_feature (181)..(192): Xaa can be any naturally occurring amino acid
  Coding DNA Sequence Number=SeqID_7996
  Gene Ontology: Mol. function=oxidoreductase activity, acting on the CH-OH group of donors, NAD or NADP as acceptor; Cellular component =cytoplasm; Biological process=metabolic process
  Homolog annotation: Hit_ID=A4YY13; Match level="QueryCoverage=87%, HitCoverage=47%, E-value=7e-71, Identity=79%"; Hit description =Tartrate dehydrogenase/decarboxylase
  Pfam annotation: Domain name=Iso_dh; Domain location=2-181; Score= -96.8; E_value=5.9e-09; Accession=PF00180.10; Description =Isocitrateisopropylmalate dehydrogen
LHRGGGRXHKGLPEEVGTEVAIFTRVGVTRIMRYAFQLAQSRPRKFLTVVTKSNAQRHGMVMWDEIAAEVATEFPDVTWDKMLVDAMTVRMTLHPKSLDTIVATNLHADILSDLAGALAGSLGVAPTSNIDPQRRFPSMFEPIHGSAFDITGKGIANPIATFWTGAXMXEHXXXXDXXXRXXXXXXXXXXXX

SEQ ID NO: 13312 - protein, 250 aa, Zea mays
  Coding DNA Sequence Number=SeqID_7997
  Gene Ontology: Mol. function=transcription factor activity; Cellular component=chloroplast; Biological process=regulation of transcription, DNA-dependent
  Homolog annotation: Hit_ID=Q6RK16; Match level="QueryCoverage=99%, HitCoverage=79%, E-value=4e-71, Identity=54%"; Hit description =Putative uncharacterized protein precursor
  Pfam annotation: Domain name=HTH_1; Domain location=1-57; Score=77.5; E_value=4.4e-20; Accession=PF00126.17; Description=Bacterial regulatory helix-turn-helix protein, lysR family
  Pfam annotation: Domain name=LysR_substrate; Domain location=81-250; Score=34.1; E_value=5.2e-07; Accession=PF03466.10; Description=LysR substrate binding domain
  Pfam module annotation: Pfam domain module=HTH_1::LysR_substrate; Domain location=1-57::81-250
MRYFLAVADCGSLSAASAQLFVAVSAISRQIQRLEQQLGVTLFARHARGMVLTEAGEIFAHHVRKNLLDMEYALAEIKGLKAVRRTLIRVACTDGLAFTLLPRLIAAFRRDHPGVLFDVRVASAQGVAELLRSGECDVALQFSLHAERAVEVVGSWPAPVLLVMHDSHPLAGVPQVALADLSHFPLALPQQNTTVRQLFELASHMSAHLIEPVLTCDNFSTLFHFLLRTPQAVTICSSFTLAEEAQQQGL

SEQ ID NO: 13313 - protein, 190 aa, Zea mays
  misc_feature (49)..(49): Xaa can be any naturally occurring amino acid
  misc_feature (53)..(53): Xaa can be any naturally occurring amino acid
  misc_feature (79)..(79): Xaa can be any naturally occurring amino acid
  misc_feature (114)..(114): Xaa can be any naturally occurring amino acid
  misc_feature (135)..(135): Xaa can be any naturally occurring amino acid
  misc_feature (145)..(145): Xaa can be any naturally occurring amino acid
  misc_feature (158)..(160): Xaa can be any naturally occurring amino acid
  misc_feature (170)..(171): Xaa can be any naturally occurring amino acid
  misc_feature (177)..(177): Xaa can be any naturally occurring amino acid
  misc_feature (183)..(183): Xaa can be any naturally occurring amino acid
  Coding DNA Sequence Number=SeqID_7998
  Gene Ontology: Mol. function=acetyl-CoA carboxylase activity; Cellular component=acetyl-CoA carboxylase complex; Biological process=fatty acid biosynthetic process
  Homolog annotation: Hit_ID=Q9BBS1; Match level="QueryCoverage=100%, HitCoverage=37%, E-value=1e-86, Identity=86%"; Hit description =Acetyl-coenzyme A carboxylase carboxyl transferase subunit beta
FHSEEEPYKDRIDSYQKMTGLTEAVQTGTGQLNGIPVAIGIMDFQFMVXSMGXVVGEKITRLVEYATNELLPLILVCAXGGARMQEGSLSLMQMAKISSALYDHQINQKLFYVXILTSPTTGGVTASFGMLGDIXIAEPNAYIAXAGKRVIEQTLNKXXXEGPQALEYLXXKGLFDXIVPRNXLKGVLSD

SEQ ID NO: 13314 - protein, 190 aa, Zea mays
  Coding DNA Sequence Number=SeqID_7999
  Gene Ontology: Mol. function=oxidoreductase activity; Cellular component=cytoplasm; Biological process=metabolic process
  Homolog annotation: Hit_ID=Q3KCP9; Match level="QueryCoverage=98%, HitCoverage=74%, E-value=8e-74, Identity=72%"; Hit description=Short- chain dehydrogenase/reductase SDR precursor
  Pfam annotation: Domain name=adh_short; Domain location=1-107; Score=- 57.0; E_value=0.07; Accession=PF00106.15; Description=short chain dehydrogenase
SIQAAAQSVLERYPALNVVINNAGIMPFDNAAGELDDAQAVTLLNTNILGPVRVSAAFIEHLKQQPDAVLINNSSVLAFLPLATNALYSATKAAIHSYTLSQRFLLRDTGVQVIEISPPWVDTDLIYKSGDPRAMPLDAFISETFEKLGTDTIEAIVDRVLPVRDNPGANEHTLVNQFNQSVADNPIPVQ

SEQ ID NO: 13315 - protein, 168 aa, Zea mays
  misc_feature (65)..(66): Xaa can be any naturally occurring amino acid
  Coding DNA Sequence Number=SeqID_8000
  Gene Ontology: Mol. function=protein binding; Cellular component =nucleus; Biological process=embryonic development ending in birth or egg hatching
  Homolog annotation: Hit_ID=Q9BSC4-2; Match level="QueryCoverage=100%, HitCoverage=26%, E-value=1e-83, Identity=89%"; Hit description =Isoform 2 of Q9BSC4
VKIIEVSCGKSLTKWLFDRKKRALHKKDDDVRMIIELIQDYEMPTVCTTIKVSKDGHYIFATGTXXPRVRCYDTYQLSLKFERCLDSEVVTFETLSDDYSKIGFLHNDRYVEFHSQSGFYYKTRIPKFGRDFSYHYPSCDLYFVGASSEVYRLNLEQGRYLNPLQTDA

SEQ ID NO: 13316 - protein, 119 aa, Zea mays
  misc_feature (15)..(15): Xaa can be any naturally occurring amino acid
  misc_feature (59)..(59): Xaa can be any naturally occurring amino acid
  misc_feature (82)..(82): Xaa can be any naturally occurring amino acid
  Coding DNA Sequence Number=SeqID_8001
  Gene Ontology: Mol. function=potassium ion transmembrane transporter activity; Cellular component=integral to membrane; Biological process=potassium ion transport
  Homolog annotation: Hit_ID=Q9AYN4; Match level="QueryCoverage=99%, HitCoverage=15%, E-value=4e-42, Identity=68%"; Hit description=High -affinity potassium transporter
IVSSTFSMTGHLMTXLMLVIWKKHIVYVLLYYVVFGLTEMIYLSYILSKFIQGGYLPFXFKQALMTLIATRHYGHMKRYWYXLDHIVPTNQITALIEKNDFRRIPGVGLLYTDLVQGIP

SEQ ID NO: 13317 - protein, 141 aa, Zea mays
  misc_feature (8)..(8): Xaa can be any naturally occurring amino acid
  misc_feature (38)..(38): Xaa can be any naturally occurring amino acid
  misc_feature (47)..(47): Xaa can be any naturally occurring amino acid
  misc_feature (121)..(121): Xaa can be any naturally occurring amino acid
  Coding DNA Sequence Number=SeqID_8002
  Gene Ontology: Cellular component=chloroplast; Biological process =respiratory chain complex IV assembly
  Homolog annotation: Hit_ID=P58266; Match level="QueryCoverage=61%, HitCoverage=27%, E-value=2e-17, Identity=55%"; Hit description =Cytochrome c biogenesis protein ccsA
  Pfam annotation: Domain name=Cytochrom_C_asm; Domain location=1-142; Score=-49.2; E_value=0.012; Accession=PF01578.11; Description =Cytochrome C assembly protein
  Subcellular localization annotation: CTP_CleavageSite=66; ConfidenceScore=5.09e-01
ALQSQWLXMMHVSMMLLSYATLLCGSLLSAALLIITFXKNFNFFSLXKNALLKTLFFSEIEYLYAQRSALKNTSFPVFTKYFEYQLTDRRHSCSYRVIILFSTLLTEGILCEAAWANEAYXYYCIWDPKETGAWTTWTIFG

SEQ ID NO: 13318 - protein, 188 aa, Zea mays
  misc_feature (9)..(9): Xaa can be any naturally occurring amino acid
  Coding DNA Sequence Number=SeqID_8003
  Gene Ontology: Mol. function=receptor signaling protein activity; Cellular component=integral to plasma membrane; Biological process =cell surface receptor linked signal transduction
  Homolog annotation: Hit_ID=UPI0000F30618; Match level="QueryCoverage =98%, HitCoverage=34%, E-value=3e-71, Identity=74%"; Hit description =B-lymphocyte antigen CD19 precursor (Differentiation antigen CD19) (B- lymphocyte ...
  Homolog annotation: Hit description=surface antigen B4) (Leu-12).
  Subcellular localization annotation: CTP_CleavageSite=49; ConfidenceScore=5.04e-01
ASPGNGAHXQYGNMLSLSMPHSGTGRALRWAAGLGAAAPSYGNPRSDVQEARAAGSRSPPGPGPEEEEGEAYEEPDSEEGSEFYENDSNLGQDQLSQDGSGYENPEEGSLDPQDEDSFSNGAESYENEDEELAPTVTRTTDLLSPHGSAWDPSREAASLGSQSYEDMRGILYAAPQLRFVRAQPGANH

SEQ ID NO: 13319 - protein, 119 aa, Zea mays
  misc_feature (60)..(60): Xaa can be any naturally occurring amino acid
  Coding DNA Sequence Number=SeqID_8004
  Gene Ontology: Mol. function=RNA-directed DNA polymerase activity; Biological process=RNA-dependent DNA replication
  Homolog annotation: Hit_ID=UPI0000F30CD2; Match level="QueryCoverage =94%, HitCoverage=64%, E-value=5e-53, Identity=88%"; Hit description =UPI0000F30CD2 related cluster
MSFRKYCSHEIKRHLPLGRKVMTNLDSILKSRDIILPTKVRLVKAMVFPVVMYGCESWTXKKAECRIIDAFELWCWRRLLRVPWTARRSIQSILKEISPGCSLEGLTFKLKLQYFSHLM

SEQ ID NO: 13320 - protein, 186 aa, Zea mays
  misc_feature (41)..(41): Xaa can be any naturally occurring amino acid
  misc_feature (117)..(118): Xaa can be any naturally occurring amino acid
  misc_feature (121)..(121): Xaa can be any naturally occurring amino acid
  misc_feature (124)..(124): Xaa can be any naturally occurring amino acid
  misc_feature (127)..(127): Xaa can be any naturally occurring amino acid
  misc_feature (154)..(154): Xaa can be any naturally occurring amino acid
  misc_feature (180)..(180): Xaa can be any naturally occurring amino acid
  Coding DNA Sequence Number=SeqID_8005
  Gene Ontology: Mol. function=glyceraldehyde-3-phosphate dehydrogenase (phosphorylating) activity; Cellular component=cytoplasm; Biological process=glucose metabolic process
  Homolog annotation: Hit_ID=P08735; Match level="QueryCoverage=96%, HitCoverage=53%, E-value=5e-75, Identity=82%"; Hit description =Glyceraldehyde-3-phosphate dehydrogenase, cytosolic 1
  Pfam annotation: Domain name=Gp_dh_C; Domain location=81-186; Score =112.8; E_value=1.1e-30; Accession=PF02800.10; Description =Glyceraldehyde 3-phosphate dehydrogenase, C-
  Pfam annotation: Domain name=Gp_dh_N; Domain location=1-76; Score= -13.4; E_value=1.7e-08; Accession=PF00044.14; Description =Glyceraldehyde 3-phosphate dehydrogen
  Pfam module annotation: Pfam domain module=Gp_dh_C::Gp_dh_N; Domain location=81-186::1-76
RGGAALEEIPWGEAGAEYVVESTGVFTDKDKGAAHLKGGAXKGVISAPSKDAPVGVVGVNEDKYTSDVNIVSNASCATNCLAPLAKVIHDNFGIVEGLMTTVHAITATQKTVDGPSXXDWXCGXAAXFNIIPSSTGAAKAVGKGLPDLNGELTXMCFRVPTVGGSGVDLTVRIEKGASYXDIKKAI

SEQ ID NO: 13321 - protein, 117 aa, Zea mays
  Coding DNA Sequence Number=SeqID_8006
  Gene Ontology: Mol. function=protein transporter activity; Cellular component=clathrin adaptor complex; Biological process=intracellular protein transport
  Homolog annotation: Hit_ID=O94973; Match level="QueryCoverage=83%, HitCoverage=10%, E-value=3e-48, Identity=93%"; Hit description=AP-2 complex subunit alpha-2
  Pfam annotation: Domain name=Alpha_adaptinC2; Domain location=1-74; Score=-9.1; E_value=0.037; Accession=PF02883.10; Description=Adaptin C-terminal domain
  Pfam annotation: Domain name=Alpha_adaptin_C; Domain location=80-117; Score=-9.6; E_value=7.8e-05; Accession=PF02296.7; Description=Alpha adaptin AP2, C-terminal domain
  Pfam module annotation: Pfam domain module=Alpha_adaptinC2::Alpha _adaptin_C; Domain location=1-74::80-117
MAAGLSCIALIPLASLTPAHLSLQTKPVDPTVDGGAQVQQAVNIECVSDFTEAPVLNIQFRYGGTFQNVSVKLPITLNKFFQPTEMASQDFFQRWKQLSNPQQEVQSIFKAKHPMDT

SEQ ID NO: 13322 - protein, 189 aa, Zea mays
  Coding DNA Sequence Number=SeqID_8007
  Gene Ontology: Mol. function=nucleoside-triphosphatase activity; Cellular component=mitochondrial inner membrane
  Homolog annotation: Hit_ID=Q925I1-2; Match level="QueryCoverage=100%, HitCoverage=36%, E-value=2e-98, Identity=96%"; Hit description =Isoform 2 of Q925I1
GEGFRAFVTDWDKVTATVAGLTLLAVGIYSAKNATSVAGRYIEARLGKPSLVRETSRITVLEALRHPIQVSRRLLSKPQDALEGVVLSPSLEARVRDIAIATRNTKKNKSLCRNVLMYGPPGTGKTLFAKKLALHSGMDYAIMTGGDVAPMGRDGVTAMHKVFDWASTSRRGLLLFVDEADAFLRKRAT

SEQ ID NO: 13323 - protein, 127 aa, Zea mays
  misc_feature (79)..(79): Xaa can be any naturally occurring amino acid
  Coding DNA Sequence Number=SeqID_8008
  Gene Ontology: Mol. function=oxidoreductase activity, acting on the CH-OH group of donors, NAD or NADP as acceptor; Cellular component =cytoplasm; Biological process=tricarboxylic acid cycle intermediate metabolic process
  Homolog annotation: Hit_ID=Q08062; Match level="QueryCoverage=100%, HitCoverage=38%, E-value=2e-45, Identity=75%"; Hit description =Malate dehydrogenase, cytoplasmic
  Pfam annotation: Domain name=Ldh_1_N; Domain location=6-127; Score =8.2; E_value=4.5e-07; Accession=PF00056.13; Description =lactatemalate dehydrogenase, NAD bin
MAKEPMRVLVTGAEGQMGYALVPMIARGVMLGANHPVILHMLDIPPAAEALNGVKMELVDAAFPFLKGVVATTDVVEAXLAVNVAVMVGGIPRKEGLERKDVLFKRCSINKTQAFVFEALAAPNCKV

SEQ ID NO: 13324 - protein, 202 aa, Zea mays
  Coding DNA Sequence Number=SeqID_8009
  Gene Ontology: Cellular component=ER-Golgi intermediate compartment membrane
  Homolog annotation: Hit_ID=UPI0000EBDB05; Match level="QueryCoverage =100%, HitCoverage=8%, E-value=1e-112, Identity=99%"; Hit description= PREDICTED: similar to Mib
FISQDSPEDIVTVHIEGSSGALWRISPPSRAQMKRELYNGTADITLRFTWNFQRDLAKGGSVEYTNEKHTLDLAPNSTARRQLASLLEGTSDQSVVIPHLFPKYIRAPSGPEANPVKQLQPNEEADYLGVRIQLRRERVGTGAAGFLEWWVIELQDCQANCNLLPMVIFSDKVSPPSLGFLAGYGIMGLYVSIVLVIGKFVR

SEQ ID NO: 13325 - protein, 248 aa, Zea mays
  Coding DNA Sequence Number=SeqID_8010
  Gene Ontology: Mol. function=diacylglycerol kinase activity; Cellular component=nucleus; Biological process=activation of protein kinase C
  Homolog annotation: Hit_ID=A3A409; Match level="QueryCoverage=98%, HitCoverage=47%, E-value=1e-113, Identity=54%"; Hit description =Putative uncharacterized protein
  Pfam annotation: Domain name=PPR; Domain location=136-170; Score =39.6; E_value=1.1e-08; Accession=PF01535.11; Description=PPR repeat
  Pfam annotation: Domain name=PPR; Domain location=171-204; Score=9.1; E_value=0.65; Accession=PF01535.11; Description=PPR repeat
  Pfam annotation: Domain name=PPR; Domain location=207-241; Score =12.6; E_value=0.25; Accession=PF01535.11; Description=PPR repeat
  Pfam annotation: Domain name=PPR; Domain location=35-69; Score=43.9; E_value=5.9e-10; Accession=PF01535.11; Description=PPR repeat
  Pfam module annotation: Pfam domain module=PPR::PPR::PPR::PPR; Domain location=136-170::171-204::207-241::35-69
QKLEPWNAIIDGYCKLGHVDVARSLFDQMGARDVITFNSMITGYIHSGRLRDALQLFMQMRRHGMRADNFTVVSLLTACASLGALPHGRALHASIEQRIVEEDVYLGTALLDMYMKCGRVDEATAVFHRMGERDVHTWTAMIAGLAFNGMGKNALESFCQMKRDGFQPTSVTYIAVLTACSHSSLLDEGRLHFNEMRSLHKLHPQVEHYGCMIDLLARSGLLDEAMHLVQTMPMQPNAVIWGSIMSAC

SEQ ID NO: 13326 - protein, 96 aa, Zea mays
  Coding DNA Sequence Number=SeqID_8011
  Gene Ontology: Mol. function=nucleotide binding; Cellular component =chloroplast; Biological process=response to stress
  Homolog annotation: Hit_ID=Q41816; Match level="QueryCoverage=98%, HitCoverage=43%, E-value=3e-21, Identity=57%"; Hit description=Heat shock protein 70 kDa
NMGNPIKDEKIASKLAADDKKKIEDAIDAAISWLDPNQLPEADEFDSKMKELESLCNPIIAKMYQGAGAHMGGPGGMDEDAPAGNGGPGPKIEEVA

SEQ ID NO: 13327 - protein, 162 aa, Zea mays
  misc_feature (75)..(75): Xaa can be any naturally occurring amino acid
  misc_feature (82)..(82): Xaa can be any naturally occurring amino acid
  misc_feature (106)..(106): Xaa can be any naturally occurring amino acid
  Coding DNA Sequence Number=SeqID_8012
  Gene Ontology: Mol. function=transporter activity; Cellular component= integral to membrane; Biological process=transport
  Homolog annotation: Hit_ID=O64909; Match level="QueryCoverage=100%, HitCoverage=41%, E-value=8e-38, Identity=58%"; Hit description =Glucose-6-phosphate/phosphate-translocator precursor
  Subcellular localization annotation: CTP_CleavageSite=71; ConfidenceScore=5.44e-01
MISSVRLSPVPAAFSGSRLRSKLPSIPSISSLKPSIYVVSSLKALYLTPVDGPRTVDDYSARRQPLEFRCSASAXADDKESXTQDGASSAGEAHRGVNILIYFCTXGSLDAIFNIYNKKGLNAFSYAWIISTLSLACGSGMMLISRATGLDEAPNTDLNFWK

SEQ ID NO: 13328 - protein, 123 aa, Zea mays
  Coding DNA Sequence Number=SeqID_8013
  Gene Ontology: Mol. function=protein serine/threonine kinase activity; Cellular component=integral to membrane; Biological process=detection of brassinosteroid stimulus
  Homolog annotation: Hit_ID=Q942F3; Match level="QueryCoverage=65%, HitCoverage=7%, E-value=1e-28, Identity=73%"; Hit description=Extra sporogenous cells-like
  Pfam annotation: Domain name=Ribosomal_60s; Domain location=21-87; Score=-5.1; E_value=0.027; Accession=PF00428.9; Description=60s Acidic ribosomal protein
MASGELACTYAALILSDDGIAITAEKIATIVKAANIKVESYWPALFAKLLEKRSVEDLILSVGSGGFGDVYKAQLKDGKVVAIKKLIHVSGQGDREFTAEMETIGRIKHRNLVPLLGYCKCGE

SEQ ID NO: 13329 - protein, 212 aa, Zea mays
  Coding DNA Sequence Number=SeqID_8014
  Gene Ontology: Mol. function=two-component sensor activity; Cellular component=membrane; Biological process=two-component signal transduction system (phosphorelay)
  Homolog annotation: Hit_ID=A7MGE2; Match level="QueryCoverage=92%, HitCoverage=38%, E-value=4e-54, Identity=51%"; Hit description =Putative uncharacterized protein
QAQPLEKLNAANLSQIMRDLQSRLPQLHGLFYYDEQGRWIATSTRSVPVGTNNSDREYFRYHRNNSRDSLHIGPVIRSRSTGDLVIPVSLRVSDAARDFKGILLATIKVDYFRRFYSYYELGPRDVLVLMLADSTVLYARPMPDSYIGKSLSASHLFQQMLVKADRGSGEWNAALDGQVRIFGFASSERYPLVVAAGYDKRNLYLRWVKGRL

SEQ ID NO: 13330 - protein, 155 aa, Zea mays
  Coding DNA Sequence Number=SeqID_8015
  Gene Ontology: Mol. function=low-density lipoprotein receptor activity; Cellular component=integral to membrane; Biological process=lipid metabolic process
  Homolog annotation: Hit_ID=A6QPB1; Match level="QueryCoverage=89%, HitCoverage=19%, E-value=5e-78, Identity=100%"; Hit description =LRP10 protein
  Pfam annotation: Domain name=CUB; Domain location=20-119; Score= -27.3; E_value=0.0092; Accession=PF00431.11; Description=CUB domain
  Pfam annotation: Domain name=Ldl_recept_a; Domain location=124-155; Score=20.8; E_value=0.00084; Accession=PF00057.9; Description=Low -density lipoprotein receptor doma
  Pfam module annotation: Pfam domain module=CUB::Ldl_recept_a; Domain location=20-119::124-155
  Subcellular localization annotation: CTP_CleavageSite=37; ConfidenceScore=5.32e-01
WCKKACAWSCPAPSSTPPAVLLEVQGTLQRPVGRDSRSSPANCTWLILGRKEQTVTVRFQKLHLACGSERLTLRSPIQPQISLCEAPASPLQLPGGNVTITYSYVGARAPMGQGFLLSYSQDWLMCLQEEFQCLNHRCVPLLQRCDGVDACGDGS

SEQ ID NO: 13331 - protein, 155 aa, Zea mays
  Coding DNA Sequence Number=SeqID_8016
  Subcellular localization annotation: CTP_CleavageSite=3; ConfidenceScore=5.35e-01
PPPGAAPAPPPPPPPPLPPPPAPAPPPSRPPHPPPPPPPRPAPPIQRPPSPPPPPPPPPPRPPPPPTPPPPPTPPPPPPTKALGRAGPPPRGARAPRGPGPPRPARPPPPPSPPPATPPPHPKSPALPPLTPAPDLVLLIAHTCSSPILYFVVVT

SEQ ID NO: 13332 - protein, 296 aa, Zea mays
  Coding DNA Sequence Number=SeqID_8018
  Subcellular localization annotation: CTP_CleavageSite=7; ConfidenceScore=5.18e-01
VRLQRLSAANNWYQRRSIPGDPPLRLSSPTPLPQPGPHLGTPASTSCTASSMAFAVLGPPPPPPPLPPPPPPPPPSSAGPAVAPPSPPPNPADLPPPLSALAPPLPLPPSPRPPRAPRSPPPGLSRLPPPLPPPPPPASSPHPRSPPPPPPPPPPPPRPPSPPPPSPRPLPSPPPPPPLPPPARSPPPPSPPFPPSPPPPPLLSPAPPPSPPPPLPPPPPPPSARLPSPPLPPPPTPHRPLPPPSHPPPPPPSPSPSPPPPLPPPPAPPFPLSHLSAPPLSPAPLPPPPPPPRPPP

SEQ ID NO: 13333 - protein, 165 aa, Zea mays
  Coding DNA Sequence Number=SeqID_8020
  Gene Ontology: Mol. function=protein transporter activity; Cellular component=membrane; Biological process=protein secretion
  Homolog annotation: Hit_ID=A7MEZ8; Match level="QueryCoverage=100%, HitCoverage=43%, E-value=2e-64, Identity=75%"; Hit description =Putative uncharacterized protein
QQRIRQQETNVEARQQQVEQARAQLNTAELNLSYTEVRAPYDGFVTKRNVQPGTLVQAGSALFSLVSPDIWITANFKESQLARMNPGDKVEIGVDAWPDMKLEGHVDSVQMGSGSRFSTFPAENATGNYVKIVQRVPVKIVIDKGLDPNHPLPLGLSVEPKVTVE

SEQ ID NO: 13334 - protein, 201 aa, Zea mays
  misc_feature (2)..(3): Xaa can be any naturally occurring amino acid
  misc_feature (42)..(46): Xaa can be any naturally occurring amino acid
  misc_feature (143)..(143): Xaa can be any naturally occurring amino acid
  misc_feature (150)..(150): Xaa can be any naturally occurring amino acid
  misc_feature (156)..(156): Xaa can be any naturally occurring amino acid
  misc_feature (159)..(168): Xaa can be any naturally occurring amino acid
  misc_feature (173)..(178): Xaa can be any naturally occurring amino acid
  misc_feature (180)..(182): Xaa can be any naturally occurring amino acid
  misc_feature (184)..(198): Xaa can be any naturally occurring amino acid
  misc_feature (200)..(201): Xaa can be any naturally occurring amino acid
  Coding DNA Sequence Number=SeqID_8021
  Gene Ontology: Mol. function=nucleotide binding; Cellular component =cytoskeleton; Biological process=actin filament organization
  Homolog annotation: Hit_ID=P78712; Match level="QueryCoverage=85%, HitCoverage=39%, E-value=8e-60, Identity=68%"; Hit description=Actin- related protein 3
  Pfam annotation: Domain name=Actin; Domain location=2-201; Score= -161.8; E_value=6.2e-06; Accession=PF00022.9; Description=Actin
  Subcellular localization annotation: CTP_CleavageSite=53; ConfidenceScore=5.50e-01
MXXQTPAVVMDNGTGYSKLGFAGNDSPSFVFPTAIATKGPTXXXXXSGSGRPAVANKPSFLTGGAGPGGHLSGKRGTEDLDFFIGDEALAAAGGAGYGINYPIRHGQIDNWDLMERFWSNSIFKYLRVEPEDHHFLLTEPPLXPPENREXTAEIMXESXXXXXXXXXXQAVLXXXXXXTXXXVXXXXXXXXXXXXXXXVXX

SEQ ID NO: 13335 - protein, 220 aa, Zea mays
  misc_feature (27)..(27): Xaa can be any naturally occurring amino acid
  misc_feature (52)..(52): Xaa can be any naturally occurring amino acid
  misc_feature (72)..(72): Xaa can be any naturally occurring amino acid
  misc_feature (139)..(139): Xaa can be any naturally occurring amino acid
  misc_feature (212)..(212): Xaa can be any naturally occurring amino acid
  Coding DNA Sequence Number=SeqID_8022
  Gene Ontology: Mol. function=oxidoreductase activity, acting on the CH-CH group of donors; Cellular component=integral to membrane; Biological process=lipid metabolic process
  Homolog annotation: Hit_ID=Q10E47; Match level="QueryCoverage=92%, HitCoverage=69%, E-value=5e-45, Identity=50%"; Hit description =Expressed protein
  Pfam annotation: Domain name=DUF1295; Domain location=40-220; Score =5.7; E_value=1.3e-08; Accession=PF06966.3; Description=Protein of unknown function (DUF1295)
MICREVVGRRNTATGAMGNELDSHFLXLTDIITVGYQLLFFIITALLRCNKXTHFAGRTNYIIICILTCPLXIGAWTLSVIVGHRQSLATIWGRRLGLFVLMRIMKCGEDRKDDRMHDNVEKVAVFSIVHAVRVCSVRXTAAVVNASDRNPSIEPMIIIGWIIWKAGICVEPAADHQKLVFKNSPSNMRKRSDGWLWKHSRHPNYYEEIFLXSGVFVEST

SEQ ID NO: 13336 - protein, 269 aa, Zea mays
  misc_feature (36)..(36): Xaa can be any naturally occurring amino acid
  misc_feature (51)..(52): Xaa can be any naturally occurring amino acid
  misc_feature (54)..(54): Xaa can be any naturally occurring amino acid
  misc_feature (56)..(56): Xaa can be any naturally occurring amino acid
  misc_feature (72)..(72): Xaa can be any naturally occurring amino acid
  misc_feature (77)..(77): Xaa can be any naturally occurring amino acid
  misc_feature (90)..(90): Xaa can be any naturally occurring amino acid
  misc_feature (95)..(95): Xaa can be any naturally occurring amino acid
  misc_feature (97)..(97): Xaa can be any naturally occurring amino acid
  misc_feature (119)..(119): Xaa can be any naturally occurring amino acid
  misc_feature (122)..(123): Xaa can be any naturally occurring amino acid
  misc_feature (153)..(153): Xaa can be any naturally occurring amino acid
  misc_feature (179)..(179): Xaa can be any naturally occurring amino acid
  misc_feature (186)..(186): Xaa can be any naturally occurring amino acid
  misc_feature (188)..(188): Xaa can be any naturally occurring amino acid
  misc_feature (205)..(205): Xaa can be any naturally occurring amino acid
  misc_feature (209)..(209): Xaa can be any naturally occurring amino acid
  misc_feature (211)..(212): Xaa can be any naturally occurring amino acid
  misc_feature (214)..(214): Xaa can be any naturally occurring amino acid
  misc_feature (226)..(226): Xaa can be any naturally occurring amino acid
  misc_feature (228)..(228): Xaa can be any naturally occurring amino acid
  misc_feature (241)..(241): Xaa can be any naturally occurring amino acid
  Coding DNA Sequence Number=SeqID_8023
  Gene Ontology: Mol. function=alpha-1,4-glucan-protein synthase (UDP -forming) activity; Cellular component=cellulose and pectin -containing cell wall; Biological process=cell wall organization and biogenesis
  Homolog annotation: Hit_ID=P80607; Match level="QueryCoverage=74%, HitCoverage=55%, E-value=3e-83, Identity=78%"; Hit description=Alpha- 1,4-glucan-protein synthase [UDP-forming]
  Pfam annotation: Domain name=RGP; Domain location=40-266; Score =219.5; E_value=8e-63; Accession=PF03214.4; Description=Reversibly glycosylated polypeptide
  Subcellular localization annotation: CTP_CleavageSite=26; ConfidenceScore=5.03e-01
LCSPPPPGPSRKRGFRKIRRPGPPPTAIAGTVTVPXVVDPSTPLLKDELDXXIXTXRNLDFLEKWRPFFQPXHLIIXQDGDPTKTIKVPXGFDYXLXNRNDINRILGPKASCISFKDSXFRXXGYMVSKKKYIYTIDDDCFVAKDPSCKDINXLEQHIKNLLSPSTPFFFNTLYDPYRXGSDFVRXYXFSLREGSHTAVSHGLLXNIPXYXXPXQLGKPRRGLEDXEXVMTIPRELVPMFXMNLLRQGFIGLTWSHGYGTLHTTCGRMC

SEQ ID NO: 13337 - protein, 208 aa, Zea mays
  misc_feature (28)..(28): Xaa can be any naturally occurring amino acid
  misc_feature (206)..(207): Xaa can be any naturally occurring amino acid
  Coding DNA Sequence Number=SeqID_8024
  Gene Ontology: Mol. function=hydrolase activity, acting on ester bonds; Cellular component=extracellular region; Biological process =DNA catabolic process
  Homolog annotation: Hit_ID=A7R1U4; Match level="QueryCoverage=88%, HitCoverage=57%, E-value=5e-83, Identity=75%"; Hit description =Chromosome undetermined scaffold_377, whole genome shotgun sequence
  Pfam annotation: Domain name=S1-P1_nuclease; Domain location=25-208; Score=279.2; E_value=8.6e-81; Accession=PF02265.7; Description=S1P1 Nuclease
MGQCSGRVRLLFLLLLMPLSTVLGWGKXGHYAICKITQEYLSEDALLAVKQLLPDSAEGDLAAVCSWADEVRYHYRWSSPLHYVDTPDFKCNYDYCRDCHDSYGHKHRCVTGAIYNYTMQLKSADTDTSSESKYNLTEALMFLSHFVGDVHQPLHCGFIGDLGGNTITVRWYRRKTNLHHVWDTMIIESALKTFYDSDLSIMIQAXXR

SEQ ID NO: 13338 - protein, 195 aa, Zea mays
  Coding DNA Sequence Number=SeqID_8025
  Gene Ontology: Mol. function=metal ion binding; Cellular component =protein complex; Biological process=aggregation involved in sorocarp development
  Homolog annotation: Hit_ID=A2Q5P5; Match level="QueryCoverage=100%, HitCoverage=72%, E-value=4e-68, Identity=71%"; Hit description=Zinc finger, FYVE/PHD-type
MAIARTGVYVDDYLEYASTLPAELQRLLNTVRELDERSQSMINQTRQQTKYCMGFSSHGSKKGNHSYNNSYVNDDDDASIEKMRKEIEAYQDSALSLCTEKVLLARQAYDLIDSHIKRLDEDLNNFAEDLKQEGKIPPDEPAILPPLPIVPKTEKRKPIYGTPQSKRLDYRDRDWDRERDRDFELMPPPGSHKKE

SEQ ID NO: 13339 - protein, 131 aa, Zea mays
  Coding DNA Sequence Number=SeqID_8026
  Gene Ontology: Mol. function=protein tyrosine phosphatase activity; Cellular component=nucleus; Biological process=cell division
  Homolog annotation: Hit_ID=A7QJF5; Match level="QueryCoverage=96%, HitCoverage=96%, E-value=3e-52, Identity=79%"; Hit description =Chromosome chr8 scaffold_106, whole genome shotgun sequence
  Pfam annotation: Domain name=Rhodanese; Domain location=9-113; Score =4.7; E_value=0.091; Accession=PF00581.10; Description=Rhodanese-like domain
MARSISYITGSQLLNLRRLPNIAVVDVTDDERSYDGHTSGSLHYASDTFSENISKLVQEVKGKGTLVFHCALSQVRGPTCARKLANYLAENKEDAGVKNIMVLERGFNGWEAPGRAVCRCTNVPCKESENA

SEQ ID NO: 13340 - protein, 109 aa, Zea mays
  misc_feature (13)..(13): Xaa can be any naturally occurring amino acid
  Coding DNA Sequence Number=SeqID_8027
  Gene Ontology: Mol. function=glyceraldehyde-3-phosphate dehydrogenase (phosphorylating) activity; Cellular component=cytoplasm; Biological process=glucose metabolic process
  Homolog annotation: Hit_ID=Q8AY70; Match level="QueryCoverage=93%, HitCoverage=30%, E-value=1e-48, Identity=93%"; Hit description =Glyceraldehyde 3-phosphate dehydrogenase
  Pfam annotation: Domain name=Gp_dh_C; Domain location=2-89; Score =55.4; E_value=1.9e-13; Accession=PF02800.10; Description =Glyceraldehyde 3-phosphate dehydrogenase, C-
KATSQEGFRVPVXKVSVGDLTCRLKKPAKYDDIKAAVKAAAEGQMKGILQYTQDQVVSTDFNGCTYSSLFAADAGIALNEHFVKLVSWYDNECGYSQRVVDLMSHMASQ

SEQ ID NO: 13341 - protein, 101 aa, Zea mays
  Coding DNA Sequence Number=SeqID_8028
  Homolog annotation: Hit_ID=A9PA69; Match level="QueryCoverage=100%, HitCoverage=96%, E-value=3e-47, Identity=89%"; Hit description =Putative uncharacterized protein
MNTDITASTKPEYPVIDRNPPFTKVVGNFNTLDYLRFTTITGVSVTVGYLSGIKPGIRGPSMVTGGLIGLMGGFMYAYQNSAGRLMGFFPNDDEVARYNEK

SEQ ID NO: 13342 - protein, 139 aa, Zea mays
  misc_feature (19)..(19): Xaa can be any naturally occurring amino acid
  Coding DNA Sequence Number=SeqID_8029
  Gene Ontology: Mol. function=structural constituent of ribosome; Cellular component=ribonucleoprotein complex; Biological process =translation
  Homolog annotation: Hit_ID=Q9AR08; Match level="QueryCoverage=100%, HitCoverage=62%, E-value=2e-41, Identity=66%"; Hit description=9S ribosomal protein
MALYARFLAVALSHLCLPXTYTHRPHQAPHLHLHSTYLRADGLSLGAFSDYASEADLPAEEVMAVEEEAEEDALSGIALRKYVKHTLTTGFSAHRITATGRRKTAIARVVLHEGTGLVFINFRDANEYLQGNPMWMEYC

SEQ ID NO: 13343 - protein, 199 aa, Zea mays
  misc_feature (61)..(61): Xaa can be any naturally occurring amino acid
  misc_feature (100)..(100): Xaa can be any naturally occurring amino acid
  misc_feature (126)..(126): Xaa can be any naturally occurring amino acid
  misc_feature (159)..(159): Xaa can be any naturally occurring amino acid
  Coding DNA Sequence Number=SeqID_8030
  Gene Ontology: Mol. function=transporter activity; Cellular component= mitochondrial inner membrane; Biological process=transport
  Homolog annotation: Hit_ID=P04709; Match level="QueryCoverage=100%, HitCoverage=51%, E-value=5e-69, Identity=69%"; Hit description=ADP ,ATP carrier protein 1, mitochondrial precursor
  Pfam annotation: Domain name=Mito_carr; Domain location=86-184; Score= 39.7; E_value=1e-08; Accession=PF00153.17; Description=Mitochondrial carrier protein
  Subcellular localization annotation: CTP_CleavageSite=29; ConfidenceScore=5.01e-01
MVDHANQPTDHHKLRGQLHLSSSFSEGVRARNICPSFSPHERRYATRNYMTQSLWGPSMHXRGGINVPAMPTPLFANAPAEKGGKNIMIDFMMGSVSASXSKTATAPIERVKLLIHNPDEMIKTWXYQRTDNGIADCFKRTIKDDGFSSLRRRNTANVXIRYLPTHDLNFAIKDYFNMLINFQKDMDAYCKREAGNLPS

SEQ ID NO: 13344 - protein, 92 aa, Zea mays
  misc_feature (38)..(38): Xaa can be any naturally occurring amino acid
  Coding DNA Sequence Number=SeqID_8031
  Gene Ontology: Mol. function=structural constituent of ribosome; Cellular component=ribonucleoprotein complex; Biological process =translation
  Homolog annotation: Hit_ID=Q8RXU5; Match level="QueryCoverage=100%, HitCoverage=100%, E-value=1e-39, Identity=85%"; Hit description=60S ribosomal protein L37a-2
  Pfam annotation: Domain name=Ribosomal_L37ae; Domain location=2-91; Score=190.7; E_value=3.7e-54; Accession=PF01780.9; Description =Ribosomal L37ae protein family
MTKRTNKAGIVGKYGTRYGASLRMHIKKMEVSLLSKFXCEFCGKYAVKRKAVGIWGCKDCGKVKAGGAYTLNTASAVTVRSTIRRLREQTEG

SEQ ID NO: 13345 - protein, 140 aa, Zea mays
  Coding DNA Sequence Number=SeqID_8032
  Gene Ontology: Mol. function=nucleic acid binding; Cellular component= mitochondrion; Biological process=translation
  Homolog annotation: Hit_ID=P93486; Match level="QueryCoverage=80%, HitCoverage=77%, E-value=2e-41, Identity=74%"; Hit description =Glycine-rich RNA-binding protein PsGRBP
  Pfam annotation: Domain name=RRM_1; Domain location=38-109; Score =110.0; E_value=7e-30; Accession=PF00076.12; Description=RNA recognition motif. (a.k.a. RRM, RBD, or
  Subcellular localization annotation: CTP_CleavageSite=31; ConfidenceScore=5.02e-01
MALCNKVGNILRQGAAQSRQAPVASMLNYIRCMSSSKLFVGGLSYGVDDQSLRDAFASFGDVTEARVITDRDTGRSRGFGFVNFSSDDSASSAQSAMDGQDLNGRNIRVSFANDRPAGPRSPGGRGYGGDGFASGRGGGY

SEQ ID NO: 13346 - protein, 143 aa, Zea mays
  misc_feature (130)..(131): Xaa can be any naturally occurring amino acid
  Coding DNA Sequence Number=SeqID_8033
  Gene Ontology: Mol. function=actin binding; Cellular component =intracellular; Biological process=response to stress
  Homolog annotation: Hit_ID=A9PD44; Match level="QueryCoverage=100%, HitCoverage=100%, E-value=3e-72, Identity=90%"; Hit description =Putative uncharacterized protein
  Pfam annotation: Domain name=Cofilin_ADF; Domain location=16-143; Score=170.5; E_value=4.4e-48; Accession=PF00241.10; Description =Cofilintropomyosin-type actin-bindin
MAMAFKMATTGMWVTDECKNSFMEMKWKKVHRYIVFKIDERSRLVTVDKVGGPGESYDDLAASLPNDDCRYAVFDFDFVTVDNCRKSKIFFIAWAPTASRIRAKMLYATSKDGLRRALDGISYEVQATDXXEMGFDIIKDRAK

SEQ ID NO: 13347 - protein, 197 aa, Zea mays
  misc_feature (102)..(102): Xaa can be any naturally occurring amino acid
  misc_feature (113)..(113): Xaa can be any naturally occurring amino acid
  misc_feature (162)..(162): Xaa can be any naturally occurring amino acid
  misc_feature (174)..(174): Xaa can be any naturally occurring amino acid
  Coding DNA Sequence Number=SeqID_8034
  Gene Ontology: Mol. function=sucrose transmembrane transporter activity; Cellular component=integral to plasma membrane; Biological process=sucrose transport
  Homolog annotation: Hit_ID=A2Z731; Match level="QueryCoverage=97%, HitCoverage=96%, E-value=3e-41, Identity=47%"; Hit description =Putative uncharacterized protein
MCGDGMEASASATGGVNKQPKITLLRMSLTCMAFTSLQHGWAPDVSLLTRYVQTLRIPHALTSLMWICETIADLLVPTCARLYRDKCTSKIGRRTPFIFTGXIIICISVIIIXAPSHMRYPLADTDQILQSPTHKKQLHSVLIFAMSFWLLDFSNNTEQGPXLALMEDLASIHXPSTVNAIFVSWMAIGNILSYLVG

SEQ ID NO: 13348 - protein, 102 aa, Zea mays
  misc_feature (62)..(62): Xaa can be any naturally occurring amino acid
  Coding DNA Sequence Number=SeqID_8035
  Gene Ontology: Mol. function=ATP binding; Cellular component =cytoplasm; Biological process=septin ring assembly
  Homolog annotation: Hit_ID=Q9FI52; Match level="QueryCoverage=99%, HitCoverage=31%, E-value=9e-28, Identity=60%"; Hit description =Nucleotide-binding protein
MKADACAGCDKQNICACAHKVPEPNVVAIDERLTTVKHKLLVLNGKGGVGKSTFSAQLYFAXAEMDHQVGLFDIHLCGPSIPKMLGLEGQDFYQSNLGWSPV

SEQ ID NO: 13349 - protein, 247 aa, Zea mays
  Coding DNA Sequence Number=SeqID_8036
  Gene Ontology: Mol. function=structural constituent of ribosome; Cellular component=large ribosomal subunit; Biological process =translation
  Homolog annotation: Hit_ID=Q53Q51; Match level="QueryCoverage=21%, HitCoverage=35%, E-value=2e-12, Identity=68%"; Hit description =Ribosomal protein L24, putative
  Subcellular localization annotation: CTP_CleavageSite=66; ConfidenceScore=5.33e-01
MGPSRARLPRPPQETLAARPEAASQVSRSVHPAAVMNPHPRVTSSRRKSRKAHFTAPPSPRRALMSAALPTQLPHQHPARSIPIPKDDQPHALPRPLQAPRGPPAPHPSPRPCLLPAPVDPPPPPPPPSPPPPHQPPPPPRNPPQTQPLHLPHLTYSTIPLPSSPSSSSLLPYLSPSLPPPLPPPPPPPSPFSPPPPPPSPPPPPYPPSPLPPPPSPPPPHPPTPPPPPSFPPPPPPPPPPRPPPPP

SEQ ID NO: 13350 - protein, 112 aa, Zea mays
  Coding DNA Sequence Number=SeqID_8037
MQMVEVPTPVGEKQVQVMGMQVQETAVGEKEEEVKGTGVEDTAVGEKEEEGMGTGVEDTAEEVKVAEEMVEEAKVGEGMVMAEEGMVGEAKAAVETATVEEETAGVEMVAAG

SEQ ID NO: 13351 - protein, 223 aa, Zea mays
  misc_feature (4)..(4): Xaa can be any naturally occurring amino acid
  misc_feature (15)..(15): Xaa can be any naturally occurring amino acid
  misc_feature (39)..(40): Xaa can be any naturally occurring amino acid
  misc_feature (55)..(55): Xaa can be any naturally occurring amino acid
  misc_feature (69)..(69): Xaa can be any naturally occurring amino acid
  misc_feature (103)..(103): Xaa can be any naturally occurring amino acid
  misc_feature (107)..(107): Xaa can be any naturally occurring amino acid
  misc_feature (115)..(115): Xaa can be any naturally occurring amino acid
  misc_feature (118)..(118): Xaa can be any naturally occurring amino acid
  misc_feature (121)..(121): Xaa can be any naturally occurring amino acid
  misc_feature (129)..(129): Xaa can be any naturally occurring amino acid
  misc_feature (134)..(135): Xaa can be any naturally occurring amino acid
  misc_feature (161)..(161): Xaa can be any naturally occurring amino acid
  misc_feature (169)..(170): Xaa can be any naturally occurring amino acid
  misc_feature (176)..(176): Xaa can be any naturally occurring amino acid
  misc_feature (187)..(187): Xaa can be any naturally occurring amino acid
  misc_feature (190)..(190): Xaa can be any naturally occurring amino acid
  misc_feature (199)..(199): Xaa can be any naturally occurring amino acid
  misc_feature (220)..(220): Xaa can be any naturally occurring amino acid
  Coding DNA Sequence Number=SeqID_8039
RGAXGGGGGRRTLRXGRAGGGGGRGGRRGRGAGGKGGGXXAGGQPEGGARGGDRXRGGGGETGGGGGGXARGAGGAGPRGGAAGAGGRGGGGAGGGGGGGGRXGGPXGRGRGGGXAAXGRXDRRRGAGXRGGPXXRRASRDQASVRGGRPRRGKGSRERRXQRRAGREXXGTPPAXEGESPDRPGPXRTXRRRQRVGGXGKQPKSGGKLRPRVKTGERPXATK

SEQ ID NO: 13352 - protein, 112 aa, Zea mays
  misc_feature (33)..(36): Xaa can be any naturally occurring amino acid
  misc_feature (91)..(91): Xaa can be any naturally occurring amino acid
  misc_feature (96)..(97): Xaa can be any naturally occurring amino acid
  misc_feature (106)..(107): Xaa can be any naturally occurring amino acid
  Coding DNA Sequence Number=SeqID_8041
  Gene Ontology: Mol. function=structural constituent of ribosome; Cellular component=ribonucleoprotein complex; Biological process =translation
  Homolog annotation: Hit_ID=A9P8U6; Match level="QueryCoverage=100%, HitCoverage=83%, E-value=9e-43, Identity=78%"; Hit description =Putative uncharacterized protein
  Pfam annotation: Domain name=Ribosomal_L14e; Domain location=44-112; Score=89.1; E_value=1.4e-23; Accession=PF01929.7; Description =Ribosomal protein L14
MPFKRYVEIGRVALVSYGKEYGRLVVTVDVIDXXXXLVFSPDMVRSQMNFKRLSLTDIKVDIIRVPKKKDLIKAMEAADVKNKWEKSSWGXKLIVXXKTAALNDFXXFKIML

SEQ ID NO: 13353 - protein, 200 aa, Zea mays
  misc_feature (181)..(181): Xaa can be any naturally occurring amino acid
  Coding DNA Sequence Number=SeqID_8042
  Gene Ontology: Mol. function=structural molecule activity; Cellular component=cytoskeleton; Biological process=nucleocytoplasmic transport
  Homolog annotation: Hit_ID=A2XZH4; Match level="QueryCoverage=92%, HitCoverage=35%, E-value=1e-77, Identity=78%"; Hit description =Putative uncharacterized protein
  Pfam annotation: Domain name=Actin; Domain location=20-200; Score= -44.6; E_value=3.5e-12; Accession=PF00022.9; Description=Actin
GLHWSLRRRRAPSSVEMADGEDIQPLVCDNGTGMVKAGSAGDDAPMAAYPSIVGHHRHTGDMVGMVQKDAHAGDEAQSKRGILTLKYPIEQGLESTWNDMDKIWHHTLYNELRVTPKEHPVLLTEAPLIPNAISENMTQIMLETFNAPAMYVAIQAALSLYASGHTTAIVLDSDHECSHTXPIYERHALPYAIVGLDHAG

SEQ ID NO: 13354 - protein, 107 aa, Zea mays
  Coding DNA Sequence Number=SeqID_8043
  Gene Ontology: Mol. function=protein binding; Cellular component =nucleus
  Homolog annotation: Hit_ID=A2WLZ1; Match level="QueryCoverage=100%, HitCoverage=64%, E-value=3e-43, Identity=78%"; Hit description =Putative uncharacterized protein
  Pfam annotation: Domain name=DUF538; Domain location=1-108; Score =52.5; E_value=1.5e-12; Accession=PF04398.3; Description=Protein of unknown function, DUF538
GLLPLADMEEVGYNRATGFVWLRQKKSLKHTFRPIGRQVLYAPEVTAFVEDRRIRGMTGVKTKELLIWVTLSEMFVDRDDPSKITFKTPPGLGRTYPVSAFAKEGAG

SEQ ID NO: 13355 - protein, 290 aa, Zea mays
  Coding DNA Sequence Number=SeqID_8044
  Gene Ontology: Mol. function=amino acid binding; Biological process =metabolic process
  Homolog annotation: Hit_ID=Q5YR97; Match level="QueryCoverage=95%, HitCoverage=50%, E-value=4e-76, Identity=52%"; Hit description =Putative uncharacterized protein
  Pfam annotation: Domain name=DUF1524; Domain location=181-269; Score =71.2; E_value=3.4e-18; Accession=PF07510.2; Description=Protein of unknown function (DUF1524)
LQEFPEQVLNKYLRKGKAAEFVEKMLVPYADAFLRTVHADFPDDSEWQPVNRWLKRFSRIDNRDWRPTAIWALYNHGDDAAFLTKFFAKLETLAASFLVRGTYTTPRIGRYLDLLTELKEGQGLDAPSFELSAGEIAETRHAINGDIYNMQKRRARYVLLRLDEMLTTDGAVEYNEPLIQIEHVLPQTPTVDYWLERFDEEARETWTNRLGNLLLLNGRKNAQVKNYDFDVRASKYFKGSAIFQLTSQVIQETDWNLDIVKQRQQKLTETLYDAWGLQSYVAEAGDVTGS

SEQ ID NO: 13356 - protein, 242 aa, Zea mays
  misc_feature (187)..(190): Xaa can be any naturally occurring amino acid
  misc_feature (215)..(217): Xaa can be any naturally occurring amino acid
  misc_feature (220)..(220): Xaa can be any naturally occurring amino acid
  misc_feature (222)..(224): Xaa can be any naturally occurring amino acid
  misc_feature (231)..(233): Xaa can be any naturally occurring amino acid
  misc_feature (236)..(237): Xaa can be any naturally occurring amino acid
  misc_feature (239)..(242): Xaa can be any naturally occurring amino acid
  Coding DNA Sequence Number=SeqID_8045
  Gene Ontology: Mol. function=unfolded protein binding; Cellular component=cytoplasm; Biological process=cellular protein metabolic process
  Homolog annotation: Hit_ID=P28769; Match level="QueryCoverage=98%, HitCoverage=43%, E-value=1e-100, Identity=80%"; Hit description=T -complex protein 1 subunit alpha
  Pfam annotation: Domain name=Cpn60_TCP1; Domain location=31-242; Score=-207.9; E_value=2.2e-05; Accession=PF00118.14; Description=TCP- 1cpn60 chaperonin family
MAITAQVPDIMGERQSGQDVRTQNVSACQAVANIVKSSLGPVGLDKMLVDDIGDVTITNDGATILRMLEVEHPAAKVLVELAELQDREVGDGTTSVVIIAAELLKRANELVRNKIHPTSIISGYRLAMREACKYVEEKLSVKVDRLGKDSLINCAKTSMSSKLITTDGNFFANLVVEAVQAVKTTNXXXXVKYPIKSINILKAHGKSAKESYLLXXXALXTXXXAQGMPTXXXPAXXAXXXX

SEQ ID NO: 13357 - protein, 157 aa, Zea mays
  misc_feature (123)..(123): Xaa can be any naturally occurring amino acid
  Coding DNA Sequence Number=SeqID_8046
  Gene Ontology: Mol. function=protein serine/threonine kinase activity; Cellular component=plasma membrane; Biological process =protein amino acid phosphorylation
  Homolog annotation: Hit_ID=Q2RB87; Match level="QueryCoverage=87%, HitCoverage=33%, E-value=2e-50, Identity=70%"; Hit description =Serine/threonine-protein kinase NAK, putative, expressed
  Pfam annotation: Domain name=Pkinase_Tyr; Domain location=9-155; Score=-137.8; E_value=0.00057; Accession=PF07714.7; Description =Protein tyrosine kinase
VTPAGAAYAIQGATYASCFFGTVFKGFIYDIVRVGLESLPVADKVLNKDGHQGHREWFTEVNCLGQLKHPNMVKLIGYCCKDDHLLLDYEFMFRGSVENHLLRKTVTPLPWGTRMSIALGAVXGLALLHIAQRPSIYRDHKTLNILLDFDYTAKLSD

SEQ ID NO: 13358 - protein, 188 aa, Zea mays
  misc_feature (47)..(47): Xaa can be any naturally occurring amino acid
  misc_feature (71)..(71): Xaa can be any naturally occurring amino acid
  misc_feature (156)..(156): Xaa can be any naturally occurring amino acid
  misc_feature (164)..(165): Xaa can be any naturally occurring amino acid
  Coding DNA Sequence Number=SeqID_8047
  Homolog annotation: Hit_ID=Q9ZRQ5; Match level="QueryCoverage=78%, HitCoverage=37%, E-value=3e-49, Identity=71%"; Hit description =Phytase
  Subcellular localization annotation: CTP_CleavageSite=39; ConfidenceScore=5.09e-01
MLYLIHGLVRSGGLTCVILVLLFRRFMNTGPRATPTGLLCMMLTDKXSQLTALALLLRNTEDLMMSQAIKXDSASIEYLKTVSDCCTRTMKLLDYSMAATTTYESSAGIMSLVPRHMDDYVVYGLNACLQNVRICCVRLDAIDKLRAHYDALVDAXVVDPDANXXGLAEEACDYKAIMWQYCFNQRIA

SEQ ID NO: 13359 - protein, 120 aa, Zea mays
  misc_feature (42)..(42): Xaa can be any naturally occurring amino acid
  misc_feature (72)..(72): Xaa can be any naturally occurring amino acid
  Coding DNA Sequence Number=SeqID_8048
  Gene Ontology: Mol. function=ARF GTPase activator activity; Cellular component=Golgi apparatus; Biological process=regulation of ARF GTPase activity
  Homolog annotation: Hit_ID=Q5KQL0; Match level="QueryCoverage=97%, HitCoverage=30%, E-value=6e-51, Identity=83%"; Hit description =Putative zinc finger protein
  Pfam annotation: Domain name=ArfGap; Domain location=12-120; Score =101.6; E_value=2.4e-27; Accession=PF01412.9; Description=Putative GTPase activating protein for Arf
MAAACDAYTDKNAVFRRLKAMPENKMCLDCNAQIPTWASVTXYGIFLWLDCCAAHRSLGVHITFVRSTNLDXWTPYQLKMMAFGGNIRAHAFFKHHGWTDGGKVEAKCTSRAGELYRQML

SEQ ID NO: 13360 - protein, 137 aa, Zea mays
  misc_feature (106)..(106): Xaa can be any naturally occurring amino acid
  Coding DNA Sequence Number=SeqID_8049
  Gene Ontology: Mol. function=structural molecule activity; Cellular component=protein complex; Biological process=microtubule-based movement
  Homolog annotation: Hit_ID=Q53M51; Match level="QueryCoverage=100%, HitCoverage=39%, E-value=8e-63, Identity=85%"; Hit description =Tubulin/FtsZ family, GTPase domain, putative
  Pfam annotation: Domain name=Tubulin_C; Domain location=1-88; Score =41.4; E_value=3.3e-09; Accession=PF03953.7; Description=TubulinFtsZ family, C-terminal domain
DPPHGKYMACCLMYRGDVVPKDVNASVATIKTKRPIQFVGWCPTGFKFGIKYQPPSVVPGGDLAKVQRAVCMISNSPSVVEVFFRIDPKFDLMYAKRAFVPWYVGXGMEEGEFFQACEDLAALEKEFQEVGSEFYQG

SEQ ID NO: 13361 - protein, 214 aa, Zea mays
  misc_feature (48)..(48): Xaa can be any naturally occurring amino acid
  misc_feature (152)..(152): Xaa can be any naturally occurring amino acid
  misc_feature (193)..(193): Xaa can be any naturally occurring amino acid
  Coding DNA Sequence Number=SeqID_8050
  Gene Ontology: Cellular component=integral to membrane; Biological process=response to nematode
  Homolog annotation: Hit_ID=Q6K225; Match level="QueryCoverage=90%, HitCoverage=56%, E-value=8e-61, Identity=66%"; Hit description =Phosphate translocator-like
GLELELGPLDSHQVDPRAEDIQIGVIRALALSVASYAAVVLRNKALIXTLGFPFATTVTIWNLMVTFCTLHVAQILLFFEPDEIDAQTTILFGLLNGTSMVIVNLSLGSYSIEIYQMTKMEIIPFTELLETIFLKKRFSESIKLSLLVLLRXERIASATDLKINLVGCIISGLVIDTTCVGHIRTITIHKRLXGSSTQLLYQSAAYHQVILFAS

SEQ ID NO: 13362 - protein, 234 aa, Zea mays
  misc_feature (43)..(43): Xaa can be any naturally occurring amino acid
  misc_feature (138)..(138): Xaa can be any naturally occurring amino acid
  misc_feature (209)..(209): Xaa can be any naturally occurring amino acid
  Coding DNA Sequence Number=SeqID_8051
  Gene Ontology: Mol. function=ubiquitin-protein ligase activity; Cellular component=ubiquitin ligase complex; Biological process =protein ubiquitination
  Homolog annotation: Hit_ID=Q9AV81; Match level="QueryCoverage=91%, HitCoverage=40%, E-value=5e-73, Identity=65%"; Hit description =Putative WD-repeat containing protein
  Pfam annotation: Domain name=Prp19; Domain location=83-152; Score =139.1; E_value=1.2e-38; Accession=PF08606.2; Description=Prp19Pso4 -like
  Subcellular localization annotation: CTP_CleavageSite=32; ConfidenceScore=5.13e-01
MMHRACSLPSPSMALPSSMICTISVKTTNKTVAANNAVLLFEXRRVIERYIEDHGKSPVTNEDLTMDDIQPDETNKIENPRPLQAASIPGLLAIFQNEWDALMVSNFALEHQLHTVRLELSHALYQHDAACRAIARLXKERDDARALLAQTERQIPASVAGAAPAAVVSNGKRVIEDEIGPDGKKIRPGINPVMIDELTKCYAMLSARXKKRLVPPTLGTMDALEKNLRTSAIP

SEQ ID NO: 13363 - protein, 197 aa, Zea mays
  misc_feature (35)..(38): Xaa can be any naturally occurring amino acid
  misc_feature (154)..(154): Xaa can be any naturally occurring amino acid
  misc_feature (169)..(170): Xaa can be any naturally occurring amino acid
  misc_feature (172)..(172): Xaa can be any naturally occurring amino acid
  misc_feature (175)..(176): Xaa can be any naturally occurring amino acid
  misc_feature (180)..(180): Xaa can be any naturally occurring amino acid
  misc_feature (183)..(186): Xaa can be any naturally occurring amino acid
  misc_feature (189)..(190): Xaa can be any naturally occurring amino acid
  Coding DNA Sequence Number=SeqID_8052
  Gene Ontology: Mol. function=nucleotide binding; Cellular component =plasma membrane; Biological process=small GTPase mediated signal transduction
  Homolog annotation: Hit_ID=Q40191; Match level="QueryCoverage=98%, HitCoverage=85%, E-value=6e-89, Identity=87%"; Hit description=Ras -related protein Rab11A
  Pfam annotation: Domain name=Arf; Domain location=2-176; Score=-89.5; E_value=0.0098; Accession=PF00025.11; Description=ADP-ribosylation factor family
  Pfam annotation: Domain name=MMR_HSR1; Domain location=15-131; Score=- 6.2; E_value=0.004; Accession=PF01926.13; Description=GTPase of unknown function
  Pfam annotation: Domain name=Miro; Domain location=16-131; Score =69.2; E_value=1.4e-17; Accession=PF08477.3; Description=Miro-like protein
  Pfam annotation: Domain name=Ras; Domain location=16-178; Score =290.1; E_value=4.5e-84; Accession=PF00071.12; Description=Ras family
  Pfam module annotation: Pfam domain module=Arf::MMR_HSR1::Miro::Ras; Domain location=2-176::15-131::16-131::16-178
MASYGDANQKIDYVFKVVLIGDSAVGKSQILARFXXXXEFSLDSKSTIGVEFQTQTLVIDHKTVKAQIWDTAGQERYRAVTSAYYRGAVGAMLVYDITKRQTFDHIPRWLEELRNHADKNIVIILIGNKCDLESQRDVPTEDAKEFAEKEGLFXLETSALEATNVETAXXTXLTXXYTIXNKXXXXADXXQGNGNSS

SEQ ID NO: 13364 - protein, 137 aa, Zea mays
  Coding DNA Sequence Number=SeqID_8053
  Gene Ontology: Mol. function=nucleic acid binding
  Homolog annotation: Hit_ID=Q45NM5; Match level="QueryCoverage=98%, HitCoverage=82%, E-value=5e-65, Identity=90%"; Hit description =Putative uncharacterized protein
  Subcellular localization annotation: CTP_CleavageSite=50; ConfidenceScore=5.13e-01
MADSKSGLRKPVFTKVDQLRPGTSGHTLTVKVVNTKMVMQKGRPDGPQPRQMRIAECLVGDETGVIIFTARNDQVDLMKEGTTVILRNAKIDMFKGSMRLAVDKWGRVEVIEPASFTVKEDNNLSLIEYELVNVVVE

SEQ ID NO: 13365 - protein, 154 aa, Zea mays
  Coding DNA Sequence Number=SeqID_8054
  Gene Ontology: Cellular component=membrane
  Homolog annotation: Hit_ID=A8GCT0; Match level="QueryCoverage=83%, HitCoverage=41%, E-value=2e-32, Identity=58%"; Hit description =Putative uncharacterized protein
  Pfam annotation: Domain name=DUF6; Domain location=3-120; Score=23.4; E_value=0.00084; Accession=PF00892.11; Description=Integral membrane protein DUF6
AEIILISRYAGQVDVRRVTLVQLLVASACAFVLMLPNGESLPTLSAPLLFSALGLGAASALIQVTMNWAQRRVSPTRATVIYAGEPVWAGVVGRIAGERLPAAALLGGALIVCGVIVSELRLRRKKAAPGAGTAEALRLRARRRMGQRGTAPLQ

SEQ ID NO: 13366 - protein, 229 aa, Zea mays
  misc_feature (215)..(216): Xaa can be any naturally occurring amino acid
  Coding DNA Sequence Number=SeqID_8055
  Gene Ontology: Mol. function=sucrose synthase activity; Biological process=sucrose metabolic process
  Homolog annotation: Hit_ID=P31926; Match level="QueryCoverage=100%, HitCoverage=28%, E-value=1e-122, Identity=93%"; Hit description =Sucrose synthase
  Pfam annotation: Domain name=Sucrose_synth; Domain location=1-140; Score=-155.6; E_value=0.0052; Accession=PF00862.10; Description =Sucrose synthase
DGNIVASLLAHKLGVTQCTIAHALEKTKYPESDIYWKKFEEKYHFSCQFTADLFAMNHTDFIITSTFQEIAGSKDTVGQYESHTAFTLPGLYRVVHGIDVFDPKFNIVSPGADQTIYFPYTETSRRLTSFHPEIEELLYSSVENEEHICVLKDRNKPIIFTMARLDRVKNITGLVEWYGKNAKLRELVNLVVVAGDRRKESKDLEEKAEMKKMYXXIETYKLNGQFRWI

SEQ ID NO: 13367 - protein, 207 aa, Zea mays
  Coding DNA Sequence Number=SeqID_8056
  Gene Ontology: Mol. function=structural constituent of ribosome; Cellular component=ribonucleoprotein complex; Biological process =translation
  Homolog annotation: Hit_ID=A7P6K3; Match level="QueryCoverage=100%, HitCoverage=88%, E-value=1e-110, Identity=98%"; Hit description =Chromosome chr9 scaffold_7, whole genome shotgun sequence
  Pfam annotation: Domain name=KH_2; Domain location=45-102; Score =45.8; E_value=1.5e-10; Accession=PF07650.7; Description=KH domain
  Pfam annotation: Domain name=Ribosomal_S3_C; Domain location=104-188; Score=114.5; E_value=3.2e-31; Accession=PF00189.10; Description =Ribosomal protein S3, C-terminal domain
  Pfam module annotation: Pfam domain module=KH_2::Ribosomal_S3_C; Domain location=45-102::104-188
MATQMSKKRKFVADGVFFAELNEVLTRELAEDGYSGVEVRVTPMRTEIIIRATRTQAVLGEKGRRIRELTSVVQKRFKFPENSVELYAEKVNNRGLCAIAQAESLRYKLLGGLAVRRACYGVLRFVMESGAKGCEVIVSGKLRAQRAKSMKFKDGYMISSGQPVKDYIDSAVRHVLLRQGVLGIKVKIMLDWDPKGKQGPKTPLPDI

SEQ ID NO: 13368 - protein, 116 aa, Zea mays
  Coding DNA Sequence Number=SeqID_8057
  Gene Ontology: Mol. function=glutathione transferase activity; Biological process=response to stress
  Homolog annotation: Hit_ID=Q9FQB7; Match level="QueryCoverage=100%, HitCoverage=50%, E-value=6e-40, Identity=73%"; Hit description =Glutathione S-transferase GST 22
KGRTAEKIAEAARQALPALETLEQAFRECSKGKAFFGGDSVGLVDVVLGGLVGWLYPPEAIFGVKALYPGRTPLLAGWGERFCPLEGVKGLIPPVDRLLEYTKARRAVFGLPPLRP

SEQ ID NO: 13369 - protein, 263 aa, Zea mays
  misc_feature (111)..(112): Xaa can be any naturally occurring amino acid
  Coding DNA Sequence Number=SeqID_800
  Gene Ontology: Mol. function=structural constituent of cell wall; Cellular component=chloroplast thylakoid membrane; Biological process=lipid transport
  Homolog annotation: Hit_ID=A7PF96; Match level="QueryCoverage=30%, HitCoverage=30%, E-value=2e-15, Identity=51%"; Hit description =Chromosome chr11 scaffold_13, whole genome shotgun sequence
  Pfam annotation: Domain name=Extensin_1; Domain location=101-110; Score=1.7; E_value=72; Accession=PF02095.6; Description=Extensin -like protein repeat
  Pfam annotation: Domain name=Extensin_1; Domain location=120-129; Score=3.8; E_value=16; Accession=PF02095.6; Description=Extensin -like protein repeat
  Pfam annotation: Domain name=Extensin_1; Domain location=130-139; Score=1.7; E_value=72; Accession=PF02095.6; Description=Extensin -like protein repeat
  Pfam annotation: Domain name=Extensin_1; Domain location=91-100; Score=3.8; E_value=16; Accession=PF02095.6; Description=Extensin -like protein repeat
  Pfam annotation: Domain name=Tryp_alpha_amyl; Domain location=180 -261; Score=86.5; E_value=8.6e-23; Accession=PF00234.12; Description =Protease inhibitorseed storageLTP f
  Pfam module annotation: Pfam domain module=Extensin_1::Extensin _1::Extensin_1::Extensin_1::Tryp_alpha_amyl; Domain location=101 -110::120-129::130-139::91-100::180-261
MEASGMKLRRTFLLTLLLVLSTAVTPILSLPADNVVACDCDKPKAPKPSHSRPPKTTKPSHPSPKPENPKPPKGPAYPAAGHPPPKSPSYPPVVGPPVTRPPVVGPPVTYXXITGSPTTPPVIGPPVTRPPVVGPPVTYPPITGPPSTPLPVTGPPVTYPPGGGGGSSTPCPPPPPLPTCPADSLKLGACVDLLGGLVHVGLGDPVVNQCCPVLEGLVELEAAVCLCTTIKLRLLNVNLYLPLALQLLLTCGKTPPPGYTCTV

SEQ ID NO: 13370 - protein, 257 aa, Zea mays
  misc_feature (75)..(75): Xaa can be any naturally occurring amino acid
  Coding DNA Sequence Number=SeqID_801
  Homolog annotation: Hit_ID=Q2RBM1; Match level="QueryCoverage=36%, HitCoverage=51%, E-value=4e-36, Identity=80%"; Hit description =Expressed protein
MPQAMADAATLSALALFASRLSCRRFGDEDLRVLEAALSAGADVPALLATRSAARRLLRSSAAEALAFTAAGCIXDGGDERRSLAVADFFSRAFALVGDVESCLAMRYEALLLRDAKYCNDLHLQVSRQEWLTFATDCLDNGFYTIASKAFANALVHIHPSHTGHLDSANSIEEKDKIIEITGLQNLAKSLSAQHCVQIKSAEYMERRASGVHEKYNLQSGKLKLTGSSMFRLGIKTRNIKKLLRSQERNLGDLKQS

SEQ ID NO: 13371 - protein, 144 aa, Zea mays
  Coding DNA Sequence Number=SeqID_802
  Homolog annotation: Hit_ID=Q53LU3; Match level="QueryCoverage=95%, HitCoverage=41%, E-value=3e-46, Identity=63%"; Hit description=F-box protein family, AtFBL12, putative
MPSAQVVSGSGLRYLNLHRLGSLTGLDGLGNLAFAKSLCVLNLRMYRYLTDDSVTAIASGCPLLEEWGTLLFSMGVHLPGWLYCNKLRVLHVNRCRHICDHSLLAIGNGCLVLHVNGCVKVTNNGLADEVMSIGPSIENLFRLH

SEQ ID NO: 13372 - protein, 138 aa, Zea mays
  Coding DNA Sequence Number=SeqID_803
KQEKVIKSCDGGIRGSYLGEQGGRGRGGLGLCRGRRRRGCRGGWRGGRRRWAGLGGGLGRGGGGRRGLGGGLGRRLSRRGRGGLREGAGGGEQDEERGAEDDGCPRRHCGRRVRAAVWCYCYASGNRRSVCVRGSESK

SEQ ID NO: 13373 - protein, 308 aa, Zea mays
  misc_feature (104)..(105): Xaa can be any naturally occurring amino acid
  misc_feature (114)..(114): Xaa can be any naturally occurring amino acid
  misc_feature (124)..(125): Xaa can be any naturally occurring amino acid
  misc_feature (127)..(128): Xaa can be any naturally occurring amino acid
  misc_feature (130)..(130): Xaa can be any naturally occurring amino acid
  misc_feature (133)..(133): Xaa can be any naturally occurring amino acid
  misc_feature (221)..(221): Xaa can be any naturally occurring amino acid
  misc_feature (228)..(228): Xaa can be any naturally occurring amino acid
  misc_feature (241)..(241): Xaa can be any naturally occurring amino acid
  misc_feature (253)..(253): Xaa can be any naturally occurring amino acid
  misc_feature (278)..(278): Xaa can be any naturally occurring amino acid
  misc_feature (290)..(290): Xaa can be any naturally occurring amino acid
  Coding DNA Sequence Number=SeqID_805
  Homolog annotation: Hit_ID=Q2QXG2; Match level="QueryCoverage=18%, HitCoverage=22%, E-value=5e-13, Identity=68%"; Hit description =Uncharacterized plant-specific domain TIGR01568 family protein, expressed
  Pfam annotation: Domain name=DUF623; Domain location=227-287; Score =53.6; E_value=6.6e-13; Accession=PF04844.4; Description=Protein of unknown function, DUF623
  Subcellular localization annotation: CTP_CleavageSite=76; ConfidenceScore=5.14e-01
NILIENSLPPSIPRSIQKPHTWTAEARRCRPVQHYSYAAISYSSSSPRTIPSSMSSSRARRGGSGLQFPVGRWRHVAVVDAGCGCRPRRATTRLLSQLPSFLRXXPKPPQPPRXSSRSSSGFFXXSXXSXASXSATTFTTTHSSHSNYDSSYTHHHPTTKHLASAADKPPAPAGRRRQQLQGHHHHQGRRKKRYDKMGGPGAGAAADADAAGEEGGVGVGXAVEKESXDPRADFRESMTQXMVLEMGLCGWDXLRCMLRRLLALNAPRHHAAILAAFXEVCAQLTTAAPXQPAYHAAAYDYDYHYHHY

SEQ ID NO: 13374 - protein, 337 aa, Zea mays
  misc_feature (99)..(99): Xaa can be any naturally occurring amino acid
  Coding DNA Sequence Number=SeqID_806
  Gene Ontology: Cellular component=endoplasmic reticulum
  Homolog annotation: Hit_ID=Q7XE12; Match level="QueryCoverage=87%, HitCoverage=70%, E-value=1e-102, Identity=59%"; Hit description =Putative uncharacterized protein
  Pfam annotation: Domain name=NHL; Domain location=154-181; Score =17.3; E_value=0.059; Accession=PF01436.11; Description=NHL repeat
MCCRRQRGPDGTPVDGGRRRRRGCGAVLAVLALAAAAAVAFLESTAGGVSYTGDGWLHECAKWDAEGGRFLASTFFGGGVAEVRAGEGEERVVVADPDXAGRVALGLAVDAPRRRLLLVYCDRPPRFGYAALAAYDLGSWRRLFLTRLDVPGESTFPDDVAADEEGNAYVTDASGNKIWKVSPSGVLLGVIKNSTFVQRPGLRHNLVGLNGIVYHPNGYLLVVHTFGGDLFKVDPKTEAVHAVKVQGSLGRGDGMELLSPTRLVVAGTPSSRLVESSDDWETARVTGQYVGPVHRVGSSATVKDGDVYINHIVGFGLGKKKTHVLARAVFSPLAAAS

SEQ ID NO: 13375 - protein, 109 aa, Zea mays
  Coding DNA Sequence Number=SeqID_807
  Subcellular localization annotation: CTP_CleavageSite=78; ConfidenceScore=5.85e-01
AHLLSLPSPFSHSFVPPLPVPPPAPPLPNTGTSPAPPGPSTARPSRAAPGHQRHASPSAAPSRLSRRRLLPPSRRDLPSKVKENSPYRGGAAGFFTDNTIFYSPYGIIS

SEQ ID NO: 13376 - protein, 90 aa, Zea mays
  Coding DNA Sequence Number=SeqID_809
  Gene Ontology: Mol. function=DNA binding; Cellular component=nucleus; Biological process=regulation of transcription
  Homolog annotation: Hit_ID=Q10NZ9; Match level="QueryCoverage=71%, HitCoverage=62%, E-value=4e-17, Identity=67%"; Hit description=Myb family transcription factor, putative
MSWTYRENALFERALATYDRDTPRRWELVAAAVGGGKTAEDARRHYAHLVLDVGDIESGGYDNPNPRPAPTNSGGNGNNRGGGRANRPQT

SEQ ID NO: 13377 - protein, 161 aa, Zea mays
  Coding DNA Sequence Number=SeqID_810
  Homolog annotation: Hit_ID=A3B3A7; Match level="QueryCoverage=36%, HitCoverage=39%, E-value=2e-10, Identity=53%"; Hit description =Putative uncharacterized protein
MDATPASKKATPAAAVADAVPPAAQQAAEQLSSPESVAGVRASGSEDDDEQVERFYALLDNIRAMRGMVSTGGAAPGRKRARDDEPPWRPAFRMEDFELEEFDSGSAGCDGGKKKRESSIAKRPADEEEQAEVVEAKCPRCGPRPPQSHKPRREGVRAVDT

SEQ ID NO: 13378 - protein, 179 aa, Zea mays
  misc_feature (105)..(105): Xaa can be any naturally occurring amino acid
  misc_feature (119)..(119): Xaa can be any naturally occurring amino acid
  Coding DNA Sequence Number=SeqID_811
  Homolog annotation: Hit_ID=A7QPS4; Match level="QueryCoverage=47%, HitCoverage=40%, E-value=3e-13, Identity=47%"; Hit description =Chromosome chr10 scaffold_138, whole genome shotgun sequence
  Subcellular localization annotation: CTP_CleavageSite=3; ConfidenceScore=5.05e-01
MAKADARSRGRAASHVPTPTWAQRTEALTHVLTHPSHAPSLHSQLFLASRVPCPPRGLGSTTSYPPLLCPGASLLRWALASVFLPRAASLCLPPSSWRSRCPFQXSPPPVVPSAAIEPXPERWADSELRAYARRRRERRGPLTVRPPVAVLGVVLTTVPNVVIVVAFVKEYFWGRTSRI

SEQ ID NO: 13379 - protein, 179 aa, Zea mays; identical to SEQ ID NO: 13378
  misc_feature (105)..(105): Xaa can be any naturally occurring amino acid
  misc_feature (119)..(119): Xaa can be any naturally occurring amino acid
  Coding DNA Sequence Number=SeqID_812
  Homolog annotation: Hit_ID=A7QPS4; Match level="QueryCoverage=47%, HitCoverage=40%, E-value=3e-13, Identity=47%"; Hit description =Chromosome chr10 scaffold_138, whole genome shotgun sequence
  Subcellular localization annotation: CTP_CleavageSite=3; ConfidenceScore=5.05e-01

SEQ ID NO: 13380 - protein, 142 aa, Zea mays
  Coding DNA Sequence Number=SeqID_813
  Gene Ontology: Mol. function=RNA-directed DNA polymerase activity
  Homolog annotation: Hit_ID=Q7XD39; Match level="QueryCoverage=35%, HitCoverage=20%, E-value=8e-10, Identity=52%"; Hit description =Putative uncharacterized protein
MQPGASWWHVESAQRPVNQGAWTTTPWTNCAAAAMEGHRSLSSSVCAHPPLWDLVAPPLVHSRPIVAAAGLYWRPSSPIGHAVASSLPVLFRGTYWCRFWGLLQRREEHIVRIKVACRTLEVSMMQIFAKHGWSFRNRITSG

SEQ ID NO: 13381 - protein, 223 aa, Zea mays
  misc_feature (1)..(68): Xaa can be any naturally occurring amino acid
  Coding DNA Sequence Number=SeqID_814
XXXXXXXXXXXXXXXXXXXXXXXXXXXXXXXXXXXXXXXXXXXXXXXXXXXXXXXXXXXXXXXXXXXXFAPWSFACDAIPGIWNGWGASGSLLVADRGRSREDWWPEHLELFTATGAPPWIIPLAWAASSAPPSPQRGYESPEDQVGEVPGNLKSKEDDWRIVRLKTHQRHLRSLGHHPLIKILARVSSLMVGAQQVGEIMRVSKVKNRYRRMRRMEDALASS

SEQ ID NO: 13382 - protein, 443 aa, Zea mays
  misc_feature (127)..(127): Xaa can be any naturally occurring amino acid
MEAYAATASPPTTTAMCVDKLSHQLFSLLESRLLGGWCPSVPGTPARALLDGGRVRVLAIDGCGAGAEDALLAAAALARLEAKLRDRTGDPDARVADFFDVAAGAGAGGVLAAMLLLRGADGRPRYXAQEALAFFAGSVGTKGWCGRRGRWAKLFRRGSRGGDRTLRRVFGDATLRDTVAPLLVPCYDLATAAPFVFSRADAVESDTFDFRLRDVCAAACAAGGAVAPVRSVDGLTAVAAASGGVAAMCNPAGAAITHALHNKQEFPLATGVDDLLVLSIGAGASVANGSSTPMPARSPSPRELARVTAEGVADMVDESLGMAFGRARGSNYVRIQAGKALVPIRADEAAVAAEAMLAQRNVESVLFRERRLSEWTNAEKVDALAAELVKEQERRRRSPLPNVAIKQVGTPPRLSSATTASSGTGTARTASTMPSPASWESRR

SEQ ID NO: 13383 - protein, 153 aa, Zea mays
  misc_feature (126)..(126): Xaa can be any naturally occurring amino acid
  Coding DNA Sequence Number=SeqID_8058
  Homolog annotation: Hit_ID=A7QGQ3; Match level="QueryCoverage=96%, HitCoverage=95%, E-value=1e-42, Identity=65%"; Hit description =Chromosome chr12 scaffold_93, whole genome shotgun sequence
MEEKEKGERWSGAMTNLAEMGSNLESLQKLLLTKAVFVDDDTFSKASLAADQARTIKLLEQRVHTLEREVDAAITAAARARSEKRQAEAAQKAAESRAQEITKELENTTKVFELHMEELRAKQEEXTKRDNDIKLLEAIIQTLGGKESLPKSM

SEQ ID NO: 13384 - protein, 163 aa, Zea mays
  misc_feature (53)..(53): Xaa can be any naturally occurring amino acid
  misc_feature (55)..(56): Xaa can be any naturally occurring amino acid
  misc_feature (110)..(110): Xaa can be any naturally occurring amino acid
  Coding DNA Sequence Number=SeqID_8059
  Gene Ontology: Cellular component=integral to membrane; Biological process=protein transport
  Homolog annotation: Hit_ID=A9PAD5; Match level="QueryCoverage=79%, HitCoverage=48%, E-value=2e-51, Identity=74%"; Hit description =Putative uncharacterized protein
  Pfam annotation: Domain name=SCAMP; Domain location=1-130; Score =170.4; E_value=4.8e-48; Accession=PF04144.4; Description=SCAMP family
VVAVIVCRIRRSGVKIFFLAEIYALLGVPLSYVLWYRPLYRAMRTDSALKFGXFXXFYLLHIAFCIFAAIAPPVVFHGKSLTGILAAIDVFSDHVLSGIFYLVGFGLFCXESLLSFWVLQKIYMYFRGHKRDCSFDPLAFIMSVRGMVYSLFLSNPLSPNIFI

SEQ ID NO: 13385 - protein, 126 aa, Zea mays
  Coding DNA Sequence Number=SeqID_8060
  Gene Ontology: Mol. function=translation elongation factor activity; Cellular component=cytoplasm; Biological process=translation
  Homolog annotation: Hit_ID=O23755; Match level="QueryCoverage=100%, HitCoverage=14%, E-value=1e-62, Identity=92%"; Hit description =Elongation factor 2
  Pfam annotation: Domain name=EFG_C; Domain location=7-95; Score =131.1; E_value=3.2e-36; Accession=PF00679.14; Description=Elongation factor G C-terminus
QLTAKPRLLEPVYLVEIQAPEQALGGIYSVLNQKRGHVFEEMQRPGTPLYNIKAYLPVIESFGFSSTLRAATSGQAFPQCVFDHWDMMSSDPMEAGSQAATLVTDIRKRKGLKEQMTPLSEFEDKL

SEQ ID NO: 13386 - protein, 170 aa, Zea mays
  misc_feature (13)..(13): Xaa can be any naturally occurring amino acid
  misc_feature (29)..(30): Xaa can be any naturally occurring amino acid
  misc_feature (59)..(59): Xaa can be any naturally occurring amino acid
  misc_feature (119)..(119): Xaa can be any naturally occurring amino acid
  misc_feature (139)..(140): Xaa can be any naturally occurring amino acid
  misc_feature (163)..(164): Xaa can be any naturally occurring amino acid
  misc_feature (168)..(168): Xaa can be any naturally occurring amino acid
  Coding DNA Sequence Number=SeqID_8061
  Gene Ontology: Mol. function=protein tyrosine/serine/threonine phosphatase activity; Cellular component=mitochondrial inner membrane; Biological process=protein amino acid dephosphorylation
  Homolog annotation: Hit_ID=A7PEE7; Match level="QueryCoverage=88%, HitCoverage=53%, E-value=5e-63, Identity=77%"; Hit description =Chromosome chr11 scaffold_13, whole genome shotgun sequence
MKIEELEDAEGNXDEEENYERQIVRVDAXXALVGAGARILFYPTLLYNVLRNKIETEFXWWDQIDEFLLLGAVPFPKDVPHLKNLGVGGVITLNEPYETLVPSSLYHAHGIDHLVIPTXDYLFAPSFGDISRAVQFIHXXATCGKTTYVHCKAGRGRSTTIVXXYLVXYK

SEQ ID NO: 13387 - protein, 227 aa, Zea mays
  misc_feature (170)..(170): Xaa can be any naturally occurring amino acid
  misc_feature (212)..(212): Xaa can be any naturally occurring amino acid
  Coding DNA Sequence Number=SeqID_8062
  Gene Ontology: Mol. function=DNA binding; Cellular component=nascent polypeptide-associated complex; Biological process=protein transport
  Homolog annotation: Hit_ID=A9PA21; Match level="QueryCoverage=89%, HitCoverage=99%, E-value=3e-47, Identity=58%"; Hit description =Putative uncharacterized protein
  Pfam annotation: Domain name=NAC; Domain location=85-144; Score=63.6; E_value=6.7e-16; Accession=PF01849.8; Description=NAC domain
GFFPAAVAVVLPSYPLPRLRDTHMTAQTAEELATQIERHKLEEHNTEADELVVEDEEVDHEDHDDDDEGDDELHGDVSGSQSNSRSDKKSRKAMLMLGMKPITGVRRVSAKKSKNILFVISMPDVFLMPNSDSYVIFGEAKIEDLLSPLQTQAAEQFKAPDLSQMISNPXTSGAVQDDYDVEVDETAVEAKGIELVMSQASVSRSEDVEVLXASNVDIVTAIMDLTT

SEQ ID NO: 13388 - protein, 237 aa, Zea mays
  misc_feature (80)..(80): Xaa can be any naturally occurring amino acid
  misc_feature (95)..(95): Xaa can be any naturally occurring amino acid
  misc_feature (112)..(112): Xaa can be any naturally occurring amino acid
  misc_feature (141)..(141): Xaa can be any naturally occurring amino acid
  misc_feature (165)..(165): Xaa can be any naturally occurring amino acid
  Coding DNA Sequence Number=SeqID_8063
  Gene Ontology: Mol. function=transferase activity; Cellular component= transcription factor complex; Biological process=positive regulation of transcription, DNA-dependent
  Homolog annotation: Hit_ID=A2WSM9; Match level="QueryCoverage=85%, HitCoverage=22%, E-value=4e-59, Identity=61%"; Hit description =Putative uncharacterized protein
MVTSLPPKEAYLFKGIVESYETKQYKKGFMAANSILKKFPEHGETLSMKGLTLNCMDPTSEANELGLLSLKNDLKRHDWXHVHGLLYRSDIEYRXAIERYSHALRIDPDNIXILPDLTLLQAQKKHLTGYSETKQQLLILXSHHRMNWIGIADAHHSNSNPSNDXQAWRLPRNTLEKVFPPKRSVFDPWTCLFEQKTFFLKNGEFSKKPLLGKTKKKILSFFFSAPGFFLIKKKKAP

SEQ ID NO: 13389 - protein, 223 aa, Zea mays
  misc_feature (187)..(187): Xaa can be any naturally occurring amino acid
  misc_feature (197)..(198): Xaa can be any naturally occurring amino acid
  Coding DNA Sequence Number=SeqID_8064
  Gene Ontology: Mol. function=metal ion transmembrane transporter activity; Cellular component=integral to membrane; Biological process=metal ion transport
  Homolog annotation: Hit_ID=O04089; Match level="QueryCoverage=57%, HitCoverage=34%, E-value=9e-37, Identity=60%"; Hit description=Zinc transporter 4, chloroplast precursor
  Pfam annotation: Domain name=Zip; Domain location=65-222; Score= -54.1; E_value=0.0002; Accession=PF02535.12; Description=ZIP Zinc transporter
  Subcellular localization annotation: CTP_CleavageSite=50; ConfidenceScore=5.22e-01
EASFSFLFPPILPHSHVFFPGSLATAPAPRWKNSSILRKSILLSTIHGIQVSGESELCRDESAAFVLKFVAMASILLAGMAGIAIPLVGKHRRFLRTDGNVFVAAKAFAAGVILATGFVHMLSDASEALESPCLPAFPWHKFPFVGFFAMMAALFTLLLDFVGTQYYERKQGMNRAADELTRVGSSXSGNGDWSSGXXFGEEESGGMHIVGMHAHVAHHRHNH

SEQ ID NO: 13390 - protein, 195 aa, Zea mays
  misc_feature (79)..(80): Xaa can be any naturally occurring amino acid
  misc_feature (96)..(97): Xaa can be any naturally occurring amino acid
  misc_feature (141)..(141): Xaa can be any naturally occurring amino acid
  misc_feature (145)..(146): Xaa can be any naturally occurring amino acid
  misc_feature (164)..(164): Xaa can be any naturally occurring amino acid
  misc_feature (168)..(168): Xaa can be any naturally occurring amino acid
  misc_feature (178)..(182): Xaa can be any naturally occurring amino acid
  misc_feature (191)..(192): Xaa can be any naturally occurring amino acid
  Coding DNA Sequence Number=SeqID_8065
  Gene Ontology: Mol. function=transferase activity, transferring glycosyl groups; Cellular component=chloroplast; Biological process =glucan biosynthetic process
  Homolog annotation: Hit_ID=Q9ZSQ5; Match level="QueryCoverage=100%, HitCoverage=30%, E-value=1e-49, Identity=57%"; Hit description =Granule-bound glycogen (Starch) synthase
  Pfam annotation: Domain name=Glyco_transf_5; Domain location=89-194; Score=-39.7; E_value=2.2e-08; Accession=PF08323.2; Description =Starch synthase catalytic domain
  Subcellular localization annotation: CTP_CleavageSite=59; ConfidenceScore=5.12e-01
MATMTASYVVSRSACLNHHGNMRTEAKGNLPQITLNTQALTYVGLRSLNKLHVRTARARATKTSSSSMASDKTGGSEKXXLGKILCGMNVVFVGAXXGPWSKTGGLGDVLGGLPPALAANGHRVMSVSPRYDQYKDAWDTXMLVXXKVGDKIETVRFFHCYKRXVDRXFVDHPIFLEXXXXXTGSKLYGPXXGQD

SEQ ID NO: 13391 - protein, 118 aa, Zea mays
  Coding DNA Sequence Number=SeqID_8066
  Gene Ontology: Mol. function=intramolecular transferase activity, phosphotransferases; Cellular component=cytoplasm; Biological process=carbohydrate metabolic process
  Homolog annotation: Hit_ID=Q9SM60; Match level="QueryCoverage=100%, HitCoverage=20%, E-value=7e-52, Identity=88%"; Hit description =Phosphoglucomutase, cytoplasmic
  Pfam annotation: Domain name=PGM_PMM_IV; Domain location=13-107; Score=46.6; E_value=8.7e-11; Accession=PF00408.10; Description =Phosphoglucomutasephosphomannomutase
VKLQSSLSEVNEIVKGVRSDVSNVVSADEFEYKDPVDGSISSHQGIRYLFEDGSLLVFRLSGTGSEGATIRLYIEQYEKDPSKTGRLSHEALAPLVEVALKLPKMQEFTGRSAPTVIT

SEQ ID NO: 13392 - protein, 156 aa, Zea mays
  misc_feature (116)..(116): Xaa can be any naturally occurring amino acid
  Coding DNA Sequence Number=SeqID_8067
  Gene Ontology: Mol. function=nutrient reservoir activity
  Homolog annotation: Hit_ID=P04700; Match level="QueryCoverage=92%, HitCoverage=54%, E-value=7e-25, Identity=48%"; Hit description=Zein -alpha PZ22.1/22A1 precursor
  Pfam annotation: Domain name=Zein; Domain location=1-156; Score=38.5; E_value=2.4e-08; Accession=PF01559.7; Description=Zein seed storage protein
SAIITQFLPPVTSMGFEHPSVQAYRLQLALAASALQQSIAQLQHQSLAHLTIQPIATQQQQHCLPSLSHLAVVTLVAYLQQHVRASKSPVLATVAASQQQQQLQQYMPAFSELAMXRPAVFFEQLSSRAALCGQCSIQYVQQQMSATDLYKLKLIS

SEQ ID NO: 13393 - protein, 170 aa, Zea mays
  Coding DNA Sequence Number=SeqID_8068
  Gene Ontology: Mol. function=transposase activity; Biological process= transposition, DNA-mediated
  Homolog annotation: Hit_ID=A4JRY1; Match level="QueryCoverage=98%, HitCoverage=16%, E-value=3e-80, Identity=84%"; Hit description =Transposase Tn3 family protein
STSPVRTLLNALDAVLENESLHREWIDADVDVSFAAPRWRKLVRRSHGEGSPTNRRYLELCVLSYMAEELRVGDLCVSGSDAYADYRDNLLPWGQCEQQLVEYCEKLGIPTTGPEFVRHLRKWLADAASKLDEELPCKREHVVIDRNGEPILRKTVAKEIPASAIALQVD

SEQ ID NO: 13394 - protein, 202 aa, Zea mays
  misc_feature (37)..(37): Xaa can be any naturally occurring amino acid
  misc_feature (104)..(104): Xaa can be any naturally occurring amino acid
  misc_feature (147)..(147): Xaa can be any naturally occurring amino acid
  misc_feature (196)..(196): Xaa can be any naturally occurring amino acid
  Coding DNA Sequence Number=SeqID_8069
  Gene Ontology: Mol. function=protein serine/threonine kinase activity; Cellular component=plasma membrane; Biological process =protein amino acid phosphorylation
  Homolog annotation: Hit_ID=P93520; Match level="QueryCoverage=100%, HitCoverage=32%, E-value=7e-72, Identity=72%"; Hit description =Calcium/calmodulin-dependent protein kinase homolog|CaM kinase homolog|MCK1 protein
GARGTEEDATAIHFFFLVRAVSCWHVQEPPHGDWKPXNSLLTTREESTAMKTIDFGRAQSITPNERLNDTAGRAYYGAPEDLHRSYRMEAHIRRIGVITYILLXGRRTFWARTESGILRAVLRADPNTDDAPWASLSGEAKDFEKRXLNKAYRKRMTADQALTHPWLRDEQRQIPLDILIFRLVKQYLRATPLKRXALKALS

SEQ ID NO: 13395 - protein, 209 aa, Zea mays
  misc_feature (44)..(45): Xaa can be any naturally occurring amino acid
  misc_feature (123)..(124): Xaa can be any naturally occurring amino acid
  misc_feature (150)..(152): Xaa can be any naturally occurring amino acid
  misc_feature (159)..(160): Xaa can be any naturally occurring amino acid
  misc_feature (173)..(173): Xaa can be any naturally occurring amino acid
  misc_feature (177)..(177): Xaa can be any naturally occurring amino acid
  misc_feature (184)..(184): Xaa can be any naturally occurring amino acid
  misc_feature (188)..(189): Xaa can be any naturally occurring amino acid
  misc_feature (201)..(202): Xaa can be any naturally occurring amino acid
  misc_feature (206)..(208): Xaa can be any naturally occurring amino acid
  Coding DNA Sequence Number=SeqID_8070
  Gene Ontology: Mol. function=structural constituent of ribosome; Cellular component=ribonucleoprotein complex; Biological process =translation
  Homolog annotation: Hit_ID=Q9SPB3; Match level="QueryCoverage=100%, HitCoverage=95%, E-value=1e-102, Identity=86%"; Hit description=60S ribosomal protein L10
  Pfam annotation: Domain name=Ribosomal_L16; Domain location=5-167; Score=182.2; E_value=1.3e-51; Accession=PF00252.8; Description =Ribosomal protein L16
MGRRPARCYRQIKNKPYPKSRFCRGVPDPKIRIYDVGMKKKGVXXFPLCVHLVSWEKENVSSEALEAARIACNKYMSKFAGKDAFHLRVRVHPFHVLRINKMLSCAGADRLQTGMRGAFGKPXXTCARVAIGQVLLSVRCKDSNSHHAQXXXRRAKFKXXGRQKIIVSRKWGXTKFXRTDYLKXKSQXXIMPDGVHAKLLXXHGPXXXR

SEQ ID NO: 13396 - protein, 581 aa, Zea mays
  misc_feature (18)..(18): Xaa can be any naturally occurring amino acid
  misc_feature (45)..(45): Xaa can be any naturally occurring amino acid
  misc_feature (66)..(66): Xaa can be any naturally occurring amino acid
  misc_feature (80)..(80): Xaa can be any naturally occurring amino acid
  misc_feature (109)..(109): Xaa can be any naturally occurring amino acid
  misc_feature (255)..(255): Xaa can be any naturally occurring amino acid
  misc_feature (372)..(372): Xaa can be any naturally occurring amino acid
  misc_feature (386)..(386): Xaa can be any naturally occurring amino acid
  misc_feature (496)..(496): Xaa can be any naturally occurring amino acid
  misc_feature (512)..(514): Xaa can be any naturally occurring amino acid
  Coding DNA Sequence Number=SeqID_8071
  Subcellular localization annotation: CTP_CleavageSite=20; ConfidenceScore=5.67e-01
ASPRLASPLLPLSPPPTXPSPSHLFSFLHPVVLLPHHYSLSSLSXSLTSALHRQSPPATPRVLSSXSLPAFPSPPPPLSXPLSRPFTPLLLPLISSLAPLAYLLLSPLXSLSPSHSVLSLLHSPFFLTLAPSPPSPPHSLSQLSSLISLHSTFRLRHTYPPLHTPISSSSLSPSPLLPVPLSPILPPPPPPPLPLSSPFPYSHLSPPPLPPSSSRPLSSSPPICPPPFSPATPPLLSSSPPPSRSPPLLVLNPPXPPPLFSPPSPSSLPPSPLIPSPLSLSPPPPTTFHPSPRAPLLPPSLLLLPSSPSSLLPHAPPVPPLPFLSPPLPPPSSLSPPLPPSLPPLLPPLPPLPSPPPPPSPTPFFLYSPPPXLPPPSSSLPLPPPXPPPSPSLFSLLTSIFSFFFSPPTPSSLSPPPLPPPPPPTPSLLSFFPLPPPPSSPPPPPPPSPPPSPPLSPPPPLPLPPHPPPPPPLLSPPPPPIPLPPPLFSRTQTNNXPPPPPPSLLPPPSSPXXXPPPLFFFAQYFFFLPPSPPPFPPTPPSLSPLPPSPPLLSPSPPLPSPSPPPPPPPPAPPPPPPPPPL

SEQ ID NO: 13397 - protein, 211 aa, Zea mays
  misc_feature (18)..(18): Xaa can be any naturally occurring amino acid
  misc_feature (35)..(35): Xaa can be any naturally occurring amino acid
  misc_feature (40)..(40): Xaa can be any naturally occurring amino acid
  misc_feature (88)..(89): Xaa can be any naturally occurring amino acid
  misc_feature (116)..(116): Xaa can be any naturally occurring amino acid
  misc_feature (158)..(158): Xaa can be any naturally occurring amino acid
  misc_feature (160)..(161): Xaa can be any naturally occurring amino acid
  misc_feature (181)..(181): Xaa can be any naturally occurring amino acid
  misc_feature (194)..(194): Xaa can be any naturally occurring amino acid
  misc_feature (198)..(198): Xaa can be any naturally occurring amino acid
  misc_feature (203)..(204): Xaa can be any naturally occurring amino acid
  misc_feature (207)..(207): Xaa can be any naturally occurring amino acid
  misc_feature (209)..(210): Xaa can be any naturally occurring amino acid
  Coding DNA Sequence Number=SeqID_8073
  Gene Ontology: Mol. function=glycine hydroxymethyltransferase activity; Cellular component=phagocytic vesicle; Biological process =one-carbon compound metabolic process
  Homolog annotation: Hit_ID=O23254; Match level="QueryCoverage=97%, HitCoverage=43%, E-value=1e-101, Identity=85%"; Hit description =Serine hydroxymethyltransferase
  Pfam annotation: Domain name=SHMT; Domain location=12-211; Score =132.0; E_value=1.7e-36; Accession=PF00464.10; Description=Serine hydroxymethyltransferase
MDPVSLWGNTPLATVDPXIHDLIEKEKRRQCRGIXLIASXNFTSFAVIEALGSALTNKYSEGMPGNRYYGGNEFIDQIENLCRSRALXXFHLDPTKWGVNVQPYSGSPANFAAYTXVLQPHDRIMGLDLPSGGHLTHGYYTSGGKKISATSIYFESLXYXXNSSTGYIDYDRLEEKALDFXPRLIICGGSAYPXDWDXARFRXXADXCXXL

SEQ ID NO: 13398 - protein, 140 aa, Zea mays
  misc_feature (23)..(23): Xaa can be any naturally occurring amino acid
  misc_feature (52)..(52): Xaa can be any naturally occurring amino acid
  misc_feature (76)..(76): Xaa can be any naturally occurring amino acid
  Coding DNA Sequence Number=SeqID_8074
  Gene Ontology: Mol. function=indole-3-glycerol-phosphate synthase activity; Cellular component=chloroplast; Biological process =tryptophan metabolic process
  Homolog annotation: Hit_ID=Q6K306; Match level="QueryCoverage=99%, HitCoverage=36%, E-value=2e-48, Identity=67%"; Hit description =Putative indole-3-glycerol phosphate synthase
  Pfam annotation: Domain name=IGPS; Domain location=1-140; Score= -62.4; E_value=4.5e-07; Accession=PF00218.12; Description=Indole-3 -glycerol phosphate synthase
LAPPPMDFFCSLHATYLRNCVQXLVAEVNKASPNKDLLNYHYNLFEIARTYXKNSASCLTILTDKKHFQLSFENLXTARSSGVNCPLLCKEFVINAWQIYYARSKGADAVLLIAAVLPDIDITYFLRVCKSLGMTALVEV

SEQ ID NO: 13399 - protein, 254 aa, Zea mays
  Coding DNA Sequence Number=SeqID_8075
  Gene Ontology: Mol. function=signal transducer activity; Cellular component=integral to membrane; Biological process=cellulose biosynthetic process
  Homolog annotation: Hit_ID=A6TB76; Match level="QueryCoverage=100%, HitCoverage=45%, E-value=1e-45, Identity=39%"; Hit description =Putative uncharacterized protein yedQ
  Pfam annotation: Domain name=GGDEF; Domain location=117-254; Score =156.7; E_value=6.4e-44; Accession=PF00990.12; Description=GGDEF domain
QGKLVLEDRALNEITRLPAPHDVALTPAQRGQLMQAIHQQPAGTLWLGSQLASWVKLKNVDAWLINVQSLRQGLSQELGRVALFLLGMWLLFVLLLVLAHQVIFRLVRRLEDLSARLAWRANYDGLTRLLNRSAFFDQFIALARRCEQQQQPLAVIQLDIDHFKKVNDSWGHHAGDQALMRVAGVIKHTLRPYDVAGRIGGEEFCIVLPHTTLAEAQGVSERIRSRLAAKTILVNASTTFSVTLSAGVSCSTEQ

SEQ ID NO: 13400 - protein, 240 aa, Zea mays
  Coding DNA Sequence Number=SeqID_8076
  Gene Ontology: Mol. function=RNA-directed DNA polymerase activity; Cellular component=nucleus; Biological process=RNA-dependent DNA replication
  Homolog annotation: Hit_ID=Q53N40; Match level="QueryCoverage=97%, HitCoverage=13%, E-value=2e-76, Identity=57%"; Hit description =Retrotransposon protein, putative, unclassified
  Pfam annotation: Domain name=rve; Domain location=26-169; Score=47.5; E_value=4.7e-11; Accession=PF00665.16; Description=Integrase core domain
MVKSCKACQLHAKRIHTPAQALQMIPPSWPFSVWGVDILGPFPTVVGGYQYLFVAIDKFTKWPEATPVVSSTQGAAVTFLKSIVCRCRIFQEYCEGIGTQLCFAYVAYPRSNGQVERANAQIFIGLKTCTYDCLKKHGANWVSELPSVLWGNRTTPSRATGETPYSLVYRAEACLPPEILLDSPRVQSFDGSMQELLQREDVDPINERRWQAATRNAHGSQALRRYHQWSVHSREPRVGT

SEQ ID NO: 13401 - protein, 224 aa, Zea mays
  misc_feature (199)..(199): Xaa can be any naturally occurring amino acid
  Coding DNA Sequence Number=SeqID_8077
  Homolog annotation: Hit_ID=Q9S728; Match level="QueryCoverage=62%, HitCoverage=46%, E-value=2e-33, Identity=54%"; Hit description =En/Spm-like transposon protein
  Pfam annotation: Domain name=ig; Domain location=15-127; Score=17.4; E_value=0.054; Accession=PF00047.15; Description=Immunoglobulin domain
  Subcellular localization annotation: CTP_CleavageSite=36; ConfidenceScore=5.25e-01
RWGLFLFTSQQLLFSSSVRLRCQACGYLSPWYTWNRASRTSPILTVEFTFEPFSFKSFSFTFITYTSHSTSSYSPSIHNSSYTPSIHTAPCNCGSPLLRHSTFSHFYTFSHLKSLHPHSGGYYSCRTSRISVVVTSASCIVDTGTCIIGGSPPSSIIDTGSHGTRFICISFPSISGTCDYWRIRLTLIWGFIGWWGTVXGAFGTISICSSISGFDHHMILFQAI

SEQ ID NO: 13402 - protein, 204 aa, Zea mays
  misc_feature (52)..(52): Xaa can be any naturally occurring amino acid
  misc_feature (61)..(61): Xaa can be any naturally occurring amino acid
  misc_feature (78)..(78): Xaa can be any naturally occurring amino acid
  misc_feature (144)..(144): Xaa can be any naturally occurring amino acid
  misc_feature (172)..(172): Xaa can be any naturally occurring amino acid
  misc_feature (186)..(186): Xaa can be any naturally occurring amino acid
  Coding DNA Sequence Number=SeqID_8078
  Gene Ontology: Mol. function=translation initiation factor activity; Biological process=translational initiation
  Homolog annotation: Hit_ID=O24473; Match level="QueryCoverage=90%, HitCoverage=67%, E-value=5e-43, Identity=53%"; Hit description =Eukaryotic translation initiation factor 2 subunit beta
HLVFQTPSSEYRPRYSATWIDHQQADKNEEVPELAPFDPTINRNKNSVLIPXSSDDVDILXEKTDSLTGNESIEPSFXGVKKKKKKHVGLDSSLMEIGDDYVTGDDRVIEDGEGEGIVLAGAAATRYPWEGTDLDYKYEDLLDXVFDILRENNPDLDGDRRTTVMTPPLVLXGDRTKKTAFVNFMXLCQTLHRHQSMWMMFLLA

SEQ ID NO: 13403 - protein, 178 aa, Zea mays
  misc_feature (48)..(48): Xaa can be any naturally occurring amino acid
  misc_feature (119)..(119): Xaa can be any naturally occurring amino acid
  misc_feature (154)..(154): Xaa can be any naturally occurring amino acid
  Coding DNA Sequence Number=SeqID_8079
  Gene Ontology: Mol. function=catalase activity; Cellular component =glyoxysome; Biological process=response to oxidative stress
  Homolog annotation: Hit_ID=Q7XYE2; Match level="QueryCoverage=99%, HitCoverage=66%, E-value=2e-56, Identity=61%"; Hit description =Catalase isozyme
  Pfam annotation: Domain name=Catalase; Domain location=5-178; Score= -127.2; E_value=3.7e-10; Accession=PF00199.9; Description=Catalase
CGFWTIKSSAAVWKNYYGVYVLKGGLIMLEDYHLVLDLAEIHIQWMPXSVEYECRNCAYAFFYVAHDVYHIKCADSLRARGRKTSGIGRFSTAEHDRGGAETFGDPRAFAVKFYTREGXFDIACNNMPVFFIRDVMKFPDMLHAFKPNPKTNLXENWRIVDFFSSHPESLHMFTFLFD

SEQ ID NO: 13404 - protein, 113 aa, Zea mays
  Coding DNA Sequence Number=SeqID_8080
  Gene Ontology: Mol. function=nucleic acid binding; Cellular component= cytoplasm; Biological process=regulation of transcription, DNA -dependent
  Homolog annotation: Hit_ID=Q461N2; Match level="QueryCoverage=91%, HitCoverage=5%, E-value=6e-51, Identity=94%"; Hit description =Ciprofibrate bound protein p240 isoform PRIC320-2
KFGPGLFFKSLGHGKKDEKIKGFIWDLITPTEDGQTRELQNHLGLSSPVPRGRKGKKVKTQTSSFDIQKAEWLRKYNPEQLLQDECYKKHIKHHCNKVLLRVRMLYYLKQEVI

SEQ ID NO: 13405 - protein, 201 aa, Zea mays
  misc_feature (71)..(71): Xaa can be any naturally occurring amino acid
  misc_feature (112)..(112): Xaa can be any naturally occurring amino acid
  misc_feature (117)..(117): Xaa can be any naturally occurring amino acid
  Coding DNA Sequence Number=SeqID_8081
  Gene Ontology: Cellular component=integral to membrane
  Homolog annotation: Hit_ID=Q10PI5; Match level="QueryCoverage=99%, HitCoverage=49%, E-value=3e-71, Identity=67%"; Hit description =Haemolysin-III related family protein, expressed
MAATAAEEMDRMVQAECQEGKQGMRKRKRHGLAEYRALPAYLRDNQYIHRHYRCESSLPQVLLSAFSIHNXPSTALDVDLIGFFLFLALTIYTATRAPNAIDIRSLQHLPDXLRNAXDIHKIQAELVSCLPTVPHFSHLQKLQDELHTSWNSMEGHPSLSRWHLLELLAHCLPHRFTHPHETSMSVLQSMKADLASLIARN

SEQ ID NO: 13406 - protein, 535 aa, Zea mays
  misc_feature (1)..(1): Xaa can be any naturally occurring amino acid
  misc_feature (5)..(5): Xaa can be any naturally occurring amino acid
  misc_feature (8)..(8): Xaa can be any naturally occurring amino acid
  misc_feature (10)..(10): Xaa can be any naturally occurring amino acid
  misc_feature (14)..(14): Xaa can be any naturally occurring amino acid
  misc_feature (17)..(17): Xaa can be any naturally occurring amino acid
  misc_feature (19)..(19): Xaa can be any naturally occurring amino acid
  misc_feature (22)..(22): Xaa can be any naturally occurring amino acid
  misc_feature (27)..(27): Xaa can be any naturally occurring amino acid
  misc_feature (32)..(32): Xaa can be any naturally occurring amino acid
  misc_feature (35)..(35): Xaa can be any naturally occurring amino acid
  misc_feature (37)..(37): Xaa can be any naturally occurring amino acid
  misc_feature (40)..(41): Xaa can be any naturally occurring amino acid
  misc_feature (45)..(45): Xaa can be any naturally occurring amino acid
  misc_feature (47)..(47): Xaa can be any naturally occurring amino acid
  misc_feature (51)..(51): Xaa can be any naturally occurring amino acid
  misc_feature (56)..(56): Xaa can be any naturally occurring amino acid
  misc_feature (59)..(60): Xaa can be any naturally occurring amino acid
  misc_feature (64)..(64): Xaa can be any naturally occurring amino acid
  misc_feature (67)..(67): Xaa can be any naturally occurring amino acid
  misc_feature (69)..(69): Xaa can be any naturally occurring amino acid
  misc_feature (71)..(71): Xaa can be any naturally occurring amino acid
  misc_feature (73)..(73): Xaa can be any naturally occurring amino acid
  misc_feature (75)..(75): Xaa can be any naturally occurring amino acid
  misc_feature (77)..(77): Xaa can be any naturally occurring amino acid
  misc_feature (79)..(81): Xaa can be any naturally occurring amino acid
  misc_feature (88)..(88): Xaa can be any naturally occurring amino acid
  misc_feature (93)..(93): Xaa can be any naturally occurring amino acid
  misc_feature (99)..(99): Xaa can be any naturally occurring amino acid
  misc_feature (104)..(104): Xaa can be any naturally occurring amino acid
  misc_feature (107)..(108): Xaa can be any naturally occurring amino acid
  misc_feature (111)..(112): Xaa can be any naturally occurring amino acid
  misc_feature (114)..(116): Xaa can be any naturally occurring amino acid
  misc_feature (120)..(121): Xaa can be any naturally occurring amino acid
  misc_feature (127)..(127): Xaa can be any naturally occurring amino acid
  misc_feature (133)..(133): Xaa can be any naturally occurring amino acid
  misc_feature (135)..(135): Xaa can be any naturally occurring amino acid
  misc_feature (144)..(144): Xaa can be any naturally occurring amino acid
  misc_feature (149)..(149): Xaa can be any naturally occurring amino acid
  misc_feature (154)..(155): Xaa can be any naturally occurring amino acid
  misc_feature (157)..(157): Xaa can be any naturally occurring amino acid
  misc_feature (160)..(162): Xaa can be any naturally occurring amino acid
  misc_feature (169)..(170): Xaa can be any naturally occurring amino acid
  misc_feature (178)..(180): Xaa can be any naturally occurring amino acid
  misc_feature (186)..(186): Xaa can be any naturally occurring amino acid
  misc_feature (188)..(189): Xaa can be any naturally occurring amino acid
  misc_feature (195)..(198): Xaa can be any naturally occurring amino acid
  misc_feature (202)..(203): Xaa can be any naturally occurring amino acid
  misc_feature (208)..(208): Xaa can be any naturally occurring amino acid
  misc_feature (222)..(222): Xaa can be any naturally occurring amino acid
  misc_feature (228)..(228): Xaa can be any naturally occurring amino acid
  misc_feature (243)..(244): Xaa can be any naturally occurring amino acid
  misc_feature (248)..(248): Xaa can be any naturally occurring amino acid
  misc_feature (260)..(260): Xaa can be any naturally occurring amino acid
  misc_feature (265)..(266): Xaa can be any naturally occurring amino acid
  misc_feature (275)..(275): Xaa can be any naturally occurring amino acid
  misc_feature (279)..(279): Xaa can be any naturally occurring amino acid
  misc_feature (281)..(281): Xaa can be any naturally occurring amino acid
  misc_feature (286)..(286): Xaa can be any naturally occurring amino acid
  misc_feature (291)..(291): Xaa can be any naturally occurring amino acid
  misc_feature (295)..(295): Xaa can be any naturally occurring amino acid
  misc_feature (301)..(301): Xaa can be any naturally occurring amino acid
  misc_feature (311)..(311): Xaa can be any naturally occurring amino acid
  misc_feature (313)..(313): Xaa can be any naturally occurring amino acid
  misc_feature (316)..(316): Xaa can be any naturally occurring amino acid
  misc_feature (319)..(319): Xaa can be any naturally occurring amino acid
  misc_feature (322)..(322): Xaa can be any naturally occurring amino acid
  misc_feature (330)..(330): Xaa can be any naturally occurring amino acid
  misc_feature (332)..(332): Xaa can be any naturally occurring amino acid
  misc_feature (338)..(338): Xaa can be any naturally occurring amino acid
  misc_feature (340)..(340): Xaa can be any naturally occurring amino acid
  misc_feature (344)..(344): Xaa can be any naturally occurring amino acid
  misc_feature (368)..(368): Xaa can be any naturally occurring amino acid
  misc_feature (377)..(377): Xaa can be any naturally occurring amino acid
  misc_feature (387)..(387): Xaa can be any naturally occurring amino acid
  misc_feature (430)..(430): Xaa can be any naturally occurring amino acid
  misc_feature (452)..(452): Xaa can be any naturally occurring amino acid
  misc_feature (460)..(460): Xaa can be any naturally occurring amino acid
  misc_feature (472)..(472): Xaa can be any naturally occurring amino acid
  misc_feature (479)..(479): Xaa can be any naturally occurring amino acid
  misc_feature (484)..(484): Xaa can be any naturally occurring amino acid
  misc_feature (511)..(511): Xaa can be any naturally occurring amino acid
  misc_feature (527)..(527): Xaa can be any naturally occurring amino acid
  misc_feature (530)..(530): Xaa can be any naturally occurring amino acid
  Coding DNA Sequence Number=SeqID_8082
XLHTXPPXTXTLTXHTXHXTPXQQHQXNTTQXPSXPXHHXXTHYXIXSLTXLSLYXYTXXTTSXQQXHXYXQXHXSXTXXXHPARYHXHTSSXTPSPLXHTHLXHTXXQSXXHXXXTHTXXHTLHTXPHTSPXQXQKHIMHTHXINITXQHSAXXHXITXXXQHTHTHXXHTHHTYSXXXHTHLTXTXXHTHPTXXXXHINXXHTHHXHNTQITHTPHLHIXHTHTTXHTHNHTPHTPHHNQXXHTHXTTHSHTNIYTHXNTTHXXHIHTRSSTXQHTXLXTTTHXHTHTXHTQXHTHTTXHHSQQHTNTXHXSTXTHXTLXSHTQTYTXIXTPHQHXHXHYTXQTHTNHTIHNTTTSHHHNHTHAHXTQTHHPHTXHKHNTTTHHXTPHTHLSPHTHIQHTHITSHTLHNTHHHTHTHTHSTHHTTQHXTSHTHHTQHTLHTHNPRNHTHXHTTHKQHXHTHNKTHITHTXTHTLTHXNTHTXNTHTHTLYSHTHHHTFSSSTHTTTTNXIHNPSHIHHTHTPLPXHHXTPHTP

SEQ ID NO: 13407 - protein, 165 aa, Zea mays
  misc_feature (61)..(61): Xaa can be any naturally occurring amino acid
  misc_feature (104)..(104): Xaa can be any naturally occurring amino acid
  misc_feature (136)..(138): Xaa can be any naturally occurring amino acid
  misc_feature (145)..(145): Xaa can be any naturally occurring amino acid
  Coding DNA Sequence Number=SeqID_8084
  Gene Ontology: Mol. function=UTP:glucose-1-phosphate uridylyltransfera se activity; Cellular component=cytoplasm; Biological process =metabolic process
  Homolog annotation: Hit_ID=Q43772; Match level="QueryCoverage=95%, HitCoverage=33%, E-value=1e-63, Identity=77%"; Hit description=UTP- -glucose-1-phosphate uridylyltransferase
  Pfam annotation: Domain name=UDPGP; Domain location=3-165; Score= -143.7; E_value=7.2e-08; Accession=PF01704.8; Description=UTP- -glucose-1-phosphate uridylyltransferase
GDPRGRCNTHDDTQKIGEKYSNSNIEIHTFNQSQYPRIGTEDFLPLPSKGKSGKEGGDPPXHGDVCPSLSNRGKLDILLGQGKGGVFVANSDNWGAIGDIKILXHLINNQNEYCVGVTPKTLGEVKGRALISYGGXXXLLGIAQXPEEHVNEFKSIERCKIFNTN

SEQ ID NO: 13408 - protein, 120 aa, Zea mays
  Coding DNA Sequence Number=SeqID_8085
  Gene Ontology: Mol. function=nutrient reservoir activity
  Homolog annotation: Hit_ID=Q41884; Match level="QueryCoverage=87%, HitCoverage=43%, E-value=8e-26, Identity=60%"; Hit description=Zein
  Subcellular localization annotation: CTP_CleavageSite=94; ConfidenceScore=5.54e-01
LQQQTSTPFSQIVCAYFQQQQFFPFNQFAALNPLCFFQQQILLPFGQLVTTSPASFLTQQQLLPFYQQFVANPATLLQLQQLLPFVQLALTNPAAFYQQHIIGGASFRLLSCHSIMKFFG

SEQ ID NO: 13409 - protein, 156 aa, Zea mays
  Coding DNA Sequence Number=SeqID_8086
TMQKREQQLIHWQGTQLAHIRHDRGSADSSGGGGARAGRARGAAGGGWPGGCLALPAVGVAGGEGGRGLGPGGWGGGGAAGAGRAGGGGWRAWGAGGVVCARGGGGRRGGGRAGGGWGGAGAGGGAGGGGWVGGGGVGGGWGGGGGEVAGGWKGGG

SEQ ID NO: 13410 - protein, 330 aa, Zea mays
  misc_feature (2)..(2): Xaa can be any naturally occurring amino acid
  misc_feature (10)..(11): Xaa can be any naturally occurring amino acid
  misc_feature (30)..(31): Xaa can be any naturally occurring amino acid
  misc_feature (60)..(61): Xaa can be any naturally occurring amino acid
  misc_feature (81)..(82): Xaa can be any naturally occurring amino acid
  misc_feature (92)..(92): Xaa can be any naturally occurring amino acid
  misc_feature (95)..(95): Xaa can be any naturally occurring amino acid
  misc_feature (97)..(97): Xaa can be any naturally occurring amino acid
  misc_feature (99)..(99): Xaa can be any naturally occurring amino acid
  misc_feature (106)..(106): Xaa can be any naturally occurring amino acid
  misc_feature (118)..(118): Xaa can be any naturally occurring amino acid
  misc_feature (123)..(123): Xaa can be any naturally occurring amino acid
  misc_feature (144)..(144): Xaa can be any naturally occurring amino acid
  misc_feature (160)..(160): Xaa can be any naturally occurring amino acid
  misc_feature (166)..(168): Xaa can be any naturally occurring amino acid
  misc_feature (173)..(173): Xaa can be any naturally occurring amino acid
  misc_feature (176)..(176): Xaa can be any naturally occurring amino acid
  misc_feature (181)..(181): Xaa can be any naturally occurring amino acid
  misc_feature (183)..(183): Xaa can be any naturally occurring amino acid
  misc_feature (186)..(186): Xaa can be any naturally occurring amino acid
  misc_feature (188)..(188): Xaa can be any naturally occurring amino acid
  misc_feature (190)..(190): Xaa can be any naturally occurring amino acid
  misc_feature (197)..(197): Xaa can be any naturally occurring amino acid
  misc_feature (211)..(211): Xaa can be any naturally occurring amino acid
  misc_feature (222)..(222): Xaa can be any naturally occurring amino acid
  misc_feature (232)..(232): Xaa can be any naturally occurring amino acid
  misc_feature (242)..(242): Xaa can be any naturally occurring amino acid
  misc_feature (259)..(259): Xaa can be any naturally occurring amino acid
  misc_feature (261)..(262): Xaa can be any naturally occurring amino acid
  misc_feature (269)..(269): Xaa can be any naturally occurring amino acid
  misc_feature (271)..(271): Xaa can be any naturally occurring amino acid
  misc_feature (279)..(279): Xaa can be any naturally occurring amino acid
  misc_feature (283)..(284): Xaa can be any naturally occurring amino acid
  misc_feature (291)..(292): Xaa can be any naturally occurring amino acid
  misc_feature (302)..(302): Xaa can be any naturally occurring amino acid
  misc_feature (304)..(304): Xaa can be any naturally occurring amino acid
  misc_feature (309)..(309): Xaa can be any naturally occurring amino acid
  misc_feature (318)..(318): Xaa can be any naturally occurring amino acid
  misc_feature (321)..(321): Xaa can be any naturally occurring amino acid
  Coding DNA Sequence Number=SeqID_8088
  Gene Ontology: Mol. function=methyltransferase activity; Cellular component=ribonucleoprotein complex; Biological process=porphyrin biosynthetic process
  Homolog annotation: Hit_ID=P93628; Match level="QueryCoverage=89%, HitCoverage=67%, E-value=1e-113, Identity=74%"; Hit description =Uroporphyrinogen III methyltransferase
  Pfam annotation: Domain name=TP_methylase; Domain location=27-240; Score=182.7; E_value=9.3e-52; Accession=PF00590.10; Description =Tetrapyrrole (CorrinPorphyrin) Methylases
QXLLDALRAXXRRGAEGGGGGGRGPGSIAXXGTGPGDPELLTLKAVRAIEAADLVLYDRXXSNDVLDLVGEGSRLRYVGKXXGYHSRTQEEXHEXLXNXAEAGSNXVRLKGGDPLVFXRGGEXMDFLQQQGIKVEIIPGITSSXGIAAELGIPLTHRGVXTSFRFXXXHSRNXGTXPLYVXGXAAXPXTXLVVYMGXSTLPSLAPKLMKHXLPPETPSVAVXPGTTPQQRMXFALLKDLVDXVKSADLVSPTLIIIGKXVXXSPFWVEXSXHDALKIEXSYSXXPEDNTFXXILVIGQYILXYXISQIXAVRVGVIYXMQXRFDLVYTFR

SEQ ID NO: 13411 - protein, 182 aa, Zea mays
  Coding DNA Sequence Number=SeqID_8089
  Gene Ontology: Mol. function=binding
  Homolog annotation: Hit_ID=Q53RB7; Match level="QueryCoverage=99%, HitCoverage=16%, E-value=2e-69, Identity=78%"; Hit description=HEAT repeat, putative
PSELFVYPALSPTTQYSLRALLVWADIAPALPKTECTKLCDAADELASFLMPANAWADLLSFLYKSIDSTSSPPGLQESALNILARLASHLAASFPNLHGLLHAALSHPSSADVRVAGLNAAISLIQSLPSAAARDQFQDLLPAMMRALAESLNCGNEGSTQKALQIMNELAGAHPRLLRPQ

SEQ ID NO: 13412 - protein, 132 aa, Zea mays
  Coding DNA Sequence Number=SeqID_8090
  Gene Ontology: Mol. function=electron carrier activity; Cellular component=cytoplasm; Biological process=cell redox homeostasis
  Homolog annotation: Hit_ID=A7QWX8; Match level="QueryCoverage=100%, HitCoverage=100%, E-value=7e-59, Identity=81%"; Hit description =Chromosome chr13 scaffold_210, whole genome shotgun sequence
  Pfam annotation: Domain name=DUF953; Domain location=9-131; Score =176.8; E_value=5.4e-50; Accession=PF06110.2; Description=Eukaryotic protein of unknown function (DUF953)
MPLKIFDTTVATFDGVFEKFRSEATQNKANLILFLAYKDPSTSLSWCPDCVRAEPVIYKKLEASPGDIALLRAYVGDRPTWRNPQHPWRVEPRFKLTGVPTLIRWGNDAVKGRLEDHEAHLEHKIEALVADK

SEQ ID NO: 13413 - protein, 195 aa, Zea mays
  misc_feature (162)..(162): Xaa can be any naturally occurring amino acid
  Coding DNA Sequence Number=SeqID_8091
  Homolog annotation: Hit_ID=A4GXB9; Match level="QueryCoverage=84%, HitCoverage=64%, E-value=1e-43, Identity=54%"; Hit description =Putative uncharacterized protein
KRPCLRFLTVSLQPFCHRNIPYGGSLLRRIKVSVADNAPLLPEASRNSVKNVIVWTRQGSPLRAILVISVGAVTSVALTGMLVFMLFFLAATINAIVISLLMSLAAAGGFLALFFAFATAIYIGALSVAIFVISVTTFWTIVAILITTGWIGFFYTVWLITXKSFGFAKHSLCVTGSAISTYTTARHARHLKHKD

SEQ ID NO: 13414 - protein, 228 aa, Zea mays
  misc_feature (20)..(20): Xaa can be any naturally occurring amino acid
  misc_feature (30)..(30): Xaa can be any naturally occurring amino acid
  misc_feature (41)..(41): Xaa can be any naturally occurring amino acid
  misc_feature (52)..(52): Xaa can be any naturally occurring amino acid
  misc_feature (61)..(61): Xaa can be any naturally occurring amino acid
  Coding DNA Sequence Number=SeqID_8092
  Gene Ontology: Mol. function=sodium ion transmembrane transporter activity; Cellular component=integral to membrane; Biological process=vesicle-mediated transport
  Homolog annotation: Hit_ID=Q7S4G8; Match level="QueryCoverage=85%, HitCoverage=12%, E-value=1e-52, Identity=58%"; Hit description =Putative uncharacterized protein
QTPVDTFHKALGRPCGKAQXDFNTSSKGDXRVAQIRIGINXLPYDLLPRVVXAVPTGYSEXENDAENAWNELIARMKSLILQSFDLRVTQYEDDIKERDSQRNLPGWNFCTFFILKEGLAQGFESVGLVEDALVGYDELSLGLDLACAEQAESPTALALPQYTEELRTAAEKAARDAFGDIGDKEETVDLQSQPVDSQLQALAISATRKPCSPGDPLSGRVESFHTTL

SEQ ID NO: 13415 - protein, 174 aa, Zea mays
  Coding DNA Sequence Number=SeqID_8093
  Gene Ontology: Mol. function=nucleic acid binding; Cellular component= intracellular; Biological process=transport
  Homolog annotation: Hit_ID=UPI000069E541; Match level="QueryCoverage =81%, HitCoverage=14%, E-value=6e-72, Identity=92%"; Hit description =Probable ATP-dependent RNA helicase DHX36 (EC 3.6.1.-) (DEAH box protein 36) ...
  Homolog annotation: Hit description=(MLE-like protein 1) (RNA helicase associated with AU-rich element ARE).
  Pfam annotation: Domain name=HA2; Domain location=109-173; Score =59.2; E_value=1.4e-14; Accession=PF04408.13; Description=Helicase associated domain (HA2)
WVSHANAKQRKGRAGRVQPGHCYHLYNSLRVSHANAKQRKGRAGRVQPGHCYHLYNSLRDSLLDDYQLPEIVRMPLEELCLQIKILKLGGIGSFLSKLMDIPAREAICLAINHLMELNALDNHEELTPLGFHLARLPVEPHIGKMILFGALFCCLDPVLTIAASLSFKDPFLFS

SEQ ID NO: 13416 - protein, 157 aa, Zea mays
  misc_feature (77)..(77): Xaa can be any naturally occurring amino acid
  misc_feature (89)..(89): Xaa can be any naturally occurring amino acid
  misc_feature (120)..(120): Xaa can be any naturally occurring amino acid
  misc_feature (124)..(125): Xaa can be any naturally occurring amino acid
  misc_feature (139)..(139): Xaa can be any naturally occurring amino acid
  misc_feature (147)..(147): Xaa can be any naturally occurring amino acid
  Coding DNA Sequence Number=SeqID_8094
  Gene Ontology: Mol. function=DNA-directed RNA polymerase activity; Cellular component=chloroplast; Biological process=transcription, DNA-dependent
  Homolog annotation: Hit_ID=P46819; Match level="QueryCoverage=85%, HitCoverage=19%, E-value=3e-51, Identity=70%"; Hit description=DNA -directed RNA polymerase subunit beta'
RYDKRSWDINYLILFYTSPGLRNVRAPNRRGNGEILGKVTKPYTFHFKTSKPEMDGLFCEKIFGPIKSGICPCGNYXVIGDKKNEPKFXEQCGVNFVDSRVRKYQMGYIKLPCTVPHEWXLKRXXSHIANLLNKPLKEXERLVYCDXWFDQTAYDSE

SEQ ID NO: 13417 - protein, 126 aa, Zea mays
  misc_feature (51)..(52): Xaa can be any naturally occurring amino acid
  misc_feature (99)..(100): Xaa can be any naturally occurring amino acid
  misc_feature (102)..(103): Xaa can be any naturally occurring amino acid
  misc_feature (115)..(115): Xaa can be any naturally occurring amino acid
  misc_feature (124)..(124): Xaa can be any naturally occurring amino acid
  Coding DNA Sequence Number=SeqID_8095
  Gene Ontology: Mol. function=glucose-1-phosphate adenylyltransferase activity; Cellular component=chloroplast; Biological process =glycogen biosynthetic process
  Homolog annotation: Hit_ID=Q9AT07; Match level="QueryCoverage=99%, HitCoverage=24%, E-value=5e-47, Identity=75%"; Hit description =Glucose-1-phosphate adenylyltransferase
KLIKQDRIIHVAEKPRGSDLKAMHVDTTLLGLSPEEAKKHPYIASMGVYVXXTETLLKLLRWSCSSCNDFGSEIIPSAGREHIVQAYLFNDYWEDIGTXXSXXDANLALSEHPPXFQFYDPKTXFL

SEQ ID NO: 13418 - protein, 161 aa, Zea mays
  misc_feature (50)..(52): Xaa can be any naturally occurring amino acid
  Coding DNA Sequence Number=SeqID_8096
  Gene Ontology: Mol. function=small conjugating protein ligase activity; Cellular component=proteasome complex; Biological process =regulation of protein metabolic process
  Homolog annotation: Hit_ID=A5AEM8; Match level="QueryCoverage=90%, HitCoverage=90%, E-value=6e-70, Identity=82%"; Hit description =Ubiquitin carrier protein
  Pfam annotation: Domain name=UEV; Domain location=20-134; Score= -39.5; E_value=0.057; Accession=PF05743.3; Description=UEV domain
  Pfam annotation: Domain name=UQ_con; Domain location=19-158; Score =174.6; E_value=2.5e-49; Accession=PF00179.16; Description=Ubiquitin -conjugating enzyme
  Pfam module annotation: Pfam domain module=UEV::UQ_con; Domain location=20-134::19-158
MTSSSAAARKALSKIACNRLQKELVEWQVNPPTGFKHKVTDNLQRWVIEXXXAPGTLYSNDTYQLQVDFPENYPMEAPQVIFLHPAPLHPHIYSNGHICLDILYDSWSPAMTVSSICISILSMLSSSTVKQRPEDNDRYVKNCRNGRSPKETRWWFHDDKV

SEQ ID NO: 13419 - protein, 138 aa, Zea mays
  Coding DNA Sequence Number=SeqID_8097
  Gene Ontology: Mol. function=transcription factor activity; Cellular component=intracellular; Biological process=regulation of transcription, DNA-dependent
  Homolog annotation: Hit_ID=Q6D0N9; Match level="QueryCoverage=97%, HitCoverage=49%, E-value=8e-45, Identity=65%"; Hit description=DeoR -family transcriptional regulator
  Pfam annotation: Domain name=DeoR; Domain location=1-117; Score=29.0; E_value=2.1e-08; Accession=PF00455.13; Description=Bacterial regulatory proteins, deoR family
QLRVITADLHIALFLSEFKQIETTIIGGRIDDSSQSCIGEHGRRLLRSVNPDIAFVSCNSWSIERGITTPTEDKAGLKMDLLANARRRILLADSSKYGSWSLYCAAPIDSLTDVVTDSRLDEAVCRDLRERGIGLQVD

SEQ ID NO: 13420 - protein, 115 aa, Zea mays
  Coding DNA Sequence Number=SeqID_8098
  Gene Ontology: Cellular component=respiratory chain complex I; Biological process=photorespiration
  Homolog annotation: Hit_ID=Q96SA0; Match level="QueryCoverage=86%, HitCoverage=87%, E-value=5e-42, Identity=79%"; Hit description =Putative uncharacterized protein
  Pfam annotation: Domain name=Complex1_LYR; Domain location=13-78; Score=72.2; E_value=1.7e-18; Accession=PF05347.5; Description =Complex 1 protein (LYR family)
MASTAAYLARRAAQKERVRILYRRALKDTLNCAVHRHLFYDDASNLRGRFEQNRHVEDFDTIDRLIEDAEATYNKWRHPDPYIVPWAPGGSKFTRNPPPPPGIEIIYDYGREDNN

SEQ ID NO: 13421 - protein, 141 aa, Zea mays
  Coding DNA Sequence Number=SeqID_8099
  Gene Ontology: Biological process=response to biotic stimulus
  Homolog annotation: Hit_ID=A7P032; Match level="QueryCoverage=100%, HitCoverage=72%, E-value=3e-54, Identity=72%"; Hit description =Chromosome chr6 scaffold_3, whole genome shotgun sequence
  Pfam annotation: Domain name=Dirigent; Domain location=1-140; Score =158.0; E_value=2.5e-44; Accession=PF03018.5; Description=Dirigent -like protein
  Subcellular localization annotation: CTP_CleavageSite=13; ConfidenceScore=5.31e-01
FYWHDIVSGRNPSSMAVVPPPLKNSTTAFGLVNMIENPLTLGPQLSSKLVGKAQGFYASTSQSEVDLLMAMNFAITEGKYNGSTITILGRNPVFNKVREMPVIGGSGLFRFARGYAQLRTYWFSPQTKDAIVEYNIYVLHY

SEQ ID NO: 13422 - protein, 119 aa, Zea mays
  misc_feature (30)..(30): Xaa can be any naturally occurring amino acid
  Coding DNA Sequence Number=SeqID_8100
  Homolog annotation: Hit_ID=Q8W0Y1; Match level="QueryCoverage=94%, HitCoverage=15%, E-value=6e-45, Identity=78%"; Hit description =Putative transposase
ARYPCSLSKYAEAWSAPHGAHPSSIFSTYXAMAHKGKATSDVTYNPEDRPEEYSNPAVYSHLSEYTAMAQEVHGPDYDPRTEDIDRDVLMRVRGCKRHERYWITDRAIESSCTPTLSQV

SEQ ID NO: 13423 - protein, 280 aa, Zea mays
  misc_feature (8)..(8): Xaa can be any naturally occurring amino acid
  misc_feature (236)..(237): Xaa can be any naturally occurring amino acid
  misc_feature (240)..(241): Xaa can be any naturally occurring amino acid
  misc_feature (246)..(247): Xaa can be any naturally occurring amino acid
  misc_feature (251)..(251): Xaa can be any naturally occurring amino acid
  misc_feature (263)..(265): Xaa can be any naturally occurring amino acid
  misc_feature (268)..(272): Xaa can be any naturally occurring amino acid
  misc_feature (275)..(275): Xaa can be any naturally occurring amino acid
  misc_feature (278)..(280): Xaa can be any naturally occurring amino acid
  Coding DNA Sequence Number=SeqID_8101
  Gene Ontology: Mol. function=hydrolase activity, acting on acid anhydrides, in phosphorus-containing anhydrides; Cellular component =cytoplasm; Biological process=transcription
  Homolog annotation: Hit_ID=Q2H3S0; Match level="QueryCoverage=96%, HitCoverage=20%, E-value=1e-106, Identity=75%"; Hit description =Putative uncharacterized protein
  Pfam annotation: Domain name=DEAD; Domain location=3-146; Score=93.5; E_value=6.8e-25; Accession=PF00270.19; Description=DEADDEAH box helicase
GYRAPPRXDSVFVAAHTSAGKTVVAEYAIALAARHMTKAIYTSPIKALSNQKFRDFRQTFDEVGILTGDVQINPEASCLIMTTEILRSMLYRGADLIRDVEFVIFDEVHYVNDFERGVVWEEVIIMLPQHISLILLSATVPNTYEFASWVGRTKQKDIYVISTPKRPVPLEHYLWAGKDTYKIVDSEKKFVEKGWKDAHQAVTRKDTAKAADTTVATRGGNPRGGQRGGPQRGGPXXGGXXGQQRXXNQQXGRGGPPRASHAXXXMGXXXXXGGXTSXXX

SEQ ID NO: 13424 - protein, 165 aa, Zea mays
  Coding DNA Sequence Number=SeqID_8102
  Homolog annotation: Hit_ID=B0BMY6; Match level="QueryCoverage=87%, HitCoverage=41%, E-value=6e-70, Identity=86%"; Hit description =Putative uncharacterized protein
WVTGCPGGSAVKNPPANAGDWASLAELRTAEARQMACDELVTNEEEEYSLYEAVKFLMLNRAIELYDDKEKGREVPFFSVLLFARDTSSDPGQLLRNHLNQVGHTGGLEQVEMFLLAYAVRHTIQVYRLSKYGTEEFVTVYPTDAPRDWPVVTLIAEDDRHYNVP

SEQ ID NO: 13425 - protein, 158 aa, Zea mays
  misc_feature (83)..(83): Xaa can be any naturally occurring amino acid
  misc_feature (111)..(111): Xaa can be any naturally occurring amino acid
  Coding DNA Sequence Number=SeqID_8103
  Gene Ontology: Mol. function=nucleoside-triphosphatase activity; Cellular component=intracellular; Biological process=chlorophyll biosynthetic process
  Homolog annotation: Hit_ID=Q9ABT0; Match level="QueryCoverage=87%, HitCoverage=25%, E-value=1e-47, Identity=67%"; Hit description=ComM protein
  Pfam annotation: Domain name=Mg_chelatase; Domain location=72-158; Score=-20.5; E_value=1e-12; Accession=PF01078.11; Description =Magnesium chelatase, subunit ChlI
PAASALLAVLAANALVLFLICPEANGAVAGWAGEARMLAPRSMIVVVNHVRCYQVMAAPKPGPMVDGDQVPDLRDVRGQDSAXLALEIAVAGGHNLLFIGPPGSDKSMLAXQRLPGLLPTMSPAELLETSMVHSVAGLIDRGALTRSRPFRAPDHSDS

SEQ ID NO: 13426 - protein, 191 aa, Zea mays
  misc_feature (11)..(11): Xaa can be any naturally occurring amino acid
  misc_feature (179)..(179): Xaa can be any naturally occurring amino acid
  Coding DNA Sequence Number=SeqID_8104
  Gene Ontology: Mol. function=hydrolase activity, hydrolyzing O -glycosyl compounds; Cellular component=endoplasmic reticulum; Biological process=carbohydrate metabolic process
  Homolog annotation: Hit_ID=A2XDZ1; Match level="QueryCoverage=95%, HitCoverage=21%, E-value=1e-101, Identity=89%"; Hit description =Putative uncharacterized protein
  Pfam annotation: Domain name=Glyco_hydro_31; Domain location=1-191; Score=-110.6; E_value=2.5e-08; Accession=PF01055.16; Description =Glycosyl hydrolases family 31
VLNSYDVLWLXIEHTDGKRYFTWDRSTFPDPEEMQRKIADKGRKMVTIVDPHMKRDSGYHIHEEATAKGYYVKDASGKDYDGWCWPGSSSYPDMLNPEIRDWWADKFSYQNYKGSTPTLYIWNDMNEPSVFNGPEVTMPRDALHNGDVEHRELHNAYGYYFHMATSDGLLKRGEGKDRXFVLSRAFFCWKS

SEQ ID NO: 13427 - protein, 204 aa, Zea mays
  misc_feature (140)..(140): Xaa can be any naturally occurring amino acid
  misc_feature (143)..(144): Xaa can be any naturally occurring amino acid
  Coding DNA Sequence Number=SeqID_7034
  Gene Ontology: Mol. function=magnesium protoporphyrin IX methyltransferase activity; Cellular component=chloroplast; Biological process=chlorophyll biosynthetic process
  Homolog annotation: Hit_ID=Q9SW18; Match level="QueryCoverage=100%, HitCoverage=64%, E-value=2e-57, Identity=62%"; Hit description =Magnesium-protoporphyrin IX methyltransferase-like protein
  Subcellular localization annotation: CTP_CleavageSite=40; ConfidenceScore=5.89e-01
MTIAPSLLSSSSSASQFLPRFPTAARFNVAASRSRAVTVVAASVTDLSSVDSTTIAVLGGGSVAALATIVSLTDPERRRKLQAEEVGGGDKEVVREYFNSTGFERWRKIYGETDEVNRVQKDIRIGHAKTVEKTMLMLTXRRXXLAGVTVCDAGCGTGLLSIPLAKEGAIVSASDISAAMVAEAEMKAKQQLASENLPRFGVND

SEQ ID NO: 13428 - protein, 93 aa, Zea mays
  Coding DNA Sequence Number=SeqID_7035
CQALIALLGRLLRNVTRVIDSSTLTNLISKISHSMLLLGGASQPIKRRVFVLPPLRWDCSDSANQEMYALPRCKGCDWSETQAARFLSIDSIQ

SEQ ID NO: 13429 - protein, 199 aa, Zea mays
  misc_feature (194)..(194): Xaa can be any naturally occurring amino acid
  Coding DNA Sequence Number=SeqID_7037
  Gene Ontology: Mol. function=oxidoreductase activity, acting on single donors with incorporation of molecular oxygen, incorporation of two atoms of oxygen; Cellular component=cytoplasm; Biological process=flavonoid biosynthetic process
  Homolog annotation: Hit_ID=Q8RWN6; Match level="QueryCoverage=100%, HitCoverage=58%, E-value=2e-96, Identity=82%"; Hit description =Strong similarity to naringenin 3-dioxygenase
METASRVEAVTKGGLPVVPSQYIQPPEARPNLHHAGDAAPIPTIDLSNSDSAKESIGEACRNWGAFHVVNHGVPIHLLDRMKALGLSFFQDCPLEDKLQYACDSTSAASEGYGSRMLLGAEGDVVLDWRDYFDHHTFPLSRRNPSHWPLRPPDYRQVVEEYGNEMKKLAQKLLGIISESLSLPCSSIEEAVGEXYQNFT

SEQ ID NO: 13430 - protein, 132 aa, Zea mays
  misc_feature (34)..(34): Xaa can be any naturally occurring amino acid
  misc_feature (45)..(45): Xaa can be any naturally occurring amino acid
  Coding DNA Sequence Number=SeqID_7038
  Homolog annotation: Hit_ID=A8MQD8; Match level="QueryCoverage=93%, HitCoverage=65%, E-value=1e-51, Identity=83%"; Hit description =Uncharacterized protein At5g10780.2
  Pfam annotation: Domain name=DUF1077; Domain location=22-133; Score =66.1; E_value=1.2e-16; Accession=PF06417.2; Description=Protein of unknown function (DUF1077)
MDKGKAVMGAGRRWAVDFSDQSTGPSSRDILDPXPGFSRAPPEQXDDSATSRQKKDAEASWKLQKAWEVPQSPFKNLGMMGFRMWMAGDTVHLFSIGITFPALWEPLSALQRGGKIFGAFRDNKGGPYYAPN

SEQ ID NO: 13431 - protein, 143 aa, Zea mays
  misc_feature (84)..(84): Xaa can be any naturally occurring amino acid
  misc_feature (91)..(91): Xaa can be any naturally occurring amino acid
  misc_feature (102)..(102): Xaa can be any naturally occurring amino acid
  misc_feature (109)..(109): Xaa can be any naturally occurring amino acid
  Coding DNA Sequence Number=SeqID_7039
  Gene Ontology: Mol. function=structural constituent of ribosome; Cellular component=ribonucleoprotein complex; Biological process =translation
  Homolog annotation: Hit_ID=Q9LX88; Match level="QueryCoverage=84%, HitCoverage=91%, E-value=3e-43, Identity=80%"; Hit description=40S ribosomal protein S15a-4
  Pfam annotation: Domain name=Ribosomal_S8; Domain location=5-122; Score=70.3; E_value=6.4e-18; Accession=PF00410.9; Description =Ribosomal protein S8
MVRISVLNDALKSMFNAEKRGKRQVMIRPSSKVIIKFLIVMQKHGYIGEFEYVDDPPSGGGGVELNGRLNKCGVIRPSFWCWWXEIEGWTXARLLPSRQVGXFGLTTSXAGIMDPEEPRKKWPREIPPFLLLKTSIWGKTSPF

SEQ ID NO: 13432 - protein, 111 aa, Zea mays
  Coding DNA Sequence Number=SeqID_7040
  Gene Ontology: Mol. function=structural constituent of ribosome; Cellular component=ribonucleoprotein complex; Biological process =translation
  Homolog annotation: Hit_ID=Q9LX88; Match level="QueryCoverage=100%, HitCoverage=85%, E-value=1e-55, Identity=97%"; Hit description=40S ribosomal protein S15a-4
  Pfam annotation: Domain name=Ribosomal_S8; Domain location=5-111; Score=137.5; E_value=3.8e-38; Accession=PF00410.9; Description =Ribosomal protein S8
MVRISVLNDALKSMFNAEKRGKRQVMIRPSSKVIIKFLIVMQKHGYIGEFEYVDDHRSGKIVVELNGRLNKCGVISPRFDVGVKEIEGWTARLLPSRQFGYIVLTTSAGIM

SEQ ID NO: 13433 - protein, 164 aa, Zea mays
  Coding DNA Sequence Number=SeqID_7041
  Gene Ontology: Mol. function=serine-type endopeptidase activity; Cellular component=intracellular; Biological process=protein modification process
  Homolog annotation: Hit_ID=Q0WRN6; Match level="QueryCoverage=100%, HitCoverage=99%, E-value=3e-86, Identity=91%"; Hit description =Polyubiquitin 4 UBQ4
  Pfam annotation: Domain name=ubiquitin; Domain location=6-74; Score =138.0; E_value=2.6e-38; Accession=PF00240.13; Description=Ubiquitin family
  Pfam annotation: Domain name=ubiquitin; Domain location=82-150; Score= 138.0; E_value=2.6e-38; Accession=PF00240.13; Description=Ubiquitin family
  Pfam module annotation: Pfam domain module=ubiquitin::ubiquitin; Domain location=6-74::82-150
MQIFVKTLTGKTITLEVESSDTIDNVKAKIQDKEGIPPDQQRLIFAGKQLEDGRTLADYNIQKESTLHLVLRLRGGMQIFVKTLTGKTITLEVESSDTIDNVKAKIQDKEGIPPDQQRLIFAGKQLEDGRTLADYNIQKESTLHLVLRLRGGMQIFVKTLTGKT

SEQ ID NO: 13434 - protein, 174 aa, Zea mays
  misc_feature (84)..(84): Xaa can be any naturally occurring amino acid
  misc_feature (107)..(108): Xaa can be any naturally occurring amino acid
  misc_feature (112)..(112): Xaa can be any naturally occurring amino acid
  misc_feature (120)..(120): Xaa can be any naturally occurring amino acid
  misc_feature (137)..(137): Xaa can be any naturally occurring amino acid
  misc_feature (151)..(151): Xaa can be any naturally occurring amino acid
  Coding DNA Sequence Number=SeqID_7042
  Gene Ontology: Mol. function=DNA binding; Cellular component=nucleus
  Homolog annotation: Hit_ID=Q8LCG6; Match level="QueryCoverage=98%, HitCoverage=91%, E-value=9e-36, Identity=47%"; Hit description =Putative uncharacterized protein
  Pfam annotation: Domain name=MBD; Domain location=25-144; Score=57.3; E_value=5.4e-14; Accession=PF01429.10; Description=Methyl-CpG binding domain
MSNGTDHAQPPSEKLSLPMESRPKKRASPGDNWAPPPGWTTEEKVRTSGTKAGLVDKFYYEPVTNRKFRSRTEVMYYLEHGTPXKKNKKSVNNSDTKSQRSEDPRSXXRLTXSTQSLTKXPPPQPTPTPMPLDFDFXDGPQKVIWNGTNGXTEAWGPPLGVQHSELSAKWERPS

SEQ ID NO: 13435 - protein, 174 aa, Zea mays; identical to SEQ ID NO: 13434
  misc_feature (84)..(84): Xaa can be any naturally occurring amino acid
  misc_feature (107)..(108): Xaa can be any naturally occurring amino acid
  misc_feature (112)..(112): Xaa can be any naturally occurring amino acid
  misc_feature (120)..(120): Xaa can be any naturally occurring amino acid
  misc_feature (137)..(137): Xaa can be any naturally occurring amino acid
  misc_feature (151)..(151): Xaa can be any naturally occurring amino acid
  Coding DNA Sequence Number=SeqID_7043
  Gene Ontology: Mol. function=DNA binding; Cellular component=nucleus
  Homolog annotation: Hit_ID=Q8LCG6; Match level="QueryCoverage=98%, HitCoverage=91%, E-value=9e-36, Identity=47%"; Hit description =Putative uncharacterized protein
  Pfam annotation: Domain name=MBD; Domain location=25-144; Score=57.3; E_value=5.4e-14; Accession=PF01429.10; Description=Methyl-CpG binding domain

SEQ ID NO: 13436 - protein, 181 aa, Zea mays
  misc_feature (167)..(167): Xaa can be any naturally occurring amino acid
  Coding DNA Sequence Number=SeqID_7044
  Gene Ontology: Mol. function=calcium ion binding; Biological process =response to abscisic acid stimulus
  Homolog annotation: Hit_ID=O22788; Match level="QueryCoverage=98%, HitCoverage=75%, E-value=3e-76, Identity=77%"; Hit description=RD20 protein
  Pfam annotation: Domain name=Caleosin; Domain location=54-180; Score =213.1; E_value=6.4e-61; Accession=PF05042.4; Description=Caleosin related protein
MGDAPETFATTAPLAPVTSERKVRSDLEEKLPKPYLARALVAPDTEHPNGTEGHDSKGMSVMQQHGAFFDQNGDGIVYPWETYAGFRDLGFNPISSVFWSLIINLAFSYVTLPSWLPSPLLPVYIDYIHEAEHGSDSSTYDTEGRYVPFYLENIFSKYALTAANKLXFKEMWNLTEVNECH

SEQ ID NO: 13437 - protein, 183 aa, Zea mays
  misc_feature (65)..(65): Xaa can be any naturally occurring amino acid
  misc_feature (67)..(68): Xaa can be any naturally occurring amino acid
  misc_feature (117)..(117): Xaa can be any naturally occurring amino acid
  misc_feature (141)..(141): Xaa can be any naturally occurring amino acid
  misc_feature (183)..(183): Xaa can be any naturally occurring amino acid
  Coding DNA Sequence Number=SeqID_7045
  Gene Ontology: Mol. function=nucleotidyltransferase activity; Biological process=RNA processing
  Homolog annotation: Hit_ID=Q3E7W1; Match level="QueryCoverage=99%, HitCoverage=32%, E-value=3e-79, Identity=84%"; Hit description =Uncharacterized protein At1g28090.1
  Pfam annotation: Domain name=PolyA_pol; Domain location=113-183; Score=-30.8; E_value=0.0019; Accession=PF01743.10; Description=Poly A polymerase family
  Subcellular localization annotation: CTP_CleavageSite=40; ConfidenceScore=5.13e-01
TTMAYGSFAISSKALVFCRPCYGGSIRDLPFSLRTPTIGRCGCVGAIAAPRNLVKPRKEESTEKXDXXGGRESKDKTTPWKKLDANEFGIQRSMIPESTRMVLNKLRKKGFQVYLVXGGCVRDLILDRIPKDFDVITSAEXLKEVRQVFPRCQIVGRRFPICHVYVDDIIIEVSRFSTSARTX

SEQ ID NO: 13438 - protein, 157 aa, Zea mays
  Coding DNA Sequence Number=SeqID_7046
  Homolog annotation: Hit_ID=Q9LV66; Match level="QueryCoverage=96%, HitCoverage=91%, E-value=6e-21, Identity=40%"; Hit description =Uncharacterized protein At5g48480
  Pfam annotation: Domain name=Glyoxalase; Domain location=33-152; Score=14.9; E_value=0.0041; Accession=PF00903.15; Description =GlyoxalaseBleomycin resistance proteinDioxygenase superfamily
MAQEDVAAAAAAANGATTAVEKSVTFTAYKPQLIVEAQKVGDAVAFYKAVFGAVETGRSLYPKRKADQELPHLVSSELELAGTTVVVSDVSVNSGPDAKTGTMPAILETDDVEAAVAKAVAAGAVKEEEEEEVSEGGVKGKVTDPFGFTWIFVAPAK

SEQ ID NO: 13439 - protein, 157 aa, Zea mays; identical to SEQ ID NO: 13438
  Coding DNA Sequence Number=SeqID_7047
  Homolog annotation: Hit_ID=Q9LV66; Match level="QueryCoverage=96%, HitCoverage=91%, E-value=6e-21, Identity=40%"; Hit description =Uncharacterized protein At5g48480
  Pfam annotation: Domain name=Glyoxalase; Domain location=33-152; Score=14.9; E_value=0.0041; Accession=PF00903.15; Description =GlyoxalaseBleomycin resistance proteinDioxygenase superfamily

SEQ ID NO: 13440 - protein, 184 aa, Zea mays
  misc_feature (162)..(162): Xaa can be any naturally occurring amino acid
  misc_feature (176)..(176): Xaa can be any naturally occurring amino acid
  Coding DNA Sequence Number=SeqID_7048
  Homolog annotation: Hit_ID=Q9SJ74; Match level="QueryCoverage=91%, HitCoverage=41%, E-value=2e-68, Identity=76%"; Hit description =Expressed protein
  Pfam annotation: Domain name=DUF568; Domain location=85-184; Score =118.8; E_value=1.7e-32; Accession=PF04526.4; Description=Protein of unknown function (DUF568)
  Subcellular localization annotation: CTP_CleavageSite=18; ConfidenceScore=5.20e-01
MATTLTLTLFLLFSTKLPASVSGKCTTTTSTKTFEKCISLPTQQASIAWTYHPHNATLDLCFFGTFISPSGWVGWGINPDTPSQMTGSRVLIAFPDPNSGQLILLPYVLDSSVKLQKGPLLSRPLDLLRLSSSSASLYGGNMATIRNGASVQIYASVKLSSXNTKIHHVWEQRSLXVQGYSPTI

SEQ ID NO: 13441 - protein, 192 aa, Zea mays
  misc_feature (119)..(119): Xaa can be any naturally occurring amino acid
  misc_feature (143)..(143): Xaa can be any naturally occurring amino acid
  Coding DNA Sequence Number=SeqID_7049
  Gene Ontology: Mol. function=oxidoreductase activity, acting on NADH or NADPH; Cellular component=mitochondrial respiratory chain; Biological process=electron transport
  Homolog annotation: Hit_ID=Q42599; Match level="QueryCoverage=100%, HitCoverage=85%, E-value=4e-98, Identity=93%"; Hit description=NADH dehydrogenase [ubiquinone] iron-sulfur protein 8, mitochondrial precursor
  Pfam annotation: Domain name=Fer4; Domain location=117-140; Score =25.8; E_value=3.3e-05; Accession=PF00037.17; Description=4Fe-4S binding domain
  Pfam annotation: Domain name=Fer4; Domain location=157-180; Score =37.3; E_value=5.5e-08; Accession=PF00037.17; Description=4Fe-4S binding domain
  Pfam module annotation: Pfam domain module=Fer4::Fer4; Domain location=117-140::157-180
MASMLARRSLNTLRTRHLVLSGKALQGSHLSGLQSRAISYGSKKDDEEEEQLAKEISKDWNTVFERSINTLFLTEMVRGLSLTLKYFFDPKVTINYPFEKGPLSPRFRGEHALRRYPTXGEERCIACKLCEAGCPAQAITIEXAEEREDGSRRTTRYDIDMTKCIYCGFCQEACPVDAIAEGPNFEFPTETH

SEQ ID NO: 13442 - protein, 119 aa, Zea mays
  Coding DNA Sequence Number=SeqID_7050
  Gene Ontology: Mol. function=metal ion binding; Biological process =cell redox homeostasis
  Homolog annotation: Hit_ID=O22197; Match level="QueryCoverage=93%, HitCoverage=34%, E-value=1e-38, Identity=70%"; Hit description =Expressed protein
MSSGRNTHWCHRCQRAVRLHAPDPVCSYCGGGFVEELVTPQAIANPFDIFRSHRDVAERDPAFDLMDAFSAFMRNRLADRELRRKNITSRPESFPGLASFVGSLGGQVPYREQCSPNFS

SEQ ID NO: 13443 - protein, 166 aa, Zea mays
  misc_feature (145)..(145): Xaa can be any naturally occurring amino acid
  misc_feature (166)..(166): Xaa can be any naturally occurring amino acid
  Coding DNA Sequence Number=SeqID_7051
  Gene Ontology: Mol. function=protein binding; Cellular component =integral to membrane; Biological process=vesicle-mediated transport
  Homolog annotation: Hit_ID=A7QM95; Match level="QueryCoverage=91%, HitCoverage=58%, E-value=5e-71, Identity=84%"; Hit description =Chromosome chr5 scaffold_124, whole genome shotgun sequence
  Pfam annotation: Domain name=YIF1; Domain location=34-166; Score =78.4; E_value=2.3e-20; Accession=PF03878.6; Description=YIF1
  Subcellular localization annotation: CTP_CleavageSite=36; ConfidenceScore=5.33e-01
MYNNMGPQPGMAMPQANPQPNPFGNAFSGPGSGLIRSGLGAYGEKIFGSSSEYVQSNITRYFSDPQYYFQVNDQYVRNKLKIVLLPFLHRGHWTRISEPVGGRLSYKPPIYDINAPDLYIPLMAFGTYVVLAGLSLGLYGEVFSXKALNWLFVKGMVGWFLRVMLX

SEQ ID NO: 13444 - protein, 184 aa, Zea mays
  misc_feature (153)..(153): Xaa can be any naturally occurring amino acid
  misc_feature (163)..(163): Xaa can be any naturally occurring amino acid
  Coding DNA Sequence Number=SeqID_7052
  Gene Ontology: Mol. function=structural constituent of ribosome; Cellular component=ribonucleoprotein complex; Biological process =translation
  Homolog annotation: Hit_ID=Q9SFU1; Match level="QueryCoverage=99%, HitCoverage=88%, E-value=2e-82, Identity=81%"; Hit description=60S ribosomal protein L13a-1
  Pfam annotation: Domain name=Ribosomal_L13; Domain location=11-127; Score=157.4; E_value=3.8e-44; Accession=PF00572.8; Description =Ribosomal protein L13
MVSGSGLCSKRVVVDARHHMLGCLASIIAKELLNGQRVVVVRCEEICLSGGLVRQKMKYMRFMRKRMNTKPSHGPIHFRAPSKIFWRTVRGMIPHKTKRGAAALARLKVFEGVPPPYDKVKRMVIPDALKVLRLQAGHKYCLLGRLSSEGGWXHYDTIKELEXQRKGKSQAVYERKKQLSKLRT

SEQ ID NO: 13445 - protein, 119 aa, Zea mays
  misc_feature (87)..(87): Xaa can be any naturally occurring amino acid
  Coding DNA Sequence Number=SeqID_7053
LLLLLDLIAIFAGRGLVISMGRGNSCGGGQSSLNYLFGGGGDAPPPKPAPAPAPAPSAEPTKATAPAPAPVAVTATALTTATTSVEXCRGQQADPLLVSKLLVNNYARAEGQKHRKLPH

SEQ ID NO: 13446 - protein, 157 aa, Zea mays
  misc_feature (86)..(86): Xaa can be any naturally occurring amino acid
  misc_feature (99)..(99): Xaa can be any naturally occurring amino acid
  misc_feature (120)..(120): Xaa can be any naturally occurring amino acid
  misc_feature (147)..(147): Xaa can be any naturally occurring amino acid
  Coding DNA Sequence Number=SeqID_7055
  Gene Ontology: Mol. function=receptor activity; Cellular component =chloroplast thylakoid membrane
  Homolog annotation: Hit_ID=B0FPA3; Match level="QueryCoverage=96%, HitCoverage=39%, E-value=2e-34, Identity=56%"; Hit description =Extracellular Ca2+ sensing receptor
  Subcellular localization annotation: CTP_CleavageSite=55; ConfidenceScore=5.82e-01
MAMAEMAMKSSVTTAKLTLPPSSSSCKKRARQVSVALPTTTSISLLSVFSSPPPEAKAAVSISKDQIVSSLTEVEKTINQVQETGXSSVFDATQRVFQXVVGDALKPALDTALPIAKQAXGKRPLKLASPAFSEASKKAQEAWQGSXGIDAEPVFNA

SEQ ID NO: 13447 - protein, 157 aa, Zea mays; identical to SEQ ID NO: 13446
  misc_feature (86)..(86): Xaa can be any naturally occurring amino acid
  misc_feature (99)..(99): Xaa can be any naturally occurring amino acid
  misc_feature (120)..(120): Xaa can be any naturally occurring amino acid
  misc_feature (147)..(147): Xaa can be any naturally occurring amino acid
  Coding DNA Sequence Number=SeqID_7056
  Gene Ontology: Mol. function=receptor activity; Cellular component =chloroplast thylakoid membrane
  Homolog annotation: Hit_ID=B0FPA3; Match level="QueryCoverage=96%, HitCoverage=39%, E-value=2e-34, Identity=56%"; Hit description =Extracellular Ca2+ sensing receptor
  Subcellular localization annotation: CTP_CleavageSite=55; ConfidenceScore=5.82e-01

SEQ ID NO: 13448 - protein, 180 aa, Zea mays
  Coding DNA Sequence Number=SeqID_7057
  Gene Ontology: Mol. function=structural constituent of ribosome; Cellular component=ribonucleoprotein complex; Biological process =translation
  Homolog annotation: Hit_ID=P49691; Match level="QueryCoverage=100%, HitCoverage=44%, E-value=1e-93, Identity=93%"; Hit description=60S ribosomal protein L4-2
  Pfam annotation: Domain name=Ribosomal_L4; Domain location=25-179; Score=166.2; E_value=8.9e-47; Accession=PF00573.12; Description =Ribosomal protein L4L1 family
MATSAARPLVTIQGLDGDMTTDQSSTIVLPDVMTAPVRPDIVSFVHAQISNNSRQPYAVSKKAGHQTSAESWGTGRAVSRIPRVPGGGTHRAGQAAFGNMCRGGRMFAPTKIWRKWHRRVNVNMKRHAIVSAIAATAVPALVMARGHKIENVPEMPLVVSDSAEGVEKTAAAIKVLKQIG

SEQ ID NO: 13449 - protein, 126 aa, Zea mays
  Coding DNA Sequence Number=SeqID_7058
  Gene Ontology: Mol. function=structural constituent of ribosome; Cellular component=ribonucleoprotein complex; Biological process =translation
  Homolog annotation: Hit_ID=Q9S9P1; Match level="QueryCoverage=64%, HitCoverage=56%, E-value=8e-34, Identity=87%"; Hit description=40S ribosomal protein S12-1
  Pfam annotation: Domain name=Ribosomal_L7Ae; Domain location=28-115; Score=78.2; E_value=2.7e-20; Accession=PF01248.16; Description =Ribosomal protein L7AeL30eS12eGadd45 family
MSGEEAAPAVVPPAAEPAAIPEDMDLLTALELTLRKARAHGGVTRGLHESAKLIEKRVAQLCVLAEDCNQPDYGKLAKALCADHNINLLTVPSAKTLGEWAGLPRMIPRLRKENFWKPPPLGQGLR

SEQ ID NO: 13450 - protein, 205 aa, Zea mays
  misc_feature (173)..(173): Xaa can be any naturally occurring amino acid
  Coding DNA Sequence Number=SeqID_7059
  Gene Ontology: Mol. function=fructose-bisphosphate aldolase activity; Cellular component=mitochondrial envelope; Biological process =metabolic process
  Homolog annotation: Hit_ID=Q9LF98; Match level="QueryCoverage=97%, HitCoverage=55%, E-value=1e-99, Identity=93%"; Hit description =Fructose-bisphosphate aldolase
  Pfam annotation: Domain name=Glycolytic; Domain location=11-204; Score=238.9; E_value=1.1e-68; Accession=PF00274.9; Description =Fructose-bisphosphate aldolase class-I
MSAFTSKFADELIANAAYIGTPGKGILAADESTGTIGKRLASINVENVETNRRALRELLFTAPGALPCLSGVILFEETLYQKSSDGKLFVDILKEGGVLPGIKVDKGTVELAGTNGETTTQGLDGLGERCKKYYEAGARFAKWRAVLKIGENEPSELSIHENAYGLARYAGIXQENGLVPIVEPEILVDGPMTSTWCAAGDRACS

SEQ ID NO: 13451 - protein, 120 aa, Zea mays
  misc_feature (11)..(12): Xaa can be any naturally occurring amino acid
  misc_feature (14)..(14): Xaa can be any naturally occurring amino acid
  misc_feature (17)..(18): Xaa can be any naturally occurring amino acid
  misc_feature (85)..(85): Xaa can be any naturally occurring amino acid
  misc_feature (98)..(98): Xaa can be any naturally occurring amino acid
  Coding DNA Sequence Number=SeqID_7060
  Gene Ontology: Mol. function=fructose-bisphosphate aldolase activity; Cellular component=mitochondrial envelope; Biological process =metabolic process
  Homolog annotation: Hit_ID=Q9LF98; Match level="QueryCoverage=96%, HitCoverage=29%, E-value=3e-34, Identity=73%"; Hit description =Fructose-bisphosphate aldolase
  Pfam annotation: Domain name=Glycolytic; Domain location=20-121; Score=-207.6; E_value=0.033; Accession=PF00274.9; Description =Fructose-bisphosphate aldolase class-I
MSAFTSKFADXXVXSHXXFNAAYIGTPGKGILAADESTGTIGKRLASINVENVETNRRALRELLFTAPGALPCLSGVILVRGNSXTKRAPDGKRFFVXDILEGKGEYSPGIKVDKGYRPS

SEQ ID NO: 13452 - protein, 120 aa, Zea mays; identical to SEQ ID NO: 13451
  misc_feature (11)..(12): Xaa can be any naturally occurring amino acid
  misc_feature (14)..(14): Xaa can be any naturally occurring amino acid
  misc_feature (17)..(18): Xaa can be any naturally occurring amino acid
  misc_feature (85)..(85): Xaa can be any naturally occurring amino acid
  misc_feature (98)..(98): Xaa can be any naturally occurring amino acid
  Coding DNA Sequence Number=SeqID_7061
  Gene Ontology: Mol. function=fructose-bisphosphate aldolase activity; Cellular component=mitochondrial envelope; Biological process =metabolic process
  Homolog annotation: Hit_ID=Q9LF98; Match level="QueryCoverage=96%, HitCoverage=29%, E-value=3e-34, Identity=73%"; Hit description =Fructose-bisphosphate aldolase
  Pfam annotation: Domain name=Glycolytic; Domain location=20-121; Score=-207.6; E_value=0.033; Accession=PF00274.9; Description =Fructose-bisphosphate aldolase class-I

SEQ ID NO: 13453 - protein, 164 aa, Zea mays
  misc_feature (101)..(101): Xaa can be any naturally occurring amino acid
  misc_feature (120)..(120): Xaa can be any naturally occurring amino acid
  misc_feature (128)..(128): Xaa can be any naturally occurring amino acid
  Coding DNA Sequence Number=SeqID_7062
  Gene Ontology: Mol. function=glutamate-ammonia ligase activity; Cellular component=cytoplasm; Biological process=nitrogen compound metabolic process
  Homolog annotation: Hit_ID=Q56WN1; Match level="QueryCoverage=96%, HitCoverage=43%, E-value=7e-56, Identity=68%"; Hit description =Glutamine synthetase cytosolic isozyme 1-1
  Pfam annotation: Domain name=Gln-synt_N; Domain location=17-98; Score= 116.9; E_value=5.9e-32; Accession=PF03951.9; Description=Glutamine synthetase, beta-Grasp domain
MSLLTDLVNLNLSETTDKIIAEYIWVGGSGMDMRSKARTLPGPVSDPSELPKWNYDGSSTGQAPGEDSEVILYPSSHLSKILFRRGNNILVMCDAYTPAGXPFPTNKRHRCRLRAFSHPXMVYLKGPXFGLDQEYTFTSERWDRALLGGPMGGFPAARGEKRIL

SEQ ID NO: 13454 - protein, 180 aa, Zea mays
  Coding DNA Sequence Number=SeqID_7063
  Gene Ontology: Mol. function=structural constituent of ribosome; Cellular component=ribonucleoprotein complex; Biological process =translation
  Homolog annotation: Hit_ID=Q9LXG1; Match level="QueryCoverage=98%, HitCoverage=89%, E-value=8e-94, Identity=96%"; Hit description=40S ribosomal protein S9-1
  Pfam annotation: Domain name=Ribosomal_S4; Domain location=7-108; Score=134.5; E_value=3e-37; Accession=PF00163.9; Description =Ribosomal protein S4S9 N-terminal domain
  Pfam annotation: Domain name=S4; Domain location=109-156; Score=50.4; E_value=6.3e-12; Accession=PF01479.15; Description=S4 domain
  Pfam module annotation: Pfam domain module=Ribosomal_S4::S4; Domain location=7-108::109-156
MVHVCYYRNYGKTFKGPRRPFEKERLDSELKLVGEYGLRNKRELWRVQYSLSRIRNAARDLLTLDEKNPKRIFEGEALLRKMNRYGLLDESQNKLDYVLALTVENFLERRLQTIVFKSGMAKSIHHSRVLIRQRHIRVGKQLVNIPSFMVRLDSQKHIDFALTSPFGWWRPGRVKRRTRS

SEQ ID NO: 13455 - protein, 173 aa, Zea mays
  misc_feature (159)..(159): Xaa can be any naturally occurring amino acid
  Coding DNA Sequence Number=SeqID_7064
  Gene Ontology: Mol. function=protein binding; Cellular component =mitochondrion; Biological process=response to stress
  Homolog annotation: Hit_ID=Q9XI00; Match level="QueryCoverage=100%, HitCoverage=52%, E-value=1e-94, Identity=93%"; Hit description=F-box protein 7
  Pfam annotation: Domain name=F-box; Domain location=57-104; Score =47.2; E_value=5.7e-11; Accession=PF00646.23; Description=F-box domain
MTSDALNIPSELESALRLRTVQYFITKRPWLDLYGVHVRPVAPFGSTSSKPQFDPALIHRSLPDELLFEVFARMLPYDLGRAACVCRKWRYTVRNPVFWRNACLKAWQTAGVIENYRILQSKYDGSWRKMWLLRSRVRTDGIYVSRNTYIRAGIAEWKXTNPVHIVCYFRYIR

SEQ ID NO: 13456 - protein, 96 aa, Zea mays
  Coding DNA Sequence Number=SeqID_7065
  Homolog annotation: Hit_ID=Q9SKS8; Match level="QueryCoverage=98%, HitCoverage=31%, E-value=9e-09, Identity=51%"; Hit description =Putative uncharacterized protein At2g20920
  Subcellular localization annotation: CTP_CleavageSite=62; ConfidenceScore=5.59e-01
MAAAAISAGPNRLISSASDVPPHLLTTKLNPLFFPSGKTQHLWRSSSILLPTPPRCAAPPPRASSRADDSPPFDMSRETALKGYSGAPEGAPFHEY

SEQ ID NO: 13457 - protein, 129 aa, Zea mays
  Coding DNA Sequence Number=SeqID_7066
  Homolog annotation: Hit_ID=Q9SKS8; Match level="QueryCoverage=73%, HitCoverage=31%, E-value=9e-09, Identity=51%"; Hit description =Putative uncharacterized protein At2g20920
TQSDGGTKQKRSHNPSNLIVVLCCVCEAETNREMAAAAISAGPNRLISSASDVPPHLLTTKLNPLFFPSGKTQHLWRSSSILLPTPPRCAAPPPRASSRADDSPPFDMSRETALKGYSGAPEGAPFHEY

SEQ ID NO: 13458 - protein, 165 aa, Zea mays
  misc_feature (106)..(106): Xaa can be any naturally occurring amino acid
  misc_feature (154)..(154): Xaa can be any naturally occurring amino acid
  Coding DNA Sequence Number=SeqID_7067
  Gene Ontology: Mol. function=protein binding; Cellular component =protein complex; Biological process=protein catabolic process
  Homolog annotation: Hit_ID=Q9LT08; Match level="QueryCoverage=98%, HitCoverage=52%, E-value=5e-85, Identity=97%"; Hit description=26S proteasome non-ATPase regulatory subunit 14
  Pfam annotation: Domain name=Mov34; Domain location=25-138; Score =180.7; E_value=3.7e-51; Accession=PF01398.11; Description =Mov34MPNPAD-1 family
MERLQRIFGAGGGLGHASPDSPTLDTSEQVYISSLALLKMLKHGRAGVPMEVMGLMLGEFVDEYTVRVVDVFAMPQSGTGVSVEAVDHVFQTNMLDMLKQTGRPEXVVGWYHSHPGFGCWLSGVDINTQQSFEALNQRAVAVVGDPIQSVRGKXVVIDAFRSITL

SEQ ID NO: 13459 - protein, 195 aa, Zea mays
  misc_feature (89)..(89): Xaa can be any naturally occurring amino acid
  misc_feature (92)..(92): Xaa can be any naturally occurring amino acid
  misc_feature (140)..(140): Xaa can be any naturally occurring amino acid
  Coding DNA Sequence Number=SeqID_7068
  Gene Ontology: Mol. function=oxidoreductase activity; Cellular component=chloroplast; Biological process=cell redox homeostasis
  Homolog annotation: Hit_ID=Q949U7; Match level="QueryCoverage=84%, HitCoverage=70%, E-value=8e-62, Identity=75%"; Hit description =Peroxiredoxin-2E, chloroplast precursor
  Pfam annotation: Domain name=AhpC-TSA; Domain location=82-193; Score =13.2; E_value=0.00012; Accession=PF00578.11; Description=AhpCTSA family
  Pfam annotation: Domain name=Redoxin; Domain location=81-195; Score =62.0; E_value=2e-15; Accession=PF08534.1; Description=Redoxin
  Pfam module annotation: Pfam domain module=AhpC-TSA::Redoxin; Domain location=82-193::81-195
  Subcellular localization annotation: CTP_CleavageSite=77; ConfidenceScore=5.66e-01
EPLNHTLSITQWATSLSVSRLISSSAISVAKPLLSPTSAFTAPISFSRSLAPNLSLKSHTRRASISAVRSFSTTTISASISVGDKLPEXLPXSYLDPATNDVKTVTVSSLTAGKKTILFAVPGAFTPTCSQKHVPGFVSXAGELRSKGVDVIACVSVNAALVMLAWRKDLGIEDEVMLLSDGNGEFTGKLGVELD

SEQ ID NO: 13460 - protein, 193 aa, Zea mays
  Coding DNA Sequence Number=SeqID_7069
  Gene Ontology: Mol. function=threonine endopeptidase activity; Cellular component=proteasome core complex; Biological process =ubiquitin-dependent protein catabolic process
  Homolog annotation: Hit_ID=O81149; Match level="QueryCoverage=100%, HitCoverage=81%, E-value=1e-102, Identity=96%"; Hit description =Proteasome subunit alpha type-5-A
  Pfam annotation: Domain name=Proteasome; Domain location=31-193; Score=178.6; E_value=1.6e-50; Accession=PF00227.16; Description =Proteasome A-type and B-type
MFLTRTEYDRGVNTFSPEGRLFQVEYAIEAIKLGSTAIGVKTKEGVVLAVEKRITSPLLEPSSVEKIMEIDDHIGCAMSGLIADARTLVEHARVETQNHRFSYGEPMTVESTTQALCDLALRFGEGDEESMSRPFGVSLLIAGHDENGPSLYYTDPSGTFWQCNAKAIGSGSKGADSSLPEQFDKDLSLSGTE

SEQ ID NO: 13461 - protein, 160 aa, Zea mays
  Coding DNA Sequence Number=SeqID_7070
  Gene Ontology: Mol. function=protein binding; Cellular component =membrane; Biological process=response to drug
  Homolog annotation: Hit_ID=A7QMK1; Match level="QueryCoverage=88%, HitCoverage=40%, E-value=4e-56, Identity=73%"; Hit description =Chromosome chr19 scaffold_126, whole genome shotgun sequence
  Pfam annotation: Domain name=CDC50; Domain location=65-160; Score= -122.9; E_value=0.00027; Accession=PF03381.6; Description=LEM3 (ligand-effect modulator 3) family  CDC50 family
  Subcellular localization annotation: CTP_CleavageSite=19; ConfidenceScore=5.49e-01
MSSNTASSSAGSGDSSAARKNSKRPKYSKFTQQELPACKPILTPGWVISTFLIVSVIFIPLGVISLFASQDVVEIVDRYDNDCIPAPARTNKVAFIQGAAPKSCNRTLTVTKRMKQPIYVYYQLENFYQNHRRYVKSRSDSQLRSPKFENQISACKPEDD

SEQ ID NO: 13462 - protein, 189 aa, Zea mays
  misc_feature (143)..(143): Xaa can be any naturally occurring amino acid
  misc_feature (167)..(167): Xaa can be any naturally occurring amino acid
  misc_feature (173)..(173): Xaa can be any naturally occurring amino acid
  Coding DNA Sequence Number=SeqID_7071
  Gene Ontology: Mol. function=nucleic acid binding
  Homolog annotation: Hit_ID=Q9M0S2; Match level="QueryCoverage=65%, HitCoverage=66%, E-value=5e-38, Identity=64%"; Hit description =Putative uncharacterized protein AT4g09050
  Pfam annotation: Domain name=RRM_1; Domain location=78-149; Score =50.6; E_value=5.5e-12; Accession=PF00076.12; Description=RNA recognition motif. (a.k.a. RRM, RBD, or
  Subcellular localization annotation: CTP_CleavageSite=68; ConfidenceScore=5.50e-01
MALLRLPPISLQYLGHKSEQKTPNPGVSLTNFSLTWSTPSLSRLHLAKPRNLTSYSFATTQEPILEPSSSEEISKTRLIAQNVPWTSTPEDIRSLFEKSGSVVDVEMSMHKKERNRGLVFIEMASPEEAASALQALESYEYEXGRRLKVAYAKAKKKKTYAPREKPXPVPTFXNLFVANLAFEARAKHL

SEQ ID NO: 13463 - protein, 145 aa, Zea mays
  Coding DNA Sequence Number=SeqID_7072
  Homolog annotation: Hit_ID=Q8L7C3; Match level="QueryCoverage=98%, HitCoverage=100%, E-value=5e-69, Identity=86%"; Hit description =Expressed protein
  Subcellular localization annotation: CTP_CleavageSite=44; ConfidenceScore=5.76e-01
MAATFGTPSTVIGLGGSSVSPIKAKALSSSFLKPTLRAKNALKVAGASGGRFTCFERNWLRRDLNVVGFGLVGWLAPSSIPAINGKSLTGLFFESIGTELAHFPTPPALTSQFWLWLITWHLGLFICLTFGQIGFKGRTEDYFKK

SEQ ID NO: 13464 - protein, 131 aa, Zea mays
  misc_feature (26)..(26): Xaa can be any naturally occurring amino acid
  misc_feature (57)..(57): Xaa can be any naturally occurring amino acid
  misc_feature (66)..(66): Xaa can be any naturally occurring amino acid
  misc_feature (98)..(98): Xaa can be any naturally occurring amino acid
  misc_feature (113)..(113): Xaa can be any naturally occurring amino acid
  Coding DNA Sequence Number=SeqID_7073
  Homolog annotation: Hit_ID=Q9LYG2; Match level="QueryCoverage=100%, HitCoverage=62%, E-value=2e-48, Identity=77%"; Hit description =Putative uncharacterized protein T22P22_70
MALNPQLMPNGMPVPFVNEMFVLVRXGVEFEVDKIPGGHGGHVKAKGVIYLSNIRMXVFVASKPVXNFVAFDMPLLYIHAEKFNQPIFHCNNISGQVXPVVPENEHRALYSNXSFQICFKGKWLGKRLVPL

SEQ ID NO: 13465 - protein, 131 aa, Zea mays; identical to SEQ ID NO: 13464
  misc_feature (26)..(26): Xaa can be any naturally occurring amino acid
  misc_feature (57)..(57): Xaa can be any naturally occurring amino acid
  misc_feature (66)..(66): Xaa can be any naturally occurring amino acid
  misc_feature (98)..(98): Xaa can be any naturally occurring amino acid
  misc_feature (113)..(113): Xaa can be any naturally occurring amino acid
  Coding DNA Sequence Number=SeqID_7074
  Homolog annotation: Hit_ID=Q9LYG2; Match level="QueryCoverage=100%, HitCoverage=62%, E-value=2e-48, Identity=77%"; Hit description =Putative uncharacterized protein T22P22_70

SEQ ID NO: 13466 - protein, 141 aa, Zea mays
  Coding DNA Sequence Number=SeqID_7075
  Subcellular localization annotation: CTP_CleavageSite=9; ConfidenceScore=5.09e-01
PLSLFLFCSRSSPSGVPICFMCSGPLLTISSPPPAHEGAWTERVVNLWNSGEVRLGGRVKLVGFWVKICLVPCHFRSTTNLGVWWRVLSCGDSSVPDLFFIVVFLSSKFGRSGAVARDAFLRLASRRRRLVWLPFRWFLSG

SEQ ID NO: 13467 - protein, 171 aa, Zea mays
  misc_feature (138)..(138): Xaa can be any naturally occurring amino acid
  misc_feature (152)..(152): Xaa can be any naturally occurring amino acid
  Coding DNA Sequence Number=SeqID_7077
  Gene Ontology: Mol. function=hormone activity; Cellular component=cis- Golgi network; Biological process=ER to Golgi vesicle-mediated transport
  Homolog annotation: Hit_ID=A5C4U4; Match level="QueryCoverage=99%, HitCoverage=99%, E-value=3e-75, Identity=81%"; Hit description =Putative uncharacterized protein
  Pfam annotation: Domain name=Sedlin_N; Domain location=28-169; Score=- 52.2; E_value=0.065; Accession=PF04628.3; Description=Sedlin, N -terminal conserved region
  Pfam annotation: Domain name=Sybindin; Domain location=23-170; Score =218.6; E_value=1.4e-62; Accession=PF04099.3; Description=Sybindin -like family
  Pfam module annotation: Pfam domain module=Sedlin_N::Sybindin; Domain location=28-169::23-170
  Subcellular localization annotation: CTP_CleavageSite=17; ConfidenceScore=5.04e-01
MQFFGGSEISPSPPVPTASANNAHMMYVFNRSGVCLLYKEWNRPLRSLNPQQDHKLMFGLLFSLKSLTAKMDPTSADKGNLGVPQLPAQGCSFHSFRANTYKLSFRETPSGIKIILLTHPKTGDLRASLKYIYGLYVXECVGQNPIYGPGSXPIKSELFNTALGQYVRSIS

SEQ ID NO: 13468 - protein, 166 aa, Zea mays
  misc_feature (158)..(158): Xaa can be any naturally occurring amino acid
  Coding DNA Sequence Number=SeqID_7078
  Gene Ontology: Mol. function=nucleoside-triphosphatase activity; Cellular component=cytoplasm; Biological process=protein catabolic process
  Homolog annotation: Hit_ID=Q9C5U3; Match level="QueryCoverage=99%, HitCoverage=39%, E-value=1e-69, Identity=83%"; Hit description =AtSUG1 protein
MAAVGVESMRPESAMEETCNVKIAAAKQGEGLKQYYLQHIHELQRQLRQKTNNLNRLEAQRNELNSRVRMLREELQLLQEPGSYVGEVVKVMGKNKVLVKVHPEGKYVVDIDKSIDITKITPSTRVALRNDSYVLHLVLPSKVDPLVNLMKVEKVRTXTYDMIGGP

SEQ ID NO: 13469 - protein, 195 aa, Zea mays
  misc_feature (149)..(149): Xaa can be any naturally occurring amino acid
  misc_feature (166)..(166): Xaa can be any naturally occurring amino acid
  misc_feature (174)..(174): Xaa can be any naturally occurring amino acid
  misc_feature (195)..(195): Xaa can be any naturally occurring amino acid
  Coding DNA Sequence Number=SeqID_7079
  Gene Ontology: Mol. function=ferredoxin-NADP+ reductase activity; Cellular component=thylakoid membrane; Biological process=electron transport
  Homolog annotation: Hit_ID=Q9FKW6; Match level="QueryCoverage=97%, HitCoverage=51%, E-value=4e-65, Identity=71%"; Hit description =Ferredoxin--NADP reductase, leaf isozyme 1, chloroplast precursor
  Subcellular localization annotation: CTP_CleavageSite=63; ConfidenceScore=5.74e-01
MAAAAIGAAVSYPSSKSSSLPSKTSFVSPQRIFLNNKSTLCYREACIYRGRVKAQVSTEAPVKVAKESKKQEEGIVVNKFKPKDPYTGRCLLNTRITGDDAPGETWHIVFTTEGEVPYREGQSIGIIPEGIDKNGKPHKLRLYSIASSXAIGDFGDSKTVSLCVKXRLVYTNEXGEIWVKGACLHLPCVALKPSX

SEQ ID NO: 13470 - protein, 139 aa, Zea mays
  Coding DNA Sequence Number=SeqID_7080
  Gene Ontology: Cellular component=chloroplast thylakoid membrane
  Homolog annotation: Hit_ID=O64835; Match level="QueryCoverage=89%, HitCoverage=74%, E-value=9e-43, Identity=75%"; Hit description =Expressed protein
  Subcellular localization annotation: CTP_CleavageSite=52; ConfidenceScore=5.55e-01
MASLSLLSGGALQARCARHAHVSPRAAHATKAAPPSSSLTGASRRNLLFSLTAATVVTGLQPASMAETIPLFGIRKKLKKAEEEAVEIVKEGFETAEKGLETAEKGIEAAEKGVETAEKEIETAVSYNGLTQAGAVVGC

SEQ ID NO: 13471 - protein, 84 aa, Zea mays
  Coding DNA Sequence Number=SeqID_7081
  Gene Ontology: Mol. function=ATP-dependent helicase activity; Cellular component=nucleus; Biological process=mRNA catabolic process, nonsense-mediated decay
  Homolog annotation: Hit_ID=Q8W4R3; Match level="QueryCoverage=39%, HitCoverage=5%, E-value=6e-11, Identity=96%"; Hit description=DEAD -box ATP-dependent RNA helicase 30
ALSSSLFRFPELQINKHGHRWKQEHQRQTDNILNAIAKLGFTEPTPIQAQGWPMALKGRDLIWLFLHLLRLQAMCHLLLLVMLK

SEQ ID NO: 13472 - protein, 84 aa, Zea mays; identical to SEQ ID NO: 13471
  Coding DNA Sequence Number=SeqID_7082
  Gene Ontology: Mol. function=ATP-dependent helicase activity; Cellular component=nucleus; Biological process=mRNA catabolic process, nonsense-mediated decay
  Homolog annotation: Hit_ID=Q8W4R3; Match level="QueryCoverage=39%, HitCoverage=5%, E-value=6e-11, Identity=96%"; Hit description=DEAD -box ATP-dependent RNA helicase 30

SEQ ID NO: 13473 - protein, 184 aa, Zea mays
  misc_feature (97)..(97): Xaa can be any naturally occurring amino acid
  misc_feature (151)..(151): Xaa can be any naturally occurring amino acid
  misc_feature (175)..(175): Xaa can be any naturally occurring amino acid
  misc_feature (184)..(184): Xaa can be any naturally occurring amino acid
  Coding DNA Sequence Number=SeqID_7083
  Gene Ontology: Mol. function=protochlorophyllide reductase activity; Cellular component=chloroplast; Biological process=chlorophyll biosynthetic process
  Homolog annotation: Hit_ID=P21218; Match level="QueryCoverage=99%, HitCoverage=46%, E-value=8e-65, Identity=75%"; Hit description =Protochlorophyllide reductase B, chloroplast precursor
  Subcellular localization annotation: CTP_CleavageSite=60; ConfidenceScore=5.61e-01
MALQAASLVSSAFSVRKDGKLSASSAYFKDSSLFGASITEHGSSSLRFKRELSVRNVAIRAQTAATSSPSITKSSVDGKKTLRKGNVVVTGASSGLXGLATAKALAETGKWHVIMACRDFLKAERAAKSAGMPKDSYTVMHLDLASLDRRXEQFVDNFRRSEMPLDVLVCNAAVXFPDAKEPTX

SEQ ID NO: 13474 - protein, 170 aa, Zea mays
  Coding DNA Sequence Number=SeqID_7084
  Homolog annotation: Hit_ID=Q8RXD3; Match level="QueryCoverage=74%, HitCoverage=40%, E-value=7e-60, Identity=91%"; Hit description=ABI3 -interacting protein 2
MEAASLSEESLKLELDDLQKQLNKKLRFEASVRSIHSLLRDRYTSSSPSLRKQFYTVVSRVATVLKTRYTATGFWVAGLSLFEEAERLVSDTSEKKHLKSCIEQAKEQLTEVDIQPTESSQGYLFEGHLTVDREPPQPQWLVQQNLMSAFSSIVAGESSNAAAAAVGNVL

SEQ ID NO: 13475 - protein, 196 aa, Zea mays
  misc_feature (186)..(186): Xaa can be any naturally occurring amino acid
  misc_feature (193)..(193): Xaa can be any naturally occurring amino acid
  Coding DNA Sequence Number=SeqID_7085
  Gene Ontology: Mol. function=nucleic acid binding; Cellular component= ribonucleoprotein complex; Biological process=mRNA processing
  Homolog annotation: Hit_ID=Q9ZUU4; Match level="QueryCoverage=71%, HitCoverage=78%, E-value=1e-47, Identity=61%"; Hit description =Putative ribonucleoprotein At2g37220, chloroplast precursor
  Pfam annotation: Domain name=RRM_1; Domain location=96-167; Score =79.5; E_value=1.1e-20; Accession=PF00076.12; Description=RNA recognition motif. (a.k.a. RRM, RBD, or
  Subcellular localization annotation: CTP_CleavageSite=59; ConfidenceScore=5.94e-01
MAASASSLALSTFTPKSLPFSISRPASASLSPPSLSFNLHSLSASLSLSISAASSRFVRNVAVTDDFSVEEDGIFADDDAPPPPRREQSFSSDLKLFVGNLPFNVDSAQLAQLFESAGNVEMVEVIYDKVTGRSRGFGFVTMSSASEGQTAEQQVNGYELDGRPLRGNAGPPSTERGDSFSQRPRXQLWSSGXDMG

SEQ ID NO: 13476 - protein, 151 aa, Zea mays
  misc_feature (128)..(128): Xaa can be any naturally occurring amino acid
  misc_feature (137)..(138): Xaa can be any naturally occurring amino acid
  Coding DNA Sequence Number=SeqID_7086
  Gene Ontology: Mol. function=transporter activity; Cellular component= intracellular; Biological process=transport
  Homolog annotation: Hit_ID=Q2PYY3; Match level="QueryCoverage=98%, HitCoverage=50%, E-value=2e-51, Identity=68%"; Hit description =Transporter-like protein
  Pfam annotation: Domain name=CRAL_TRIO_N; Domain location=9-80; Score= 31.3; E_value=3.5e-06; Accession=PF03765.5; Description=CRALTRIO, N -terminus
MFRRKTTSQAEQENNEAALREAKIKELKTLIGELSGRSSLYCSDPCLKRYLEARSWNVGKAKKMLEETLKWRSTFKPEEIRWDEVSGEGETGKVYKAGFHDRSGRTVLILRPGLQNTKSLENQMKHLXVYLFENAIXXILPEVKEQMVWAH

SEQ ID NO: 13477 - protein, 135 aa, Zea mays
  misc_feature (134)..(134): Xaa can be any naturally occurring amino acid
  Coding DNA Sequence Number=SeqID_7087
  Gene Ontology: Mol. function=structural constituent of ribosome; Cellular component=ribonucleoprotein complex; Biological process =translation
  Homolog annotation: Hit_ID=Q9SF35; Match level="QueryCoverage=100%, HitCoverage=95%, E-value=4e-68, Identity=94%"; Hit description=40S ribosomal protein S23-1
  Pfam annotation: Domain name=Ribosomal_S12; Domain location=8-135; Score=230.0; E_value=5.5e-66; Accession=PF00164.15; Description =Ribosomal protein S12
MGKTRGMGAGRKLKRLRINQRWADKQYKKSHQGNEWKKPFAGSSHAKGIVLEKIGIEAKQPNSAIRKCARVQLIKNGKKIAAFVPNDGCLNYIEENDEVLIAGFGRKGHAVGDIPGVRFKVVKVSGVSLLALFXE

SEQ ID NO: 13478 - protein, 182 aa, Zea mays
  misc_feature (118)..(118): Xaa can be any naturally occurring amino acid
  misc_feature (132)..(132): Xaa can be any naturally occurring amino acid
  Coding DNA Sequence Number=SeqID_7088
  Gene Ontology: Mol. function=oxidoreductase activity; Cellular component=extracellular region; Biological process=hydrogen peroxide catabolic process
  Homolog annotation: Hit_ID=Q9FJR1; Match level="QueryCoverage=84%, HitCoverage=45%, E-value=4e-59, Identity=79%"; Hit description =Peroxidase 65 precursor
  Pfam annotation: Domain name=peroxidase; Domain location=76-182; Score=-49.7; E_value=0.00056; Accession=PF00141.13; Description =Peroxidase
LPSTKIYRREVYLVDQSLKFDSLFSLPTSNMRLSCSLTPFILLFFLFLVAPAVSSGVAILRTDYYQKTCPDFNKIVRDAVIAKQGQQPTTAAGTLRLFFHDCFLEGCDASVLIATNSXFNKAERDDDLHDSXLPGDAFDIVNRIKTALELSWPGVGSCADILAQATRDLVTMVGGLYFDGKL

SEQ ID NO: 13479 - protein, 197 aa, Zea mays
  misc_feature (97)..(97): Xaa can be any naturally occurring amino acid
  misc_feature (166)..(166): Xaa can be any naturally occurring amino acid
  misc_feature (192)..(192): Xaa can be any naturally occurring amino acid
  Coding DNA Sequence Number=SeqID_7089
  Homolog annotation: Hit_ID=Q9LVG0; Match level="QueryCoverage=99%, HitCoverage=50%, E-value=5e-53, Identity=64%"; Hit description =Adenylyl cyclase
  Subcellular localization annotation: CTP_CleavageSite=45; ConfidenceScore=5.02e-01
MQYLSNSRRIARALKPLALLEADVRFASHVVDSTQWQNHRSPSVSVSPGMNTQSHMTGLMMLRSSFSSEAKLVEDPTEAVKELHGKILDSVNVKRSXMPPNALLWSLIGDCRREDDISFLFDALQNLRRFRWSNPPYTWTTLICNLWPGRLAKTRGTGGEQINPGXNGPLWKPKGHGLTPSVASAHHLLVYXVEHRT

SEQ ID NO: 13480 - protein, 197 aa, Zea mays; identical to SEQ ID NO: 13479
  misc_feature (97)..(97): Xaa can be any naturally occurring amino acid
  misc_feature (166)..(166): Xaa can be any naturally occurring amino acid
  misc_feature (192)..(192): Xaa can be any naturally occurring amino acid
  Coding DNA Sequence Number=SeqID_7090
  Homolog annotation: Hit_ID=Q9LVG0; Match level="QueryCoverage=99%, HitCoverage=50%, E-value=5e-53, Identity=64%"; Hit description =Adenylyl cyclase
  Subcellular localization annotation: CTP_CleavageSite=45; ConfidenceScore=5.02e-01

SEQ ID NO: 13481 - protein, 122 aa, Zea mays
  misc_feature (57)..(57): Xaa can be any naturally occurring amino acid
  Coding DNA Sequence Number=SeqID_7091
  Gene Ontology: Mol. function=sequence-specific DNA binding; Cellular component=nucleus; Biological process=regulation of transcription, DNA-dependent
  Homolog annotation: Hit_ID=Q940J1; Match level="QueryCoverage=97%, HitCoverage=40%, E-value=2e-42, Identity=71%"; Hit description =Homeobox-leucine zipper protein ATHB-16
  Pfam annotation: Domain name=Homeobox; Domain location=61-115; Score =67.6; E_value=4.2e-17; Accession=PF00046.19; Description=Homeobox domain
MMKRLSSSDSMCGLVSNSPDEQSPRGYGGNFQSMLDGYEEDGTIVEEYSGNHHHWGXLSEKKRRLRVDQVKALEKNFELENKLEPERKTKLAQELGLQPRQVAVWFQNRRARWKTNSSKRLP

SEQ ID NO: 13482 - protein, 187 aa, Zea mays
  Coding DNA Sequence Number=SeqID_7092
  Gene Ontology: Mol. function=nucleic acid binding; Cellular component= ribonucleoprotein complex; Biological process=mRNA processing
  Homolog annotation: Hit_ID=Q39061; Match level="QueryCoverage=87%, HitCoverage=80%, E-value=1e-52, Identity=55%"; Hit description=RNA -binding protein cp33
  Pfam annotation: Domain name=RRM_1; Domain location=107-178; Score =88.1; E_value=2.7e-23; Accession=PF00076.12; Description=RNA recognition motif. (a.k.a. RRM, RBD, or
  Subcellular localization annotation: CTP_CleavageSite=68; ConfidenceScore=5.66e-01
MSSAYCSSAVAVSTAATVSSATTFNPLFSFHSNFKLFYRITPKPFKLVAKCPTPPLFLHLNTHRHRLFCAAEDEIPPSSEEDEEENEEDEDADETQTTHASVEEGRLYVGNLPYTITASELSQLFGEAGNVIDVQIVYDKVTDRSRGFGFVTMGTIEEAKEAIQMFHSSQIGGRTGKGNFPEGPRGG

SEQ ID NO: 13483 - protein, 88 aa, Zea mays
  misc_feature (13)..(13): Xaa can be any naturally occurring amino acid
  Coding DNA Sequence Number=SeqID_7093
PFGVFCQRPNFFXCYYSPRWDLDPRTLSICLFTITQSISHRSKGTAMKGLATMALIINIIVIADVYLFDSYRFINIFVKHEPYHSTGC

SEQ ID NO: 13484 - protein, 210 aa, Zea mays
  misc_feature (199)..(199): Xaa can be any naturally occurring amino acid
  Coding DNA Sequence Number=SeqID_7095
  Gene Ontology: Mol. function=hydrolase activity; Cellular component =integral to membrane; Biological process=iron ion transport
  Homolog annotation: Hit_ID=Q9SDZ8; Match level="QueryCoverage=89%, HitCoverage=59%, E-value=9e-73, Identity=67%"; Hit description =Putative purple acid phosphatase precursor
  Pfam annotation: Domain name=Metallophos; Domain location=60-191; Score=10.1; E_value=0.042; Accession=PF00149.18; Description =Calcineurin-like phosphoesterase
  Subcellular localization annotation: CTP_CleavageSite=39; ConfidenceScore=5.29e-01
KILSSFLFSFFFSSLPMASSKYKPINFIFHVFYLIFIFSAHSSTAELKRLLQPAKPDGRVSFLVIGDWGRGGSYNQSNVALQMGEVGEKLNIDFVISTGDNFYDNGLLGLDDPAFQDSFTNIYNASSLQKPWYTVLRNHDYRGDVEAQLSPMLRAMDNRWVCMRSFVGNAEIVEFFVIDTTPFVDKYFVQPNKHVYDWXGVFPRPTYLNI

SEQ ID NO: 13485 - protein, 181 aa, Zea mays
  Coding DNA Sequence Number=SeqID_7096
  Gene Ontology: Mol. function=protein serine/threonine phosphatase activity; Cellular component=protein serine/threonine phosphatase complex; Biological process=protein amino acid dephosphorylation
  Homolog annotation: Hit_ID=P49599; Match level="QueryCoverage=99%, HitCoverage=45%, E-value=4e-74, Identity=80%"; Hit description =Protein phosphatase 2C PPH1
MALLRPHLHRFHSNALHQSAPHTKSTADAGGGLVVYPTYGRRRRHRCSAIAIDAPSSLAGVTPIRWGYTSVQGFREEMEDDIVIRSEALDSFSFAAVFDGHAGSSSVKFLREELYKGCVEALQVGSLLKGGDFGAIKGSFGQAFESVDQSLLKWLETKGEEDESGSTATVMLFRNDVSYLH

SEQ ID NO: 13486 - protein, 155 aa, Zea mays
  misc_feature (88)..(88): Xaa can be any naturally occurring amino acid
  misc_feature (98)..(98): Xaa can be any naturally occurring amino acid
  misc_feature (125)..(125): Xaa can be any naturally occurring amino acid
  misc_feature (131)..(131): Xaa can be any naturally occurring amino acid
  misc_feature (146)..(146): Xaa can be any naturally occurring amino acid
  Coding DNA Sequence Number=SeqID_7097
  Gene Ontology: Mol. function=calcium ion binding; Cellular component =flagellin-based flagellum; Biological process=ciliary or flagellar motility
  Homolog annotation: Hit_ID=P25070; Match level="QueryCoverage=98%, HitCoverage=92%, E-value=8e-61, Identity=81%"; Hit description =Calmodulin-related protein 2, touch-induced
  Pfam annotation: Domain name=efhand; Domain location=16-44; Score =42.0; E_value=2.2e-09; Accession=PF00036.22; Description=EF hand
  Pfam annotation: Domain name=efhand; Domain location=52-80; Score =28.9; E_value=1.9e-05; Accession=PF00036.22; Description=EF hand
  Pfam annotation: Domain name=efhand; Domain location=95-123; Score =27.0; E_value=7e-05; Accession=PF00036.22; Description=EF hand
  Pfam module annotation: Pfam domain module=efhand::efhand::efhand; Domain location=16-44::52-80::95-123
MSKSNGARSCLGSMDDIRRVFQRFDKNGDGKISVDELKEVIRALSPTASPEETVKMMKQFDLDGNGFIDMDEFVSLFQIRVNQGGGGXENSKNDLKEXAFELYDLDGNGRISAKELHSVMKDLGXEKCSVXQDCRKMISQVDTDGXDGCVNFEGV

SEQ ID NO: 13487 - protein, 168 aa, Zea mays
  Coding DNA Sequence Number=SeqID_7098
  Homolog annotation: Hit_ID=A7QSL4; Match level="QueryCoverage=100%, HitCoverage=89%, E-value=2e-44, Identity=53%"; Hit description =Chromosome undetermined scaffold_161, whole genome shotgun sequence
MSWMKGDLLSKTRRLVGGLATREPVWLKAMEASPPPVFPRSNGNLKKIVLPEDPYVRRFARKHPEAKLVDPIKASAFIPDPARVYGCRVLELTKNGISEDDAMSVANMEYLAERKEMKKAYKRLKELAVLQDKSPPPKPYLSSKTEMQIQEKKPPTDPPSVRRLVNQL

SEQ ID NO: 13488 - protein, 200 aa, Zea mays
  misc_feature (40)..(40): Xaa can be any naturally occurring amino acid
  misc_feature (60)..(60): Xaa can be any naturally occurring amino acid
  misc_feature (128)..(128): Xaa can be any naturally occurring amino acid
  misc_feature (166)..(166): Xaa can be any naturally occurring amino acid
  misc_feature (174)..(174): Xaa can be any naturally occurring amino acid
  misc_feature (182)..(182): Xaa can be any naturally occurring amino acid
  Coding DNA Sequence Number=SeqID_7099
  Gene Ontology: Mol. function=translation elongation factor activity; Cellular component=cytoplasm; Biological process=translational elongation
  Homolog annotation: Hit_ID=P13905; Match level="QueryCoverage=100%, HitCoverage=43%, E-value=5e-90, Identity=86%"; Hit description =Elongation factor 1-alpha
  Pfam annotation: Domain name=GTP_EFTU; Domain location=5-195; Score =188.1; E_value=2.2e-53; Accession=PF00009.17; Description=Elongation factor Tu GTP binding domain
  Pfam annotation: Domain name=MMR_HSR1; Domain location=8-159; Score= -6.4; E_value=0.0041; Accession=PF01926.13; Description=GTPase of unknown function
  Pfam module annotation: Pfam domain module=GTP_EFTU::MMR_HSR1; Domain location=5-195::8-159
MGKEKFHINIVVIGHVDSGKSTTTGHLIYKLGGIDKRVIXERFEKEAAEMNKRPFKYAWXVLDKLKAERERGITIDVALWKFETTKYYCTVIDAPGHRDFIKNMITGTSQADCAALIIDSPTGGFESXVSSRDGQTREHALLAFTLGGKQMICCWNKMDATTPQYXSRPGYDEXIEEVASYXGRKGGYNPDKIPSSPSSG

SEQ ID NO: 13489 - protein, 194 aa, Zea mays
  Coding DNA Sequence Number=SeqID_7100
  Gene Ontology: Mol. function=structural constituent of ribosome; Cellular component=ribonucleoprotein complex; Biological process =translation
  Homolog annotation: Hit_ID=P49691; Match level="QueryCoverage=99%, HitCoverage=47%, E-value=1e-102, Identity=96%"; Hit description=60S ribosomal protein L4-2
  Pfam annotation: Domain name=Ribosomal_L4; Domain location=25-194; Score=189.2; E_value=1e-53; Accession=PF00573.12; Description =Ribosomal protein L4L1 family
MAAAAARPLVTVQGLDGDMTTDKSTTVCLPDVMTAPVRPDIVNFVHAQISNNSRQPYAVSKKAGHQTSAESWGTGRAVSRIPRVPGGGTHRAGQAAFGNMCRGGRMFAPTKIWRRWHRRVNVNMKRHAIVSAIAATAVPSLVMARGHKIENVPEMPLVVSDSAEAVEKTSAAIKVLKQIGAYDDAEKAKDSIGD

SEQ ID NO: 13490 - protein, 191 aa, Zea mays
  misc_feature (151)..(151): Xaa can be any naturally occurring amino acid
  misc_feature (174)..(174): Xaa can be any naturally occurring amino acid
  Coding DNA Sequence Number=SeqID_7101
  Gene Ontology: Mol. function=adenosylhomocysteinase activity; Cellular component=cytoplasm; Biological process=one-carbon compound metabolic process
  Homolog annotation: Hit_ID=A8MQP1; Match level="QueryCoverage=97%, HitCoverage=56%, E-value=2e-96, Identity=94%"; Hit description =Uncharacterized protein At4g13940.4
  Pfam annotation: Domain name=AdoHcyase; Domain location=12-191; Score= 248.3; E_value=1.7e-71; Accession=PF05221.7; Description=S-adenosyl-L- homocysteine hydrolase
MALIVEKTSSGREYKVKDMSQADFGRLELELAEVEMPGLMACRTEFGPAQPFKGARITGSLHMTIQTAVLIETLTALGAEVRWCSCNIFSTQDHAAAAITRDSAAVFAWKGETLQEYWWCTERALDWGPGGGPDLIVDDGGDATLLIPRGXVRAEEIFEKTGQVPDPTSTDNPXEFQIVLAIIRGGLPWCP

SEQ ID NO: 13491 - protein, 197 aa, Zea mays
  Coding DNA Sequence Number=SeqID_7102
  Gene Ontology: Mol. function=glutathione transferase activity; Cellular component=cytoplasm; Biological process=aromatic amino acid family metabolic process
  Homolog annotation: Hit_ID=Q84JK3; Match level="QueryCoverage=100%, HitCoverage=87%, E-value=1e-99, Identity=91%"; Hit description =Glutathione S-transferase zeta
  Pfam annotation: Domain name=GST_N; Domain location=10-85; Score =97.4; E_value=4.4e-26; Accession=PF02798.10; Description=Glutathione S-transferase, N-terminal domain
MANLGEEKKGKLKLYSYWRSSCAHRVRIALSLKGLEYEYIPVNLLKGEQSDPDFKKINPMGTVPALVDGDVVISDSLAIIMYLDEKYPEPPLLPPDLHKRAVNFQAASIVLSGIQPHQNLGVIKFIEEKINSEEKTAWVTNAITKGFTALEKLLVSCAGKHATGDEVYLADLFLAPQIYGAINRVQINMEPYPPLAR

SEQ ID NO: 13492 - protein, 148 aa, Zea mays
  Coding DNA Sequence Number=SeqID_7103
  Gene Ontology: Mol. function=small conjugating protein ligase activity; Cellular component=cytosol; Biological process=regulation of protein metabolic process
  Homolog annotation: Hit_ID=A2WWE6; Match level="QueryCoverage=100%, HitCoverage=73%, E-value=3e-80, Identity=92%"; Hit description =Ubiquitin carrier protein
  Pfam annotation: Domain name=UQ_con; Domain location=5-142; Score =280.2; E_value=4.3e-81; Accession=PF00179.16; Description=Ubiquitin -conjugating enzyme
MASKRILKELKDLQKDPPSNCSAGPVAEDMFHWQATIMGPPDSPYAGGVFLVSIHFPPDYPFKPPKVSFKTRVYHPNINSNGSICLDILKEQWSPALTVSKVLLSICSLLTDPNPDDPLVPEIAHMYKTDKSKYESTARSWTQKYAMG

SEQ ID NO: 13493 - protein, 148 aa, Zea mays
  Coding DNA Sequence Number=SeqID_7104
  Subcellular localization annotation: CTP_CleavageSite=60; ConfidenceScore=5.66e-01
SRKANKKTSLLIKCSNLSLTKLGQAAVKLRFRRSLCRLRRPPGLPFSFAFLCSSLSVGPRRSAASKACPSFSSGVDLERSLHRSQAVGLCSARGRRSRLTGSVSSTGGRLFPDEVFPVWTWLGLSYGVWRFGEARVVRLVLHRLVSRR

SEQ ID NO: 13494 - protein, 199 aa, Zea mays
  Coding DNA Sequence Number=SeqID_7106
HKAKYERNMGFLGKSILSSLLAIWFFTSCAFTEEVNHVNQTPSSAPAPSPYHHGHHHPHPPHHHHPHPHPPAKAPVKPPVSPPSKPPVKPPVYPPTKSPVKPPTKPPVKPPVSPPAKPPVKPPVYPPTKAPVKPPVKPPVKPPVSPPAKPPIKPPVSPPAKPPVKPPVYPPTKAPVKPPTKAPAKPPVSPPAKPQYPLS

SEQ ID NO: 13495 - protein, 200 aa, Zea mays
  Coding DNA Sequence Number=SeqID_7108
  Gene Ontology: Mol. function=aspartic-type endopeptidase activity; Cellular component=extracellular region; Biological process =proteolysis
  Homolog annotation: Hit_ID=Q9LS40; Match level="QueryCoverage=84%, HitCoverage=35%, E-value=1e-69, Identity=74%"; Hit description=CND41, chloroplast nucleoid DNA binding protein-like
  Subcellular localization annotation: CTP_CleavageSite=57; ConfidenceScore=5.58e-01
MASARFLSLLSTVTLSLLLTTTDASSRSLPTSHETTVLDVVSSLQQTQHILSIDPTRSSLTTTTSAPESVPVFLNSSSPLSLELHSRDTLVASQHKDYKNLVLSRLERDSSRVAAIIAKVNLAVEGADSETRYQPEELTTPVISGASQGSGEYFSRLGVGTPAKEMYMVLDTGSDINWIQCKPCSSCYQQSDPIFDPRSP

SEQ ID NO: 13496 - protein, 191 aa, Zea mays
  misc_feature (122)..(122): Xaa can be any naturally occurring amino acid
  Coding DNA Sequence Number=SeqID_7109
  Gene Ontology: Mol. function=transporter activity; Cellular component= integral to membrane; Biological process=iron ion transport
  Homolog annotation: Hit_ID=Q9C6B2; Match level="QueryCoverage=80%, HitCoverage=29%, E-value=1e-38, Identity=62%"; Hit description=Metal transporter Nramp2
MENDVKVAEKVEEADRLLPPQSLPSNSDEEEPESESEAEAAVESRDKIVIVDFESAGDPAAVPPFSWRKLWLFTGPGFLMSIAFLDPGNLEGDLQAGAIAGYSLLWLLMGATAMGLLIQMLXSARVGGRHRADIWVELWPRRVIPLWGEGNLAFGPNGPEPPAPPVRSWNNSKEGVYSGKGGAKKAEFQRD

SEQ ID NO: 13497 - protein, 152 aa, Zea mays
  misc_feature (130)..(130): Xaa can be any naturally occurring amino acid
  misc_feature (140)..(140): Xaa can be any naturally occurring amino acid
  Coding DNA Sequence Number=SeqID_7110
  Gene Ontology: Mol. function=structural constituent of ribosome; Cellular component=ribonucleoprotein complex; Biological process =translation
  Homolog annotation: Hit_ID=Q08112; Match level="QueryCoverage=100%, HitCoverage=100%, E-value=6e-75, Identity=93%"; Hit description=40S ribosomal protein S15-1
  Pfam annotation: Domain name=Ribosomal_S19; Domain location=54-135; Score=164.6; E_value=2.6e-46; Accession=PF00203.11; Description =Ribosomal protein S19
MADVEPEVAAAGVPKKRTFKKFAFKGVDLDALLDMSTDDLVKLFPSRIRRRFSRGLTRKPMALIKKLRKAKREAPQGEKPEPVRTHLRNMIIVPEMIGSIIGVYNGKTFNPVEIKPEMIGHYLAEFSISXQPVKHGRPWXGATHSPQVIPLQ

SEQ ID NO: 13498 - protein, 205 aa, Zea mays
  misc_feature (80)..(80): Xaa can be any naturally occurring amino acid
  misc_feature (190)..(190): Xaa can be any naturally occurring amino acid
  misc_feature (205)..(205): Xaa can be any naturally occurring amino acid
  Coding DNA Sequence Number=SeqID_7111
  Gene Ontology: Mol. function=catalytic activity; Biological process =alkaloid metabolic process
  Homolog annotation: Hit_ID=Q9LVL9; Match level="QueryCoverage=91%, HitCoverage=70%, E-value=2e-81, Identity=78%"; Hit description =Polyneuridine aldehyde esterase-like protein
MSEHHHFAFVHGAGHGGWCWYKLANSLRENGHKATCIDLKGAGINLTDPNTVSSLDDYNQPLYDFLSQLPLDQKVILVSXHSVGGGSMTAAMCQYPSKVSMAVYVAAAMVKPGTIIPPILKEVLKICSGMIETEAEKIWDFTFGNGPENLPTSMMMKPEYVRDKYYNESPMEDYTLATTLLRPAPVMAFXGIVDIPAAPEADQIX

SEQ ID NO: 13499 - protein, 206 aa, Zea mays
  misc_feature (163)..(163): Xaa can be any naturally occurring amino acid
  misc_feature (187)..(187): Xaa can be any naturally occurring amino acid
  misc_feature (206)..(206): Xaa can be any naturally occurring amino acid
  Coding DNA Sequence Number=SeqID_7112
  Gene Ontology: Mol. function=catalytic activity; Cellular component =chloroplast; Biological process=cellular metabolic process
  Homolog annotation: Hit_ID=O80934; Match level="QueryCoverage=99%, HitCoverage=60%, E-value=1e-67, Identity=69%"; Hit description =Uncharacterized protein At2g37660, chloroplast precursor
  Subcellular localization annotation: CTP_CleavageSite=75; ConfidenceScore=5.96e-01
LQLMAMSTTTLFHALVPSNTYKSRAVSSSFVSVPRSSTPPSSPSLQFRSLVSDTTSIYGRRKFTGNLRRVSLTVSAAAAAEPLTVLVTGAGGRTGQIVYKKLKERSDQFVARGLVRTKESKEKIGGEDEVFVGDIRDPESIAPAVQGIDALVILTSAVPKMKXPGFDPSKGERPESTLKEELIPEQXLDWIGQKNQIDAAKQPGIX

SEQ ID NO: 13500 - protein, 167 aa, Zea mays
  Coding DNA Sequence Number=SeqID_7113
  Gene Ontology: Mol. function=acetylornithine transaminase activity; Cellular component=mitochondrion; Biological process=amino acid biosynthetic process
  Homolog annotation: Hit_ID=A9PF72; Match level="QueryCoverage=71%, HitCoverage=26%, E-value=4e-49, Identity=77%"; Hit description =Putative uncharacterized protein
  Subcellular localization annotation: CTP_CleavageSite=45; ConfidenceScore=5.31e-01
MASLGQITLPRAPSLQKGLLRRPIRTPIRFNGRIASVLTNAGSVKASVSQKVIEEEAKVLVGTYARAPVVLSSGKGCKLMDAEGKEYLDCASGIAVNALGHGDPDWLQAVTDQASVLSHVSNVYYTIPQIELAKRLVASSFADRVFFCNSGTEANEAAIKFSRKFQR

SEQ ID NO: 13501 - protein, 196 aa, Zea mays
  misc_feature (150)..(150): Xaa can be any naturally occurring amino acid
  misc_feature (167)..(167): Xaa can be any naturally occurring amino acid
  misc_feature (183)..(183): Xaa can be any naturally occurring amino acid
  Coding DNA Sequence Number=SeqID_7114
  Gene Ontology: Mol. function=transporter activity; Cellular component= integral to membrane; Biological process=transport
  Homolog annotation: Hit_ID=P43286; Match level="QueryCoverage=100%, HitCoverage=68%, E-value=9e-77, Identity=74%"; Hit description =Aquaporin PIP2-1
  Pfam annotation: Domain name=MIP; Domain location=29-196; Score =149.9; E_value=6.8e-42; Accession=PF00230.10; Description=Major intrinsic protein
MAKEVEGAEGFASRDYEDPPPTPFFDAEELTKWSLYRAVIAEFVATLLFLYVTVLTVIGYKISSDTKAGGDECGGVGILGISWAFGGMIFILVYCTAGISGGHINPAVTFGLFLARKVSLVRAVLYMVAQCLGAICGGGFVKAFQSAYLXRYGGGANSLADGYSTGXGLAAEIIGDIRPGLHXVFSATDPKRNARD

SEQ ID NO: 13502 - protein, 168 aa, Zea mays
  misc_feature (121)..(121): Xaa can be any naturally occurring amino acid
  misc_feature (149)..(149): Xaa can be any naturally occurring amino acid
  misc_feature (154)..(154): Xaa can be any naturally occurring amino acid
  Coding DNA Sequence Number=SeqID_7115
  Gene Ontology: Mol. function=transporter activity; Cellular component= integral to membrane; Biological process=transport
  Homolog annotation: Hit_ID=P43286; Match level="QueryCoverage=97%, HitCoverage=57%, E-value=1e-56, Identity=68%"; Hit description =Aquaporin PIP2-1
  Pfam annotation: Domain name=MIP; Domain location=29-168; Score=31.3; E_value=7.3e-12; Accession=PF00230.10; Description=Major intrinsic protein
MAKDVEGAEGFAARDYEDPPPTPFFDAEELTKWSLYRAVIAEFVATLLFLYVTVLTVIGYKISSDTKAGGDECGGVGILGISWAFGGMIFILVYCTAGISGGHINPAVTFGLFLARKVSLXRAVLYLVASSVWVRFVGKLGFVKAFQSXNYVRXGGGANSLARGGCGK

SEQ ID NO: 13503 - protein, 218 aa, Zea mays
  misc_feature (1)..(19): Xaa can be any naturally occurring amino acid
  Coding DNA Sequence Number=SeqID_7116
XXXXXXXXXXXXXXXXXXXSRAAFFFLCSWRSRLPPLLPWRLHLPVPSLPGRAGTLLPHGHAPFRLGGRDSALRSLCCPSVDAHFHGRAQATGTRRGAPCCRSSFLPAPPPGERLQQGAFLPCAQKLPGPLSACSMSMALQQLGFLPWMPLCSSPHLPSLRSSSAKRRCSCSHGVPFFLLCAATPVQKTAAAPLPSPRRAAARPLFPPMGAQKFPSRD

SEQ ID NO: 13504 - protein, 178 aa, Zea mays
  misc_feature (167)..(167): Xaa can be any naturally occurring amino acid
  Coding DNA Sequence Number=SeqID_7118
  Gene Ontology: Mol. function=hydrolase activity, acting on glycosyl bonds; Biological process=cell wall organization and biogenesis
  Homolog annotation: Hit_ID=Q9SUP5; Match level="QueryCoverage=98%, HitCoverage=37%, E-value=1e-68, Identity=74%"; Hit description =Putative polygalacturonase
MWPLSISVVFLPCFAAFLLTALSSAYGYGDSEATCSGIVPLKYRNDKISITDFGGVGDGRTVNTKAFRAAIYRIQHLRRRGGTVLYIPPGVFLTESFSLTSHMTLFLARGAVIKAVQDTWNWPLIDPLPFLMEEGRELPGARYISFIHGDGLRDVVITGQNGTIDGXRTVMVHHWGAV

SEQ ID NO: 13505 - protein, 181 aa, Zea mays
  misc_feature (1)..(1): Xaa can be any naturally occurring amino acid
  misc_feature (3)..(3): Xaa can be any naturally occurring amino acid
  misc_feature (5)..(12): Xaa can be any naturally occurring amino acid
  misc_feature (18)..(18): Xaa can be any naturally occurring amino acid
  misc_feature (20)..(20): Xaa can be any naturally occurring amino acid
  misc_feature (24)..(24): Xaa can be any naturally occurring amino acid
  misc_feature (32)..(32): Xaa can be any naturally occurring amino acid
  misc_feature (36)..(37): Xaa can be any naturally occurring amino acid
  misc_feature (46)..(47): Xaa can be any naturally occurring amino acid
  misc_feature (49)..(49): Xaa can be any naturally occurring amino acid
  misc_feature (52)..(52): Xaa can be any naturally occurring amino acid
  misc_feature (62)..(62): Xaa can be any naturally occurring amino acid
  misc_feature (67)..(67): Xaa can be any naturally occurring amino acid
  misc_feature (71)..(71): Xaa can be any naturally occurring amino acid
  misc_feature (85)..(85): Xaa can be any naturally occurring amino acid
  misc_feature (90)..(90): Xaa can be any naturally occurring amino acid
  misc_feature (95)..(96): Xaa can be any naturally occurring amino acid
  misc_feature (105)..(105): Xaa can be any naturally occurring amino acid
  misc_feature (114)..(114): Xaa can be any naturally occurring amino acid
  misc_feature (150)..(150): Xaa can be any naturally occurring amino acid
  misc_feature (172)..(172): Xaa can be any naturally occurring amino acid
  Coding DNA Sequence Number=SeqID_7119
  Subcellular localization annotation: CTP_CleavageSite=11; ConfidenceScore=5.28e-01
XWXRXXXXXXXXSPPNKXFXFFFXKRKLFFCXPPRXXGGGFPQKNXXKXTPXEKNLGGKTKXPPHKXPPKXGFFFFCPPTKKKKXFFSPXEKQKXXPPPPGGQFXGVFKGGNHXGFFLKIWFTTLGPRSNLFRSKAWKAPKVTSIMVSPXIYPSYFAPQLLHAHNEAFGRRXLTDNGVHSS

SEQ ID NO: 13506 - protein, 181 aa, Zea mays; identical to SEQ ID NO: 13505
  misc_feature (1)..(1): Xaa can be any naturally occurring amino acid
  misc_feature (3)..(3): Xaa can be any naturally occurring amino acid
  misc_feature (5)..(12): Xaa can be any naturally occurring amino acid
  misc_feature (18)..(18): Xaa can be any naturally occurring amino acid
  misc_feature (20)..(20): Xaa can be any naturally occurring amino acid
  misc_feature (24)..(24): Xaa can be any naturally occurring amino acid
  misc_feature (32)..(32): Xaa can be any naturally occurring amino acid
  misc_feature (36)..(37): Xaa can be any naturally occurring amino acid
  misc_feature (46)..(47): Xaa can be any naturally occurring amino acid
  misc_feature (49)..(49): Xaa can be any naturally occurring amino acid
  misc_feature (52)..(52): Xaa can be any naturally occurring amino acid
  misc_feature (62)..(62): Xaa can be any naturally occurring amino acid
  misc_feature (67)..(67): Xaa can be any naturally occurring amino acid
  misc_feature (71)..(71): Xaa can be any naturally occurring amino acid
  misc_feature (85)..(85): Xaa can be any naturally occurring amino acid
  misc_feature (90)..(90): Xaa can be any naturally occurring amino acid
  misc_feature (95)..(96): Xaa can be any naturally occurring amino acid
  misc_feature (105)..(105): Xaa can be any naturally occurring amino acid
  misc_feature (114)..(114): Xaa can be any naturally occurring amino acid
  misc_feature (150)..(150): Xaa can be any naturally occurring amino acid
  misc_feature (172)..(172): Xaa can be any naturally occurring amino acid
  Coding DNA Sequence Number=SeqID_7120
  Subcellular localization annotation: CTP_CleavageSite=11; ConfidenceScore=5.28e-01

SEQ ID NO: 13507 - protein, 183 aa, Zea mays
  misc_feature (107)..(107): Xaa can be any naturally occurring amino acid
  misc_feature (144)..(144): Xaa can be any naturally occurring amino acid
  misc_feature (167)..(167): Xaa can be any naturally occurring amino acid
  Coding DNA Sequence Number=SeqID_7121
  Gene Ontology: Mol. function=structural molecule activity; Cellular component=cytoskeleton; Biological process=actomyosin structure organization and biogenesis
  Homolog annotation: Hit_ID=A2XZH4; Match level="QueryCoverage=99%, HitCoverage=34%, E-value=6e-85, Identity=87%"; Hit description =Putative uncharacterized protein
  Pfam annotation: Domain name=Actin; Domain location=8-183; Score= -1.5; E_value=1.8e-14; Accession=PF00022.9; Description=Actin
IYLKMADGEDIQPLVCDNGTGMVKAGFAGDDAPRAVFPSIVGRPRHTGVMGGMGQRDAYVGDEAQSKRGILPLKYPIEHGIVNHWDDMEKICHHTFYNELRVAPEEXHPGLLTEAPLNPKVNREKITQIMFENVNAPAMYCAIXAVLSLYARGRTTGIVLDSGRGVXSTPVPIYEGYALPHAS

SEQ ID NO: 13508 - protein, 152 aa, Zea mays
  Coding DNA Sequence Number=SeqID_7122
  Gene Ontology: Mol. function=structural constituent of ribosome; Cellular component=ribonucleoprotein complex; Biological process =translation
  Homolog annotation: Hit_ID=P34788; Match level="QueryCoverage=99%, HitCoverage=99%, E-value=1e-80, Identity=98%"; Hit description=40S ribosomal protein S18
  Pfam annotation: Domain name=Ribosomal_S13; Domain location=14-142; Score=293.3; E_value=4.8e-85; Accession=PF00416.12; Description =Ribosomal protein S13S18
MSLVANEEFQHILRVLNTNVDGKQKIMFALTSIKGIGRRLANIVCKKADVDMNKRAGELSAAEIDNLMTIVANPKQYKIPDWFLNRQKDYKDGKYSQVVSNALDMKLRDDLERLKKIRNHRGLRHYWGLRVRGQHTKTTGRRGKNVGVSKKA

SEQ ID NO: 13509 - protein, 155 aa, Zea mays
  misc_feature (56)..(56): Xaa can be any naturally occurring amino acid
  misc_feature (89)..(89): Xaa can be any naturally occurring amino acid
  misc_feature (94)..(94): Xaa can be any naturally occurring amino acid
  misc_feature (114)..(115): Xaa can be any naturally occurring amino acid
  misc_feature (119)..(119): Xaa can be any naturally occurring amino acid
  misc_feature (131)..(131): Xaa can be any naturally occurring amino acid
  Coding DNA Sequence Number=SeqID_7123
  Gene Ontology: Mol. function=binding; Cellular component =intracellular; Biological process=RNA processing
  Homolog annotation: Hit_ID=A2YP84; Match level="QueryCoverage=94%, HitCoverage=14%, E-value=7e-57, Identity=73%"; Hit description =Putative uncharacterized protein
MHLMAIVDCRRVKLFEKDPARQIATYVEAVKIVDPMNAVGKSHTLWVAFAKMYEKXNSLDSVDDIFKCATQVNYNTIDHLASIWCEWTXMELCXNNFDKAIELMRQATAEPCPXXAAAXGDEPVQMKVHKXLELWSFYVDMEDSLETIYSTYAVY

SEQ ID NO: 13510 - protein, 191 aa, Zea mays
  misc_feature (65)..(65): Xaa can be any naturally occurring amino acid
  misc_feature (145)..(145): Xaa can be any naturally occurring amino acid
  Coding DNA Sequence Number=SeqID_7124
  Gene Ontology: Mol. function=oxidoreductase activity, acting on NADH or NADPH; Cellular component=mitochondrial respiratory chain; Biological process=ATP synthesis coupled electron transport
  Homolog annotation: Hit_ID=Q9FGI6; Match level="QueryCoverage=100%, HitCoverage=25%, E-value=4e-78, Identity=80%"; Hit description=NADH -ubiquinone oxidoreductase 75 kDa subunit, mitochondrial precursor
  Pfam annotation: Domain name=Molybdopterin; Domain location=1-137; Score=-56.5; E_value=7.4e-06; Accession=PF00384.12; Description =Molybdopterin oxidoreductase
AILAAVESIAQANNVVRPDWNGLNYLLLYAAQAAALDLGLIQQSAKALESAKFVYLMGADDVDVXDKIPKDAFVVYQGHHGDKAVYRANVILPASAFTEKEGTYENTEGFTQQTVPAVPTVGDARDDWQIVRALSEVSGVNLPYXSIEGVRSRIKSVAPNLVHTDEREPAAFGPSLKPECKGDMSTTSVKT

SEQ ID NO: 13511 - protein, 159 aa, Zea mays
  misc_feature (34)..(34): Xaa can be any naturally occurring amino acid
  misc_feature (97)..(97): Xaa can be any naturally occurring amino acid
  misc_feature (122)..(122): Xaa can be any naturally occurring amino acid
  misc_feature (138)..(138): Xaa can be any naturally occurring amino acid
  Coding DNA Sequence Number=SeqID_7125
  Gene Ontology: Mol. function=caffeoyl-CoA O-methyltransferase activity; Cellular component=integral to membrane; Biological process=lignin biosynthetic process
  Homolog annotation: Hit_ID=O49499; Match level="QueryCoverage=87%, HitCoverage=52%, E-value=9e-58, Identity=86%"; Hit description =Probable caffeoyl-CoA O-methyltransferase At4g34050
  Pfam annotation: Domain name=Methyltransf_3; Domain location=46-160; Score=58.4; E_value=5.7e-17; Accession=PF01596.8; Description=O -methyltransferase
MATTTAEATKTSSTTVEDEQSQNLRRQELGHKSXLLQSDDLYQDILETSVYPREPESMKELREVTARHPWNIMTTSADEGQFLNMLIKLVNAYNTMXEIGVYAGYSLLATALALPEHGKILXAMHGNRENYQLGLPIXEKAGVAHKIDFRGGPLLYLVP

SEQ ID NO: 13512 - protein, 159 aa, Zea mays; identical to SEQ ID NO: 13511
  misc_feature (34)..(34): Xaa can be any naturally occurring amino acid
  misc_feature (97)..(97): Xaa can be any naturally occurring amino acid
  misc_feature (122)..(122): Xaa can be any naturally occurring amino acid
  misc_feature (138)..(138): Xaa can be any naturally occurring amino acid
  Coding DNA Sequence Number=SeqID_7126
  Gene Ontology: Mol. function=caffeoyl-CoA O-methyltransferase activity; Cellular component=integral to membrane; Biological process=lignin biosynthetic process
  Homolog annotation: Hit_ID=O49499; Match level="QueryCoverage=87%, HitCoverage=52%, E-value=9e-58, Identity=86%"; Hit description =Probable caffeoyl-CoA O-methyltransferase At4g34050
  Pfam annotation: Domain name=Methyltransf_3; Domain location=46-160; Score=58.4; E_value=5.7e-17; Accession=PF01596.8; Description=O -methyltransferase

SEQ ID NO: 13513 - protein, 193 aa, Zea mays
  misc_feature (174)..(174): Xaa can be any naturally occurring amino acid
  Coding DNA Sequence Number=SeqID_7127
  Gene Ontology: Mol. function=hydrolase activity, acting on ester bonds
  Homolog annotation: Hit_ID=A7NYG7; Match level="QueryCoverage=100%, HitCoverage=45%, E-value=3e-70, Identity=68%"; Hit description =Chromosome chr6 scaffold_3, whole genome shotgun sequence
  Pfam annotation: Domain name=Phosphoesterase; Domain location=34-193; Score=-12.1; E_value=4.7e-09; Accession=PF04185.5; Description =Phosphoesterase family
MALRRVSATVILFLYLLFSAHSLDSKHHKIEGPIKTIVVVVMENRSFDHILGWLKPTRPEIDGLTGKESNPLNASDPNSKKIYVSNDAVFVDMDPGHSFQAIREQIFGSNDTSGDPKMNGFAQEAESMEPGMAKNVMSGFKPEVLPVYTELANEFGIFDRWFASVPTSTQPNRXFYVHSATSHGGPRNGEKDL

SEQ ID NO: 13514 - protein, 179 aa, Zea mays
  misc_feature (143)..(143): Xaa can be any naturally occurring amino acid
  misc_feature (179)..(179): Xaa can be any naturally occurring amino acid
  Coding DNA Sequence Number=SeqID_7128
  Gene Ontology: Mol. function=inorganic diphosphatase activity; Cellular component=cytoplasm; Biological process=phosphate metabolic process
  Homolog annotation: Hit_ID=O82793; Match level="QueryCoverage=99%, HitCoverage=82%, E-value=8e-84, Identity=84%"; Hit description =Putative inorganic pyrophosphatase
  Pfam annotation: Domain name=Pyrophosphatase; Domain location=52-179; Score=125.6; E_value=1.4e-34; Accession=PF00719.9; Description =Inorganic pyrophosphatase
MSEEVKENQSGKLQKPTPRLNERILSSLSKRSVAAHPWHDLEIGPGAPVIFNVVVEISKGSKVKYELDKKTGLIKVDRILYSSVVYPHNYGFIPRTLCEDNDPLDVLVIMQEPVLPGCFLRARAIGLMPMIDQGEKDDKIICXYCVDDPEYKHYTDIKELPPHRLTEIRRFFEDYKKNX

SEQ ID NO: 13515 - protein, 175 aa, Zea mays
  misc_feature (26)..(26): Xaa can be any naturally occurring amino acid
  misc_feature (154)..(154): Xaa can be any naturally occurring amino acid
  Coding DNA Sequence Number=SeqID_7129
  Gene Ontology: Mol. function=phosphogluconate dehydrogenase (decarboxylating) activity; Cellular component=nucleus; Biological process=pentose-phosphate shunt
  Homolog annotation: Hit_ID=Q8RWF1; Match level="QueryCoverage=97%, HitCoverage=49%, E-value=2e-71, Identity=82%"; Hit description =Putative uncharacterized protein At1g17650
  Pfam annotation: Domain name=NAD_binding_2; Domain location=51-174; Score=58.0; E_value=3.3e-14; Accession=PF03446.5; Description=NAD binding domain of 6-phosphogluconate dehydrogenase
  Subcellular localization annotation: CTP_CleavageSite=66; ConfidenceScore=5.16e-01
MALCSIFCPRIPVRFRPKPISPLLSXPLFPLSYRVYSSLQPTPSTKDELGSVSIGFLGMGIMGSPMAQNLLKAGRDVTAWNRTKSKCDPLVGLGAKYKSSPEEVTATCDLTFAMLADPESAIHVACGKNGAVSGISSRKGYVDVSTVDAASSIXISKQIKDTGAVFLEAPFLSTE

SEQ ID NO: 13516 - protein, 147 aa, Zea mays
  Coding DNA Sequence Number=SeqID_7130
  Gene Ontology: Mol. function=structural constituent of ribosome; Cellular component=ribonucleoprotein complex; Biological process =translation
  Homolog annotation: Hit_ID=Q8VZ55; Match level="QueryCoverage=100%, HitCoverage=100%, E-value=2e-45, Identity=71%"; Hit description=50S ribosomal protein L35
  Pfam annotation: Domain name=Ribosomal_L35p; Domain location=79-137; Score=87.8; E_value=3.5e-23; Accession=PF01632.9; Description =Ribosomal protein L35
  Subcellular localization annotation: CTP_CleavageSite=48; ConfidenceScore=5.77e-01
MASLSMASVNLSFSPLRSPPKVSTHASVQFARFSSSSLASAHCISGLRAVLPQKISTVVSQSSQRLQTLTVFAHKGYKMKTHKASAKRFRVTGRGKIVRRRSGKQHLLAKKNNKRKLRLSKMHEVSRSDYDNVIGALPYLKVNRKAT

SEQ ID NO: 13517 - protein, 206 aa, Zea mays
  Coding DNA Sequence Number=SeqID_7131
  Gene Ontology: Mol. function=metal ion binding; Cellular component =integral to membrane
  Homolog annotation: Hit_ID=Q9SRM4; Match level="QueryCoverage=66%, HitCoverage=55%, E-value=1e-56, Identity=80%"; Hit description =Putative nucleic acid binding protein
MFMSSSSLHLLPKSLSLSIAFLSLSLSTSDHIGSQKPIDADLDLSPLATDLHPYTNRIYIHTLYLSVKSMAAVSSNPRTVEEIFKDYTARRSALLRALTKDVDDFYSQCDPEKENLCLYGHPNESWEVNLPAEEVPPELPEPALGINFARDGMQRKDWLSLVAVHSDCWVLSVSFYFGARLNRNERKRLFSLIKDRPTLPEAGTGR

SEQ ID NO: 13518 - protein, 183 aa, Zea mays
  misc_feature (99)..(99): Xaa can be any naturally occurring amino acid
  misc_feature (131)..(131): Xaa can be any naturally occurring amino acid
  Coding DNA Sequence Number=SeqID_7132
  Gene Ontology: Mol. function=structural constituent of ribosome; Cellular component=ribonucleoprotein complex; Biological process =translation
  Homolog annotation: Hit_ID=P17094; Match level="QueryCoverage=99%, HitCoverage=46%, E-value=3e-86, Identity=87%"; Hit description=60S ribosomal protein L3-1
  Pfam annotation: Domain name=Ribosomal_L3; Domain location=50-182; Score=64.1; E_value=4.6e-16; Accession=PF00297.12; Description =Ribosomal protein L3
MSHRKFEHPRHGSLGFLPRKRANRHRGKVKAFPKDDQTKPCKFTAFMGYKAGMTHIVRDVEKPGSKLHKKETCEAVTIIETPAMVVVGVVAYVKTPRGXLRSLNTVWAQHLSEEVRRRFYKNWAKSKKKAXFTGYAKQYETEEGKKSIQSQLEKMKKYGTVIRVLAPPQIRKMKGLNKKKGHW

SEQ ID NO: 13519 - protein, 347 aa, Zea mays
  misc_feature (1)..(126): Xaa can be any naturally occurring amino acid
  misc_feature (128)..(146): Xaa can be any naturally occurring amino acid
  misc_feature (148)..(190): Xaa can be any naturally occurring amino acid
  misc_feature (192)..(194): Xaa can be any naturally occurring amino acid
  misc_feature (196)..(197): Xaa can be any naturally occurring amino acid
  misc_feature (199)..(199): Xaa can be any naturally occurring amino acid
  misc_feature (201)..(214): Xaa can be any naturally occurring amino acid
  misc_feature (216)..(232): Xaa can be any naturally occurring amino acid
  misc_feature (234)..(235): Xaa can be any naturally occurring amino acid
  misc_feature (237)..(282): Xaa can be any naturally occurring amino acid
  misc_feature (286)..(287): Xaa can be any naturally occurring amino acid
  misc_feature (289)..(289): Xaa can be any naturally occurring amino acid
  Coding DNA Sequence Number=SeqID_7133
XXXXXXXXXXXXXXXXXXXXXXXXXXXXXXXXXXXXXXXXXXXXXXXXXXXXXXXXXXXXXXXXXXXXXXXXXXXXXXXXXXXXXXXXXXXXXXXXXXXXXXXXXXXXXXXXXXXXXXXXXXXXXXGXXXXXXXXXXXXXXXXXXXGXXXXXXXXXXXXXXXXXXXXXXXXXXXXXXXXXXXXXXXXXXXNXXXGXXFXVXXXXXXXXXXXXXXGXXXXXXXXXXXXXXXXXIXXFXXXXXXXXXXXXXXXXXXXXXXXXXXXXXXXXXXXXXXXXXXXXXXRERXXSXVPPPPPCWLSDIQIVYVTPVLLPVEATADPLLQSFDKLERKRVIVYSTKVPGPISLFH

SEQ ID NO: 13520 - protein, 163 aa, Zea mays
  misc_feature (46)..(46): Xaa can be any naturally occurring amino acid
  misc_feature (96)..(96): Xaa can be any naturally occurring amino acid
  misc_feature (103)..(103): Xaa can be any naturally occurring amino acid
  misc_feature (114)..(114): Xaa can be any naturally occurring amino acid
  Coding DNA Sequence Number=SeqID_7134
  Homolog annotation: Hit_ID=Q2V367; Match level="QueryCoverage=77%, HitCoverage=55%, E-value=3e-52, Identity=86%"; Hit description =Uncharacterized protein At5g19140.2
MLGIFSGAIVSLPEELVAAGSRTPSPKTTGAALVNKFVEQNPSAVXVQVGDYVQLAYTHHQESPLRPRSFGAKDEIFCLFPGSLDHLGSLEQQYGXLAKNANXEVLLVIEAYQXLLRDGAPYPANHGRGSPKGRLSPFGGPPKTTFPPGLELRAKKEKVPWVW

SEQ ID NO: 13521 - protein, 167 aa, Zea mays
  misc_feature (111)..(111): Xaa can be any naturally occurring amino acid
  misc_feature (125)..(125): Xaa can be any naturally occurring amino acid
  Coding DNA Sequence Number=SeqID_7135
  Gene Ontology: Mol. function=zinc ion binding; Cellular component =intracellular
  Homolog annotation: Hit_ID=Q9LZI1; Match level="QueryCoverage=77%, HitCoverage=75%, E-value=1e-09, Identity=33%"; Hit description =Putative uncharacterized protein F26K9_280
  Pfam annotation: Domain name=DUF537; Domain location=10-154; Score =85.7; E_value=1.5e-22; Accession=PF04396.4; Description=Protein of unknown function, DUF537
MNQIENMATQKAIVLWNISSCPIPDGHDPLMVVQRIQAAVEKSGYVRRNGEISITAIGDKLTEVPGEDVMRRLSSIGIALKNGDEYQMDLYNWADENAPPGTMMLIDGHEXLGWLAETLSEFEDXGFRILLAYPHRDPAATPFPCKQVGIGAALFSDEQETTPRPCW

SEQ ID NO: 13522 - protein, 167 aa, Zea mays; identical to SEQ ID NO: 13521
  misc_feature (111)..(111): Xaa can be any naturally occurring amino acid
  misc_feature (125)..(125): Xaa can be any naturally occurring amino acid
  Coding DNA Sequence Number=SeqID_7136
  Gene Ontology: Mol. function=zinc ion binding; Cellular component =intracellular
  Homolog annotation: Hit_ID=Q9LZI1; Match level="QueryCoverage=77%, HitCoverage=75%, E-value=1e-09, Identity=33%"; Hit description =Putative uncharacterized protein F26K9_280
  Pfam annotation: Domain name=DUF537; Domain location=10-154; Score =85.7; E_value=1.5e-22; Accession=PF04396.4; Description=Protein of unknown function, DUF537

SEQ ID NO: 13523 - protein, 197 aa, Zea mays
  Coding DNA Sequence Number=SeqID_7137
  Subcellular localization annotation: CTP_CleavageSite=58; ConfidenceScore=5.90e-01
ASSPAACSLAPLLSSAFLSSPFSMASAPFSSSARPLQLPAPASAMGLAVRSLSGLQPSVSGAASLLRPGSPPSSPSHSAPISLPWRALPAQLPRCPLPAPSPWPCPAPSSKLPRRPCFVLATSSRSVSNFGARLSSMACAPVLRSHARISLGHRAPFAWGWLGFLRARPRPLLLLRRRVSLARPYSSLLCRRSPVGG

SEQ ID NO: 13524 - protein, 206 aa, Zea mays
  misc_feature (206)..(206): Xaa can be any naturally occurring amino acid
  Coding DNA Sequence Number=SeqID_7139
  Subcellular localization annotation: CTP_CleavageSite=22; ConfidenceScore=5.39e-01
ALSSALSPTRRLLLQPPAPLRRCSRRRSSPLPFPWPAPPLAPLLDLCSSLLQLQPWGSLAALCPVSSPAFLAPQACCALGRLPAGHLTRRPSPYHGVPSLRSSLAVRCPRPVHWPGPSSPPPSSHGAPCFGLATSSRSGSNFRRPAEVHGGAPPGSFGPHAAHLLLGHRGSPFGCGGGGLPPRASPPRPCCFLSLGREEGFPLARX

SEQ ID NO: 13525 - protein, 151 aa, Zea mays
  Coding DNA Sequence Number=SeqID_7141
  Gene Ontology: Mol. function=DNA binding; Cellular component =chromosome; Biological process=nucleosome assembly
  Homolog annotation: Hit_ID=Q9FFC0; Match level="QueryCoverage=68%, HitCoverage=71%, E-value=4e-49, Identity=96%"; Hit description =Histone H2B.10
  Pfam annotation: Domain name=CBFD_NFYB_HMF; Domain location=68-125; Score=3.0; E_value=0.084; Accession=PF00808.13; Description=Histone -like transcription factor (CBFNF-Y) and archaeal histone
  Pfam annotation: Domain name=Histone; Domain location=58-128; Score =109.4; E_value=1.1e-29; Accession=PF00125.14; Description=Core histone H2AH2BH3H4
  Pfam module annotation: Pfam domain module=CBFD_NFYB_HMF::Histone; Domain location=68-125::58-128
MAPKAGKKPAEKKPAAAEKPVEEEKVAEKAPAEKKPKAGKKLPKEAIGATDKKKKRSKKNIETYKIYIFKVLKQVHPDIGISSKAMGIMNSFINDIFEKLAQEASKLARYNKKPTITSREIQTAVRLVLPGELAKHAVSEGTKAVTKFTSS

SEQ ID NO: 13526 - protein, 185 aa, Zea mays
  misc_feature (106)..(106): Xaa can be any naturally occurring amino acid
  misc_feature (130)..(130): Xaa can be any naturally occurring amino acid
  misc_feature (138)..(138): Xaa can be any naturally occurring amino acid
  misc_feature (146)..(146): Xaa can be any naturally occurring amino acid
  Coding DNA Sequence Number=SeqID_7142
  Gene Ontology: Mol. function=serine-type endopeptidase activity; Biological process=proteolysis
  Homolog annotation: Hit_ID=Q94B60; Match level="QueryCoverage=82%, HitCoverage=51%, E-value=1e-34, Identity=64%"; Hit description=ATP -dependent Clp protease proteolytic subunit 4, chloroplast precursor
  Pfam annotation: Domain name=CLP_protease; Domain location=73-183; Score=-13.7; E_value=1.8e-07; Accession=PF00574.13; Description=Clp protease
  Subcellular localization annotation: CTP_CleavageSite=59; ConfidenceScore=5.96e-01
MATLSLSSSLKPSLVSSRLSSSSSASYSSFPKPSNLSLKPAKLISPPLRTSPSPLRFANASIEMSQTQESAIRGAESDVMGLLLRERIVFLGSSIDDFVADAIMSXQLLLLDAKDPKKDIKLFINSSRGXSLRATIAXIYEGGQLXEADVSTIALGMAGSTASIILGGGKLRASGFCYPPTPRNN

SEQ ID NO: 13527 - protein, 185 aa, Zea mays; identical to SEQ ID NO: 13526
  misc_feature (106)..(106): Xaa can be any naturally occurring amino acid
  misc_feature (130)..(130): Xaa can be any naturally occurring amino acid
  misc_feature (138)..(138): Xaa can be any naturally occurring amino acid
  misc_feature (146)..(146): Xaa can be any naturally occurring amino acid
  Coding DNA Sequence Number=SeqID_7143
  Gene Ontology: Mol. function=serine-type endopeptidase activity; Biological process=proteolysis
  Homolog annotation: Hit_ID=Q94B60; Match level="QueryCoverage=82%, HitCoverage=51%, E-value=1e-34, Identity=64%"; Hit description=ATP -dependent Clp protease proteolytic subunit 4, chloroplast precursor
  Pfam annotation: Domain name=CLP_protease; Domain location=73-183; Score=-13.7; E_value=1.8e-07; Accession=PF00574.13; Description=Clp protease
  Subcellular localization annotation: CTP_CleavageSite=59; ConfidenceScore=5.96e-01

SEQ ID NO: 13528 - protein, 118 aa, Zea mays
  Coding DNA Sequence Number=SeqID_7144
  Gene Ontology: Mol. function=protein binding; Cellular component =microtubule associated complex; Biological process=microtubule cytoskeleton organization and biogenesis
  Homolog annotation: Hit_ID=A9P0S5; Match level="QueryCoverage=98%, HitCoverage=97%, E-value=1e-58, Identity=91%"; Hit description =Putative uncharacterized protein
  Pfam annotation: Domain name=APG12; Domain location=14-116; Score= -21.9; E_value=0.017; Accession=PF04110.4; Description=Autophagy protein Apg12
  Pfam annotation: Domain name=MAP1_LC3; Domain location=13-116; Score =252.4; E_value=9.6e-73; Accession=PF02991.6; Description=Microtubule associated protein 1A1B, light chain 3
  Pfam module annotation: Pfam domain module=APG12::MAP1_LC3; Domain location=14-116::13-116
MKFQYKEEHAFEKRKSEGEKIRRKYPDRVPVIVEKAPKARIGDLDKKKYLVPSDLTVGQFYFLIRKRIHLRPEDALFFLVNSVVPPSSATMGSLYQEHHEEDFFLYIAYSDENVYGKL

SEQ ID NO: 13529 - protein, 93 aa, Zea mays
  misc_feature (86)..(93): Xaa can be any naturally occurring amino acid
  Coding DNA Sequence Number=SeqID_7145
FSLSQFWRRVSHGDGSIGSDLSAVCVDVGVALCLGVSATATCHSYPGRASWALLTKVVARVAQRIVSGTQASGVWASFPCLGSLGXXXXXXXX

SEQ ID NO: 13530 - protein, 443 aa, Zea mays; identical to SEQ ID NO: 13382
  misc_feature (127)..(127): Xaa can be any naturally occurring amino acid
  Coding DNA Sequence Number=SeqID_817
  Coding DNA Sequence Number=SeqID_817
  Gene Ontology: Mol. function=hydrolase activity; Biological process =lipid catabolic process
  Homolog annotation: Hit_ID=Q6ASS6; Match level="QueryCoverage=89%, HitCoverage=91%, E-value=1e-109, Identity=57%"; Hit description =Patatin-like phospholipase domain containing protein
  Pfam annotation: Domain name=Patatin; Domain location=58-256; Score =62.1; E_value=1.9e-15; Accession=PF01734.12; Description=Patatin -like phospholipase

SEQ ID NO: 13531 - protein, 135 aa, Zea mays
  Coding DNA Sequence Number=SeqID_818
  Gene Ontology: Mol. function=nucleotide binding; Cellular component =intracellular
  Homolog annotation: Hit_ID=A2XMG0; Match level="QueryCoverage=66%, HitCoverage=58%, E-value=2e-33, Identity=76%"; Hit description =Putative uncharacterized protein
  Pfam annotation: Domain name=DUF59; Domain location=29-96; Score=3.2; E_value=0.00048; Accession=PF01883.9; Description=Domain of unknown function DUF59
MTVGMINANPVVHERPERASHPHAADVLDPLDVFDTVRDIKDPEHPYSLEQLSVLSEESVSVDETLGRIQITFTPTVQHCSMATVIGLCLRRWHSPRRPRRPARRREARARSRCWREHCRSSPRPWSCVREGVVE

SEQ ID NO: 13532 - protein, 130 aa, Zea mays
  Coding DNA Sequence Number=SeqID_819
  Gene Ontology: Mol. function=drug transporter activity; Cellular component=membrane; Biological process=multidrug transport
  Homolog annotation: Hit_ID=Q338M3; Match level="QueryCoverage=100%, HitCoverage=100%, E-value=5e-54, Identity=80%"; Hit description =Expressed protein
MEVPMNTTQSGPHFPVQHRSLSLDIKGNKTDIVINKYEDTFLVIVTQIGCMGTILAAKKDESVFSNPTYNVSVLFGKRDEPLLLACARQLIEHISGSGSARSLVISLGLKDHSQGTLKDITVAVIDNRLW

SEQ ID NO: 13533 - protein, 102 aa, Zea mays
  misc_feature (26)..(26): Xaa can be any naturally occurring amino acid
  Coding DNA Sequence Number=SeqID_820
NPTETDPLLSREIAARNCFQPSRASXQPGILGTATVPHFATAPLPPPSWTSPLCRQHRLGLPRRAAALLDFATSLVDITSSRILVLCISSIRLLVPTNLQIL

SEQ ID NO: 13534 - protein, 170 aa, Zea mays
  Coding DNA Sequence Number=SeqID_822
  Subcellular localization annotation: CTP_CleavageSite=57; ConfidenceScore=5.40e-01
PRSPRLLVFSPAHACKPALLAAPRCPAPSRGRSPGASCSPPAPAPWALPHRAACEPPCGLASGAPRWLPWSYLHTAHPLLRSMAEAPADELVQDDAASAPLSTATAIHFRASRNRRSSFGDQVIELFEFYEAEDPEHLFGEGCLWCNLCSGKEGVEADLQKFQDFDEFKD

SEQ ID NO: 13535 - protein, 363 aa, Zea mays
  Coding DNA Sequence Number=SeqID_824
  Gene Ontology: Mol. function=structural constituent of cell wall
  Homolog annotation: Hit_ID=Q9ZQT1; Match level="QueryCoverage=81%, HitCoverage=83%, E-value=9e-74, Identity=49%"; Hit description=Root cap protein 2
  Pfam annotation: Domain name=Root_cap; Domain location=269-328; Score= 84.2; E_value=4.3e-22; Accession=PF06830.2; Description=Root cap
DGVRPVVPPWALIASFLVVAAVGAQPMDPKNPISSDPNVIPVYMSPGSPPTYVSCYNSTHGQQGSEPTCSILARQCPRGCRDTCYVHCPSCKLVCLCELTGSECYDPRFVGGDGNKFLFHGRRDADFCLVSDANLHINAHFIGKRNDARAAAPARDFTWVQALGIRFGGHRLYLGVRRTAVWDDAEDRLAITFDGVPVALDAVAGASWSPAAAPALSVFRTGPANGVVVRLDGRFRAVANAVPVTAEDSRVHGYGLRPGDGSLAHLNVAFRFYALSADVHGVLGQTYRPGYVSAAGVDAGARVPVMGGAGRFQVYGGIFDTSCEVGRFAGEDHGPVGGVITVEEPTDALCGSGKASTGLVCKK

SEQ ID NO: 13536 - protein, 55 aa, Zea mays
  Coding DNA Sequence Number=SeqID_825
STSSSTHIPLHGCWGSCIPASDDPLPQPPSLLCPEHQAPVVTTLTILHPTIARTF

SEQ ID NO: 13537 - protein, 261 aa, Zea mays
  misc_feature (45)..(45): Xaa can be any naturally occurring amino acid
  misc_feature (47)..(47): Xaa can be any naturally occurring amino acid
  misc_feature (59)..(59): Xaa can be any naturally occurring amino acid
  Coding DNA Sequence Number=SeqID_827
  Gene Ontology: Mol. function=transcription factor activity; Cellular component=nucleus; Biological process=regulation of transcription, DNA-dependent
  Homolog annotation: Hit_ID=Q69TX6; Match level="QueryCoverage=90%, HitCoverage=70%, E-value=2e-26, Identity=38%"; Hit description =Putative DRE binding factor 2
  Pfam annotation: Domain name=AP2; Domain location=19-70; Score=52.4; E_value=1.6e-12; Accession=PF00847.10; Description=AP2 domain
  Subcellular localization annotation: CTP_CleavageSite=8; ConfidenceScore=5.02e-01
MVKTATATAAARHGGAHKRTYKGVRMRSWGSWVSEVRAPGQKTRXWXGSHSTAEAAARXYDAALLCLRGSAAAPDLNFPPRRPLADGLHPLPPAAMSPKAIQRVAAAAAACCAPQSNGIGSACCAAPCAPPSNGIGSACGHAETAPALSGSPPSSDSDVSSPEAGSTASSDGELARYGDGDGDGGVSVDYGSLADIDAFFQSPKCMDDDHYYYAALMDPCGAFFAPAPSVAADDDAAAAAGCWEDGDGIALWSFSFPALDC

SEQ ID NO: 13538 - protein, 421 aa, Zea mays
  misc_feature (12)..(12): Xaa can be any naturally occurring amino acid
  misc_feature (21)..(21): Xaa can be any naturally occurring amino acid
  misc_feature (84)..(84): Xaa can be any naturally occurring amino acid
  misc_feature (106)..(106): Xaa can be any naturally occurring amino acid
  misc_feature (292)..(292): Xaa can be any naturally occurring amino acid
  Coding DNA Sequence Number=SeqID_828
  Gene Ontology: Mol. function=metalloendopeptidase activity; Cellular component=integral to membrane; Biological process=proteolysis
  Homolog annotation: Hit_ID=A2XIU5; Match level="QueryCoverage=83%, HitCoverage=83%, E-value=1e-121, Identity=68%"; Hit description =Putative uncharacterized protein
  Pfam annotation: Domain name=PDZ; Domain location=136-237; Score =12.0; E_value=0.038; Accession=PF00595.14; Description=PDZ domain (Also known as DHR or GLGF)
  Pfam annotation: Domain name=Peptidase_M50; Domain location=59-410; Score=141.9; E_value=1.8e-39; Accession=PF02163.12; Description =Peptidase family M50
  Pfam module annotation: Pfam domain module=PDZ::Peptidase_M50; Domain location=136-237::59-410
MITTHLSPALKXRFPVPAPLXYHTHHHLPLPLPRRHCHLAKPAAAASPDLLASVESVASAASVLAAIVLVHESGHFLAAASRGXSTSPSSPSASARRWPASASAPXECTLRAVPLGGYVGFPDDDPESGFAPDDPDLLRNRPVPDLLLVVSAGVAANLAFAFLVVYAQALTVGVPVQARLPGVLVPEVLPGSAAARAGLLPGDVILAAPGAAPDPSVPVLVDLMKASPGRKVPLTVSRAGPGKLEPDPRPVELTVVPDTSADGTGRIGVQLSPNVRVTRVRPENLADATVLXAREFALLTVTVFDGLRQTLLNFSQSADKVSGPVAIIAVGAEVARSSADGLFQFAAVINLNLAAINLLPLPALDGGTLALILLEAARGGRKIPREVEQGIMSSGILVVLMVGMFLIVRDTLNLDFIKEML

SEQ ID NO: 13539 - protein, 148 aa, Zea mays
  Coding DNA Sequence Number=SeqID_829
  Subcellular localization annotation: CTP_CleavageSite=15; ConfidenceScore=5.39e-01
STQRNTHTQHYLFISAMASNKSIALLVLALALMLTVSVHGQLSSSSPTPAPSPAPAAPTPTPSPSPASAPAPTPAPAPSQNRCPPGFPDLKSLLEGIKRYLAQAIYIFYVPSRQNPGNSSNKCLCFPASTSIISIFSGPYECVPAPLK

SEQ ID NO: 13540 - protein, 145 aa, Zea mays
  Coding DNA Sequence Number=SeqID_831
  Gene Ontology: Mol. function=ferredoxin-nitrite reductase activity; Cellular component=chloroplast; Biological process=nitrate assimilation
  Homolog annotation: Hit_ID=P17847; Match level="QueryCoverage=61%, HitCoverage=15%, E-value=3e-45, Identity=98%"; Hit description =Ferredoxin--nitrite reductase, chloroplast precursor
  Subcellular localization annotation: CTP_CleavageSite=43; ConfidenceScore=5.73e-01
MASSASLQRFLLPSPHAAATAASPSSRLRRTGRARAAVSVPPPAAAGEQVPTERLEPRVEERAGGYWVLKEKYRAGLNPQEKVKLEKEPMALFMEGGIQDLARVPMEQIDAAKLTKDDVDVRFKWLGLFHRRKHQCTSTPTLQQG

SEQ ID NO: 13541 - protein, 391 aa, Zea mays
  misc_feature (158)..(158): Xaa can be any naturally occurring amino acid
  misc_feature (310)..(310): Xaa can be any naturally occurring amino acid
  misc_feature (328)..(328): Xaa can be any naturally occurring amino acid
  misc_feature (333)..(333): Xaa can be any naturally occurring amino acid
  Coding DNA Sequence Number=SeqID_832
  Gene Ontology: Mol. function=hydrolase activity, acting on ester bonds; Cellular component=cellular_component; Biological process =lipid metabolic process
  Homolog annotation: Hit_ID=A2XNZ2; Match level="QueryCoverage=88%, HitCoverage=91%, E-value=1e-114, Identity=59%"; Hit description =Putative uncharacterized protein
  Pfam annotation: Domain name=Lipase_GDSL; Domain location=44-367; Score=123.8; E_value=5e-34; Accession=PF00657.12; Description=GDSL -like LipaseAcylhydrolase
  Subcellular localization annotation: CTP_CleavageSite=93; ConfidenceScore=5.17e-01
MASTTDNRGLLVVAAATVVLAVAAAPAHTPGGNTATPPPPFRTVYAFGDSFTDTGNTRSTTGPYSFGYVSSPPYGATFFHRSTNRYSDGRLVVDFLAEALALPSYLPPYLAVSVSNANATAAGAGVNFAVAGATAIEHDFFARNNLSIDVTPQSIMTXLGWFDAHLLRSSSSAAAAADALFWVGEIGANDYAYTVVARDTIPPKLVRTMAVQRVTAFVEGLLERGAKYVIVQGLPLTGCLPLAMTLARADDRDAVGCAASVNRQSYAHNRRLLAALRALRRRHPGAVVAYADYYAAHLAVMRSPARHGFXEPFRTCCGSGGGAYNFDXFATCXSPQVTTACARPAEYVNWDGVHMTEAMYKVVAGMFFSGDGYCRPAFKDLLAMKARQGKP

SEQ ID NO: 13542 - protein, 419 aa, Zea mays
  Coding DNA Sequence Number=SeqID_833
  Gene Ontology: Mol. function=transcription factor activity; Cellular component=nucleus; Biological process=regulation of transcription, DNA-dependent
  Homolog annotation: Hit_ID=Q10AL3; Match level="QueryCoverage=91%, HitCoverage=35%, E-value=1e-48, Identity=35%"; Hit description =Powdery mildew resistance protein PM3b, putative, expressed
  Pfam annotation: Domain name=LRR_1; Domain location=111-132; Score =0.5; E_value=2.4e+02; Accession=PF00560.23; Description=Leucine Rich Repeat
  Pfam annotation: Domain name=LRR_1; Domain location=205-228; Score =2.4; E_value=1.1e+02; Accession=PF00560.23; Description=Leucine Rich Repeat
  Pfam annotation: Domain name=LRR_1; Domain location=230-268; Score =0.5; E_value=2.5e+02; Accession=PF00560.23; Description=Leucine Rich Repeat
  Pfam annotation: Domain name=LRR_1; Domain location=288-310; Score =7.1; E_value=15; Accession=PF00560.23; Description=Leucine Rich Repeat
  Pfam annotation: Domain name=LRR_1; Domain location=333-356; Score =11.6; E_value=2.2; Accession=PF00560.23; Description=Leucine Rich Repeat
  Pfam annotation: Domain name=LRR_1; Domain location=361-380; Score =5.4; E_value=30; Accession=PF00560.23; Description=Leucine Rich Repeat
  Pfam annotation: Domain name=LRR_1; Domain location=46-67; Score=5.1; E_value=35; Accession=PF00560.23; Description=Leucine Rich Repeat
  Pfam module annotation: Pfam domain module=LRR_1::LRR_1::LRR_1::LRR _1::LRR_1::LRR_1::LRR_1; Domain location=111-132::205-228::230 -268::288-310::333-356::361-380::46-67
LENLQFLCSRCTSSTFGKLKVLKLIDLDVFEGFCEAVHGCAVAFPQLELLEIDSCKNLAALPEASYCGGDHTVARSAFPELKKLVLRCLRSFERWEAAALETEEGHAIFPLVECVHINRCPKLKTLPRAPKLKSLFIHGVNEHLSLGGGIRCMTSLSTLFLGGVKLDCKERWDRPSYVTVVSMRLRSCSVFFQPHALALWVCFGQLQDLEIYECDDLVYWPEKVFQSLISLRRLEIYSCKNLIGYAEAVANGPDQATSGMSQLLLPHLESLEILGCESLVEVFNLPSSLRVIDIWGCSKLRFMSGQLDALNNLVIVDSPELRSLETCIVDLPSLESLDLRGCENLSSLPSARAGGRQEYSSLGKLTIRDCPGIKSLPSALQQRLDSGLVDLDPRLRQDPSPRLLGRLCLRSRMSRFVAD

SEQ ID NO: 13543 - protein, 93 aa, Zea mays; identical to SEQ ID NO: 13529
  misc_feature (86)..(93): Xaa can be any naturally occurring amino acid
  Coding DNA Sequence Number=SeqID_7146

SEQ ID NO: 13544 - protein, 141 aa, Zea mays
  Coding DNA Sequence Number=SeqID_7148
  Gene Ontology: Mol. function=metal ion binding; Biological process =response to stress
  Homolog annotation: Hit_ID=Q94B40; Match level="QueryCoverage=96%, HitCoverage=68%, E-value=2e-27, Identity=49%"; Hit description=Zinc finger A20 and AN1 domain-containing stress-associated protein 6
  Pfam annotation: Domain name=zf-A20; Domain location=13-37; Score =22.4; E_value=0.0016; Accession=PF01754.7; Description=A20-like zinc finger
MAEEHRCQTPEGHRLCANNCGFLGSSATMNLCSNCYGDLCLKQQQASMKSTVESSLSAVSPPSSEIGSMQSTVESSLSDVSPPSSETISISSPMIQPLVRNPSAELEVTAKNVPKTVTPPPEQQQKRPNRCTTCRKTGRVD

SEQ ID NO: 13545 - protein, 141 aa, Zea mays; identical to SEQ ID NO: 13544
  Coding DNA Sequence Number=SeqID_7149
  Gene Ontology: Mol. function=metal ion binding; Biological process =response to stress
  Homolog annotation: Hit_ID=Q94B40; Match level="QueryCoverage=96%, HitCoverage=68%, E-value=2e-27, Identity=49%"; Hit description=Zinc finger A20 and AN1 domain-containing stress-associated protein 6
  Pfam annotation: Domain name=zf-A20; Domain location=13-37; Score =22.4; E_value=0.0016; Accession=PF01754.7; Description=A20-like zinc finger

SEQ ID NO: 13546 - protein, 179 aa, Zea mays
  Coding DNA Sequence Number=SeqID_7150
  Homolog annotation: Hit_ID=Q9FLX1; Match level="QueryCoverage=82%, HitCoverage=63%, E-value=3e-60, Identity=78%"; Hit description =Arabidopsis thaliana genomic DNA, chromosome 5, P1 clone:MXC20
MEVNQEASSMPVVPIDSFSYSWVVNCPSLEDSIDDYHQTYEDSSSSFIEMDPRLPPSRRFFINKSHESSFKFDNFVSFSDEDHSLVHADELFRDGYVMPYLSKATSAATEEEYEPLDKKTEKKMETRDIKSKSPSSCRKLRRVSKWVLLLLTPLCKRLRRCRTAGSSGGIGIDSRIRVT

SEQ ID NO: 13547 - protein, 81 aa, Zea mays
  Coding DNA Sequence Number=SeqID_7151
  Gene Ontology: Mol. function=nucleotide binding; Cellular component =plasma membrane; Biological process=small GTPase mediated signal transduction
  Homolog annotation: Hit_ID=Q40787; Match level="QueryCoverage=65%, HitCoverage=25%, E-value=2e-23, Identity=96%"; Hit description=Ras -related protein Rab7
ESALLSLFFPTFRPSIACGTCPGGRPGRYFETSAKDGTNVEDAFQCIVKNALKNEPEEELYVPDTVNVVGGNRAQRSSGCC

SEQ ID NO: 13548 - protein, 170 aa, Zea mays
  Coding DNA Sequence Number=SeqID_7152
  Gene Ontology: Mol. function=transferase activity, transferring hexosyl groups; Biological process=carbohydrate biosynthetic process
  Homolog annotation: Hit_ID=Q9LHD2; Match level="QueryCoverage=100%, HitCoverage=49%, E-value=3e-73, Identity=82%"; Hit description =Glycosyl transferase-like protein
  Pfam annotation: Domain name=Glyco_transf_8; Domain location=64-170; Score=-71.1; E_value=0.052; Accession=PF01501.10; Description =Glycosyl transferase family 8
MMSGSRLIIFAIISTTVFTVGSIRLLPEDASSDFMEAPAYINGPECSVLPQNRLLLACDPSAVHIAMTLDPAYLRGTVSAVHSILKHTSCPQNIFFHFIASGSSHVKTLSSVFPSLSFKVYTFDETLVKDLISSSIRQALDSPLNYARSYLSEILSSCVHRVIYLDSDVI

SEQ ID NO: 13549 - protein, 230 aa, Zea mays
  misc_feature (200)..(230): Xaa can be any naturally occurring amino acid
  Coding DNA Sequence Number=SeqID_7153
TKYLHRLSKNLAQQSPCTNPRTDVRRTRERSKAVAMDESAIKGLEVLELKGSDAGIRNSSIITRMVVKGYDTSPPTPPKEVVVEAMIKHLGYDTFTPTPREVVEEALRKHFASRGITLIHVAVPEENSHILCSHGLIYVNEECEAEALKLDGSDMGGGRILEVAAYPFADHHLDHIFAPTKATECLERTLYGTGFDTCLXXXXXXXXXXXXXXXXXXXXXXXXXXXXXXX

SEQ ID NO: 13550 - protein, 235 aa, Zea mays
  misc_feature (188)..(188): Xaa can be any naturally occurring amino acid
  misc_feature (200)..(200): Xaa can be any naturally occurring amino acid
  misc_feature (227)..(227): Xaa can be any naturally occurring amino acid
  Coding DNA Sequence Number=SeqID_7155
  Gene Ontology: Mol. function=sequence-specific DNA binding; Cellular component=nucleus; Biological process=regulation of transcription, DNA-dependent
  Homolog annotation: Hit_ID=Q9FLX8; Match level="QueryCoverage=99%, HitCoverage=64%, E-value=3e-73, Identity=65%"; Hit description =Probable WRKY transcription factor 27
  Pfam annotation: Domain name=WRKY; Domain location=169-231; Score =107.1; E_value=5.4e-29; Accession=PF03106.6; Description=WRKY DNA -binding domain
MSEDWDLFAVVRSCSSSVSTATINTNSRGGDEGRANCKQHDLPPLFQHIHGDISRESSSCNELQDSCKPFLPVTTTWSSPLPPPPVVSSAPNILMKQEQGLIESQDQKPPLGVRVFPPPTTISSSSSVFVFRGQRDHLLQQQPQAPLRSRKRKNQQKRTICHVTQENLSSDMWAWRKYGQKPIRGSPXYPRNYYRCSSSXKGCLARKQGERSILDPNIFIVTYTGEXTHPRPTHR

SEQ ID NO: 13551 - protein, 193 aa, Zea mays
  misc_feature (150)..(150): Xaa can be any naturally occurring amino acid
  misc_feature (165)..(165): Xaa can be any naturally occurring amino acid
  Coding DNA Sequence Number=SeqID_7156
  Homolog annotation: Hit_ID=Q9C7R2; Match level="QueryCoverage=83%, HitCoverage=74%, E-value=6e-53, Identity=69%"; Hit description =Putative uncharacterized protein F15D2.29
  Pfam annotation: Domain name=WCOR413; Domain location=47-193; Score =55.0; E_value=3.8e-14; Accession=PF05562.2; Description=Cold acclimation protein WCOR413
  Subcellular localization annotation: CTP_CleavageSite=72; ConfidenceScore=5.25e-01
MIRFNGKITPSSFFHHHRPLNKLHMASLCISSSRIVSLHHQKPFLSLKLRPCSSGLSGPTHRTSAVCFNPLRASLDRQRTAAAVSTNAEKQRKRGSSVVCYAAPMSVHNLQWVSAISCVALMVAKGTGIHKSFVVPLLALTAPSDIISWXRGEIWKIWTAFIALXARRGLRFFQGELELAFIALSLGDGGRHN

SEQ ID NO: 13552 - protein, 164 aa, Zea mays
  misc_feature (152)..(152): Xaa can be any naturally occurring amino acid
  misc_feature (164)..(164): Xaa can be any naturally occurring amino acid
  Coding DNA Sequence Number=SeqID_7157
  Gene Ontology: Mol. function=transporter activity; Cellular component= mitochondrial inner membrane; Biological process=transport
  Homolog annotation: Hit_ID=Q93XM7; Match level="QueryCoverage=99%, HitCoverage=54%, E-value=7e-61, Identity=77%"; Hit description =Mitochondrial carnitine/acylcarnitine carrier-like protein
  Pfam annotation: Domain name=Mito_carr; Domain location=3-98; Score =98.0; E_value=3e-26; Accession=PF00153.17; Description=Mitochondrial carrier protein
MADAAKDLASGTVGGAAQLIVGHPFDTIKVKLQSQPAPSPGQPPRYTGAIDAVKQTVASEGPKGLYKGMGAPLATVAAFNAVLFTVRGQMEGLLRSEPGVPLTISQQFVCGAGAGFAVSFLACPTELIKCRLQAQGAGGGASTTGSVVAAVXKYGGPMDVARHX

SEQ ID NO: 13553 - protein, 195 aa, Zea mays
  Coding DNA Sequence Number=SeqID_7158
  Gene Ontology: Mol. function=protochlorophyllide reductase activity; Cellular component=chloroplast; Biological process=chlorophyll biosynthetic process
  Homolog annotation: Hit_ID=P21218; Match level="QueryCoverage=100%, HitCoverage=49%, E-value=6e-65, Identity=72%"; Hit description =Protochlorophyllide reductase B, chloroplast precursor
  Pfam annotation: Domain name=adh_short; Domain location=86-188; Score= -42.6; E_value=0.0079; Accession=PF00106.15; Description=short chain dehydrogenase
  Subcellular localization annotation: CTP_CleavageSite=61; ConfidenceScore=5.72e-01
MALQAASLVSSAFSVRKDGKLNASSSSFKESSLFGASITEHGSFSFRFKREHSSRNVLAVRAQTAATSSPSVTKSSSGGKKTLRKGTVVVTGASSGLGLATAKALAETGKWHVIMACRDFLKAERAAKSAGMPKDSYTVMHLDLASLDSVRQFVDSFRRSEMPLDVLVCNAAVYFPTAKEPTYSAEGFELSVATN

SEQ ID NO: 13554 - protein, 186 aa, Zea mays
  misc_feature (148)..(148): Xaa can be any naturally occurring amino acid
  misc_feature (186)..(186): Xaa can be any naturally occurring amino acid
  Coding DNA Sequence Number=SeqID_7159
  Gene Ontology: Mol. function=metal ion binding; Cellular component =cytoplasm
  Homolog annotation: Hit_ID=Q8VZK0; Match level="QueryCoverage=99%, HitCoverage=69%, E-value=1e-103, Identity=88%"; Hit description =Putative uncharacterized protein At5g18650
  Pfam annotation: Domain name=zf-CHY; Domain location=18-100; Score =160.5; E_value=4.5e-45; Accession=PF05495.3; Description=CHY zinc finger
MEASPNDRLHFGKMGFGCQHYRRRCQIRAPCCNEIFDCRHCHNEFTSTLRNIYDRHELVRQDVKQVICSVCDTEQPVAQVCSNCGVNMGEYFCNICKFYDDNTEKQQFHCDDCGICRVGGRENFFHCKKCGSCYATGLRNNHRCVEDXMRHHCPICFQDLFDSLKKTAVMKGEHTMHCECYHEMIX

SEQ ID NO: 13555 - protein, 178 aa, Zea mays
  misc_feature (117)..(117): Xaa can be any naturally occurring amino acid
  misc_feature (130)..(130): Xaa can be any naturally occurring amino acid
  misc_feature (141)..(141): Xaa can be any naturally occurring amino acid
  misc_feature (156)..(157): Xaa can be any naturally occurring amino acid
  misc_feature (167)..(167): Xaa can be any naturally occurring amino acid
  Coding DNA Sequence Number=SeqID_7160
  Gene Ontology: Mol. function=delta14-sterol reductase activity; Cellular component=membrane; Biological process=steroid biosynthetic process
  Homolog annotation: Hit_ID=Q3EAK7; Match level="QueryCoverage=80%, HitCoverage=54%, E-value=7e-56, Identity=79%"; Hit description =Uncharacterized protein At3g52940.2
MLEMDLRLLLPSLIPSSQSVYVLVFYFVYLAVAGEILPGKVIRGVVLSDGSQLRYRCNGLFALSLLVAILGISAKLGDLSPLVGADRGLELLSATFIFCGLVTLVLYITGRTSSDKXSSLKPHVSGNLLXDWWFGIQLDPXQLLGIDLKVFFVKAXXMMGWLLINLXILEKGFSDGSP

SEQ ID NO: 13556 - protein, 180 aa, Zea mays
  misc_feature (82)..(82): Xaa can be any naturally occurring amino acid
  misc_feature (101)..(101): Xaa can be any naturally occurring amino acid
  misc_feature (159)..(159): Xaa can be any naturally occurring amino acid
  Coding DNA Sequence Number=SeqID_7161
  Gene Ontology: Mol. function=structural molecule activity; Cellular component=cytoskeleton; Biological process=actomyosin structure organization and biogenesis
  Homolog annotation: Hit_ID=P53496; Match level="QueryCoverage=97%, HitCoverage=46%, E-value=2e-88, Identity=92%"; Hit description=Actin- 11
  Pfam annotation: Domain name=Actin; Domain location=4-180; Score =32.6; E_value=2.7e-16; Accession=PF00022.9; Description=Actin
MADGEDIQPLVCDNGTGMVKAGFAGDDAPRAVFPSIVGRPRHTGVMVGMGQKDAYVGDEAQSKRGILTLKYPIEHGIVNNWXDDMEKIWHHTFYHELRVAXEEHPILLTEAPLNPKANREKMTQIMVETFNAPAMYGAIQAVLSLYASGRPTGIVLDLXDGVSHTVPNLRGYALPTHPGF

SEQ ID NO: 13557 - protein, 97 aa, Zea mays
  Coding DNA Sequence Number=SeqID_7162
  Gene Ontology: Mol. function=nucleic acid binding
  Homolog annotation: Hit_ID=Q67X81; Match level="QueryCoverage=92%, HitCoverage=44%, E-value=1e-23, Identity=60%"; Hit description =Putative poly(A) binding protein II
MEDEEHEVYGQEIPVDGEDVDMAAGDDATKLQELDDMKRRLKEMEEEAAALREMQAKVAKEMQGVDPNATTSENKEEMDSRSVFIGNVSFISSLYVN

SEQ ID NO: 13558 - protein, 174 aa, Zea mays
  misc_feature (151)..(151): Xaa can be any naturally occurring amino acid
  Coding DNA Sequence Number=SeqID_7163
  Gene Ontology: Mol. function=sugar:hydrogen symporter activity; Cellular component=membrane; Biological process=carbohydrate transport
  Homolog annotation: Hit_ID=A5B8H8; Match level="QueryCoverage=95%, HitCoverage=52%, E-value=3e-67, Identity=76%"; Hit description =Putative uncharacterized protein
  Pfam annotation: Domain name=DUF6; Domain location=19-152; Score=1.4; E_value=0.057; Accession=PF00892.11; Description=Integral membrane protein DUF6
MSSSSSSKKQTLFISTLIISWYSSNIGVLLLNKFLLSNYGFKFPIFLTMCHMSACAFLSYISIVFLKLVPLQHLKSRSQFLKVATLSVVFCASVVGGNISLRYLPVSFNQAVGATTPFFTALFAYLMTLKREAWVTYGALVPVVAGVVIAXGGEPGFHWFGFIMCISATAGRSL

SEQ ID NO: 13559 - protein, 177 aa, Zea mays
  misc_feature (121)..(121): Xaa can be any naturally occurring amino acid
  misc_feature (129)..(129): Xaa can be any naturally occurring amino acid
  Coding DNA Sequence Number=SeqID_7164
  Gene Ontology: Mol. function=oxidoreductase activity, acting on the CH-CH group of donors; Cellular component=mitochondrion; Biological process=electron transport
  Homolog annotation: Hit_ID=Q9SWG0; Match level="QueryCoverage=99%, HitCoverage=42%, E-value=1e-63, Identity=73%"; Hit description =Isovaleryl-CoA dehydrogenase, mitochondrial precursor
  Pfam annotation: Domain name=Acyl-CoA_dh_N; Domain location=33-148; Score=138.4; E_value=2.1e-38; Accession=PF02771.7; Description=Acyl -CoA dehydrogenase, N-terminal domain
MQRLFAARSVLGNAVKTRRRQHLSSLSSSLLFDETQLQVKESVSKFAQDVIAPHAERIDKTNSFPKDVNLWKLMGEFNLHGITAPEEYGGLGLGYLYHCIAMEEISRASASVALSYGAHSXNLCIHQLXRNGNTSQKHKYLPQLISGEHGGALAMSEPHGRVDGVSMKCRPDKVDGA

SEQ ID NO: 13560 - protein, 166 aa, Zea mays
  misc_feature (150)..(150): Xaa can be any naturally occurring amino acid
  Coding DNA Sequence Number=SeqID_7165
  Gene Ontology: Mol. function=structural constituent of ribosome; Cellular component=ribonucleoprotein complex; Biological process =translation
  Homolog annotation: Hit_ID=P50883; Match level="QueryCoverage=91%, HitCoverage=91%, E-value=2e-78, Identity=98%"; Hit description=60S ribosomal protein L12-1
  Pfam annotation: Domain name=Ribosomal_L11; Domain location=76-144; Score=84.7; E_value=3e-22; Accession=PF00298.9; Description =Ribosomal protein L11, RNA binding domain
  Pfam annotation: Domain name=Ribosomal_L11_N; Domain location=12-71; Score=77.1; E_value=5.7e-20; Accession=PF03946.4; Description =Ribosomal protein L11, N-terminal domain
  Pfam module annotation: Pfam domain module=Ribosomal_L11::Ribosomal _L11_N; Domain location=76-144::12-71
MPPKLDPSQIVDVYVRVTGGEVGAASSLAPKIGPLGLAPKKIGEDIAKETAKEWKGLRVTVKLTVQNRQAKVTVVPSAAALVIKALKEPERDRKKVKNIKHNGNISFDDVIEIARIMRPRSIAKELSGTVREILGTCVSVGCTVDGKDPXDLQQEIQEGEIEIPEN

SEQ ID NO: 13561 - protein, 169 aa, Zea mays
  Coding DNA Sequence Number=SeqID_7166
  Gene Ontology: Mol. function=structural constituent of ribosome; Cellular component=ribonucleoprotein complex; Biological process =translation
  Homolog annotation: Hit_ID=Q9SFU1; Match level="QueryCoverage=89%, HitCoverage=73%, E-value=4e-77, Identity=91%"; Hit description=60S ribosomal protein L13a-1
  Pfam annotation: Domain name=Ribosomal_L13; Domain location=11-127; Score=163.9; E_value=4.4e-46; Accession=PF00572.8; Description =Ribosomal protein L13
MVSGSGICSKRVVVDARHHMLGRLASIVAKELLNGQKVVIVRCEEICLSGGLVRQKMKYMRFLRKRMNTKPSHGPIHFRAPSKIFWRTVRGMIPHKTKRGAAALARMKVFEGVPPPYDKVKRMVIPDALKGLRLQAGHKYCLLGRLSSEAGGPLPPFRGWKPKGGKIPG

SEQ ID NO: 13562 - protein, 178 aa, Zea mays
  misc_feature (163)..(163): Xaa can be any naturally occurring amino acid
  Coding DNA Sequence Number=SeqID_7167
  Gene Ontology: Cellular component=oxygen evolving complex; Biological process=photosynthesis
  Homolog annotation: Hit_ID=Q8W0Y8; Match level="QueryCoverage=99%, HitCoverage=95%, E-value=2e-73, Identity=80%"; Hit description =Photosystem II reaction center PSB28 protein, chloroplast precursor
  Pfam annotation: Domain name=Psb28; Domain location=75-178; Score =184.4; E_value=2.9e-52; Accession=PF00572.8; Description=Psb28 protein
  Subcellular localization annotation: CTP_CleavageSite=68; ConfidenceScore=5.67e-01
MACFRSIGSLASLTHSPRDVSRSSGIVLTSCSVHPITRSSFTGSPISIPPVHLPSQTPTRPRNLLPITSMVKPTLQFIQGTDEMTIPDVKLTRSRDGSNGMALFSFDQPSVFDSSGEVGEITGLYMIDEEGVIQSTDVNARFVNGKPEGIVAKHVMRTPREWXDRFMRVMERYSDQNV

SEQ ID NO: 13563 - protein, 120 aa, Zea mays
  misc_feature (60)..(60): Xaa can be any naturally occurring amino acid
  misc_feature (97)..(97): Xaa can be any naturally occurring amino acid
  misc_feature (117)..(117): Xaa can be any naturally occurring amino acid
  Coding DNA Sequence Number=SeqID_7168
  Gene Ontology: Mol. function=gamma-glutamyl hydrolase activity; Cellular component=extracellular region; Biological process =glutamine metabolic process
  Homolog annotation: Hit_ID=O65355; Match level="QueryCoverage=96%, HitCoverage=34%, E-value=1e-39, Identity=69%"; Hit description=Gamma- glutamyl hydrolase precursor
MWRYVWSLLLLFVVCKDTIFMAKSAAILLPSQTGVDDSVCSAPDPSLNYKPVIGILTHPXDGATGRLNHDTNASYIAASYVKLAEAGGARVVPLIYXEPEELLFQKLDLVNGGIFTXWPG

SEQ ID NO: 13564 - protein, 172 aa, Zea mays
  misc_feature (134)..(134): Xaa can be any naturally occurring amino acid
  Coding DNA Sequence Number=SeqID_7169
  Gene Ontology: Mol. function=structural constituent of ribosome; Cellular component=ribonucleoprotein complex; Biological process =translation
  Homolog annotation: Hit_ID=A9NU91; Match level="QueryCoverage=95%, HitCoverage=64%, E-value=6e-74, Identity=85%"; Hit description =Putative uncharacterized protein
  Pfam annotation: Domain name=Ribosomal_S6e; Domain location=1-129; Score=268.4; E_value=1.5e-77; Accession=PF01092.9; Description =Ribosomal protein S6e
MKFNVANPTTGCQKKLEIDDDQKLRAFYDKRLSQEVSGDALGEEFKGYVFKIMGGCDKQGFPMKQGVLTPGRVRLLLHRGTPCFRGHGRRTGERRRKSVRGCIVSQDLSVLNLVIVKKGEKDLPGLTDTEKPRXMRGPKRASKIRKLVNLGKDDDVRKYVHTYRPQSLRKVR

SEQ ID NO: 13565 - protein, 95 aa, Zea mays
  Coding DNA Sequence Number=SeqID_7170
  Subcellular localization annotation: CTP_CleavageSite=67; ConfidenceScore=5.70e-01
RRKHFSHTTIPLSPPLSSLSLLQPSRNKALLLFRWPLCRSRSLDLLFSPPLSSRVFHMSLFPSYSLLFAAGGAPPLLRSGIWVSDLGSPAASPCE

SEQ ID NO: 13566 - protein, 172 aa, Zea mays
  misc_feature (129)..(129): Xaa can be any naturally occurring amino acid
  Coding DNA Sequence Number=SeqID_7172
  Gene Ontology: Mol. function=protein domain specific binding; Cellular component=cytoplasm; Biological process=response to stress
  Homolog annotation: Hit_ID=Q96300; Match level="QueryCoverage=77%, HitCoverage=50%, E-value=3e-64, Identity=94%"; Hit description=14-3 -3-like protein GF14 nu
  Pfam annotation: Domain name=14-3-3; Domain location=5-172; Score =134.0; E_value=4.3e-37; Accession=PF00244.10; Description=14-3-3 protein
MSSPREENVYLAKLAEQAERYEEMVEFMEKVAKTVDSEELTVEERNLLSVAYKNVIGARRASWRIISSIEQKEESRGNEDHVAIIKDYRGKIETELSKICDGILNLLDSHLVPAASLAESKVFYLKMKXGDYHREPLVKFKNWGLKKKGFFLKKTFPGGKKKFGPRKFWPFS

SEQ ID NO: 13567 - protein, 184 aa, Zea mays
  misc_feature (36)..(36): Xaa can be any naturally occurring amino acid
  misc_feature (130)..(130): Xaa can be any naturally occurring amino acid
  misc_feature (141)..(141): Xaa can be any naturally occurring amino acid
  misc_feature (160)..(160): Xaa can be any naturally occurring amino acid
  misc_feature (184)..(184): Xaa can be any naturally occurring amino acid
  Coding DNA Sequence Number=SeqID_7173
  Gene Ontology: Mol. function=receptor activity
  Homolog annotation: Hit_ID=Q9LT85; Match level="QueryCoverage=46%, HitCoverage=17%, E-value=9e-22, Identity=62%"; Hit description =Similarity to receptor protein kinase
MASLLLLLLSLSLVSFTLPTGDTHITKRKSFEIIIXGGGGNPPPSPSPEPEPEPEDCSPPPPPPPCPPPPQLPPPQRQRAPPKPPPKSRGQPPLPLLGFESPLLKKVFPVLKAFQKLVTRDPMHILKTWXGTDICNKYKYXGLECAIFPNTTDKALASIXQLTGFNFGGDKLVLHNFLDKLDTX

SEQ ID NO: 13568 - protein, 184 aa, Zea mays; identical to SEQ ID NO: 13567
  misc_feature (36)..(36): Xaa can be any naturally occurring amino acid
  misc_feature (130)..(130): Xaa can be any naturally occurring amino acid
  misc_feature (141)..(141): Xaa can be any naturally occurring amino acid
  misc_feature (160)..(160): Xaa can be any naturally occurring amino acid
  misc_feature (184)..(184): Xaa can be any naturally occurring amino acid
  Coding DNA Sequence Number=SeqID_7174
  Gene Ontology: Mol. function=receptor activity
  Homolog annotation: Hit_ID=Q9LT85; Match level="QueryCoverage=46%, HitCoverage=17%, E-value=9e-22, Identity=62%"; Hit description =Similarity to receptor protein kinase

SEQ ID NO: 13569 - protein, 162 aa, Zea mays
  misc_feature (148)..(148): Xaa can be any naturally occurring amino acid
  misc_feature (162)..(162): Xaa can be any naturally occurring amino acid
  Coding DNA Sequence Number=SeqID_7175
  Gene Ontology: Mol. function=protein binding; Cellular component =integral to membrane; Biological process=vesicle-mediated transport
  Homolog annotation: Hit_ID=P47192; Match level="QueryCoverage=97%, HitCoverage=71%, E-value=5e-80, Identity=92%"; Hit description =Vesicle-associated membrane protein 722
MAQQQSLIYSFVARGTAILVEFTDFKGNFTSVAAQCLQKLPSSNNKFTYNCDGHTFNYLVEDGFTYCVVAVDSAGRQIPMAFLERVKEDFNKRYGGGKAATAQASSLNKEFASKLKEHMQYCMDHPDEISKLAKVQAQESEVKGAMMXDIEQVLDRGEMIEX

SEQ ID NO: 13570 - protein, 165 aa, Zea mays
  Coding DNA Sequence Number=SeqID_7176
  Homolog annotation: Hit_ID=Q9FNM0; Match level="QueryCoverage=83%, HitCoverage=83%, E-value=1e-37, Identity=64%"; Hit description =Arabidopsis thaliana genomic DNA, chromosome 5, P1 clone:MCL19
MGRGKFKGKPTGQRRFSSAAEILAGTSAARPRSFKQKEAEYEEDIEEVSEEESEEEESEDESDVKKKGHEALIEVDNPNRAKPKTLKARDLDASKTTELSRREREELEKQRAHERYMRLQEQGKTEQARKDLDRLALIRQQREEAAKKREEEKAARDAKKVDARK

SEQ ID NO: 13571 - protein, 130 aa, Zea mays
  misc_feature (61)..(61): Xaa can be any naturally occurring amino acid
  misc_feature (90)..(90): Xaa can be any naturally occurring amino acid
  misc_feature (107)..(107): Xaa can be any naturally occurring amino acid
  Coding DNA Sequence Number=SeqID_7177
  Gene Ontology: Mol. function=sequence-specific DNA binding
  Homolog annotation: Hit_ID=A2YUJ5; Match level="QueryCoverage=59%, HitCoverage=52%, E-value=2e-17, Identity=67%"; Hit description =Putative uncharacterized protein
  Pfam annotation: Domain name=MBF1; Domain location=57-128; Score =25.3; E_value=0.00018; Accession=PF08523.1; Description=Multiprotein bridging factor 1
FPSLRLERGEREREEREKRERERGVGDPRRGCRVGTVDSATAKEEIRGWAGIGPIRQTWEXPGRLWRKKAPTAAAKKGWRRPSTPAPRRXAEIDPMKKYNAGTNKAXSSGTSLNTKRLDDDTENLAPLSE

SEQ ID NO: 13572 - protein, 152 aa, Zea mays
  misc_feature (152)..(152): Xaa can be any naturally occurring amino acid
  Coding DNA Sequence Number=SeqID_7178
  Gene Ontology: Mol. function=nucleotide binding; Cellular component =intracellular; Biological process=small GTPase mediated signal transduction
  Homolog annotation: Hit_ID=P36397; Match level="QueryCoverage=99%, HitCoverage=83%, E-value=3e-80, Identity=98%"; Hit description=ADP -ribosylation factor 1
  Pfam annotation: Domain name=Arf; Domain location=5-150; Score=320.9; E_value=2.3e-93; Accession=PF00025.11; Description=ADP-ribosylation factor family
  Pfam annotation: Domain name=MMR_HSR1; Domain location=18-129; Score =7.8; E_value=0.00021; Accession=PF01926.13; Description=GTPase of unknown function
  Pfam annotation: Domain name=Miro; Domain location=19-129; Score =20.4; E_value=0.00012; Accession=PF08477.3; Description=Miro-like protein
  Pfam annotation: Domain name=Ras; Domain location=19-150; Score= -55.3; E_value=3.4e-05; Accession=PF00071.12; Description=Ras family
  Pfam annotation: Domain name=SRPRB; Domain location=15-152; Score= -40.0; E_value=0.00012; Accession=PF00071.12; Description=Signal recognition particle receptor bet
  Pfam module annotation: Pfam domain module=Arf::MMR_HSR1::Miro::Ras::S RPRB; Domain location=5-150::18-129::19-129::19-150::15-152
MGLSFGKLFSKLFAKKEMRILMVGLDAAGKTTILYKLKLGEIVTTIPTIGFNVETVEYKNISFTVWDVGGQDKIRPLWRHYFQNTQGLIFVVDSNDRDRVVEARDELHRMLNEDELRDAVLLVFANKQDLPNAMNAAEITDQLGLHSLRQRX

SEQ ID NO: 13573 - protein, 125 aa, Zea mays
  misc_feature (107)..(107): Xaa can be any naturally occurring amino acid
  Coding DNA Sequence Number=SeqID_7179
  Gene Ontology: Mol. function=structural constituent of ribosome; Cellular component=ribonucleoprotein complex; Biological process =translation
  Homolog annotation: Hit_ID=Q9SIM4; Match level="QueryCoverage=90%, HitCoverage=84%, E-value=2e-50, Identity=88%"; Hit description=60S ribosomal protein L14-1
  Pfam annotation: Domain name=Ribosomal_L14e; Domain location=44-120; Score=132.8; E_value=9.6e-37; Accession=PF01929.7; Description =Ribosomal protein L14
MVFKRYVEIGRVALVNYGKDHGKLVVIVDVVDQNRALVDAPDMERIQMNFKRLSLTDIVIEINRVPKKKALIEAMEKADVKNKWEKSSWGRKLIVQKRRASLNDFEXVRIMVAKIKKGGVGQQKI

SEQ ID NO: 13574 - protein, 190 aa, Zea mays
  misc_feature (137)..(137): Xaa can be any naturally occurring amino acid
  misc_feature (151)..(151): Xaa can be any naturally occurring amino acid
  misc_feature (182)..(182): Xaa can be any naturally occurring amino acid
  Coding DNA Sequence Number=SeqID_7180
  Homolog annotation: Hit_ID=Q9C683; Match level="QueryCoverage=98%, HitCoverage=66%, E-value=3e-60, Identity=65%"; Hit description =Putative uncharacterized protein F23H24.7
  Subcellular localization annotation: CTP_CleavageSite=64; ConfidenceScore=5.79e-01
MSFSVVLFQKPYPATPTLPITTTFTISSSSSSFRPRRRLPSSTNRIFPVNQPKPITKNRQTETLAARDTIIDFGKHKGKMLGSLPSSYLRWVSKNLRAGDTEYWAKLADQVLEDDVYKDRIEWEFAEKILHGSDESXRRAEKKEVSSVSMXLEISERFGWDNGDKIGWSRVNFELLGTSRGXSIPRLGRR

SEQ ID NO: 13575 - protein, 182 aa, Zea mays
  misc_feature (156)..(156): Xaa can be any naturally occurring amino acid
  misc_feature (177)..(177): Xaa can be any naturally occurring amino acid
  Coding DNA Sequence Number=SeqID_7181
  Gene Ontology: Mol. function=NADH dehydrogenase (ubiquinone) activity; Cellular component=mitochondrial respiratory chain; Biological process=electron transport
  Homolog annotation: Hit_ID=O22769; Match level="QueryCoverage=100%, HitCoverage=71%, E-value=9e-91, Identity=91%"; Hit description=NADH -ubiquinone oxidoreductase 24 kDa subunit, mitochondrial precursor
  Pfam annotation: Domain name=Complex1_24kDa; Domain location=47-181; Score=166.1; E_value=9.6e-47; Accession=PF01257.9; Description =Respiratory-chain NADH dehydrogenase 2
MLARLAAKRLLEIRQAFRQAPSQASRSFSTALNYHLDSPDNKPDLPWEFSEANKSKVKEILSYYPSNYKQSAVIPLLDLAQQQHGGWLPVSAMNAVAKVIEVAPIRVYEVATFYSMFNRAKVGKYHLLVCGTTPCMIRGSREIESALLDHLGVGRXPATSHGLFSVGEMECMGCCVXAPMIT

SEQ ID NO: 13576 - protein, 136 aa, Zea mays; identical to SEQ ID NO: 10809
  Coding DNA Sequence Number=SeqID_7182
  Gene Ontology: Mol. function=DNA binding; Cellular component =chromosome; Biological process=nucleosome assembly
  Homolog annotation: Hit_ID=Q00YS0; Match level="QueryCoverage=100%, HitCoverage=81%, E-value=2e-58, Identity=86%"; Hit description =Histones H3 and H4
  Pfam annotation: Domain name=CBFD_NFYB_HMF; Domain location=64-129; Score=5.1; E_value=0.054; Accession=PF00808.13; Description=Histone -like transcription factor (CBFNF-Y) and archaeal histone
  Pfam annotation: Domain name=Histone; Domain location=58-132; Score =138.9; E_value=1.4e-38; Accession=PF00125.14; Description=Core histone H2AH2BH3H4
  Pfam module annotation: Pfam domain module=CBFD_NFYB_HMF::Histone; Domain location=64-129::58-132
  Subcellular localization annotation: CTP_CleavageSite=53; ConfidenceScore=5.45e-01

SEQ ID NO: 13577 - protein, 214 aa, Zea mays
  misc_feature (103)..(103): Xaa can be any naturally occurring amino acid
  misc_feature (140)..(140): Xaa can be any naturally occurring amino acid
  misc_feature (189)..(189): Xaa can be any naturally occurring amino acid
  Coding DNA Sequence Number=SeqID_7183
  Gene Ontology: Mol. function=transferase activity, transferring glycosyl groups; Biological process=metabolic process
  Homolog annotation: Hit_ID=A8MS44; Match level="QueryCoverage=98%, HitCoverage=45%, E-value=8e-80, Identity=72%"; Hit description =Uncharacterized protein At2g30140.2
MDPTESHLLRFRHVVAMPWPGRGHINPMMNLCKRLVLRDPNLTVTFVVTEEWLGLIGSDPKPDRIHFATLPNLIPSELVRANDFIGFVNAVHATLEEPFEQLXFDRLDSPPPTAIVADTYVLWAVRVRERRNIPVASLWXTMSATILSLFLHPDLLISHGHALFQPFRIQKKRRLVAYLPGLPPTKLRXDLPPLFKGYQAPRECELCFDELRRA

SEQ ID NO: 13578 - protein, 73 aa, Zea mays
  Coding DNA Sequence Number=SeqID_7184
YNEGMETLACCISSLLQIFDGTSDTETLTSLVATQSTDIHRSSKMAHTCSDQIMKREAIKNAYEQKKHSTHVY

SEQ ID NO: 13579 - protein, 147 aa, Zea mays
  misc_feature (21)..(147): Xaa can be any naturally occurring amino acid
  Coding DNA Sequence Number=SeqID_7186
AVVSGFSFLPLSSLYLLHSSXXXXXXXXXXXXXXXXXXXXXXXXXXXXXXXXXXXXXXXXXXXXXXXXXXXXXXXXXXXXXXXXXXXXXXXXXXXXXXXXXXXXXXXXXXXXXXXXXXXXXXXXXXXXXXXXXXXXXXXXXXXXXXX

SEQ ID NO: 13580 - protein, 221 aa, Zea mays
  misc_feature (1)..(93): Xaa can be any naturally occurring amino acid
  misc_feature (96)..(112): Xaa can be any naturally occurring amino acid
  misc_feature (114)..(121): Xaa can be any naturally occurring amino acid
  misc_feature (123)..(125): Xaa can be any naturally occurring amino acid
  misc_feature (127)..(132): Xaa can be any naturally occurring amino acid
  misc_feature (135)..(148): Xaa can be any naturally occurring amino acid
  misc_feature (161)..(161): Xaa can be any naturally occurring amino acid
  misc_feature (216)..(218): Xaa can be any naturally occurring amino acid
  Coding DNA Sequence Number=SeqID_7188
  Homolog annotation: Hit_ID=Q6ZB95; Match level="QueryCoverage=19%, HitCoverage=34%, E-value=1e-07, Identity=71%"; Hit description =Putative uncharacterized protein OJ1113_A10.6
XXXXXXXXXXXXXXXXXXXXXXXXXXXXXXXXXXXXXXXXXXXXXXXXXXXXXXXXXXXXXXXXXXXXXXXXXXXXXXXXXXXXXXXXXXXXXGGXXXXXXXXXXXXXXXXXSXXXXXXXXRXXXMXXXXXXAPXXXXXXXXXXXXXXVGGRDGALQGVHXHGVAAGALHRDSLRHPGAVAQGLQGRRVLMQFRPPHGATPWIHNDDDKKLPIDAXXXKNN

SEQ ID NO: 13581 - protein, 60 aa, Zea mays
  misc_feature (1)..(18): Xaa can be any naturally occurring amino acid
  misc_feature (24)..(27): Xaa can be any naturally occurring amino acid
  misc_feature (29)..(36): Xaa can be any naturally occurring amino acid
  Coding DNA Sequence Number=SeqID_7189
XXXXXXXXXXXXXXXXXXGPPLEXXXXDXXXXXXXXAHKVFQSHNKAHTNTEYSSPSSLR

SEQ ID NO: 13582 - protein, 133 aa, Zea mays
  misc_feature (82)..(82): Xaa can be any naturally occurring amino acid
  misc_feature (108)..(108): Xaa can be any naturally occurring amino acid
  Coding DNA Sequence Number=SeqID_7191
  Gene Ontology: Mol. function=structural constituent of ribosome; Cellular component=intracellular; Biological process=translation
  Homolog annotation: Hit_ID=A3C0C3; Match level="QueryCoverage=87%, HitCoverage=35%, E-value=4e-36, Identity=68%"; Hit description =Putative uncharacterized protein
  Pfam annotation: Domain name=Ribosomal_L32e; Domain location=14-115; Score=90.2; E_value=6.7e-24; Accession=PF01655.8; Description =Ribosomal protein L32
MAVHLLLKKIVKKRVKQFNRLHIVRFKCLKTSWRRPKGIDYRVRRKFKGCTLMPNIGYGSDKLTRLYLISKFKKSVVHIVFXLELLIMHNRTWCSEIAHRVSTKKRKXSCSVLPSLSLWSPFKLDRLRRQEDE

SEQ ID NO: 13583 - protein, 112 aa, Zea mays
  misc_feature (69)..(69): Xaa can be any naturally occurring amino acid
  misc_feature (90)..(90): Xaa can be any naturally occurring amino acid
  Coding DNA Sequence Number=SeqID_7192
TKEIHKEILVPTKAYFLKHSCNPLESCLLRLETHRASVDNVAREAPATCSTPSPWDLWDPFRHHVPSSXPRGGGSPPTPRTAAFASARFXLGRRRPRANGGSRPPSRRRKRG

SEQ ID NO: 13584 - protein, 75 aa, Zea mays
  Coding DNA Sequence Number=SeqID_7194
  Gene Ontology: Mol. function=helicase activity
  Homolog annotation: Hit_ID=Q5NA16; Match level="QueryCoverage=98%, HitCoverage=15%, E-value=2e-09, Identity=39%"; Hit description =Helicase-like protein
MEYTLLTDLEPHKKHATIQVCVTRKWLFRGANDNAPLQHVDMILSDQKGNAIYAEIPANLANQKAPDIEEGRIYF

SEQ ID NO: 13585 - protein, 75 aa, Zea mays; identical to SEQ ID NO: 13584
  Coding DNA Sequence Number=SeqID_7195
  Gene Ontology: Mol. function=helicase activity
  Homolog annotation: Hit_ID=Q5NA16; Match level="QueryCoverage=98%, HitCoverage=15%, E-value=2e-09, Identity=39%"; Hit description =Helicase-like protein

SEQ ID NO: 13586 - protein, 144 aa, Zea mays
  Coding DNA Sequence Number=SeqID_7196
  Gene Ontology: Mol. function=structural constituent of ribosome; Cellular component=ribonucleoprotein complex; Biological process =translation
  Homolog annotation: Hit_ID=P16180; Match level="QueryCoverage=81%, HitCoverage=85%, E-value=7e-41, Identity=70%"; Hit description=30S ribosomal protein S17, chloroplast precursor
  Pfam annotation: Domain name=Ribosomal_S17; Domain location=54-122; Score=139.0; E_value=1.3e-38; Accession=PF00366.10; Description =Ribosomal protein S17
  Subcellular localization annotation: CTP_CleavageSite=47; ConfidenceScore=5.80e-01
MASLASSLQSLKISSSPFTHGSTPLSSLSKPISFPNTRKPGLVPGIRAMKTMQGRVVCATNDKTVAVEVTRLAPHPKYKRRVRMKKKYQAHDPDNVFKVGDVVRLEKSRPISKTKSFVALPVLKRNDLGIPMESQQPSPPPGEE

SEQ ID NO: 13587 - protein, 130 aa, Zea mays
  misc_feature (16)..(16): Xaa can be any naturally occurring amino acid
  misc_feature (52)..(52): Xaa can be any naturally occurring amino acid
  misc_feature (62)..(62): Xaa can be any naturally occurring amino acid
  Coding DNA Sequence Number=SeqID_7197
LELIQLLVLRQPLLVXAGRPDLVDTGTDWLPDHILSAAFPGHFWPLVLDPYXGSWFGLLVPXRGLESGAFGVRGVDAALALDPEAEAEGRKKRKHPRRSRAAQASLELMSDSGLRRRLEPTGLGLRRRHR

SEQ ID NO: 13588 - protein, 171 aa, Zea mays
  Coding DNA Sequence Number=SeqID_7199
  Gene Ontology: Mol. function=caffeoyl-CoA O-methyltransferase activity; Cellular component=integral to membrane; Biological process=lignin biosynthetic process
  Homolog annotation: Hit_ID=Q9C9W3; Match level="QueryCoverage=100%, HitCoverage=73%, E-value=3e-72, Identity=79%"; Hit description =Putative caffeoyl-CoA O-methyltransferase At1g67980
  Pfam annotation: Domain name=Methyltransf_3; Domain location=21-171; Score=220.2; E_value=4.9e-63; Accession=PF01596.8; Description=O -methyltransferase
MSDEIPPKGILKSEALRQYILETSAYPREHELLKELRKVTEEKFGNLIEMVIPVDEGIFLSMLLKIINAKNTLELGVFTGYSLLTTALALPEDGRITAIDIDKEAYEVRLEFMKKAGVDHKINFIYCDGMEVLHKLVNDNQEFDFIFADADKPNYLNFLERFLKLEKVGGI

SEQ ID NO: 13589 - protein, 190 aa, Zea mays
  misc_feature (100)..(100): Xaa can be any naturally occurring amino acid
  misc_feature (115)..(115): Xaa can be any naturally occurring amino acid
  misc_feature (131)..(131): Xaa can be any naturally occurring amino acid
  misc_feature (142)..(142): Xaa can be any naturally occurring amino acid
  misc_feature (151)..(151): Xaa can be any naturally occurring amino acid
  misc_feature (164)..(164): Xaa can be any naturally occurring amino acid
  misc_feature (174)..(174): Xaa can be any naturally occurring amino acid
  Coding DNA Sequence Number=SeqID_7200
  Gene Ontology: Mol. function=iron-sulfur cluster binding; Cellular component=plastid; Biological process=lipoate biosynthetic process
  Homolog annotation: Hit_ID=Q8LSZ8; Match level="QueryCoverage=100%, HitCoverage=57%, E-value=3e-66, Identity=63%"; Hit description =Lipoic acid synthase
  Subcellular localization annotation: CTP_CleavageSite=35; ConfidenceScore=5.59e-01
MIHHCSITKPTFSVPIPSHKHRHSTTFSNLTFRIRCESKDVSSMRTNAFSLSSEMESEVKKSDLYPGGMPKMGPFTGRDPNVKKPAWLRQKAPQGERFQXEVKESLTRLKLNTVXCEEAQCPNIGECWNGXGGDGIATATIXVLGDTCTTXRWGVDYLVITSVXRDDLPDGESXHFAQTVKAMKRLKPEI

SEQ ID NO: 13590 - protein, 166 aa, Zea mays
  misc_feature (133)..(133): Xaa can be any naturally occurring amino acid
  misc_feature (144)..(144): Xaa can be any naturally occurring amino acid
  Coding DNA Sequence Number=SeqID_7201
  Homolog annotation: Hit_ID=Q9FKX3; Match level="QueryCoverage=84%, HitCoverage=68%, E-value=1e-34, Identity=61%"; Hit description =Genomic DNA, chromosome 5, TAC clone:K2A18
  Subcellular localization annotation: CTP_CleavageSite=56; ConfidenceScore=5.54e-01
MASLHSLAAVSVIATKGTAVTSSCSSTLRPLSSLRFKPRELSIFPNHRKGKGGAIKAQSKEASLPPPTVGEGDALTSMKHLLLPVIDRNPYLSEGTRQAAATTTSLATKYGADITGVVIDEEKRESSSEHETXQVSNIRWHLSXEGGFEEFKLLESLGEGKKALPL

SEQ ID NO: 13591 - protein, 154 aa, Zea mays
  misc_feature (154)..(154): Xaa can be any naturally occurring amino acid
  Coding DNA Sequence Number=SeqID_7202
YFGSTLKVSVKAYHPINKANPTLVHFLGIKKYQMTTEPEKKRRLIKQKSEILIKAQKDPLVSIVRSQKIGRGFWSSQPSVSQIKRQKVRIEIKIRRENKEWMGDRKWTIVQLPRQTMDEQSNLQKRVAAVRRRGRIAAQRWSGLGTRSSDVPAX

SEQ ID NO: 13592 - protein, 104 aa, Zea mays
  Coding DNA Sequence Number=SeqID_7204
  Homolog annotation: Hit_ID=A7PV94; Match level="QueryCoverage=58%, HitCoverage=52%, E-value=3e-32, Identity=93%"; Hit description =Chromosome chr4 scaffold_32, whole genome shotgun sequence
  Subcellular localization annotation: CTP_CleavageSite=40; ConfidenceScore=5.31e-01
MPSSAHAHAHGLIIISLILVSIFLPNVNLANGGATSMQMMMMMNESRRKLGSFQICALCNCCGGAKGICLPSPCCYAINCNIPNRPFGFCSFTPKTCNCFECHL

SEQ ID NO: 13593 - protein, 104 aa, Zea mays; identical to SEQ ID NO: 13592
  Coding DNA Sequence Number=SeqID_7205
  Homolog annotation: Hit_ID=A7PV94; Match level="QueryCoverage=58%, HitCoverage=52%, E-value=3e-32, Identity=93%"; Hit description =Chromosome chr4 scaffold_32, whole genome shotgun sequence
  Subcellular localization annotation: CTP_CleavageSite=40; ConfidenceScore=5.31e-01

SEQ ID NO: 13594 - protein, 203 aa, Zea mays
  misc_feature (111)..(111): Xaa can be any naturally occurring amino acid
  Coding DNA Sequence Number=SeqID_7206
  Gene Ontology: Mol. function=transcription regulator activity; Biological process=regulation of transcription
  Homolog annotation: Hit_ID=A2Q3A4; Match level="QueryCoverage=94%, HitCoverage=90%, E-value=5e-41, Identity=51%"; Hit description =Putative uncharacterized protein
MEGQPAKRRRVYSLEPNKVEQAAFARNYMNYLVPALMKIKERSTSSDQHSGYCDDNIQNVVKYEVDMAMVHSAQGFAWSNALSVKLQRDRVNVDCDTTSFGEGSSSSRVCXQNCEMVPLDNFPSNPSLKSNNKCKEMPEMKRGLREDDDGDEDEVINGQLKSLRRLMPGGEEMCSEQMVTELQSYVSCLQMQVNILRCLAETH

SEQ ID NO: 13595 - protein, 203 aa, Zea mays; identical to SEQ ID NO: 13594
  misc_feature (111)..(111): Xaa can be any naturally occurring amino acid
  Coding DNA Sequence Number=SeqID_7207
  Gene Ontology: Mol. function=transcription regulator activity; Biological process=regulation of transcription
  Homolog annotation: Hit_ID=A2Q3A4; Match level="QueryCoverage=94%, HitCoverage=90%, E-value=5e-41, Identity=51%"; Hit description =Putative uncharacterized protein

SEQ ID NO: 13596 - protein, 208 aa, Zea mays
  misc_feature (1)..(57): Xaa can be any naturally occurring amino acid
  misc_feature (59)..(79): Xaa can be any naturally occurring amino acid
  misc_feature (81)..(86): Xaa can be any naturally occurring amino acid
  misc_feature (195)..(196): Xaa can be any naturally occurring amino acid
  Coding DNA Sequence Number=SeqID_7208
XXXXXXXXXXXXXXXXXXXXXXXXXXXXXXXXXXXXXXXXXXXXXXXXXXXXXXXXXSXXXXXXXXXXXXXXXXXXXXXVXXXXXXWGFHSWGWIHMAGSLRPPGGGGGLVIHHCDPLLCIDPQQRFIVGIGTTPSRSRHTTLDSIPIPSLSLGNRFSENNIQGDPTPCRSCSLLFFILIQFHNTNPHQFHFPFXXGRKKKKKKKKKK

SEQ ID NO: 13597 - protein, 96 aa, Zea mays
  misc_feature (42)..(43): Xaa can be any naturally occurring amino acid
  Coding DNA Sequence Number=SeqID_7210
IKFYQKFLRQTPQGCTEPRFHHTGGGRNLKYHGMALLFWRAXXFLICFVRARGQSKGYSKNFFGPGCNTKKIIWGGYFSSFFKLGNCSPRCASRKV

SEQ ID NO: 13598 - protein, 202 aa, Zea mays
  misc_feature (202)..(202): Xaa can be any naturally occurring amino acid
  Coding DNA Sequence Number=SeqID_7212
  Homolog annotation: Hit_ID=A7QF25; Match level="QueryCoverage=99%, HitCoverage=26%, E-value=3e-28, Identity=41%"; Hit description =Chromosome chr16 scaffold_86, whole genome shotgun sequence
PAFAEQLRLKDEKLEAFRWQLLRTELEMKQMRAHVEGQVKDVTQLRHDKMRLETLLLEREDELTSLKEQFVSKLRPLKNNSNLPPQSSELAQYAVWSRVKVVKRKPGEKVLETMETLVEEDCEKEVQCLPHDQLNSANLLVQSQENEIEEEKGVSREDSPTPMQNQSPNKVEADASEKIASTSQTLSTTKQSLWKMDLHALX

SEQ ID NO: 13599 - protein, 202 aa, Zea mays; identical to SEQ ID NO: 13598
  misc_feature (202)..(202): Xaa can be any naturally occurring amino acid
  Coding DNA Sequence Number=SeqID_7213
  Homolog annotation: Hit_ID=A7QF25; Match level="QueryCoverage=99%, HitCoverage=26%, E-value=3e-28, Identity=41%"; Hit description =Chromosome chr16 scaffold_86, whole genome shotgun sequence

SEQ ID NO: 13600 - protein, 74 aa, Zea mays
  Coding DNA Sequence Number=SeqID_7214
  Gene Ontology: Mol. function=cycloeucalenol cycloisomerase activity; Cellular component=integral to membrane
  Homolog annotation: Hit_ID=A7PHF1; Match level="QueryCoverage=94%, HitCoverage=24%, E-value=1e-28, Identity=85%"; Hit description =Chromosome chr17 scaffold_16, whole genome shotgun sequence
YFIVSFPMFLRIDEKPGDKWDLPRVAVDALGAAMLVTIILDLWRIFLGPIVPIADTKQCPQVGLPWFTGHANLK

SEQ ID NO: 13601 - protein, 74 aa, Zea mays; identical to SEQ ID NO: 13600
  Coding DNA Sequence Number=SeqID_7215
  Gene Ontology: Mol. function=cycloeucalenol cycloisomerase activity; Cellular component=integral to membrane
  Homolog annotation: Hit_ID=A7PHF1; Match level="QueryCoverage=94%, HitCoverage=24%, E-value=1e-28, Identity=85%"; Hit description =Chromosome chr17 scaffold_16, whole genome shotgun sequence

SEQ ID NO: 13602 - protein, 198 aa, Zea mays
  Coding DNA Sequence Number=SeqID_7216
  Gene Ontology: Mol. function=DNA binding; Cellular component=nucleus; Biological process=regulation of transcription
  Homolog annotation: Hit_ID=A7QEB8; Match level="QueryCoverage=76%, HitCoverage=33%, E-value=2e-75, Identity=86%"; Hit description =Chromosome chr1 scaffold_84, whole genome shotgun sequence
  Pfam annotation: Domain name=Myb_DNA-binding; Domain location=102 -147; Score=52.5; E_value=1.5e-12; Accession=PF00249.21; Description =Myb-like DNA-binding domain
  Pfam annotation: Domain name=Myb_DNA-binding; Domain location=50-96; Score=55.1; E_value=2.5e-13; Accession=PF00249.21; Description=Myb -like DNA-binding domain
  Pfam module annotation: Pfam domain module=Myb_DNA-binding::Myb_DNA -binding; Domain location=102-147::50-96
APPSPPPNNNINEKTNHNNGKFSEEESNPNENNPAGGKEVDSGHSKLCARGHWRPAEDSKLKELVALHGPQNWNLIAEKLEGRSGKSCRLRWFNQLDPRINRRAFSEEEEERLMQAHRIYGNKWAMIARLFPGRTDNAVKNHWHVIMARKYREQSSAYRRRRMSQPVYRRVDQNPTFVCSSRDNNASTTEPEPESSPS

SEQ ID NO: 13603 - protein, 96 aa, Zea mays
  Coding DNA Sequence Number=SeqID_7217
GLLSFESSSTIAMDIEETNIIEVETKVMNLALNMESMNILSIRVHNLIEDFTEDVILHIRSRYIRLEPHGFTPSHISELLRGHQVDESHHIGGKDR

SEQ ID NO: 13604 - protein, 202 aa, Zea mays
  misc_feature (80)..(80): Xaa can be any naturally occurring amino acid
  misc_feature (105)..(105): Xaa can be any naturally occurring amino acid
  misc_feature (134)..(134): Xaa can be any naturally occurring amino acid
  misc_feature (173)..(173): Xaa can be any naturally occurring amino acid
  misc_feature (183)..(183): Xaa can be any naturally occurring amino acid
  Coding DNA Sequence Number=SeqID_7219
  Gene Ontology: Mol. function=superoxide dismutase activity; Cellular component=chloroplast; Biological process=superoxide metabolic process
  Homolog annotation: Hit_ID=P36214; Match level="QueryCoverage=81%, HitCoverage=79%, E-value=2e-25, Identity=51%"; Hit description =Superoxide dismutase [Cu-Zn], chloroplast precursor
  Pfam annotation: Domain name=Sod_Cu; Domain location=52-197; Score= -20.3; E_value=1e-05; Accession=PF00080.10; Description=Copperzinc superoxide dismutase (SODC)
  Subcellular localization annotation: CTP_CleavageSite=56; ConfidenceScore=5.94e-01
MQLAMAANAVVSPSPFRPQPFLRSSFSGVSVKLTPQSITLSRSKPLTVFAATKRAVAVLKGTSRRRRRRHSHPRRRWPDXQFLFASLALLRGLHGFSPNMSMVIXQMGCYFYGEHIFNPNKFDTWCSWRDEVPXHAGDLGNIVAMAKGGFAEGYNWWIIRYHSPGPNSVSWKXLGAHDLGDDXLGKGGHGLSLKLEKVGKKT

SEQ ID NO: 13605 - protein, 202 aa, Zea mays; identical to SEQ ID NO: 13604
  misc_feature (80)..(80): Xaa can be any naturally occurring amino acid
  misc_feature (105)..(105): Xaa can be any naturally occurring amino acid
  misc_feature (134)..(134): Xaa can be any naturally occurring amino acid
  misc_feature (173)..(173): Xaa can be any naturally occurring amino acid
  misc_feature (183)..(183): Xaa can be any naturally occurring amino acid
  Coding DNA Sequence Number=SeqID_7220
  Gene Ontology: Mol. function=superoxide dismutase activity; Cellular component=chloroplast; Biological process=superoxide metabolic process
  Homolog annotation: Hit_ID=P36214; Match level="QueryCoverage=81%, HitCoverage=79%, E-value=2e-25, Identity=51%"; Hit description =Superoxide dismutase [Cu-Zn], chloroplast precursor
  Pfam annotation: Domain name=Sod_Cu; Domain location=52-197; Score= -20.3; E_value=1e-05; Accession=PF00080.10; Description=Copperzinc superoxide dismutase (SODC)
  Subcellular localization annotation: CTP_CleavageSite=56; ConfidenceScore=5.94e-01

SEQ ID NO: 13606 - protein, 175 aa, Zea mays
  misc_feature (91)..(91): Xaa can be any naturally occurring amino acid
  misc_feature (105)..(105): Xaa can be any naturally occurring amino acid
  Coding DNA Sequence Number=SeqID_7221
  Homolog annotation: Hit_ID=A3BJX4; Match level="QueryCoverage=30%, HitCoverage=13%, E-value=8e-16, Identity=83%"; Hit description =Putative uncharacterized protein
  Subcellular localization annotation: CTP_CleavageSite=48; ConfidenceScore=5.02e-01
MAMGTATISCSYPQLRYRPSPPCRRHGPAAATVAALATPRSEQDIVIVGAAVAGLAPAVPLRRLGVGAAVLEQGDPLRAGGTSLTLVKNGXRVLDAIRVADELRXQVPPHPGVRPSSPWCVPLPARCRSRIIPVWSELHREVPAGPRRMMVRSPGRNLPEFSFDEEPPGDCSFPP

SEQ ID NO: 13607 - protein, 175 aa, Zea mays; identical to SEQ ID NO: 13606
  misc_feature (91)..(91): Xaa can be any naturally occurring amino acid
  misc_feature (105)..(105): Xaa can be any naturally occurring amino acid
  Coding DNA Sequence Number=SeqID_7222
  Homolog annotation: Hit_ID=A3BJX4; Match level="QueryCoverage=30%, HitCoverage=13%, E-value=8e-16, Identity=83%"; Hit description =Putative uncharacterized protein
  Subcellular localization annotation: CTP_CleavageSite=48; ConfidenceScore=5.02e-01

SEQ ID NO: 13608 - protein, 184 aa, Zea mays
  Coding DNA Sequence Number=SeqID_7223
  Pfam annotation: Domain name=DUF588; Domain location=63-183; Score =52.7; E_value=1.3e-12; Accession=PF04535.3; Description=Domain of unknown function (DUF588)
ESHTRPAATDCSSVLRFLATMDLERGDKKPPPPPPPAPRTAAATTTTTTTPACSGKKRPPLRDSLVALQPVLLRAAAALAAAAAAAVMALDAQSYTAVVAIVGTRPLTQTFTAKFSDTPAFVYFVIANAIAAAYNLLVLLVRRRRRTTAGLVVRMLDMVVMALLADRRRRGVHLSVHVCIILAS

SEQ ID NO: 13609 - protein, 151 aa, Zea mays
  misc_feature (53)..(53): Xaa can be any naturally occurring amino acid
  misc_feature (79)..(79): Xaa can be any naturally occurring amino acid
  Coding DNA Sequence Number=SeqID_7224
  Subcellular localization annotation: CTP_CleavageSite=29; ConfidenceScore=5.08e-01
RISRVPIAFLNGFTPVYPNPRGSRGGPSRAELTKPVPYRLGPYMGRIDVTTLXSLALSFSTSQAVVPSIAASEKTSAAXHCHLFRQRGNTQPPPTGPRRALLGNHLGALVVCVGSPGSGGDPGTGNCSSAQQFHRRAALPRGWASSPLDRR

SEQ ID NO: 13610 - protein, 95 aa, Zea mays
  Coding DNA Sequence Number=SeqID_7226
  Homolog annotation: Hit_ID=Q67XY2; Match level="QueryCoverage=80%, HitCoverage=76%, E-value=2e-28, Identity=80%"; Hit description =Putative uncharacterized protein At1g22520
  Pfam annotation: Domain name=DUF543; Domain location=1-74; Score =104.1; E_value=4.4e-28; Accession=PF04418.3; Description=Domain of unknown function (DUF543)
MGEGKESVPQEHDVNAKWDACIDLTTRRFVYSSLGGAFAGLLFFRSPVTRWASIAFGAGLGIGSAYTDCSRAFDAPPSFTETSSVSQTVSQSADE

SEQ ID NO: 13611 - protein, 131 aa, Zea mays
  misc_feature (118)..(118): Xaa can be any naturally occurring amino acid
  misc_feature (120)..(121): Xaa can be any naturally occurring amino acid
  Coding DNA Sequence Number=SeqID_7227
IPNLPPHVPLSTVLPVPCPCRDRWLAAPNDDDRAAMTTTTTPTAVAVVNVVAVAQLYVGPPPARVPPPRPWPRNPLPWNRRASSSTSTAAADSHRHHAAHAPSLGPPSASSLPLPPAXTXXLGPPNIVVSI

SEQ ID NO: 13612 - protein, 106 aa, Zea mays
  misc_feature (4)..(4): Xaa can be any naturally occurring amino acid
  Coding DNA Sequence Number=SeqID_7229
GVGXARGTSRSRRTAGRRLTVDEPGKGGGGSAWQVAVGPSAVGDWGRGAPVTGGRGSGPGSAACSLQVEKGRLWPWARRGDAGHRSRRWELLQPLRAACRSGGGGG

SEQ ID NO: 13613 - protein, 143 aa, Zea mays
  Coding DNA Sequence Number=SeqID_7231
  Gene Ontology: Mol. function=hydrogen ion transmembrane transporter activity; Cellular component=proton-transporting ATP synthase complex, coupling factor F(o); Biological process=proton transport
  Homolog annotation: Hit_ID=Q9SJ12; Match level="QueryCoverage=87%, HitCoverage=52%, E-value=5e-54, Identity=86%"; Hit description =Probable ATP synthase 24 kDa subunit, mitochondrial precursor
MAYASRFLSRSKQLRGSLVILQQHHAIPVRAFAKEAARPTFKGDEMLKGVFTEIKNNFLAAVDILRKEKITLDPEDPAAVKQYANVMKTIRQKADMFSESQRITYDIENETKEIPDARASLLEVEGYPHPGGGLLDELGAEGP

SEQ ID NO: 13614 - protein, 213 aa, Zea mays
  misc_feature (20)..(21): Xaa can be any naturally occurring amino acid
  Coding DNA Sequence Number=SeqID_7232
ARPQRRVRVAGHWRLEHGSXXDDMQPRPGGRPRRGCATRDAGARAWRGPRPQRLPSQRTSPWRGGPRPQRLGRGTTMAAQGAAPWRRGRAASARWQAAMARYRRAASLGGAALAARCYSVSRGRGPTTSSPDADACRELLWTHSARCGQDTPSIDARKMSRITKDEASRNITAMASCKTASGQQSAAVCLSFLFGVCELHLFVLAWRHPAESS

SEQ ID NO: 13615 - protein, 204 aa, Zea mays
  misc_feature (159)..(159): Xaa can be any naturally occurring amino acid
  misc_feature (190)..(190): Xaa can be any naturally occurring amino acid
  Coding DNA Sequence Number=SeqID_7234
  Gene Ontology: Mol. function=structural constituent of ribosome; Cellular component=ribonucleoprotein complex; Biological process =translation
  Homolog annotation: Hit_ID=Q9SYL9; Match level="QueryCoverage=100%, HitCoverage=84%, E-value=1e-93, Identity=84%"; Hit description=50S ribosomal protein L13, chloroplast precursor
  Pfam annotation: Domain name=Ribosomal_L13; Domain location=106-204; Score=160.1; E_value=6e-45; Accession=PF00572.8; Description =Ribosomal protein L13
  Subcellular localization annotation: CTP_CleavageSite=57; ConfidenceScore=5.92e-01
MAILCSSSAVILPSSSSVKTSGCNRRSSFLGFSLNAISKPPVRVATNANTKRGVQVKCEAEQTTTTSLVPANQRWMFDEEEANGPDIWNTTWYPKASDHVNTDKPWYVVDATDKILGRLASTIANHIRGKNLASYTPSVDMGAFVIVVNAEKVAVSGKXRNQKLYRRHSGRPGRMTVETFDQLQQRIPEXIIEHAVRGMAPKGR

SEQ ID NO: 13616 - protein, 180 aa, Zea mays
  misc_feature (171)..(171): Xaa can be any naturally occurring amino acid
  Coding DNA Sequence Number=SeqID_7235
  Homolog annotation: Hit_ID=Q8L8X4; Match level="QueryCoverage=85%, HitCoverage=82%, E-value=8e-17, Identity=37%"; Hit description =Putative uncharacterized protein
MLFAAEGGGFFSSSASGYINGLALLLLGHKDEPKPVIVSPWRHYHLVVEETDTKFQLDSSKKWLSRACTSLTCFGRKSDRPENPSQPQDFPSDKRDDAQQSVDYECSNRFALKSSLKKRSFSDALLADEEDDDVSRDNGALNHADRREVQWPDTCGIEIAEVREFEPSEVXELDDELHHE

SEQ ID NO: 13617 - protein, 172 aa, Zea mays
  misc_feature (6)..(6): Xaa can be any naturally occurring amino acid
  misc_feature (168)..(168): Xaa can be any naturally occurring amino acid
  misc_feature (172)..(172): Xaa can be any naturally occurring amino acid
  Coding DNA Sequence Number=SeqID_7236
  Gene Ontology: Mol. function=cytochrome-c oxidase activity; Cellular component=mitochondrial envelope; Biological process=electron transport
  Homolog annotation: Hit_ID=Q9LW15; Match level="QueryCoverage=91%, HitCoverage=89%, E-value=2e-53, Identity=70%"; Hit description =Cytochrome c oxidase subunit Vb-like protein
  Pfam annotation: Domain name=COX5B; Domain location=60-161; Score =63.3; E_value=8e-16; Accession=PF01215.9; Description=Cytochrome c oxidase subunit Vb
  Subcellular localization annotation: CTP_CleavageSite=53; ConfidenceScore=5.44e-01
MWRRIXVSSHLKALAADVAAASPRRSIATTTTARPVHFHRADNPASSSSVTPRCFSSESVETIAKKKVEDVMPIATGHEKEELEAELEGRRLLDIDFPEGPFGTKEAPAIVKSYYDKRIVGCPGGEGEDEHDVVWVWLEKGKSFECPGCTQYFELEVVGPGGPPDGHXDEDX

SEQ ID NO: 13618 - protein, 146 aa, Zea mays
  Coding DNA Sequence Number=SeqID_7237
  Gene Ontology: Mol. function=calcium ion binding; Cellular component =membrane; Biological process=protein transport
  Homolog annotation: Hit_ID=P93645; Match level="QueryCoverage=39%, HitCoverage=38%, E-value=3e-23, Identity=89%"; Hit description =Vacuolar sorting receptor homolog
YLQLLLLLPASIIHGGARGGTRTAAANQALALLTFLPAPESGGAGWLGLGLRGRRGHLPRSLRAPLPSPPRRRRGSGRRFHLGRPTVGWSFLWVIFFGLVFAGVGAYAGSKYRLRSYMDSKIRAIMVKYMPLDNQKGANQHQVGTP

SEQ ID NO: 13619 - protein, 68 aa, Zea mays
  Coding DNA Sequence Number=SeqID_7238
TLHSYINLAMITTNNSLWSNKISRLPIRICNIKSKDLYMCIYISPSVLAMPMVSSRTTGFRGIEDDRS

SEQ ID NO: 13620 - protein, 138 aa, Zea mays
  Coding DNA Sequence Number=SeqID_7240
  Gene Ontology: Mol. function=structural constituent of ribosome; Cellular component=cytosolic small ribosomal subunit; Biological process=negative regulation of transcription, DNA-dependent
  Homolog annotation: Hit_ID=Q9SIH0; Match level="QueryCoverage=100%, HitCoverage=92%, E-value=7e-60, Identity=86%"; Hit description=40S ribosomal protein S14-1
  Pfam annotation: Domain name=Ribosomal_S11; Domain location=28-137; Score=220.0; E_value=5.5e-63; Accession=PF00411.9; Description =Ribosomal protein S11
MSRRKTREPKEETVTLGPAVRDGEQVFGVVHIFASFNDTFIHVTDLSGRETLVRITGGMKVKADRDESSPYAAMLAAQDVAQRCKELGITAMHVKLRATGGNKTKTPGPGAQSALRALARSGMKIGRIEDVTPIPTDS

SEQ ID NO: 13621 - protein, 120 aa, Zea mays
  misc_feature (1)..(1): Xaa can be any naturally occurring amino acid
  misc_feature (61)..(61): Xaa can be any naturally occurring amino acid
  Coding DNA Sequence Number=SeqID_7241
  Gene Ontology: Mol. function=protein serine/threonine phosphatase activity; Cellular component=protein serine/threonine phosphatase complex; Biological process=protein amino acid dephosphorylation
  Homolog annotation: Hit_ID=A3A362; Match level="QueryCoverage=85%, HitCoverage=33%, E-value=3e-32, Identity=68%"; Hit description =Putative uncharacterized protein
XGTWRVFGVLAVSRAFGDKLLKQYVLVDPEIREEVVDDTLEFLILASDPLWDVVFNEEAVXMTGSIKDPEEAAMMLFLKAHKRESKDNITSVVVRFLHGQGSRGYAPCVHGQVILRSVVL

SEQ ID NO: 13622 - protein, 145 aa, Zea mays
  misc_feature (75)..(75): Xaa can be any naturally occurring amino acid
  misc_feature (90)..(90): Xaa can be any naturally occurring amino acid
  misc_feature (101)..(101): Xaa can be any naturally occurring amino acid
  misc_feature (103)..(103): Xaa can be any naturally occurring amino acid
  misc_feature (107)..(107): Xaa can be any naturally occurring amino acid
  misc_feature (109)..(110): Xaa can be any naturally occurring amino acid
  misc_feature (112)..(112): Xaa can be any naturally occurring amino acid
  misc_feature (114)..(115): Xaa can be any naturally occurring amino acid
  misc_feature (118)..(121): Xaa can be any naturally occurring amino acid
  misc_feature (125)..(126): Xaa can be any naturally occurring amino acid
  misc_feature (128)..(128): Xaa can be any naturally occurring amino acid
  misc_feature (130)..(133): Xaa can be any naturally occurring amino acid
  Coding DNA Sequence Number=SeqID_7242
  Homolog annotation: Hit_ID=Q9SBX4; Match level="QueryCoverage=68%, HitCoverage=20%, E-value=2e-31, Identity=70%"; Hit description =Proline-rich protein precursor
  Pfam annotation: Domain name=DUF1210; Domain location=43-142; Score= -11.9; E_value=0.00017; Accession=PF06735.2; Description=Protein of unknown function (DUF1210)
  Subcellular localization annotation: CTP_CleavageSite=29; ConfidenceScore=5.23e-01
NRSGPRRLRRADGNRDRTRPPPRPVSMVVAVTRSASSDACSVVVGLATSVYCTRKSLKTEAAFKGLEVAIKCKNXKGEYQSKAMGKLDGXSAFSIPLSTDXHXADCXGXXHXSXXNPXXXXEPFXXAXQXXXXLTSTLDCFPFVS

SEQ ID NO: 13623 - protein, 112 aa, Zea mays
  Coding DNA Sequence Number=SeqID_7243
PNPRTHQRPGTPGDPPRRLLLYLSIDCTKGNLHQTDAQGLQPYRTQRARSLGRQPLIFDPSKLGNGSQTAGTVVKGCPPEELKPPLTWAGKRGSQIRSADRGRSGGDDAWGP

SEQ ID NO: 13624 - protein, 137 aa, Zea mays
  Coding DNA Sequence Number=SeqID_7245
GFFRYQTCRRLRHLTALPKQLPHGPRRCCPATGEARRLARLPLRLASQLLLHPWCVVMEAAGLGIRSPVWRGQPARPTSAVFLRRAFPSDCDPFSSFEESTIKHGDQVIELFEFYEIEDPEHLVGGDQGSSDLLCPI

SEQ ID NO: 13625 - protein, 130 aa, Zea mays
  misc_feature (121)..(130): Xaa can be any naturally occurring amino acid
  Coding DNA Sequence Number=SeqID_7247
SPFWRSETIRASGNMGPPTPRATPASRDHHSPNHPPEAFPELPPPRRVQVTPIPWERGNLRQRGAGGVAPPPPGGSGGCPKGGPPPPPPGEGAPWGGGGGKRHQRFLGDGPPPRGGGVSGXXXXXXXXXX

SEQ ID NO: 13626 - protein, 122 aa, Zea mays
  misc_feature (1)..(18): Xaa can be any naturally occurring amino acid
  misc_feature (21)..(28): Xaa can be any naturally occurring amino acid
  misc_feature (30)..(34): Xaa can be any naturally occurring amino acid
  misc_feature (70)..(71): Xaa can be any naturally occurring amino acid
  Coding DNA Sequence Number=SeqID_7249
XXXXXXXXXXXXXXXXXXFSXXXXXXXXYXXXXXDSDDDDEGPGEILGDILKAMNHTPAHEDGVERKPGXXAQAVRGAVPQPGRLRLRALIQVAIVVVQDKCRQEVAAKMNDLRAWRSPCCS

SEQ ID NO: 13627 - protein, 107 aa, Zea mays
  misc_feature (1)..(17): Xaa can be any naturally occurring amino acid
  misc_feature (19)..(30): Xaa can be any naturally occurring amino acid
  misc_feature (33)..(34): Xaa can be any naturally occurring amino acid
  misc_feature (36)..(37): Xaa can be any naturally occurring amino acid
  misc_feature (40)..(44): Xaa can be any naturally occurring amino acid
  misc_feature (47)..(47): Xaa can be any naturally occurring amino acid
  misc_feature (52)..(53): Xaa can be any naturally occurring amino acid
  misc_feature (55)..(56): Xaa can be any naturally occurring amino acid
  misc_feature (58)..(58): Xaa can be any naturally occurring amino acid
  misc_feature (64)..(64): Xaa can be any naturally occurring amino acid
  misc_feature (68)..(70): Xaa can be any naturally occurring amino acid
  misc_feature (76)..(77): Xaa can be any naturally occurring amino acid
  misc_feature (90)..(91): Xaa can be any naturally occurring amino acid
  misc_feature (102)..(103): Xaa can be any naturally occurring amino acid
  Coding DNA Sequence Number=SeqID_7251
XXXXXXXXXXXXXXXXXPXXXXXXXXXXXXSAXXPXXRTXXXXXAGXAAPRXXDXXGXRQSQGXRRRXXXGRPESXXGGRPQVQAPQRRXXLASWCMHGPGXXYSFP

SEQ ID NO: 13628 - protein, 163 aa, Zea mays
  misc_feature (156)..(157): Xaa can be any naturally occurring amino acid
  misc_feature (161)..(163): Xaa can be any naturally occurring amino acid
  Coding DNA Sequence Number=SeqID_7253
  Subcellular localization annotation: CTP_CleavageSite=83; ConfidenceScore=5.02e-01
RKRLEYRLSQSITIHTQTHRYSGIEHVKQISLLSSHLPCQQCSSASASMKMSSGRPASSPGLQASGRAATDGLCRLCDCPSVQQAAADGLCVWASDGPGTPGSGLCVRGSGQATVWASGGSGERQSSERRPATEALLERLRFEGKRLGAGPRPASXXPIAXXX

SEQ ID NO: 13629 - protein, 91 aa, Zea mays
  Coding DNA Sequence Number=SeqID_7255
  Pfam annotation: Domain name=Auxin_inducible; Domain location=5-91; Score=23.9; E_value=1.1e-07; Accession=PF02519.5; Description=Auxin responsive protein
  Subcellular localization annotation: CTP_CleavageSite=48; ConfidenceScore=5.54e-01
MCKLAITTIPSIAWLRRTVRRRSRNHTTAASASCFSSCPSCPCPAAVPAGHVAVCVESGSGSTRRFVVPLAHLSHPAFRELLQKAEDEYGF

SEQ ID NO: 13630 - protein, 112 aa, Zea mays
  Coding DNA Sequence Number=SeqID_7256
QKIRKESRSRCLPHEDTVQVTFSIASRPGLHRRRPRGVTIGIRASAILVEGASATIGCYDRKRRSGCDFVDSEPPNFDGDAALLGRRDGGAVGGDLHLVASGGGGSVTRFLW

SEQ ID NO: 13631 - protein, 157 aa, Zea mays
  misc_feature (146)..(146): Xaa can be any naturally occurring amino acid
  Coding DNA Sequence Number=SeqID_7258
  Homolog annotation: Hit_ID=Q6YWS2; Match level="QueryCoverage=29%, HitCoverage=8%, E-value=2e-17, Identity=80%"; Hit description=Leaf senescence protein-like
  Subcellular localization annotation: CTP_CleavageSite=12; ConfidenceScore=5.27e-01
MRPSLLPKASPSAMKLHKINPSSRKISVAVATPVLVLLALAVVSLYDINFADSYQYIRRASSSSSASSSSSSTPIPATTPSSSTIPDTSSSSPVKSSSSSTSPAATTVEACDLTRGQWVPDDEQAPYYTNLTCPFIDDLQNCMKFXKPSLEFLRWRW

SEQ ID NO: 13632 - protein, 135 aa, Zea mays
  Coding DNA Sequence Number=SeqID_7259
  Subcellular localization annotation: CTP_CleavageSite=53; ConfidenceScore=5.37e-01
SETRSAVFYNCKNLPNPWLPFGGSASRERAQRLAKRCRSSSPPRRRYRCAVPRAPHAAPRPPWRPRPGTRRRPRPRSTRPPSRPSGCAWTPRRGPGWSPPPRQRRPARGPGSGRYGSGCGTRSRLRASRGTAPRP

SEQ ID NO: 13633 - protein, 111 aa, Zea mays
  Coding DNA Sequence Number=SeqID_7261
WGRRNDANNLEKWSGLGQGCGVLWRRRLGFRARGVGVWPGGSHGEAWRARCRGVFGQGHGGRGVRLQGDGGLGARGRSVLLARLEMARSRPDGWRKGRGAGLLAALQVLRG

SEQ ID NO: 13634 - protein, 117 aa, Zea mays
  Coding DNA Sequence Number=SeqID_7263
PTVLEHLVILLRVQHVFRLQIWRTSNPLDRPVINVEQERRRRYASSSLSIPSSLLLESCSLHIVALCCWRVAVFILLPCRETAHIKFELLQVVAFPDTMTLRRWGLWGLGFWGEVLA

SEQ ID NO: 13635 - protein, 155 aa, Zea mays
  misc_feature (1)..(1): Xaa can be any naturally occurring amino acid
  Coding DNA Sequence Number=SeqID_7265
XQLLPLFLTTLALESGIYVVPVLLNRIDLIRHPRRASRARSQRAEQASRARSGSAARAEWTTIGGRRVGGAAEQLAGRRSSSPARGLAGRAEALSGRRTTLRHCGLAARSGARLWQWRSGGRISGGAERRARRTEARRRMAPAEQTESRTVARRI

SEQ ID NO: 13636 - protein, 67 aa, Zea mays
  Coding DNA Sequence Number=SeqID_7267
  Gene Ontology: Mol. function=aspartic-type endopeptidase activity; Biological process=DNA integration
  Homolog annotation: Hit_ID=Q8LSK0; Match level="QueryCoverage=100%, HitCoverage=5%, E-value=9e-22, Identity=77%"; Hit description=Gag and Pol
  Subcellular localization annotation: CTP_CleavageSite=59; ConfidenceScore=5.09e-01
DSSVLMGNVSHAFVHGTGTVDLKFTLANIMQLRNMQHVPFMSKNLISGTLLCRYGFKVVLESNKTVV

SEQ ID NO: 13637 - protein, 164 aa, Zea mays
  Coding DNA Sequence Number=SeqID_7268
KTMVYKLVSSIKHPQPITQPILMVIRMLVLRSMFWPVSVLSGGYDEDGCYHPTRHRKSQGFPSPAAEDMGPDTVLYQFMTKEKEILGESTQRINDWIKKLQGEREKYRTGEIAAKDGTIYEKGRTNDRIYREYTNRIAVLQKEISDRENLIENIQDLKKHQKLK

SEQ ID NO: 13638 - protein, 194 aa, Zea mays
  misc_feature (48)..(48): Xaa can be any naturally occurring amino acid
  misc_feature (102)..(102): Xaa can be any naturally occurring amino acid
  misc_feature (125)..(125): Xaa can be any naturally occurring amino acid
  misc_feature (142)..(142): Xaa can be any naturally occurring amino acid
  misc_feature (159)..(159): Xaa can be any naturally occurring amino acid
  misc_feature (179)..(179): Xaa can be any naturally occurring amino acid
  misc_feature (183)..(183): Xaa can be any naturally occurring amino acid
  Coding DNA Sequence Number=SeqID_7270
  Gene Ontology: Mol. function=aspartic-type endopeptidase activity; Cellular component=nucleus; Biological process=DNA integration
  Homolog annotation: Hit_ID=Q8S6W4; Match level="QueryCoverage=100%, HitCoverage=13%, E-value=2e-39, Identity=44%"; Hit description =Putative pol polyprotein
YEINFLNPPPYYGQANGQGDSSNKSCIKIIKNKLEDNLRRWHEVLSKXSWARRVSRHGVINVTSFELVYEQEFVLLVEVNLDAYRLAKQNDLFIVMYNDLMXDNINEVIGRRLMDHKDMDKDKAXVARAYNNKAKIILFQLXDLVWKTIVPIGVKSKKXSWEGPYKVMREIFKNTYMLXVLQXDSLSRTITRMY

SEQ ID NO: 13639 - protein, 155 aa, Zea mays
  misc_feature (140)..(140): Xaa can be any naturally occurring amino acid
  Coding DNA Sequence Number=SeqID_7271
  Homolog annotation: Hit_ID=Q5GAV3; Match level="QueryCoverage=43%, HitCoverage=5%, E-value=6e-08, Identity=48%"; Hit description =Putative integral membrane protein
GGGDGSSEAAVLCTTLGGWLDKRFTALDSKWEPHAGAVESQAVDFDQHRDEFSSALRADVEAHLSAADADPLERICYWEASTGTRDARYLPASKSSSLGSVLESDLACPDQFVVDFAVALVDLNPLVHVDFSTVPVANSXDPRHQVDPVTPLTPH

SEQ ID NO: 13640 - protein, 132 aa, Zea mays
  Coding DNA Sequence Number=SeqID_7272
NLISFKMFKLFVSLVLFGILSSGESCCAKKYLKVYAEPECCSKSIPIILTHQKSCCHSPAPIYISAPAPACPPPAPIYISAPPAPKPAPIYISAPAPACPPPAPIYISAAPAPAPAALPSLPCLPDLQSLYC

SEQ ID NO: 13641 - protein, 39 aa, Zea mays
  Coding DNA Sequence Number=SeqID_7274
TTSSYSALNSHDTQVLSTTTFSPYSQILINTGKKKTEST

SEQ ID NO: 13642 - protein, 163 aa, Zea mays
  misc_feature (125)..(125): Xaa can be any naturally occurring amino acid
  misc_feature (134)..(134): Xaa can be any naturally occurring amino acid
  misc_feature (138)..(138): Xaa can be any naturally occurring amino acid
  misc_feature (161)..(161): Xaa can be any naturally occurring amino acid
  Coding DNA Sequence Number=SeqID_7276
  Subcellular localization annotation: CTP_CleavageSite=31; ConfidenceScore=5.15e-01
NKAPRGHACTPKSRRRPVPDEDKPPPLLSAQCRHTAVATCHVCASPGSMRPCSSSSSGRVVVVVEWTVDWYPGGDRDGARPWHRRPPRGVDPSLGRQACSWIPRLHGHPSLPHGTRVRPRAVSWXWCMHPIGRXCAPXLVFMRRDRWGARWRSLMCCSDLXML

SEQ ID NO: 13643 - protein, 115 aa, Zea mays
  Coding DNA Sequence Number=SeqID_7278
KFPCVASTYPLHRKPSRPIGGRGECRGAEEASRASPTTNTARVPRSDLWRAGDGVDQRRRSVRARETLGRPEFLAVIKLRRGSTIPPRPTFCASSLSGEEQVVQEEPHNEEFDLI

SEQ ID NO: 13644 - protein, 80 aa, Zea mays
  Coding DNA Sequence Number=SeqID_7280
AFIMLLSSMARLLILLFFIVVSLFTDTVYGAKQICNWRSPPKEQQCMHGTSTYHEPWRCMPAPLRLGRYAEAALLRLAAR

SEQ ID NO: 13645 - protein, 113 aa, Zea mays
  misc_feature (13)..(13): Xaa can be any naturally occurring amino acid
  misc_feature (16)..(18): Xaa can be any naturally occurring amino acid
  misc_feature (24)..(24): Xaa can be any naturally occurring amino acid
  misc_feature (35)..(38): Xaa can be any naturally occurring amino acid
  misc_feature (41)..(41): Xaa can be any naturally occurring amino acid
  misc_feature (43)..(43): Xaa can be any naturally occurring amino acid
  misc_feature (47)..(49): Xaa can be any naturally occurring amino acid
  misc_feature (51)..(51): Xaa can be any naturally occurring amino acid
  misc_feature (54)..(55): Xaa can be any naturally occurring amino acid
  misc_feature (57)..(58): Xaa can be any naturally occurring amino acid
  misc_feature (62)..(62): Xaa can be any naturally occurring amino acid
  misc_feature (64)..(64): Xaa can be any naturally occurring amino acid
  misc_feature (66)..(66): Xaa can be any naturally occurring amino acid
  misc_feature (70)..(72): Xaa can be any naturally occurring amino acid
  misc_feature (74)..(74): Xaa can be any naturally occurring amino acid
  misc_feature (76)..(80): Xaa can be any naturally occurring amino acid
  misc_feature (82)..(82): Xaa can be any naturally occurring amino acid
  misc_feature (106)..(106): Xaa can be any naturally occurring amino acid
  Coding DNA Sequence Number=SeqID_7282
  Gene Ontology: Mol. function=structural constituent of ribosome; Cellular component=ribonucleoprotein complex; Biological process =translation
  Homolog annotation: Hit_ID=Q9LX88; Match level="QueryCoverage=95%, HitCoverage=81%, E-value=3e-17, Identity=53%"; Hit description=40S ribosomal protein S15a-4
  Pfam annotation: Domain name=Ribosomal_S8; Domain location=3-112; Score=-22.1; E_value=7.3e-05; Accession=PF00410.9; Description =Ribosomal protein S8
DYHGLNDALKSMXHAXXXGKRHVXIRPSSKEIIKXXXXMQXRXYLDXXXYXDDXXAXXIVLXLXGXLNKXXXIXPXXXXXFXGKSRDGRRRLLPSRQFGYIVLTTXSAGIMDP

SEQ ID NO: 13646 - protein, 161 aa, Zea mays
  misc_feature (1)..(4): Xaa can be any naturally occurring amino acid
  misc_feature (6)..(9): Xaa can be any naturally occurring amino acid
  misc_feature (11)..(11): Xaa can be any naturally occurring amino acid
  misc_feature (13)..(15): Xaa can be any naturally occurring amino acid
  misc_feature (17)..(19): Xaa can be any naturally occurring amino acid
  misc_feature (21)..(28): Xaa can be any naturally occurring amino acid
  misc_feature (31)..(31): Xaa can be any naturally occurring amino acid
  misc_feature (33)..(44): Xaa can be any naturally occurring amino acid
  misc_feature (46)..(50): Xaa can be any naturally occurring amino acid
  misc_feature (52)..(53): Xaa can be any naturally occurring amino acid
  misc_feature (55)..(57): Xaa can be any naturally occurring amino acid
  misc_feature (59)..(59): Xaa can be any naturally occurring amino acid
  misc_feature (61)..(65): Xaa can be any naturally occurring amino acid
  misc_feature (67)..(67): Xaa can be any naturally occurring amino acid
  misc_feature (69)..(74): Xaa can be any naturally occurring amino acid
  misc_feature (77)..(77): Xaa can be any naturally occurring amino acid
  misc_feature (80)..(81): Xaa can be any naturally occurring amino acid
  misc_feature (83)..(83): Xaa can be any naturally occurring amino acid
  misc_feature (86)..(87): Xaa can be any naturally occurring amino acid
  misc_feature (117)..(118): Xaa can be any naturally occurring amino acid
  misc_feature (128)..(128): Xaa can be any naturally occurring amino acid
  misc_feature (132)..(132): Xaa can be any naturally occurring amino acid
  misc_feature (135)..(135): Xaa can be any naturally occurring amino acid
  misc_feature (137)..(138): Xaa can be any naturally occurring amino acid
  misc_feature (140)..(140): Xaa can be any naturally occurring amino acid
  misc_feature (148)..(149): Xaa can be any naturally occurring amino acid
  misc_feature (151)..(151): Xaa can be any naturally occurring amino acid
  misc_feature (154)..(155): Xaa can be any naturally occurring amino acid
  misc_feature (157)..(158): Xaa can be any naturally occurring amino acid
  misc_feature (160)..(161): Xaa can be any naturally occurring amino acid
  Coding DNA Sequence Number=SeqID_7283
XXXXGXXXXRXKXXXGXXXEXXXXXXXXEGXGXXXXXXXXXXXXEXXXXXEXXGXXXKXGXXXXXGXNXXXXXXNSXIGXXQXEEXXAFLAGEKAREFVLIALTDLAKERTEDPAMXXIASDARGEGXQQSXAEXPXXTXAAVRPSGXXSXLLXXAXXWXX

SEQ ID NO: 13647 - protein, 150 aa, Zea mays
  Coding DNA Sequence Number=SeqID_7285
  Homolog annotation: Hit_ID=A2WMQ2; Match level="QueryCoverage=70%, HitCoverage=49%, E-value=3e-23, Identity=52%"; Hit description =Putative uncharacterized protein
GEAGGEMSGDEVAKAKAAAAAGGGVGEYGTFHGPPSYPPPRPPVGYPQPAPPPGLHGQREPNSRHRGGYQAGNAQDYEAGARGHRHDRLPCCGIGMGWFLFILGFFLGAIPWYVGAFLLWCSRVDYREKPGYVACTIAAVLATIAVIIGA

SEQ ID NO: 13648 - protein, 161 aa, Zea mays
  misc_feature (7)..(7): Xaa can be any naturally occurring amino acid
  misc_feature (9)..(9): Xaa can be any naturally occurring amino acid
  misc_feature (12)..(13): Xaa can be any naturally occurring amino acid
  misc_feature (22)..(23): Xaa can be any naturally occurring amino acid
  misc_feature (30)..(30): Xaa can be any naturally occurring amino acid
  misc_feature (35)..(35): Xaa can be any naturally occurring amino acid
  misc_feature (38)..(39): Xaa can be any naturally occurring amino acid
  misc_feature (41)..(41): Xaa can be any naturally occurring amino acid
  misc_feature (51)..(51): Xaa can be any naturally occurring amino acid
  misc_feature (56)..(56): Xaa can be any naturally occurring amino acid
  misc_feature (71)..(72): Xaa can be any naturally occurring amino acid
  misc_feature (75)..(75): Xaa can be any naturally occurring amino acid
  misc_feature (78)..(82): Xaa can be any naturally occurring amino acid
  misc_feature (86)..(86): Xaa can be any naturally occurring amino acid
  misc_feature (94)..(96): Xaa can be any naturally occurring amino acid
  misc_feature (101)..(101): Xaa can be any naturally occurring amino acid
  misc_feature (104)..(104): Xaa can be any naturally occurring amino acid
  misc_feature (107)..(107): Xaa can be any naturally occurring amino acid
  misc_feature (110)..(111): Xaa can be any naturally occurring amino acid
  misc_feature (113)..(114): Xaa can be any naturally occurring amino acid
  misc_feature (119)..(119): Xaa can be any naturally occurring amino acid
  misc_feature (121)..(121): Xaa can be any naturally occurring amino acid
  misc_feature (124)..(124): Xaa can be any naturally occurring amino acid
  misc_feature (127)..(128): Xaa can be any naturally occurring amino acid
  misc_feature (132)..(132): Xaa can be any naturally occurring amino acid
  misc_feature (136)..(137): Xaa can be any naturally occurring amino acid
  Coding DNA Sequence Number=SeqID_7286
  Subcellular localization annotation: CTP_CleavageSite=57; ConfidenceScore=5.11e-01
IIRSSEXTXSPXXRPQEPTQEXXPPLPCSXSWRSXPRXXPXASAPPAPPPXFAPPXRAAVALGGRAEAASXXSPXTGXXXXXKMRXDTLYHHLXXXAIISXITXWYXLGXXTXXENIRXTXDYXNLXXQTLXPTLXXQQFLPFNQLAALNSASYLQQQQLP

SEQ ID NO: 13649 - protein, 121 aa, Zea mays
  Coding DNA Sequence Number=SeqID_7288
  Gene Ontology: Mol. function=nucleic acid binding; Cellular component= cytoplasm; Biological process=regulation of transcription, DNA -dependent
  Homolog annotation: Hit_ID=Q38896; Match level="QueryCoverage=70%, HitCoverage=43%, E-value=1e-28, Identity=75%"; Hit description =Glycine-rich protein 2b
  Pfam annotation: Domain name=CSD; Domain location=11-79; Score=119.9; E_value=7.3e-33; Accession=PF00313.12; Description='Cold-shock' DNA -binding domain
  Pfam annotation: Domain name=OB_RNB; Domain location=14-62; Score= -5.7; E_value=0.07; Accession=PF08206.2; Description=Ribonuclease B OB domain
  Pfam module annotation: Pfam domain module=CSD::OB_RNB; Domain location=11-79::14-62
MSGENDNGGAKRRGSVKWFAAEKGFGFITPEDGGEDLFVHQSSIRSEGYRSLAEGESVEFLVEVDNSSGRTKAIEVTGPDGAPVQGTSRGSAGGRGGFGGDGYGGRGGGRGSYGGRGGGGG

SEQ ID NO: 13650 - protein, 136 aa, Zea mays
  misc_feature (1)..(1): Xaa can be any naturally occurring amino acid
  misc_feature (7)..(9): Xaa can be any naturally occurring amino acid
  misc_feature (11)..(11): Xaa can be any naturally occurring amino acid
  misc_feature (16)..(20): Xaa can be any naturally occurring amino acid
  misc_feature (22)..(22): Xaa can be any naturally occurring amino acid
  misc_feature (24)..(24): Xaa can be any naturally occurring amino acid
  misc_feature (26)..(27): Xaa can be any naturally occurring amino acid
  misc_feature (30)..(30): Xaa can be any naturally occurring amino acid
  misc_feature (32)..(33): Xaa can be any naturally occurring amino acid
  misc_feature (50)..(53): Xaa can be any naturally occurring amino acid
  misc_feature (56)..(56): Xaa can be any naturally occurring amino acid
  misc_feature (58)..(58): Xaa can be any naturally occurring amino acid
  misc_feature (63)..(63): Xaa can be any naturally occurring amino acid
  misc_feature (68)..(68): Xaa can be any naturally occurring amino acid
  misc_feature (75)..(75): Xaa can be any naturally occurring amino acid
  misc_feature (85)..(85): Xaa can be any naturally occurring amino acid
  misc_feature (92)..(95): Xaa can be any naturally occurring amino acid
  misc_feature (97)..(100): Xaa can be any naturally occurring amino acid
  misc_feature (102)..(102): Xaa can be any naturally occurring amino acid
  misc_feature (111)..(111): Xaa can be any naturally occurring amino acid
  misc_feature (113)..(116): Xaa can be any naturally occurring amino acid
  misc_feature (118)..(118): Xaa can be any naturally occurring amino acid
  misc_feature (122)..(123): Xaa can be any naturally occurring amino acid
  misc_feature (125)..(125): Xaa can be any naturally occurring amino acid
  misc_feature (129)..(129): Xaa can be any naturally occurring amino acid
  misc_feature (132)..(132): Xaa can be any naturally occurring amino acid
  misc_feature (134)..(134): Xaa can be any naturally occurring amino acid
  misc_feature (136)..(136): Xaa can be any naturally occurring amino acid
  Coding DNA Sequence Number=SeqID_7289
XPPPPPXXXDXDLELXXXXXPXPXWXXFRXEXXSTGRDVYREMDCVKPGXXXXSRXDXCPPVXLPVEXYKKRPGXCRPSQAGCMXCEWKNGXXXXFXXXXKXGSYVAEAAXFXXXXTXSKLXXCXCQGXSYXGXCX

SEQ ID NO: 13651 - protein, 94 aa, Zea mays
  Coding DNA Sequence Number=SeqID_7290
  Gene Ontology: Mol. function=N-acetyltransferase activity; Biological process=metabolic process
  Homolog annotation: Hit_ID=A9FZ84; Match level="QueryCoverage=96%, HitCoverage=32%, E-value=7e-38, Identity=82%"; Hit description =Putative uncharacterized protein
MNPVVVAVAITGSVPRKKDNPAVPILPSEQIESTQQAFEAGATLAHIHVRNDDETPSSDPERFALVQQGIRKHCPDMIVQFSTGGRGRHRGELQ

SEQ ID NO: 13652 - protein, 176 aa, Zea mays
  misc_feature (92)..(92): Xaa can be any naturally occurring amino acid
  misc_feature (102)..(102): Xaa can be any naturally occurring amino acid
  misc_feature (104)..(104): Xaa can be any naturally occurring amino acid
  misc_feature (106)..(106): Xaa can be any naturally occurring amino acid
  misc_feature (110)..(110): Xaa can be any naturally occurring amino acid
  misc_feature (118)..(118): Xaa can be any naturally occurring amino acid
  misc_feature (122)..(122): Xaa can be any naturally occurring amino acid
  misc_feature (127)..(127): Xaa can be any naturally occurring amino acid
  misc_feature (133)..(133): Xaa can be any naturally occurring amino acid
  misc_feature (137)..(137): Xaa can be any naturally occurring amino acid
  misc_feature (146)..(147): Xaa can be any naturally occurring amino acid
  misc_feature (150)..(150): Xaa can be any naturally occurring amino acid
  misc_feature (154)..(154): Xaa can be any naturally occurring amino acid
  misc_feature (157)..(157): Xaa can be any naturally occurring amino acid
  misc_feature (161)..(161): Xaa can be any naturally occurring amino acid
  Coding DNA Sequence Number=SeqID_7291
  Gene Ontology: Mol. function=structural constituent of ribosome; Cellular component=ribonucleoprotein complex; Biological process =translation
  Homolog annotation: Hit_ID=O81229; Match level="QueryCoverage=53%, HitCoverage=87%, E-value=8e-24, Identity=68%"; Hit description =Ribosomal protein L25
  Pfam annotation: Domain name=Ribosomal_L23eN; Domain location=34-86; Score=66.4; E_value=9.5e-17; Accession=PF03939.4; Description =Ribosomal protein L23, N-terminal domain
PSSFRVRLSPPQGEFMRHLREAEMAPKAAPAKKGDAKTQALKVAKAVKSGAAKKTKKIRTSVTFHRPTTLKKARDHKYPRISTTGRNKLDQXQILKYPLTTXSXMXKIVXYNTLGFIXVDLXADKNXIMAAAXMYDXQAKIVNTLXXALXEEEXYVXLLPXCGHKSLSCGSIGLPF

SEQ ID NO: 13653 - protein, 117 aa, Zea mays
  misc_feature (4)..(6): Xaa can be any naturally occurring amino acid
  misc_feature (8)..(9): Xaa can be any naturally occurring amino acid
  misc_feature (15)..(15): Xaa can be any naturally occurring amino acid
  misc_feature (18)..(19): Xaa can be any naturally occurring amino acid
  misc_feature (53)..(53): Xaa can be any naturally occurring amino acid
  misc_feature (61)..(61): Xaa can be any naturally occurring amino acid
  misc_feature (66)..(66): Xaa can be any naturally occurring amino acid
  misc_feature (70)..(71): Xaa can be any naturally occurring amino acid
  misc_feature (73)..(74): Xaa can be any naturally occurring amino acid
  misc_feature (78)..(78): Xaa can be any naturally occurring amino acid
  misc_feature (80)..(80): Xaa can be any naturally occurring amino acid
  misc_feature (83)..(83): Xaa can be any naturally occurring amino acid
  misc_feature (85)..(85): Xaa can be any naturally occurring amino acid
  misc_feature (87)..(89): Xaa can be any naturally occurring amino acid
  misc_feature (94)..(94): Xaa can be any naturally occurring amino acid
  misc_feature (108)..(108): Xaa can be any naturally occurring amino acid
  misc_feature (112)..(112): Xaa can be any naturally occurring amino acid
  Coding DNA Sequence Number=SeqID_7292
PLGXXXMXXCCCSIXCEXXVARDIVASSFATSCSARPLVTIMLGIIQWAHHVXRHHPVASXLASSXAVRXXAXXSIRXGXVHXSXQXXXLHHAXLHAWGSWYPMARLXASTXEYGSH

SEQ ID NO: 13654 - protein, 248 aa, Zea mays
  misc_feature (26)..(26): Xaa can be any naturally occurring amino acid
  misc_feature (200)..(248): Xaa can be any naturally occurring amino acid
  Coding DNA Sequence Number=SeqID_7294
  Subcellular localization annotation: CTP_CleavageSite=59; ConfidenceScore=5.43e-01
SKHARALCSPSVLAGPFSITNASLFXPKARRPPEADRWRARRRACCWRSGAGHPPTTPRLAPGGPPPRFVPVLPIPPPLRQAPALDPPPPPPPLECESTTLHPQISVISPPRPSPSSPFPFSPCPSPPPAAPAPPPNRELICLPAPLRPACGCAPPSPHLRHLTFNSPPPLPSPPTPPPHPSHPPPPGAVGGVGRYKKYXXXXXXXXXXXXXXXXXXXXXXXXXXXXXXXXXXXXXXXXXXXXXXXXX

SEQ ID NO: 13655 - protein, 76 aa, Zea mays
  Coding DNA Sequence Number=SeqID_7296
  Homolog annotation: Hit_ID=A2YE66; Match level="QueryCoverage=75%, HitCoverage=75%, E-value=3e-21, Identity=89%"; Hit description =Putative uncharacterized protein
  Pfam annotation: Domain name=UPF0197; Domain location=2-76; Score =81.4; E_value=3e-21; Accession=PF05251.3; Description=Uncharacterised protein family (UPF0197)
  Subcellular localization annotation: CTP_CleavageSite=56; ConfidenceScore=5.35e-01
MAAKAISSPVPVEWYPTLAVVMVSVGLMFTASFFIYEATSSRRSRSLSKEIATAVVASVFLGFGSLFVLLASGVYV

SEQ ID NO: 13656 - protein, 181 aa, Zea mays
  misc_feature (104)..(104): Xaa can be any naturally occurring amino acid
  misc_feature (110)..(110): Xaa can be any naturally occurring amino acid
  misc_feature (114)..(114): Xaa can be any naturally occurring amino acid
  Coding DNA Sequence Number=SeqID_7297
  Gene Ontology: Mol. function=oligosaccharyl transferase activity; Cellular component=membrane; Biological process=protein amino acid glycosylation
  Homolog annotation: Hit_ID=Q9FX21; Match level="QueryCoverage=79%, HitCoverage=19%, E-value=4e-34, Identity=60%"; Hit description =Putative integral membrane protein
MAPSALASLPAPLRSLRLKTKQQELLLRVSALALIYVLAFAVRLFSVLRYESMIHEFDPYFNYRTTLFLTENGFSEFWNWFDSESCNPLGAGSFGGTPLPGSHXLTAGLXQRLXLRGFSLVVKFRGGLGLTGLSLPAQPTLVASLWGRNWGIPGGGLDAAVYRPARVTPASRGGAKKERGP

SEQ ID NO: 13657 - protein, 121 aa, Zea mays
  Coding DNA Sequence Number=SeqID_7298
  Gene Ontology: Mol. function=cinnamyl-alcohol dehydrogenase activity; Cellular component=cytoplasm; Biological process=lignin biosynthetic process
  Homolog annotation: Hit_ID=O24562; Match level="QueryCoverage=55%, HitCoverage=18%, E-value=1e-28, Identity=88%"; Hit description =Cinnamyl alcohol dehydrogenase
  Pfam annotation: Domain name=ADH_N; Domain location=34-121; Score= -18.9; E_value=0.06; Accession=PF08240.2; Description=Alcohol dehydrogenase GroES-like doma
MGSLASERKVVGWAARDATGHLSPYSYTLRNTGPEDVLVKVLYCGICHTDLLQARNHLGSSKYHYGPWARGPTTAHAGRGGDRDARRPANNWRERSPAPHRRGTQPSPAAPRPHQDHLPPT

SEQ ID NO: 13658 - protein, 119 aa, Zea mays
  misc_feature (66)..(66): Xaa can be any naturally occurring amino acid
  misc_feature (108)..(108): Xaa can be any naturally occurring amino acid
  Coding DNA Sequence Number=SeqID_7299
  Gene Ontology: Mol. function=protein binding; Cellular component =signalosome; Biological process=red or far red light signaling pathway
  Homolog annotation: Hit_ID=Q10QG2; Match level="QueryCoverage=99%, HitCoverage=29%, E-value=2e-45, Identity=79%"; Hit description=COP9 signalosome complex subunit 4, putative, expressed
  Pfam annotation: Domain name=PCI; Domain location=1-84; Score=43.0; E_ value=1.1e-09; Accession=PF01399.17; Description=PCI domain
GFSKELRPHQKAFFPDKWTVVGRAMIEHNLLRASNLYPNISFDELGALLGIDPRKAEKKASRMIYXDKMRGSIDQVEAVIPFYDSPEKLHQWDQQIAGLCPALNAILXSMSSKGITIPV

SEQ ID NO: 13659 - protein, 78 aa, Zea mays
  Coding DNA Sequence Number=SeqID_7300
  Gene Ontology: Mol. function=cellulose synthase (UDP-forming) activity; Cellular component=membrane; Biological process=cellulose biosynthetic process
  Homolog annotation: Hit_ID=Q9LLI2; Match level="QueryCoverage=100%, HitCoverage=7%, E-value=4e-40, Identity=98%"; Hit description =Cellulose synthase-8
GYESWGPLVGKLFFAFWVIVHLYPFLKGLVGRQNRTPTIVIVWSILLASIFSLLWVRVDPFLAKSNGPLLEECGLDCN

SEQ ID NO: 13660 - protein, 388 aa, Zea mays
  misc_feature (1)..(188): Xaa can be any naturally occurring amino acid
  misc_feature (280)..(282): Xaa can be any naturally occurring amino acid
  misc_feature (300)..(300): Xaa can be any naturally occurring amino acid
  misc_feature (331)..(332): Xaa can be any naturally occurring amino acid
  misc_feature (334)..(334): Xaa can be any naturally occurring amino acid
  misc_feature (337)..(340): Xaa can be any naturally occurring amino acid
  misc_feature (358)..(359): Xaa can be any naturally occurring amino acid
  misc_feature (367)..(367): Xaa can be any naturally occurring amino acid
  misc_feature (384)..(388): Xaa can be any naturally occurring amino acid
  Coding DNA Sequence Number=SeqID_7301
XXXXXXXXXXXXXXXXXXXXXXXXXXXXXXXXXXXXXXXXXXXXXXXXXXXXXXXXXXXXXXXXXXXXXXXXXXXXXXXXXXXXXXXXXXXXXXXXXXXXXXXXXXXXXXXXXXXXXXXXXXXXXXXXXXXXXXXXXXXXXXXXXXXXXXXXXXXXXXXXXXXXXXXXXXXXXXXXXXXXXXXXXXXXPHGPHPLRSRRNPSGGAIPRLAQRGARFRRRNQNRWGFAGARGSHGLRIPHFPVILRAAACCPLSPQVEFSPIGRRFGWGTVSASVSCPVWXXXSPRAAAAVACLRAVAAAXVQPGDLLLALFGRVQHSRSTRVGKEGVDVSXXSXTPXXXXGDLIVVETDSELVLACRXXFAEIWVFXCPKKKKKKKKKKKKKKXXXXX

SEQ ID NO: 13661 - protein, 135 aa, Zea mays
  misc_feature (10)..(10): Xaa can be any naturally occurring amino acid
  misc_feature (12)..(13): Xaa can be any naturally occurring amino acid
  misc_feature (21)..(21): Xaa can be any naturally occurring amino acid
  misc_feature (33)..(33): Xaa can be any naturally occurring amino acid
  Coding DNA Sequence Number=SeqID_7303
  Subcellular localization annotation: CTP_CleavageSite=46; ConfidenceScore=5.39e-01
PTPQKRYFGXPXXPPPFFLFXRGGGGGAEKKPXGGPFFSARFFPPRGVFFGGFSPPPLFFLGGGGGEEENFSPFFWGAPPHQGFSFGGRVGFKKIRNSPGGGGGFRGFFWGSGPLNLFSPFFSHPLFFQLETLGS

SEQ ID NO: 13662 - protein, 181 aa, Zea mays
  Coding DNA Sequence Number=SeqID_7305
  Homolog annotation: Hit_ID=Q2QPD2; Match level="QueryCoverage=90%, HitCoverage=94%, E-value=7e-50, Identity=66%"; Hit description =Expressed protein
  Subcellular localization annotation: CTP_CleavageSite=50; ConfidenceScore=5.43e-01
TIFFQKKEKRKKSFASLAAGRHGRPHYPFPPSKAHLFLALPNNPTRFLASASVRVAYPPRWPLRAADGERDNRVQELRVPDSWLTPAGATQESEWLRETLRKWLDDEYCPEPANVDISSTAARSYRESLIARQSDLGEILLRMVGDLDKLSYRESFHGPFSAANAAVRLIAQRMEESLPDE

SEQ ID NO: 13663 - protein, 157 aa, Zea mays
  Coding DNA Sequence Number=SeqID_69
  Homolog annotation: Hit_ID=A9PJY7; Match level="QueryCoverage=98%, HitCoverage=99%, E-value=7e-30, Identity=49%"; Hit description =Putative uncharacterized protein
  Pfam annotation: Domain name=DUF581; Domain location=74-135; Score =121.8; E_value=2e-33; Accession=PF04570.5; Description=Protein of unknown function (DUF581)
MMLLGKRQRPEIKRTTSLSEIKFDLNLPCEPEEPSDHQHVQTLSPRKSKLVTVDEHRQVHHGLLDQRLLAMVSPRGTQRRHSEDYSTHAGDFLRCCSLCKRNLVPGRDIYMYRGDRAFCSLECRQQQITVDERKEKGLVRSTVAAGSGKGERVSAAV

SEQ ID NO: 13664 - protein, 271 aa, Zea mays
  Coding DNA Sequence Number=SeqID_70
  Gene Ontology: Mol. function=hydrolase activity
  Homolog annotation: Hit_ID=A7P9P0; Match level="QueryCoverage=91%, HitCoverage=91%, E-value=1e-109, Identity=77%"; Hit description =Chromosome chr3 scaffold_8, whole genome shotgun sequence
  Pfam annotation: Domain name=Cyclase; Domain location=57-257; Score =144.8; E_value=2.4e-40; Accession=PF04199.3; Description=Putative cyclase
MAVPPLLLLTLLSLPSLLIHAAISDAYPTIPGTAPIDGGFSDELKPIRREVYGEGKIFDISHRYTPEMPAWESKEGIGRFLWLAASMKNGSLANNSEMKIPTHTGTHVDSPGHVYDEYYDAGFDVDSLDLQVLNGPALLVDVPRNKNITAEVMKSLNIPRGVRRVLFRTLNTDRRLMFKKEFDTSYVGFMKDGAQWLVDNTDIKLVGVDYLSVAAYDDLIPSHLVFLKGRETILVEGLKLDDVKAGVYSVHCLPLRLVGAEGSPIRCILIS

SEQ ID NO: 13665 - protein, 148 aa, Zea mays
  Coding DNA Sequence Number=SeqID_71
  Gene Ontology: Mol. function=nucleoside diphosphate kinase activity; Cellular component=cytoplasm; Biological process=CTP biosynthetic process
  Homolog annotation: Hit_ID=Q8RUX2; Match level="QueryCoverage=100%, HitCoverage=100%, E-value=9e-81, Identity=97%"; Hit description =Nucleoside diphosphate kinase
  Pfam annotation: Domain name=NDK; Domain location=2-136; Score=333.5; E_value=3.8e-97; Accession=PF00334.9; Description=Nucleoside diphosphate kinase
MEQTFIMIKPDGVQRGLVGEIICKFEKKGFTLKGLKLITVDRPFAEKHYQDLSAKPFFNSLVDYIISGPVVAMIWEGKNVVLTGRKIIGATNPAASEPGTIRGDFAIDIGRNVIHGSDSVESANKEAALWFPDGPVNWQSSLHSWIYE

SEQ ID NO: 13666 - protein, 263 aa, Zea mays
  Coding DNA Sequence Number=SeqID_72
  Gene Ontology: Mol. function=catalytic activity; Biological process =alkaloid metabolic process
  Homolog annotation: Hit_ID=O80476; Match level="QueryCoverage=98%, HitCoverage=98%, E-value=1e-122, Identity=80%"; Hit description =Putative acetone-cyanohydrin lyase
  Pfam annotation: Domain name=Abhydrolase_1; Domain location=35-257; Score=25.6; E_value=4.3e-05; Accession=PF00561.10; Description =alphabeta hydrolase fold
MGEEKNQQHFVLVHGACHGAWCWNKVKPLLEASGHRVTALDLAASGIDTTRSITEISTCEQYSEPLIQLIASLPSDEKVVLVGHSFGGFSLAMAMDKFPDKISVSVFVTAFMPDTKHSPSFVVDKFKRDTPPEAWLGSEFKSYGSDNSGVSMSFSTEFMKHALYQLSPVEDIELGLLLKRPGSLFINDLSKVENFSDKGYGSVPRAYIVCKEDKTITKEIQWWMIDNYPTKVVKEMEDTDHMPMFCKPQLLSDYLLEIAEKLA

SEQ ID NO: 13667 - protein, 241 aa, Zea mays
  Coding DNA Sequence Number=SeqID_73
  Gene Ontology: Mol. function=magnesium ion binding; Cellular component=integral to membrane; Biological process=photosynthesis, light harvesting
  Homolog annotation: Hit_ID=A9PJ58; Match level="QueryCoverage=99%, HitCoverage=97%, E-value=1e-113, Identity=81%"; Hit description =Putative uncharacterized protein
  Pfam annotation: Domain name=Chloroa_b-bind; Domain location=53-210; Score=271.0; E_value=2.5e-78; Accession=PF00504.12; Description =Chlorophyll A-B binding protein
  Subcellular localization annotation: CTP_CleavageSite=43; ConfidenceScore=5.39e-01
MASNSLMSCGIAAVYPSLLSSSKSKFVSAGVSLPNVGNVGHIRMAAHWMPGEPRPAYLDGSAPGDFGFDPLGLGEVPENLERYKESELIHCRWAMLAVPGILVPEALGYGNWVKAQEWAAVPGGQATYLGNPVPWGTLPTILAIEFLAIAFVEHQRSMEKDPEKKKYPGGAFDPLGYSKDPKKFEELKVKEIKNGRLALLAFVGFCVQQSAYPGTGPLENLATHLADPWHKNIGDIVIPLN

SEQ ID NO: 13668 - protein, 276 aa, Zea mays
  Coding DNA Sequence Number=SeqID_74
  Gene Ontology: Mol. function=ribose-5-phosphate isomerase activity; Cellular component=intracellular; Biological process=pentose -phosphate shunt, non-oxidative branch
  Homolog annotation: Hit_ID=Q8L9K5; Match level="QueryCoverage=96%, HitCoverage=96%, E-value=1e-120, Identity=84%"; Hit description =Putative ribose 5-phosphate isomerase
  Pfam annotation: Domain name=Rib_5-P_isom_A; Domain location=93-272; Score=329.2; E_value=7.6e-96; Accession=PF06026.5; Description =Ribose 5-phosphate isomerase A (phosphoriboisomerase A)
  Subcellular localization annotation: CTP_CleavageSite=37; ConfidenceScore=5.62e-01
MASSLSFVSSSHLTLRTPSLTLRKLSPPRTSVSFSVKAQSVALSQDDLKKLAAEKAVEAIKPGMVLGLGTGSTAAFAVDQIGKLLSSGELHDIVGIPTSKRTEEQARSLGIPLVALDTHPRIDLAIDGADEVDPNLDLVKGRGGALLREKMVEAVAERFIVVADDTKLVKGLGGSGLAMPVEVVQFCWKFNLVRLRDLFKEFGCDAKLRVGEGGEAYVTDNSNYIIDLYFKEPLKDGFAAGREIGKLEGVVEHGLFLGMATSVIIAGKNGVEVMNK

SEQ ID NO: 13669 - protein, 137 aa, Zea mays
  Coding DNA Sequence Number=SeqID_75
  Homolog annotation: Hit_ID=Q8LEK1; Match level="QueryCoverage=100%, HitCoverage=100%, E-value=8e-63, Identity=82%"; Hit description =Putative uncharacterized protein
  Pfam annotation: Domain name=Cupin_3; Domain location=60-134; Score =132.3; E_value=1.3e-36; Accession=PF05899.3; Description=Protein of unknown function (DUF861)
  Subcellular localization annotation: CTP_CleavageSite=38; ConfidenceScore=5.10e-01
MGCIGLINLTGTNIYRPVLTRTSNKPYSTRGPSMAAIRAESVATEILGIFVEKNPPESKLTQLGVRSWPKWGCPPSKFPWTYDAKETCFLLEGKVKVYPDGSDEGVEIEAGDFVVFPKGMSCTWDVSVAVDKHYQFE

SEQ ID NO: 13670 - protein, 158 aa, Zea mays
  Coding DNA Sequence Number=SeqID_76
  Gene Ontology: Mol. function=structural constituent of ribosome; Cellular component=intracellular; Biological process=translation
  Homolog annotation: Hit_ID=Q9FH41; Match level="QueryCoverage=94%, HitCoverage=62%, E-value=2e-50, Identity=64%"; Hit description =Arabidopsis thaliana genomic DNA, chromosome 5, TAC clone:K2N11
  Pfam annotation: Domain name=Ribosomal_L35p; Domain location=97-154; Score=11.6; E_value=0.00012; Accession=PF01632.9; Description =Ribosomal protein L35
  Subcellular localization annotation: CTP_CleavageSite=67; ConfidenceScore=5.02e-01
MQRLCTKLRSISVRSNGNLSLIGAPHRLIHHSPTSQLTLGFATPPSKWSFLPAGASPFVPHHFVQVRSITSKDKMAKWKKKWRPRTPITSKVKKVKIKFYSSYKDRFKPLNDGTIRRWKEGKRHNAHLKSKKSKRRLRQPGLVPPAYAKVMKKLNFCN

SEQ ID NO: 13671 - protein, 122 aa, Zea mays
  Coding DNA Sequence Number=SeqID_77
  Gene Ontology: Cellular component=cellulose and pectin-containing cell wall
  Homolog annotation: Hit_ID=Q2QP50; Match level="QueryCoverage=78%, HitCoverage=77%, E-value=3e-29, Identity=66%"; Hit description=Rapid ALkalinization Factor family protein, expressed
  Pfam annotation: Domain name=RALF; Domain location=58-122; Score =127.5; E_value=3.8e-35; Accession=PF05498.2; Description=Rapid ALkalinization Factor (RALF)
MAGVRSLVLLLLVLAVALSASASSIAGGDHLQLGLLSGGAGRGECRGTVAECGGEDAEGELGSASAEAHRRVLQGRGYISYGALRRGTVPCNRRGASYYNCRPGAQANPYHRGCSRITRCRG

SEQ ID NO: 13672 - protein, 215 aa, Zea mays
  Coding DNA Sequence Number=SeqID_78
  Gene Ontology: Mol. function=transferase activity; Cellular component= cytoplasm; Biological process=response to stress
  Homolog annotation: Hit_ID=O23626; Match level="QueryCoverage=100%, HitCoverage=100%, E-value=1e-109, Identity=90%"; Hit description =Glutathione transferase
  Pfam annotation: Domain name=GST_C; Domain location=110-202; Score =69.9; E_value=8.3e-18; Accession=PF00043.15; Description=Glutathione S-transferase, C-terminal domain
  Pfam annotation: Domain name=GST_N; Domain location=1-75; Score=78.9; E_value=1.6e-20; Accession=PF02798.10; Description=Glutathione S -transferase, N-terminal domain
  Pfam module annotation: Pfam domain module=GST_C::GST_N; Domain location=110-202::1-75
MVLKVYGPHFASPKRALVTLIEKGVPFETVPVDLMKGEHKQPAYLALQPFGTVPAVVDGDYKIFESRAVMRYVAEKYRSQGPDLLGKTVEDRGQVEQWLDVEATTFHPPLLNLTLHIMFASVMGFPSDEKLIKESEEKLSAVLDVYEAHLAKSKYLAGDFVSLADLAHLPFTDYLVGPIGKAYMIKDRKHVSAWWDDISSRPAWKETLEKYSFPA

SEQ ID NO: 13673 - protein, 131 aa, Zea mays
  Coding DNA Sequence Number=SeqID_79
  Gene Ontology: Mol. function=calcium ion binding
  Homolog annotation: Hit_ID=O81831; Match level="QueryCoverage=95%, HitCoverage=96%, E-value=1e-48, Identity=76%"; Hit description =Putative uncharacterized protein AT4g27280
  Pfam annotation: Domain name=efhand; Domain location=76-104; Score =19.8; E_value=0.01; Accession=PF00036.22; Description=EF hand
MATPQSSTRPTHQNPQPNFHDLFPAMAGKLGGEGLIDELCKGFELLMDGDKGVITFESLRRNASAVLGLGDLTDDDVRCMIDEGDFDRDGALNQMEFCVLMFRLSPDLMDASRFVVTEAIEEEFGDRTHGH

SEQ ID NO: 13674 - protein, 313 aa, Zea mays
  Coding DNA Sequence Number=SeqID_80
  Homolog annotation: Hit_ID=Q9LHS3; Match level="QueryCoverage=91%, HitCoverage=90%, E-value=1e-126, Identity=81%"; Hit description =Genomic DNA, chromosome 5, TAC clone:K16F4
  Subcellular localization annotation: CTP_CleavageSite=45; ConfidenceScore=5.80e-01
MMTTSFSSHPPPPPTSSTSRSLLLFPSSHLKLPPRLLLHGRSTLSCSAAGTNNGPPPAGDSVPNNFCIIEGSETVQDFVQMQLQEIQDNIRSRRNKIFLLMEEVRRLRVQQRIKSVKSISEDENTVLEATEMPEIPSSIPFLPNVTPKTLKQLYLTSVALISGIIFFGGLIAPKLELKVGLGGTSYEDFIRSLHLPLQLSQVDPIVASFSGGAVGVISTLMLIEVNNVKQQEKKRCKYCLGTGYLPCAKCSASGVCLSIDPIKRTRASSLLLQAPTTERCLNCSGAGKVMCPTCLCTGMVTASEHDPRFDPFD

SEQ ID NO: 13675 - protein, 213 aa, Zea mays
  Coding DNA Sequence Number=SeqID_81
  Gene Ontology: Mol. function=protein transporter activity; Cellular component=mitochondrial inner membrane; Biological process=protein transport
  Homolog annotation: Hit_ID=A7P0F9; Match level="QueryCoverage=98%, HitCoverage=98%, E-value=1e-49, Identity=52%"; Hit description =Chromosome chr19 scaffold_4, whole genome shotgun sequence
  Pfam annotation: Domain name=Tim17; Domain location=39-157; Score =139.0; E_value=1.3e-38; Accession=PF02466.9; Description =Tim17Tim22Tim23 family
MAAENPSNGVDVDTSLASDSNDNRKASDLTNHDSSMALTVPSTAVCLGRFAGDAAGGAVMGSIFGYGSGLFKKKGFKGSFADAGQSAKNFAILSGVHSLVVCLLKKLRGKDDAINVGIAGCCTGLALSYPGAPQAMLQSCVTFGAFSFILEGLNKRQTALAHSVSSRHDQTRSLKDDLPLSLALPIHEEIKGAFSSFCKSLTKPKKLAFPSSR

SEQ ID NO: 13676 - protein, 289 aa, Zea mays
  Coding DNA Sequence Number=SeqID_82
  Gene Ontology: Mol. function=structural molecule activity; Cellular component=chloroplast thylakoid membrane; Biological process =transport
  Homolog annotation: Hit_ID=Q9LW57; Match level="QueryCoverage=83%, HitCoverage=88%, E-value=3e-91, Identity=71%"; Hit description =Probable plastid-lipid-associated protein 6, chloroplast precursor
  Pfam annotation: Domain name=PAP_fibrillin; Domain location=90-287; Score=320.0; E_value=4.4e-93; Accession=PF04755.3; Description=PAP _fibrillin
  Subcellular localization annotation: CTP_CleavageSite=68; ConfidenceScore=5.92e-01
MLLPPPPLETSPMAASSALSSPALLSNNRSPPSCGSVRRSISSSPVLIATPRSSRLSFTIPERRSLVVKSTVGEVSFREPATSGDKEGIESLKLKLLRVVSGLNRGLVASVDDLQSAEAAAKLLEAAGGPVDLTNDLDKLQGKWRLLYSSAFSSRSLGGSRPGLPTGRLIPVTLGQVFQRIDVFSKDFDNIAEVELGAPWPFPPLEATATLAHKFELLGTCKIKITFEKTTVKTSGNLAQIPPFEIPRLPDSFRPPSNPGTGDFEVTYVDENMRITRGDRGELRVFVIA

SEQ ID NO: 13677 - protein, 367 aa, Zea mays
  Coding DNA Sequence Number=SeqID_83
  Gene Ontology: Mol. function=protein binding; Cellular component =nucleus; Biological process=ubiquitin cycle
  Homolog annotation: Hit_ID=Q7F0Z3; Match level="QueryCoverage=98%, HitCoverage=98%, E-value=8e-84, Identity=46%"; Hit description=Zinc finger POZ domain protein-like
  Pfam annotation: Domain name=BTB; Domain location=185-300; Score =80.9; E_value=4.3e-21; Accession=PF00651.21; Description=BTBPOZ domain
MAASESSLTRTASTCAPETAHGSHVFKIDGYSLHRGFGVGKFIRSATFAVGGYDWCVRFYPDGDREDSNGWVSAYLELKTENTEVRVLYDIWLVDQATAAPPPRPYARPNPSQVDPSIFDTRDNAAVSWGFTKFRRKSELGEWIVDDILGIQCNLTVIKFKEAQVEDAKTNVVVQVPPSDLFDNLSSLLEATEGADVSFNVKHAVFSAHKIILAMRSAVFRAEFYGPMRDKKRHNITVEDMQPAAFRGLLHFIYKDSLPPMDDLNDEEYEEMLRHLLVAADRYAMERMKLMCESKLCEVLCAETVATTLALADQHHCSQLKDACIEFMNSSNIIGDVVASKGYEQLKRECPSIIADIWEKAAKSRRI

SEQ ID NO: 13678 - protein, 269 aa, Zea mays
  Coding DNA Sequence Number=SeqID_84
  Gene Ontology: Cellular component=extracellular region; Biological process=sexual reproduction
  Homolog annotation: Hit_ID=Q9SVE5; Match level="QueryCoverage=91%, HitCoverage=92%, E-value=1e-104, Identity=76%"; Hit description =Expansin-like A2 precursor
  Pfam annotation: Domain name=DPBB_1; Domain location=62-141; Score =96.3; E_value=9.6e-26; Accession=PF03330.8; Description=Rare lipoprotein A (RlpA)-like double-psi
  Pfam annotation: Domain name=Pollen_allerg_1; Domain location=154 -237; Score=79.3; E_value=1.2e-20; Accession=PF01357.11; Description =Pollen allergen
  Pfam module annotation: Pfam domain module=DPBB_1::Pollen_allerg_1; Domain location=62-141::154-237
  Subcellular localization annotation: CTP_CleavageSite=39; ConfidenceScore=5.20e-01
MGLCRFLFFVVVVLLFSSSSSVDACDRCPHHSKAAFFSSASALSSGACSYGSMATAFFAGHIAAAVPSIYKDGAGCGACFQVRCHNPTLCSTKGTTVMVTDLNMSNQTDLVLSSRAFRAMAKPVVGADTDLLRQGIVDVEYHRVPCDYGNKKMLNVRVEESSKKPYYLAIKLLYQGGQTEVVAIDIAQAGSSNWSYMTRSHGAVWVTDNVPTGPLQFRFVVTAGYDGKMLWSKKVLPANWEAGKTYDAGVQITDIAQEGCDPCDDHIWN

SEQ ID NO: 13679 - protein, 115 aa, Zea mays
  Coding DNA Sequence Number=SeqID_85
  Gene Ontology: Mol. function=positive transcription elongation factor activity; Cellular component=nucleus; Biological process=regulation of transcription, DNA-dependent
  Homolog annotation: Hit_ID=Q94C60; Match level="QueryCoverage=100%, HitCoverage=100%, E-value=6e-60, Identity=95%"; Hit description =Transcription elongation factor SPT4 homolog 2
  Pfam annotation: Domain name=RpoE2; Domain location=16-92; Score= -19.0; E_value=0.041; Accession=PF04035.4; Description=Archaeal DNA -directed RNA polymerase subunit E'' (RpoE'' or RpoE2)
  Pfam annotation: Domain name=Spt4; Domain location=14-115; Score =220.4; E_value=4.1e-63; Accession=PF06093.4; Description =Transcription initiation protein Spt4
  Pfam module annotation: Pfam domain module=RpoE2::Spt4; Domain location=16-92::14-115
MGSAPAQIPTSFGHELRACLRCRLVKTYDQFRDAGCENCPFFKMEEDHERIVEVTTPNFNGIISVMDPSRSWAARWLRIGKFAPGCYTLAVSEPLTEEMLVCQEERVQYVPPKRM

SEQ ID NO: 13680 - protein, 135 aa, Zea mays
  Coding DNA Sequence Number=SeqID_834
NFERLTFLYIKNGRSSESPPARFSNTFVEYPCHAQLHPSSFACPHHGTLVVVCSQVYNKTSTTAFVPSGAMHIPGRRRPCLRCPLAAANILSISGGSRALARYLAAPLGRPRPILPRPSHVLPPPKWDELDLGVP

SEQ ID NO: 13681 - protein, 160 aa, Zea mays
  Coding DNA Sequence Number=SeqID_836
SRGASAIHIISLGRAVPLRRPGSFPDALGSLVCHLAGVPLHLACPSGPLFATLPWSSSHAQRRPTSLPMVVPSSFLPMVDGLTFHGFQDLLNIHSSAHPCFRFLVADAPSLELALAHPLVLVFIAGISALRLLPVSSSPPVVATPSRLVTFVSLLLPIST

SEQ ID NO: 13682 - protein, 72 aa, Zea mays
  Coding DNA Sequence Number=SeqID_838
QTILVTLIATTATRALQIGPSIQFKMIQRIISSSKISKVLDLLPMCHIPYLPTQRRYGLECLRKSELSMLLL

SEQ ID NO: 13683 - protein, 268 aa, Zea mays
  misc_feature (83)..(83): Xaa can be any naturally occurring amino acid
  Coding DNA Sequence Number=SeqID_840
  Gene Ontology: Mol. function=ATPase activity, coupled to transmembrane movement of substances; Cellular component=proton -transporting two-sector ATPase complex; Biological process=proton transport
  Homolog annotation: Hit_ID=A3AXY5; Match level="QueryCoverage=100%, HitCoverage=100%, E-value=2e-70, Identity=57%"; Hit description =Putative uncharacterized protein
  Pfam annotation: Domain name=ATP-synt_D; Domain location=15-219; Score=247.4; E_value=3.2e-71; Accession=PF01813.8; Description=ATP synthase subunit D
MAGQGQRLNVVPTVTTLGTVKARLAGAARGHALLKKKSDALTVQFRAILRRIVSAKDAVGDAMRTASLSLAEALYVAGAPLRXHAAQQSVSGPARLRVRAHQDNIAGVRLPRFESDAASPAGSAASPASLAGLAGGGQQVSACRAAYARALQVLVELASLQTSFLALDASIKTTNRRVNALESVVKPRLENTIAYIRGELDEHEREEFFRLKKIQGYKQRELERQKEAASRYAEEKAAGEVALKRGVSVATAESMLENGDRDEEDIIF

SEQ ID NO: 13684 - protein, 375 aa, Zea mays
  misc_feature (237)..(237): Xaa can be any naturally occurring amino acid
  Coding DNA Sequence Number=SeqID_841
  Gene Ontology: Mol. function=hydrolase activity, acting on ester bonds; Cellular component=extracellular region; Biological process =lipid metabolic process
  Homolog annotation: Hit_ID=Q75IE0; Match level="QueryCoverage=89%, HitCoverage=88%, E-value=1e-104, Identity=56%"; Hit description =Putative GDSL-like lipase/acylhydrolase
  Pfam annotation: Domain name=Lipase_GDSL; Domain location=40-356; Score=149.7; E_value=8.1e-42; Accession=PF00657.12; Description=GDSL- like LipaseAcylhydrolase
  Subcellular localization annotation: CTP_CleavageSite=15; ConfidenceScore=5.15e-01
MAAAAATVVTPSSPRSMAVAAAIAFFFAVTAAAASPVPAIYVLGDSLADVGNNNHLVTLLKADFPHNGIDYPGQKATGRFSNGKNSVDFLAENLGLATSPPYLALSSSNPNYANGVNFASGGAGVSNLTNKDQCISFDKQIDYFATVYASLVQSLGQAQATAHLAKSLFAITIGSNDIIHYAKSNSAANTKQASASGAAADPSQQFVDALIHTLTGQLQRLYALGARKVLFLGTGPXGCCPSLRELSPAKDCSAEANGISVRYNAGAASLLGTMAARYADMHYALFDSSAALLQYIDHPAAHGFTEAKAACCGLGDMNAKIGCTPLSFYCDNRTSHVFWDFYHPTETTARMLTSTAFDGSAPLIFPMNIRQLSAI

SEQ ID NO: 13685 - protein, 200 aa, Zea mays
  misc_feature (62)..(62): Xaa can be any naturally occurring amino acid
  misc_feature (77)..(77): Xaa can be any naturally occurring amino acid
  misc_feature (95)..(95): Xaa can be any naturally occurring amino acid
  misc_feature (167)..(167): Xaa can be any naturally occurring amino acid
  Coding DNA Sequence Number=SeqID_842
  Gene Ontology: Mol. function=aspartic-type endopeptidase activity; Cellular component=chromatin; Biological process=DNA integration
  Homolog annotation: Hit_ID=Q2QSG2; Match level="QueryCoverage=86%, HitCoverage=10%, E-value=4e-64, Identity=65%"; Hit description =Retrotransposon protein, putative, Ty1-copia subclass
  Pfam annotation: Domain name=rve; Domain location=2-99; Score=-0.3; E_ value=0.01; Accession=PF00665.16; Description=Integrase core domain
  Subcellular localization annotation: CTP_CleavageSite=39; ConfidenceScore=5.10e-01
SKPIRALQCDNGREFDNHASQSFFLASGVQLRLSCPYTSAQNGRAERMIRTTTNMIRCLLFXASLPASYWAEALHTXTHLLNRLPSKAVNHPTPXFALYGMTPSYDHLRVFGYACYPNTSASAPHKLSPRSTRCLFLGYALDHTEYRCLDLTTHRVIISRHVVFGEXCFPFAGSSPPTDLDSLLDSDPSAGNQAKFCNGV

SEQ ID NO: 13686 - protein, 77 aa, Zea mays
  Coding DNA Sequence Number=SeqID_843
ILFLGAIKLTGSRHLDKLVLLIVDFLLDHQFFSFNGLLLSNFHFLNTWVLDHLFIGYQAVEGLTTEMRGMVEQDEDR

SEQ ID NO: 13687 - protein, 137 aa, Zea mays
  Coding DNA Sequence Number=SeqID_845
  Subcellular localization annotation: CTP_CleavageSite=21; ConfidenceScore=5.43e-01
SKTRSPRSKVTSTVCAATIRSASMVRSEPPPSRGRDTSGSEAASTVFYLAPLSLPPSLHFEGKETVVVLYYETEVYYPLSSSWDFSFSAAVDLGFACTRLVLAKPRLQVSWVLAFWSVLAKTRLQVSLTVCALVILI

SEQ ID NO: 13688 - protein, 200 aa, Zea mays
  Coding DNA Sequence Number=SeqID_847
HTSVLSFNFGKQSDGCNILVYYHSNFAKQNLIVQAPPLPSGQPECAEKKLDVNSCKEQNKYEILSGNQHMFTSQDPVFYSQEHGKNQQTDMREINTSHHDSCPTRRGKSWSLGLIAGTDDEFRWRVQMESSRFGRPSDGGGPSKGGDGGPLEVGHGWDDGGSTRPDIDSRSARRDESSSMGVRRRWNLLSVARGSNKGEQ

SEQ ID NO: 13689 - protein, 165 aa, Zea mays
  Coding DNA Sequence Number=SeqID_849
DVKDSDAEMSVHQSLGRSRARIKCRIMHQVISLSKIKIRSRKNNETRRLKGGLWLLSGGNMVIGSILPASVLNSFRRGSSVSSSQQSVPRSSGKKKARENKKPRPKKIFRIENKRGPKKEFGWLGSAGKSAYRSISYTERPVIWSVELEYYRVVTAISLHLRRTD

SEQ ID NO: 13690 - protein, 103 aa, Zea mays
  Coding DNA Sequence Number=SeqID_7306
LLTGSYLGASCYIYTTTPRRRPLSCATIGPAQLQLQLVPPHLQVLQPPALAWMVGAARMPLAAAVSTSGYKLQQSHGHPQSGGQLQPSSQQYAMITGEGSRCS

SEQ ID NO: 13691 - protein, 78 aa, Zea mays
  Coding DNA Sequence Number=SeqID_7308
  Gene Ontology: Mol. function=protein binding
  Homolog annotation: Hit_ID=A2ZTZ9; Match level="QueryCoverage=93%, HitCoverage=7%, E-value=2e-23, Identity=75%"; Hit description =Putative uncharacterized protein
  Pfam annotation: Domain name=FF; Domain location=17-67; Score=34.4; E_ value=4.1e-07; Accession=PF01846.10; Description=FF domain
LESQEKEAAGKRIIQRRARDDVLAMLEERKELTSSARWSKAILMFEDDERFKAVERPREREDLFENYLVELDKKVIRY

SEQ ID NO: 13692 - protein, 51 aa, Zea mays
  Coding DNA Sequence Number=SeqID_7309
LLTIFYREEDKPNLYGHSSLESVMWEVTIETKVIRAGVSQGEARSGHLGQG

SEQ ID NO: 13693 - protein, 83 aa, Zea mays
  Coding DNA Sequence Number=SeqID_7311
  Homolog annotation: Hit_ID=Q7XC46; Match level="QueryCoverage=80%, HitCoverage=8%, E-value=1e-28, Identity=92%"; Hit description=BZIP, putative, expressed
  Pfam annotation: Domain name=DUF630; Domain location=1-60; Score =121.9; E_value=1.9e-33; Accession=PF04783.3; Description=Protein of unknown function (DUF630)
MGCTASKVEQEDTVRRCKERRRHMKDAVAARQLLASAHADYLRSLRVTAAALSRFAKGHPSLAVSHHTTPVLLSAAAPPPTAT

SEQ ID NO: 13694 - protein, 172 aa, Zea mays
  misc_feature (153)..(153): Xaa can be any naturally occurring amino acid
  misc_feature (170)..(170): Xaa can be any naturally occurring amino acid
  Coding DNA Sequence Number=SeqID_7312
  Subcellular localization annotation: CTP_CleavageSite=54; ConfidenceScore=5.74e-01
ELVSTSPSSSSLPLACPASPPGARPHRVSRVCASRGRSSPSAAPSSPLLQNCFSCAAEQPRQASSPGPCVRIAASVHLPNFKPSPTHVARTWDPWRPCSRPASLGTPTPAAPLPSVPCVPGWSSRVVAVELKGKCALGPFLSILVIECQHKWXCVNLCQMMDKVKTNIKXCF

SEQ ID NO: 13695 - protein, 68 aa, Zea mays
  misc_feature (5)..(6): Xaa can be any naturally occurring amino acid
  Coding DNA Sequence Number=SeqID_7314
RRRSXXSSYAHEWLSSLGRRRDRPEATGNESEARRWARRRGSPFLFPICTHPQHSSTRRLLFLNNWIK

SEQ ID NO: 13696 - protein, 89 aa, Zea mays
  Coding DNA Sequence Number=SeqID_7316
LSLQQIQHIITPVTYGYCVRCVAPPPAAAWLPPAGWDPAGMLGPPPPTLLGKPSMMLFLSCNRRRRGECPPRKRLGAWVQIQHTTDRKV

SEQ ID NO: 13697 - protein, 105 aa, Zea mays
  misc_feature (24)..(24): Xaa can be any naturally occurring amino acid
  misc_feature (49)..(49): Xaa can be any naturally occurring amino acid
  misc_feature (76)..(76): Xaa can be any naturally occurring amino acid
  misc_feature (105)..(105): Xaa can be any naturally occurring amino acid
  Coding DNA Sequence Number=SeqID_7318
  Homolog annotation: Hit_ID=Q2QNQ6; Match level="QueryCoverage=98%, HitCoverage=49%, E-value=9e-28, Identity=61%"; Hit description =Expressed protein
MGWATRFLAAVCFFAAGVLFVPEXLLGSPSGAGAVTAAKLAHVLSFGTXWGGALWGHFIGGIFMVKNLPRHMFRNXLQKKKFPAYLRLFLAWGPFWGGTFSHLPX

SEQ ID NO: 13698 - protein, 157 aa, Zea mays
  misc_feature (24)..(24): Xaa can be any naturally occurring amino acid
  misc_feature (49)..(49): Xaa can be any naturally occurring amino acid
  misc_feature (76)..(76): Xaa can be any naturally occurring amino acid
  Coding DNA Sequence Number=SeqID_7319
  Homolog annotation: Hit_ID=Q2QNQ6; Match level="QueryCoverage=65%, HitCoverage=49%, E-value=9e-28, Identity=61%"; Hit description =Expressed protein
MGWATRFLAAVCFFAAGVLFVPEXLLGSPSGAGAVTAAKLAHVLSFGTXWGGALWGHFIGGIFMVKNLPRHMFRNXLQKKKFPAYLRLFLAWGPFWGGTFSHLPPGKKGGPRGGVTALWFPPKGGGGGNSLQPGLTFPPLGNWEVGKKEAQICGGAP

SEQ ID NO: 13699 - protein, 214 aa, Zea mays
  misc_feature (54)..(54): Xaa can be any naturally occurring amino acid
  misc_feature (75)..(75): Xaa can be any naturally occurring amino acid
  misc_feature (80)..(80): Xaa can be any naturally occurring amino acid
  misc_feature (106)..(106): Xaa can be any naturally occurring amino acid
  misc_feature (136)..(136): Xaa can be any naturally occurring amino acid
  misc_feature (149)..(149): Xaa can be any naturally occurring amino acid
  misc_feature (167)..(167): Xaa can be any naturally occurring amino acid
  misc_feature (177)..(177): Xaa can be any naturally occurring amino acid
  misc_feature (189)..(189): Xaa can be any naturally occurring amino acid
  misc_feature (203)..(203): Xaa can be any naturally occurring amino acid
  misc_feature (207)..(207): Xaa can be any naturally occurring amino acid
  misc_feature (210)..(212): Xaa can be any naturally occurring amino acid
  Coding DNA Sequence Number=SeqID_7320
  Homolog annotation: Hit_ID=Q2QNQ6; Match level="QueryCoverage=100%, HitCoverage=100%, E-value=1e-55, Identity=58%"; Hit description =Expressed protein
MGWATRFLAAVCFFAAGVLFVPEALLGSPSGAGAVTAAKLAHVLSFATSWGAAXWATFIGGIIMFKNPARHRFGXNLQSXMFPGYFTLISAWRSLSVGTFLDLPPXKTGPPGEGLQAGIPPLRGRLQIFPHLVVLXPPLHFGMMKKGPXLGGALVFWEEGGWSKNTXGVGKSNPPLXAMNKKFGMIPGXSSLANIMSFGSLAXPSWXLAXXXEL

SEQ ID NO: 13700 - protein, 91 aa, Zea mays
  misc_feature (37)..(37): Xaa can be any naturally occurring amino acid
  Coding DNA Sequence Number=SeqID_7321
  Gene Ontology: Mol. function=helicase activity
  Homolog annotation: Hit_ID=Q2QRJ3; Match level="QueryCoverage=80%, HitCoverage=11%, E-value=5e-12, Identity=47%"; Hit description =Putative uncharacterized protein
LSYFFYFVRGGSAHAQIYPSLTEVFKPLINEGNVAMXYNVSYIQIKKANRMYKTVDNDIMIGFTKWTTVEELIEVQMVCESTGSRGNEPYS

SEQ ID NO: 13701 - protein, 182 aa, Zea mays
  misc_feature (100)..(101): Xaa can be any naturally occurring amino acid
  Coding DNA Sequence Number=SeqID_851
  Gene Ontology: Mol. function=transcription regulator activity; Cellular component=nucleus; Biological process=regulation of transcription
  Homolog annotation: Hit_ID=Q8L5G8; Match level="QueryCoverage=81%, HitCoverage=29%, E-value=9e-64, Identity=86%"; Hit description =Hexokinase
  Pfam annotation: Domain name=Hexokinase_1; Domain location=44-176; Score=19.3; E_value=1.3e-12; Accession=PF00349.11; Description =Hexokinase
MVKAVVVGAAVVACAAVGVAVVLERRRRKRDADLLGSAEAERRRRAAAVIEEVESSLATPTALLRSIADAMVAEMERGLRGDIHAQLKMLISYVDSLPTXXEHGLFYALDLGGTNFRVLRVQLGGKEKRVVKQQYEEVSIPPHLMVGTSMELFDFIAAALAKFVGTEGEDFHGSPDHQVWWS

SEQ ID NO: 13702 - protein, 187 aa, Zea mays
  misc_feature (17)..(17): Xaa can be any naturally occurring amino acid
  misc_feature (148)..(187): Xaa can be any naturally occurring amino acid
  Coding DNA Sequence Number=SeqID_852
IVGVDEHVADVTWIDDXEQGGCWRDGIRAGSTIGDHYGRELGRTASVQRTGKARLGSAMGATSRKEYPTSREGRRAGNPARNELKLSDGGRLEPAGEEDTSDMESRGPVATASLREMEKREGARKPRCWKLGTERWSPRRGGQGARPXXXXXXXXXXXXXXXXXXXXXXXXXXXXXXXXXXXXXXXX

SEQ ID NO: 13703 - protein, 209 aa, Zea mays
  misc_feature (22)..(22): Xaa can be any naturally occurring amino acid
  Coding DNA Sequence Number=SeqID_854
  Homolog annotation: Hit_ID=A8MRH9; Match level="QueryCoverage=23%, HitCoverage=94%, E-value=2e-13, Identity=66%"; Hit description =Uncharacterized protein At1g06515.2
SIRGAAPFGSGRGELRRRTSRXRMNWIGRKIHLYNVTIGLYMLDWWERYLFNILMVCLFWYILRYLLGFFQRLQGIPPSRTSSCCCCWTRSVYPRTPVLSPSSTCQFRTRTQRSASCVAGAGFTLRPASPTSTAAILSTISDSMDYKRRQVQNIKQHTVAVSFWREGALECHSSEAAYWECHKRKCLVRDRAVVGLMVQSRHVCLITCH

SEQ ID NO: 13704 - protein, 449 aa, Zea mays
  misc_feature (164)..(166): Xaa can be any naturally occurring amino acid
  Coding DNA Sequence Number=SeqID_855
  Gene Ontology: Mol. function=catalytic activity; Cellular component =phosphopyruvate hydratase complex; Biological process=metabolic process
  Homolog annotation: Hit_ID=A7PGY0; Match level="QueryCoverage=83%, HitCoverage=89%, E-value=1e-139, Identity=67%"; Hit description =Chromosome chr17 scaffold_16, whole genome shotgun sequence
  Pfam annotation: Domain name=MR_MLE; Domain location=225-320; Score =77.1; E_value=5.8e-20; Accession=PF01188.11; Description=Mandelate racemase  muconate lactonizing enzyme, C-terminal domain
  Pfam annotation: Domain name=MR_MLE_N; Domain location=88-208; Score =31.0; E_value=4.2e-06; Accession=PF02746.6; Description=Mandelate racemase  muconate lactonizing enzyme, N-terminal domain
  Pfam module annotation: Pfam domain module=MR_MLE::MR_MLE_N; Domain location=225-320::88-208
  Subcellular localization annotation: CTP_CleavageSite=87; ConfidenceScore=5.82e-01
MVPMDPSISSSSSPLRLPGSPTSPGASSTPSPRPTLVAAGRQPAAAPSTTRLRAISPSQSQSPPTPASPVEPFGFDALKGTFSVDVAAADARALDVPLAAPFTIASSRLVAVSNVAVRVELRSGAVGWGEAPVLPSVTAEDQPAALDAAGRACAALVGAPAAPXXXVLQDLASVLPGHAFASARAGVEMALIDAVANSIGIPLWRLFGGASDSLTTDITIPIVTPNEAAQLAAKYRGQGFQTLKLKVGKNLNSDIEVLKAIRLVHPDCSFILDANEGYTAKQAIEVLDRLNEMGVTPVLFEQPVHRDDWDGLRDVTSVAMEKYKVAVAADESCRSLLDAQKIIDGNLAHVINIKLAKLGVLGALEIIDAARKANIALMIGGMVETRIAMGFAGHLAAGLGCFSFIDLDTPLLLSEDPVYGGYEAFGPLYKFTNARGHGGFLHLDNDASK

SEQ ID NO: 13705 - protein, 535 aa, Zea mays
  Coding DNA Sequence Number=SeqID_856
  Gene Ontology: Mol. function=aminopeptidase activity; Cellular component=intracellular; Biological process=proteolysis
  Homolog annotation: Hit_ID=UPI0000D5770B; Match level="QueryCoverage =95%, HitCoverage=95%, E-value=0.0, Identity=62%"; Hit description =PREDICTED: similar to CG7340-PB, isoform B
  Pfam annotation: Domain name=Peptidase_M17; Domain location=193-500; Score=381.4; E_value=1.4e-111; Accession=PF00883.11; Description =Cytosol aminopeptidase family, catalytic domain
MSKVKVTFSNKLTESDPLVNPVIIIGKLENLKQVPYDVIKAKLEPRVSEEVYQSALTCMQPSPTDVCSLYLNMATLAALPKRCARHNAPSHANFITKLVRSTCLGVDEYVVIVCERQDVLASACAVARAYPIYSRKTLKPASTSNGTGVGNSGTPTSATVRVEFILVDGGKGEDAQTLSENDLLCLEEICISVRTVARIVDTPCSEMNVKDFTQEIQQVASELGVACSVVLGEELKEKGFGGIYGVGKAAIVPPALVTLSYTPPNATQTIAWVGKGIVYDTGGLSIKGKTAMPGMKRDCGGAAAILGAFRAAVKLGFSENLHAVFCLAENAIGPNATRPDDILTLYSGRTVEINNTDAEGRLVLADGVAFAQKDLKANVILDMATLTGAQAIATGRYHAAVLTNREEWEEYCLQAGRTSGDLTFPIPFCPELHLPEFSSAFADMKNSVADRGNAQSSCAGLFIFAQLGVDFPGSWIHVDMASPCHCGERATGYGVALLVTLFGQYSSQPFLQNMSSISFDEVFDKFETCKKFKRS

SEQ ID NO: 13706 - protein, 85 aa, Zea mays
  Coding DNA Sequence Number=SeqID_857
  Gene Ontology: Mol. function=hydrolase activity, acting on ester bonds; Cellular component=anchored to membrane
  Homolog annotation: Hit_ID=A2YKF4; Match level="QueryCoverage=65%, HitCoverage=71%, E-value=5e-22, Identity=91%"; Hit description =Putative uncharacterized protein
MVTTDWGPIIVAVVLFILLSPGFLFQLPARVRVVEFGNMGTSALAILVHAILYFCILTIVVVAIGGGAPGRFGQVDGEDQRVLGS

SEQ ID NO: 13707 - protein, 144 aa, Zea mays
  misc_feature (103)..(103): Xaa can be any naturally occurring amino acid
  Coding DNA Sequence Number=SeqID_858
DHSSNAHYENLVVVNLQQHQISKQSLQYKEALGKLLQTMTTGVAQNSCPHRVSWDLAGARSVVVPLGQLASLSTNRSSSIDQVFKPCSEYFHRRSPFLCTHAXGGGWGSERRGITIASVDSSITRAARGGGRGWPRRVWTVFFD

SEQ ID NO: 13708 - protein, 149 aa, Zea mays
  Coding DNA Sequence Number=SeqID_860
VQPTAARINKELEEVIAGGQCRGYRIGGVGHRMTSETPTSCVSVIAGDDRASRNRRSYPRLPWPPPRLPNEAYRASRNRRGHRAWGAPSTLVRFGSAVTACLPSSGASSSLGPGGAPVTLAHSPRKRCRLSPALGHHSRSLQDRCHSHA

SEQ ID NO: 13709 - protein, 51 aa, Zea mays
  Coding DNA Sequence Number=SeqID_862
RKLEPPSYYLVTNMSTFLIPRYVGYCLNRYGHHTKVCLCNRFGYTYPLYAC

SEQ ID NO: 13710 - protein, 247 aa, Zea mays
  misc_feature (1)..(12): Xaa can be any naturally occurring amino acid
  Coding DNA Sequence Number=SeqID_863
  Homolog annotation: Hit_ID=Q2QYN9; Match level="QueryCoverage=73%, HitCoverage=85%, E-value=9e-15, Identity=37%"; Hit description =Expressed protein
  Subcellular localization annotation: CTP_CleavageSite=81; ConfidenceScore=5.82e-01
XXXXXXXXXXXXACTSPPPRSSSRSPNPPLSPLSATPTMRPPKSAARPPASLTSPKTGANKRQRKAASAVPLGDITNLLVLAESPTPSKPRRTARRALPATSDVSAVSSTCSSSASVTPAPKPSSAAVFEEEHSVVKSPTISTVHRRTTGAQERCRRNPASANNKGKEPVAATASCPPLGKSARTHSRKKDTRPISASVPCHEGRKKRPIANTPNLLEDLLEKQRAYFADIDAFELVEEEVSESELE

SEQ ID NO: 13711 - protein, 124 aa, Zea mays
  misc_feature (7)..(7): Xaa can be any naturally occurring amino acid
  misc_feature (9)..(9): Xaa can be any naturally occurring amino acid
  Coding DNA Sequence Number=SeqID_864
  Subcellular localization annotation: CTP_CleavageSite=56; ConfidenceScore=5.44e-01
ARDHYLXHXNRKTSLSFLSFPCRLLSAVPWSTSRVPSHASCKHAVLPPLTPNLLPMANSPNHSPPLQHAVLAQPRQRHPPLRHAVDPLDGMPQRALPDLQSLHAVVEIPATVLVCNSTSSICNP

SEQ ID NO: 13712 - protein, 94 aa, Zea mays
  Coding DNA Sequence Number=SeqID_866
  Subcellular localization annotation: CTP_CleavageSite=71; ConfidenceScore=5.03e-01
PLLRETGAPSTTRRRSTTNHGLRRGAPLPWMSLALDQALHTTPHSLANPSSHLPRPSFLIVDGDGSLKRRRGETLSSLPLCRGWWLGVWKYRLD

SEQ ID NO: 13713 - protein, 177 aa, Zea mays
  Coding DNA Sequence Number=SeqID_868
LDSDAVGSRRRALRSSLHLIPFPCSPSHDVRRCEDRPWHHSPAPPVPGAVQGGGAGEAARAEQAQCREEEREKRQERSRHEADDCSGEGSSEDEREREQEKEEKQKDRRPYMFFRRSFRRVVRSEQGSLRGSFGITGSREDPRPIPGHGNPSQNCPCGFFFRSLVTTLPGPHRGGAR

SEQ ID NO: 13714 - protein, 125 aa, Zea mays
  Coding DNA Sequence Number=SeqID_870
ARDHYLEHPNRKIDPVLSSKGRPAQGRTGGEEEDLPNPACSSLVSSSSSKLRSDPPMSDSSPAPGAYYSGPPAAPPPESKPVDGGQVNADVPGYYSSAPAAKSGAGGQQGSSAAPKESGFFASCY

SEQ ID NO: 13715 - protein, 156 aa, Zea mays
  Coding DNA Sequence Number=SeqID_872
LLSKHYRNCGHPLRSLLVRPTKHTRVAWLRVGLENKLEAPEPARARSGLGSERLASLERAEPSPFFELVFAASRAEPACSGSRALVRRALKLHQLGTSHSWNIVLYVNHALGSGLLLWTADPTNQRWWRGPNPSAGVDLREPPSPPTEHWTRIFFD

SEQ ID NO: 13716 - protein, 163 aa, Zea mays
  misc_feature (24)..(24): Xaa can be any naturally occurring amino acid
  misc_feature (68)..(68): Xaa can be any naturally occurring amino acid
  misc_feature (105)..(105): Xaa can be any naturally occurring amino acid
  misc_feature (127)..(127): Xaa can be any naturally occurring amino acid
  Coding DNA Sequence Number=SeqID_874
  Subcellular localization annotation: CTP_CleavageSite=51; ConfidenceScore=5.46e-01
VNWCFIASYSHRQSPTGRGSQQRXGKRRKKNRATVRGIEGGGRIPPAVSVYSSMAPSSILLPSPSGMXTSTGRQLRRMSRLRSPPEPNLRPTRHAPAPQAVPRAXGPRVGRRGAARRARRPRRAPRXQQLEPLRQRRHWELGPPPSTLSLSALLCVSVVCASA

SEQ ID NO: 13717 - protein, 183 aa, Zea mays
  Coding DNA Sequence Number=SeqID_876
SHRPTPPTPSRVAQHHSRDPFPQVRACTPDAVRWDPRVGHLLPNSVLKPAIWGRPNRLKPTPRKRSFAPVDSASARASWKRILSTGYITLAVSRPEPKSCRGAQRAMEERGSPHLEPFLTGAGRVKISLWPTPSPCRCQTRLGEALRITSGTRRSRLSPQQLPMYAYPTPRTHASERPARLFD

SEQ ID NO: 13718 - protein, 271 aa, Zea mays
  misc_feature (139)..(139): Xaa can be any naturally occurring amino acid
  misc_feature (190)..(190): Xaa can be any naturally occurring amino acid
  misc_feature (206)..(206): Xaa can be any naturally occurring amino acid
  Coding DNA Sequence Number=SeqID_878
  Gene Ontology: Mol. function=protein serine/threonine kinase activity; Biological process=protein amino acid phosphorylation
  Homolog annotation: Hit_ID=A3B481; Match level="QueryCoverage=73%, HitCoverage=51%, E-value=1e-52, Identity=59%"; Hit description =Putative uncharacterized protein
  Pfam annotation: Domain name=PB1; Domain location=62-155; Score=63.1; E_value=9.4e-16; Accession=PF00564.15; Description=PB1 domain
MAEIEDAMGAPLTVTTTESEGTTTDEDVHLSPTCICGGAGGAGGGGRIKILCSFGGRIVPRPHEGVLKYVGGETRVLAVPRSICFRELKKKVEDMFKTEVAAIKYQLLSFAEELDVLVSVTCDEDLVHMLDEYDRLEAXRSPTTSPRFRVYVFTPQATAPTVPSSTRYAGLSRLHPHHHHHQQHLQFQPXRYVATVPASPDGSPPXSAQPHGAVSAGNSPRANAVPPREKNDDWNWRCIPEKFARREEDKRTTAARREVTDVDDVSIHGFN

SEQ ID NO: 13719 - protein, 362 aa, Zea mays
  misc_feature (307)..(307): Xaa can be any naturally occurring amino acid
  Coding DNA Sequence Number=SeqID_879
  Gene Ontology: Mol. function=amino acid transmembrane transporter activity; Cellular component=integral to membrane; Biological process=amino acid transport
  Homolog annotation: Hit_ID=A2ZBL7; Match level="QueryCoverage=85%, HitCoverage=75%, E-value=1e-124, Identity=72%"; Hit description =Putative uncharacterized protein
  Pfam annotation: Domain name=AA_permease; Domain location=2-360; Score=-105.3; E_value=0.0064; Accession=PF00324.11; Description =Amino acid permease
TSGWLVGWHAGEFAAFLTGANLIMEYVFSNAAVARSFTAYLGTAVGVDAPSKWRIPVPGLPQGFNQVDLVAVGVILLLSVCICYSTKESSVVNLVLTGVHVVFILFIIVMGFAHGDARNLSRPADPAHSPGGFFPHGAAGVFNGAAAVYLSYIGYDAVSTMAEEVERPDRDIPAGVSGSVVLVTVLYCLMATSMSMLLPYDAIDPEAPFSGAFKGRDGMAWVSNVIGAGASLGILTSLMVAMLGQARYLCVIGRSGVVPAWLARVDPRTATPINASAFLGLLTAALALFTELDVLLNLVSIGTLFVXYMVANAVVYRRYVGDPCPGALATFRSLLATLLILFCALGSSLPGALPIGKLSRGL

SEQ ID NO: 13720 - protein, 96 aa, Zea mays
  Coding DNA Sequence Number=SeqID_880
HGDLFYRGSVPKNLVPLEVVKKTESLSAHSLSQNGHLDRVSFLLNQTGHLDPHKDHHTLGVSCFDYKCLENYNEEEESQPSNKSNKETQERSSHKS

SEQ ID NO: 13721 - protein, 474 aa, Zea mays
  Coding DNA Sequence Number=SeqID_882
  Gene Ontology: Mol. function=sugar:hydrogen symporter activity; Cellular component=integral to membrane; Biological process =carbohydrate transport
  Homolog annotation: Hit_ID=UPI0000D558E3; Match level="QueryCoverage =97%, HitCoverage=97%, E-value=1e-114, Identity=46%"; Hit description= PREDICTED: similar to CG10960-PB, isoform B
  Pfam annotation: Domain name=MFS_1; Domain location=28-409; Score =70.2; E_value=7e-18; Accession=PF07690.6; Description=Major Facilitator Superfamily
  Pfam annotation: Domain name=Sugar_tr; Domain location=28-458; Score =218.0; E_value=2.3e-62; Accession=PF00083.14; Description=Sugar (and other) transporter
  Pfam module annotation: Pfam domain module=MFS_1::Sugar_tr; Domain location=28-409::28-458
MKLTQNAMFNNGNKLGSFFYQYLATISGCLSIICCGMHFGWPSPSLPELLDPNSTIPMTSEEGSWLAAMPCIGAPIGDIIAAYMADKIGRKYSMLITSPMYVASWLLVAFSPSVFVFALARIIAGAADGIAFTAFPMYLGEISDSKIRGILGSSIQVSMTTGMLLVNIIGLYLNISLTAIIALVFPVLHFITFWFMPESPYYLLMTKNTDAARRSLQIFNGTDDVDQKLKTVDQAVKEDLENTSSIWNLFTTKSNRKALLICFCLRSIQQFIGAYAITFYAKMIFDEAGENISASTATMIFFSVQLFVAIIASFLSDSLGRRPLLIISIIGSGIALAVEGLYFYFEGKIDMSGYSFVPLLALISYVIIYNVGVGCVPIILLGELFPPNVKAFALCLCDIWFDIVVTFMSKFFQLMKDNFGMHVPFFAFALFCGIGLVFIVLCVPETKGKTLEEIQLILKGKSKKNHDIELEVNT

SEQ ID NO: 13722 - protein, 191 aa, Zea mays
  misc_feature (1)..(46): Xaa can be any naturally occurring amino acid
  Coding DNA Sequence Number=SeqID_883
XXXXXXXXXXXXXXXXXXXXXXXXXXXXXXXXXXXXXXXXXXXXXXGINGEVPAAMHAPSPVRAVLAKVRPPCSRLPQSAPRWTEQPPLMTAAPAVSARGMEAADGTPARRHQACACHGHGCQQLHGWSTGSVCVADACVTDDASGPAQEGKDEPRKSKANVRRQHPLHHQHLHRLLQGELKPRPRATTAA

SEQ ID NO: 13723 - protein, 136 aa, Zea mays
  Coding DNA Sequence Number=SeqID_885
  Gene Ontology: Mol. function=glutathione transferase activity; Biological process=response to stress
  Homolog annotation: Hit_ID=Q9FQB3; Match level="QueryCoverage=100%, HitCoverage=56%, E-value=2e-72, Identity=99%"; Hit description =Glutathione S-transferase GST 26
  Pfam annotation: Domain name=GST_C; Domain location=4-108; Score =18.5; E_value=0.0012; Accession=PF00043.15; Description=Glutathione S-transferase, C-terminal domain
WAAYIDGKLFPAWTGIMKAATEEARAEKLRETHAAVLNLEKAFAEISSSSSNDGAAFFGGDSVGYLDLALGCSLPWFGALRAMLGVEIIDAAQAPLLVAWAERFGETPVAKEVLPQPDEAVAYAKKIQAYWASAKN

SEQ ID NO: 13724 - protein, 104 aa, Zea mays
  misc_feature (46)..(46): Xaa can be any naturally occurring amino acid
  misc_feature (85)..(85): Xaa can be any naturally occurring amino acid
  Coding DNA Sequence Number=SeqID_886
  Homolog annotation: Hit_ID=A2YET2; Match level="QueryCoverage=63%, HitCoverage=51%, E-value=4e-15, Identity=68%"; Hit description =Putative uncharacterized protein
  Subcellular localization annotation: CTP_CleavageSite=36; ConfidenceScore=5.44e-01
RYSSAGSPQLVPSGSAPSPRLRPCLSSSEKRTKKKREMARRGSHKXRVRFADDVVDKDNGVAAPREEAEPSCAAAVRTLMPANRXALYGGMLRGRSMLRVACSY

SEQ ID NO: 13725 - protein, 200 aa, Zea mays
  misc_feature (120)..(120): Xaa can be any naturally occurring amino acid
  misc_feature (159)..(159): Xaa can be any naturally occurring amino acid
  misc_feature (169)..(170): Xaa can be any naturally occurring amino acid
  misc_feature (181)..(181): Xaa can be any naturally occurring amino acid
  misc_feature (187)..(187): Xaa can be any naturally occurring amino acid
  Coding DNA Sequence Number=SeqID_887
  Homolog annotation: Hit_ID=A2XU23; Match level="QueryCoverage=69%, HitCoverage=30%, E-value=4e-35, Identity=53%"; Hit description =Putative uncharacterized protein
  Subcellular localization annotation: CTP_CleavageSite=87; ConfidenceScore=5.79e-01
MAALPHRRRRHGNAVACASSSPSSSQHQRSLNGLAMSSSGTNNALPIKGTTTTRVPAVGRSAPANPSPSGGNNLPVPKIPLWVKWVAGAVIFAVPMYRRFRALEDKIEKTAEVAIEVIDXSEATEKVAGEVADEFPGNESIKEAASRIKKVHVVEEDAXKAEALIEKVXXIKKEVDSIVDXIMGKVXKDKRRMNKQQSVN

SEQ ID NO: 13726 - protein, 206 aa, Zea mays
  Coding DNA Sequence Number=SeqID_888
  Gene Ontology: Mol. function=transferase activity, transferring glycosyl groups; Cellular component=chloroplast; Biological process =biosynthetic process
  Homolog annotation: Hit_ID=Q10Q06; Match level="QueryCoverage=88%, HitCoverage=38%, E-value=1e-94, Identity=86%"; Hit description =Digalactosyldiacylglycerol synthase 2, putative, expressed
MSMKRHFAIFTTASLPWMTGTSINPLFRAAYLAKDGDKDVTLVIPWLCLRDQELLYPNNIVFDSPSEQESYVRHWIEERIDFRPSFSIKFYPGKFSKEMRSILPVGDITECIPDEVADVAVLEEPEHLNWYHHGRRWKNKFRRVIGIVHTNYLAYVRREKNGQVIACFLKYANTWVTRIYCHKERAVVGMGCSLHRGEGFSWPRRQ

SEQ ID NO: 13727 - protein, 143 aa, Zea mays
  Coding DNA Sequence Number=SeqID_889
VGVGGGGEPEEEGADEKHDRDAVHGASQRLRPRRLPPPRRRQRVIRRQRRLAPAHAAAAVRHARPARRSPHPRGRLDETDGGLGEERERERRGRPRPPWLFRRVGAAPTRWARADPRRRAGGNVRRWVGGRADTAVAADGALR

SEQ ID NO: 13728 - protein, 287 aa, Zea mays
  misc_feature (9)..(9): Xaa can be any naturally occurring amino acid
  misc_feature (283)..(283): Xaa can be any naturally occurring amino acid
  Coding DNA Sequence Number=SeqID_891
  Gene Ontology: Mol. function=polyribonucleotide nucleotidyltransferase activity; Cellular component=membrane fraction; Biological process =mRNA catabolic process
  Homolog annotation: Hit_ID=A2X795; Match level="QueryCoverage=80%, HitCoverage=14%, E-value=1e-113, Identity=87%"; Hit description =Putative uncharacterized protein
  Pfam annotation: Domain name=RNase_PH; Domain location=72-204; Score =110.0; E_value=7.2e-30; Accession=PF01138.11; Description=3' exoribonuclease family, domain 1
  Pfam annotation: Domain name=RNase_PH_C; Domain location=207-271; Score=37.6; E_value=4.3e-08; Accession=PF03725.5; Description=3' exoribonuclease family, domain 2
  Pfam module annotation: Pfam domain module=RNase_PH::RNase_PH_C; Domain location=72-204::207-271
MSMAVASLXSLARRQPRLRLPPAPLVVPGGRAALLSGAAEEAAPLAAAEAAAPPPVPGRKVLESFREEFEIGGRSIAFETGKMARFANGSVVISMEDTHVLSTVAAAKSSEPIRDFLPLTVDYQEKQYAQGVIPTTHMRREGAPKERELLCGRIIDRPIRPLFPPGFYHEVQIMVNVLSSDGKQDPDVMAANASSAALMLSDIPWNGPIGVIRVGRIDGAFILNPTVDELGLSDLNLVYACSRDKTLMIDVQAREISERDLQAGMKLAHSEAIKCIDPQISLXKRAG

SEQ ID NO: 13729 - protein, 151 aa, Zea mays
  misc_feature (1)..(1): Xaa can be any naturally occurring amino acid
  misc_feature (62)..(62): Xaa can be any naturally occurring amino acid
  misc_feature (120)..(120): Xaa can be any naturally occurring amino acid
  Coding DNA Sequence Number=SeqID_892
XQIKFINHAAKIMSNYSATLTRRAADLTEQQYNGMDQHLGLSQVLAGDLAVVHAIVLIGPFXCMYRSDVLIILPLLKLDSSSTRSHLRHPYMASNLELGRRGTPTHVFCGSALEGMLRRXIPLCPTTIRLNARCSPLRCPPWNDSARTPRV

SEQ ID NO: 13730 - protein, 80 aa, Zea mays
  Coding DNA Sequence Number=SeqID_894
  Subcellular localization annotation: CTP_CleavageSite=58; ConfidenceScore=5.36e-01
TDTDVLQPPGFQTQPTALTLHPDRPPTGHGVRQPTTAHPGVMPRRTHGPSPAAPNAIRCKEPGERNKRSYRQPMCRRRRP

SEQ ID NO: 13731 - protein, 101 aa, Zea mays
  misc_feature (28)..(29): Xaa can be any naturally occurring amino acid
  misc_feature (73)..(73): Xaa can be any naturally occurring amino acid
  misc_feature (84)..(85): Xaa can be any naturally occurring amino acid
  Coding DNA Sequence Number=SeqID_896
  Subcellular localization annotation: CTP_CleavageSite=72; ConfidenceScore=5.32e-01
NIRSLLPVSIASTYMWGEIQCRTKASPXXVSPLKTLRPSPAVMFVATSPPFSTLHNCCHDVAASGVPLSIVRXHHRARRQRRHXXIPSSKKIYNTVQLIGL

SEQ ID NO: 13732 - protein, 288 aa, Zea mays
  misc_feature (137)..(288): Xaa can be any naturally occurring amino acid
  Coding DNA Sequence Number=SeqID_898
AGRIRMPTLTMKSYQHESIYFTFLALSCPITYLSSPLQISLGVGKSLPRLEPPQPSFPAPSSPAPPPPPPLPATRTTLRLGWNGGPGGTCTATPPPSPSSRDEELALIASQKMGSLALAAGWSRRSARTRPISTKVXXXXXXXXXXXXXXXXXXXXXXXXXXXXXXXXXXXXXXXXXXXXXXXXXXXXXXXXXXXXXXXXXXXXXXXXXXXXXXXXXXXXXXXXXXXXXXXXXXXXXXXXXXXXXXXXXXXXXXXXXXXXXXXXXXXXXXXXXXXXXXXXXXXXXXXX

SEQ ID NO: 13733 - protein, 128 aa, Zea mays
  Coding DNA Sequence Number=SeqID_899
  Subcellular localization annotation: CTP_CleavageSite=15; ConfidenceScore=5.66e-01
IPPQLRTPPPLMALMADRPSSSPAPLPFASPSIKTSRPDLSPLPLPKLSPSSLFPARARHPLEPRLAGAMPRRPISARAAPRRPPSRATLSRPCPHRRSRSCPPRRAPSYHAHLCPPRPSPYPPPRLA

SEQ ID NO: 13734 - protein, 139 aa, Zea mays
  Coding DNA Sequence Number=SeqID_901
  Homolog annotation: Hit_ID=Q7XHY7; Match level="QueryCoverage=84%, HitCoverage=49%, E-value=3e-50, Identity=78%"; Hit description =Putative uncharacterized protein P0524G08.115
MADSGSPRKREENEEEDDIVCLDPSFFVDRSYEMTTFTFGSHELRLLCLRATSTDFDLTGQLVWPGAILMNNYLSQHPEIVKGCSVIELGSGIGITGILCSRFCKEVVLTDHNDEVLEARFKLFRNSFTDTSASLSYRN

SEQ ID NO: 13735 - protein, 181 aa, Zea mays
  Coding DNA Sequence Number=SeqID_902
  Gene Ontology: Mol. function=ribulose-bisphosphate carboxylase activity; Cellular component=chloroplast ribulose bisphosphate carboxylase complex; Biological process=carbon utilization by fixation of carbon dioxide
  Homolog annotation: Hit_ID=P10796; Match level="QueryCoverage=92%, HitCoverage=92%, E-value=8e-94, Identity=96%"; Hit description =Ribulose bisphosphate carboxylase small chain 1B, chloroplast precursor
  Pfam annotation: Domain name=RuBisCO_small; Domain location=66-175; Score=261.4; E_value=1.9e-75; Accession=PF00101.10; Description =Ribulose bisphosphate carboxylase, small chain
  Subcellular localization annotation: CTP_CleavageSite=54; ConfidenceScore=5.75e-01
MASSMLSSAAVVTSPAQATMVAPFTGLKSSAAFPVTRKTNKDITSIASNGGRVSCMKVWPPIGKKKFETLSYLPDLSDVELAKEVDYLLRNKWIPCVEFELEHGFVYREHGNTPGYYDGRYWTMWKLPLFGCTDSAQVLKEVEECKKEYPGAFIRIIGFDNTRQVQCISFIAYKPPSFTEA

SEQ ID NO: 13736 - protein, 242 aa, Zea mays
  misc_feature (178)..(178): Xaa can be any naturally occurring amino acid
  Coding DNA Sequence Number=SeqID_903
  Gene Ontology: Cellular component=chloroplast envelope
  Homolog annotation: Hit_ID=Q9LHC4; Match level="QueryCoverage=95%, HitCoverage=95%, E-value=1e-124, Identity=94%"; Hit description =Genomic DNA, chromosome 3, BAC clone: T13O13
  Subcellular localization annotation: CTP_CleavageSite=53; ConfidenceScore=5.57e-01
MQLSLVQVSSVSNFRSQSNPSCLLLQKSIFPGSKLTLHRIFRYPKKISNGSTRASLLETPILWAGRICVFYALVKAGFAGSKSNPIVSGLETGGVDVEYDDGADLGFSKWLQNIKGNKPDKDAADKRKLVSKWHPTTKGTLRRNYRIPSKGEGNRLLKAIASLLSDDDHFRDATSHKXGCQIRRESAHGQSVCCNNVRALFDELPTPHLVVEITPFPAGPLTENDYLKAEKLERIFRFGPNI

SEQ ID NO: 13737 - protein, 136 aa, Zea mays
  misc_feature (109)..(109): Xaa can be any naturally occurring amino acid
  misc_feature (113)..(114): Xaa can be any naturally occurring amino acid
  misc_feature (127)..(127): Xaa can be any naturally occurring amino acid
  misc_feature (129)..(129): Xaa can be any naturally occurring amino acid
  misc_feature (131)..(131): Xaa can be any naturally occurring amino acid
  Coding DNA Sequence Number=SeqID_904
  Gene Ontology: Mol. function=magnesium ion binding; Cellular component=integral to membrane; Biological process=photosynthesis, light harvesting
  Homolog annotation: Hit_ID=P04778; Match level="QueryCoverage=83%, HitCoverage=42%, E-value=5e-54, Identity=90%"; Hit description =Chlorophyll a-b binding protein 2, chloroplast precursor
  Pfam annotation: Domain name=Chloroa_b-bind; Domain location=2-103; Score=58.2; E_value=2.8e-14; Accession=PF00504.12; Description =Chlorophyll A-B binding protein
MIALIRERERESSLVPPPPPLVHAQSILAIWATQVILMGAVEGYRVAGDGPLGEAEDLLYPGGSFDPLGLATDPEAFAELKVKELKNGRLAMFSMFGFFVQAMVTGKGXLENXXDHLADPVNNNAWXLXTXLVPGK

SEQ ID NO: 13738 - protein, 125 aa, Zea mays
  Coding DNA Sequence Number=SeqID_905
LKKASPKNLLPFVEGSTEAPERLAGKADGNLVFPGQIAGHLERFSGRYDGTMSEILDREIIAIRIYRDDADACRCQGTSFIHCSMPNTVPSLGLPRPRTVTTGQEGYSGLASTRRPHGPPLQLGT

SEQ ID NO: 13739 - protein, 170 aa, Zea mays
  Coding DNA Sequence Number=SeqID_907
LMKNYSIGSTNNRMHKTKDWRRSSEEDTTDATRSEELVTEGCLNRHADRRPSQPATCAIVDAAGDTHTSCGYCRRRRTPCVTAGWGHTCLVPPPHEPLVARGSLSHGRRSRLRGRRRSSLLREPPLPHEGYAVARSDLRGRAVTTHASGNHRCHARGALSLVHLDGGVKK

SEQ ID NO: 13740 - protein, 137 aa, Zea mays
  misc_feature (135)..(135): Xaa can be any naturally occurring amino acid
  Coding DNA Sequence Number=SeqID_909
TDQPHAHIPGNSPLPKPSTHSWTTLALEIPVTRVVLQILETSRDDAPALDLTIPEPSGRAAVMSVNDESIRASNCTARRLVLRRNLSMDRSTPARHDWGRFTTSTMIPDGGLQSSLIPTANGCAGRWICRGFSIXMF

SEQ ID NO: 13741 - protein, 87 aa, Zea mays
  Coding DNA Sequence Number=SeqID_911
  Homolog annotation: Hit_ID=Q94LW1; Match level="QueryCoverage=42%, HitCoverage=5%, E-value=7e-07, Identity=70%"; Hit description =Response regulator 9
ARDHYLEHPNQKGCPRRDQGSHWPCGSPTRRLAPERASRRAIGFAELEEMTAKELKLHARANGGHGAEDQFPVGMRVLSVSSSFFCK

SEQ ID NO: 13742 - protein, 138 aa, Zea mays
  Coding DNA Sequence Number=SeqID_913
  Gene Ontology: Mol. function=acetyl-CoA C-acyltransferase activity; Cellular component=glyoxysome; Biological process=metabolic process
  Homolog annotation: Hit_ID=Q84P96; Match level="QueryCoverage=65%, HitCoverage=19%, E-value=4e-21, Identity=62%"; Hit description=3 -ketoacyl-CoA thiolase-like protein
MEKAIDRQRVLLAHLLPSPSAASSQPQLAASACAAGDSAAYQRSSSFGDDVVVVAAYRTPICKAKRGGFKDTYPEDLLTVVLKAVLDNTRIRSDVATSFFICILRIRSWRAERSIYHNSFFPEQHVCKHLGGVDLQLF

SEQ ID NO: 13743 - protein, 155 aa, Zea mays
  Coding DNA Sequence Number=SeqID_914
  Gene Ontology: Cellular component=exocyst; Biological process =exocytosis
  Homolog annotation: Hit_ID=Q6Z5V6; Match level="QueryCoverage=93%, HitCoverage=19%, E-value=2e-18, Identity=37%"; Hit description =Putative leucine zipper-containing protein
LEKQTESFSSRELQCLFLMNNTHFILQEVKRSDVRLMVGSGWIGKRQDRFKKHMKGYLSASWGPVISNLETAKGMTPSKRLKTNVFNFLHSSPTPVQNFSWSFDETCQTQMSRKVPSPVLREELRGEILALLTGAYHAYLERVKNPLFLSLHLSL

SEQ ID NO: 13744 - protein, 222 aa, Zea mays
  Coding DNA Sequence Number=SeqID_915
  Gene Ontology: Mol. function=oxidoreductase activity; Cellular component=melanosome; Biological process=skeletal development
  Homolog annotation: Hit_ID=Q6T3A7; Match level="QueryCoverage=86%, HitCoverage=97%, E-value=7e-68, Identity=64%"; Hit description=Thiol peroxiredoxin
  Pfam annotation: Domain name=AhpC-TSA; Domain location=33-166; Score =172.4; E_value=1.2e-48; Accession=PF00578.11; Description=AhpCTSA family
  Pfam annotation: Domain name=Redoxin; Domain location=32-187; Score =31.0; E_value=4.4e-06; Accession=PF08534.1; Description=Redoxin
  Pfam module annotation: Pfam domain module=AhpC-TSA::Redoxin; Domain location=33-166::32-187
MINAFQYSTRRAFANTVLKRSVSDRKAVLPLKVTDPAPKWKAMGVLNEEFKTYELSDYSGKFLVMVFYPLNFTFVCPTELIAFSEKKDEFLKRNTHLVGVSCDSHFSHLAWNNQPRKEGGLGGLNFPLISDIKKQISRDYNVLLPEQGISLRGLFIIDDKGILRVTMVNDLPIGRNVEEVLRLVDAIQFTDKHGEVCPANWNKGSSTIKPNVSGSKEYFKNQ

SEQ ID NO: 13745 - protein, 183 aa, Zea mays
  misc_feature (3)..(4): Xaa can be any naturally occurring amino acid
  Coding DNA Sequence Number=SeqID_916
IDXXTSWPFPSQLPLNLLLDHQSPTPRSHRHHPGPRAAWCLDSKNPPSRPKHRFSPSHCHWSPHATLQSPDHGHRDGCLVRPRQLEPGEWAAASARTRGPARWPEPLVACRGRGGLVVVALERSQETLRCVCLSSKQQEQQPRERVAISFSVLFYFSLVAETPIRSRAAEPSGLAMETRRIKY

SEQ ID NO: 13746 - protein, 162 aa, Zea mays
  Coding DNA Sequence Number=SeqID_918
ESRNIVRAITIQREQYEDTVHLFIGTGCSPNKITFVSLITNDNHNTNYQELCGIFLFKSVSSFVLGMPPCRSSLNCSFGIYLHVVPACISFFFRRLRRGMTHPQRGRIPRWRRGTASNRRLHGNPCGLGLWHTLSTITAKVQGSGHRRIGHGREDHQSRSRL

SEQ ID NO: 13747 - protein, 198 aa, Zea mays
  misc_feature (176)..(176): Xaa can be any naturally occurring amino acid
  Coding DNA Sequence Number=SeqID_919
  Homolog annotation: Hit_ID=A0EVG2; Match level="QueryCoverage=82%, HitCoverage=11%, E-value=2e-18, Identity=35%"; Hit description =Milt1a putative polyprotein
  Subcellular localization annotation: CTP_CleavageSite=5; ConfidenceScore=5.11e-01
TTKLVCQQDSRSPRATSLTWLGKASKNIWTIPPNQTKPNKSVQYVVQLTPQTSAWSPPPQYPTNWTIPPNQTKPNKSVQYVVQLTPQTSAWSPPPQYPTMTYPPQFSYPHTYTPTPYVPNKIWGILSYPYRMPRHPTWGAQQAYVFDRLIPPVQDQLSLPQSGQHEQLQQDSWNTXPKRSINSAWGHKEKTPTSTTTI

SEQ ID NO: 13748 - protein, 133 aa, Zea mays
  Coding DNA Sequence Number=SeqID_920
  Gene Ontology: Mol. function=oxidoreductase activity, acting on paired donors, with oxidation of a pair of donors resulting in the reduction of molecular oxygen to two molecules of water; Cellular component=endoplasmic ...
  Gene Ontology: Cellular component=reticulum; Biological process=cell redox homeostasis
  Homolog annotation: Hit_ID=Q5ASV0; Match level="QueryCoverage=94%, HitCoverage=93%, E-value=2e-41, Identity=61%"; Hit description =Putative uncharacterized protein
  Pfam annotation: Domain name=DUF953; Domain location=5-128; Score =24.3; E_value=1.6e-07; Accession=PF06110.2; Description=Eukaryotic protein of unknown function (DUF953)
MPIITDYKLPNSADALDLPADSNSPFFIAFLASRDPSTGRPWCPDVIAALPYLEATFSAEGSPRAAFIEVGQRPEWRDPRNVYRAKWNVNNTPTLARYERVDGKVKEVGRLVEAEILDSKRLKNFITSSSASL

SEQ ID NO: 13749 - protein, 112 aa, Zea mays
  Coding DNA Sequence Number=SeqID_921
  Gene Ontology: Mol. function=cysteine-type peptidase activity; Biological process=proteolysis
  Homolog annotation: Hit_ID=A3BG57; Match level="QueryCoverage=62%, HitCoverage=19%, E-value=2e-20, Identity=68%"; Hit description =Putative uncharacterized protein
  Pfam annotation: Domain name=F-box; Domain location=15-65; Score =34.4; E_value=4.1e-07; Accession=PF00646.23; Description=F-box domain
IRTKTKSTAVHGMASPPPDLIDDATAEILLRLPPDDPACLVRASLVCKAWRKLLSSRIFLRRYRRFHGAPPLLGFLYNIYDERPCARFVVAADAATTFPFSAPAFYRGRAVP

SEQ ID NO: 13750 - protein, 97 aa, Zea mays
  Coding DNA Sequence Number=SeqID_922
  Gene Ontology: Mol. function=phosphatidylserine decarboxylase activity; Cellular component=integral to membrane; Biological process=phospholipid biosynthetic process
  Homolog annotation: Hit_ID=A1C515; Match level="QueryCoverage=82%, HitCoverage=83%, E-value=1e-26, Identity=72%"; Hit description =Stress response RCI peptide, putative
  Pfam annotation: Domain name=UPF0057; Domain location=5-55; Score =59.5; E_value=1.2e-14; Accession=PF01679.8; Description =Uncharacterized protein family UPF0057
MADGSALCIIIITLFIPPLGVFLISGCSVDLLINILLTILGYFPGHIHAYYLEYVYYHRRGLAAGGTTFAKPATGVYSERIQSGGHHQQTQYGTIRT

SEQ ID NO: 13751 - protein, 211 aa, Zea mays
  misc_feature (153)..(154): Xaa can be any naturally occurring amino acid
  misc_feature (161)..(161): Xaa can be any naturally occurring amino acid
  Coding DNA Sequence Number=SeqID_923
  Subcellular localization annotation: CTP_CleavageSite=64; ConfidenceScore=5.14e-01
LRGIEQVWMKIHKDFASHSSRVSEACAQCSTKLEMCAAARSMQSRQSRPPPSVLDTRLRHFFVQASQCSKLTNLKLYLMTRPPESINCCRVFWWENSGIEQVLQLEHQTPLHPCLDGGRPYSGKRNQLHLCNILAKGVRHLKNLFIASDLLCXXIITSRKXGESFLVEDRTIAIVPPRGSDFDPACLLSEKCCSGNHGPGVVVLRSSCATS

SEQ ID NO: 13752 - protein, 117 aa, Zea mays
  Coding DNA Sequence Number=SeqID_925
GRTWRSTSGCCNQHSSKNCRLFLNATSWTHIYFNKETNVGERYFYKLFYSDTGHASAAPLLRGYAKVEPLTIAELNEFGDKNEEELRQRVVLRFLLQLYQEASMHCLSLYMCSLQQY

SEQ ID NO: 13753 - protein, 228 aa, Zea mays
  Coding DNA Sequence Number=SeqID_927
  Gene Ontology: Mol. function=molecular_function; Cellular component =extracellular region; Biological process=biological_process
  Homolog annotation: Hit_ID=Q2QNE1; Match level="QueryCoverage=90%, HitCoverage=88%, E-value=9e-77, Identity=68%"; Hit description =Thaumatin family protein, expressed
  Pfam annotation: Domain name=Thaumatin; Domain location=28-203; Score= 29.7; E_value=1.8e-10; Accession=PF00314.8; Description=Thaumatin family
MAKDLAFVLLVLAALAAFSSATKLTIHNLCPHPVWPLVTPNAGLPSISDNAARLDTNAILSLTFPSTFWAGRVAARTGCDDGTSPPRGCFTGDAPPSTVAQITVHDSGNLDLAAYSVSLVNGFNVPMVLSPQAGGGQCPALGCAVDLNCDCPPDNRAAEGTACRGPAGYFKNRCPLTRTTSTDVEPVPQSCCAPGELKIVLCQSSMLQRGASAAEDTDMVIRTVVADN

SEQ ID NO: 13754 - protein, 392 aa, Zea mays
  Coding DNA Sequence Number=SeqID_928
  Gene Ontology: Mol. function=ATPase activity, coupled to transmembrane movement of ions, phosphorylative mechanism; Cellular component=membrane; Biological process=transport
  Homolog annotation: Hit_ID=Q3EBR1; Match level="QueryCoverage=51%, HitCoverage=60%, E-value=2e-40, Identity=49%"; Hit description =Uncharacterized protein At2g31150.1
  Subcellular localization annotation: CTP_CleavageSite=63; ConfidenceScore=5.54e-01
MAMSGTFHLTSDYVPGYTLSDSRCFFNSAVSRRTLAILPCSSCLDHKNGRLKSVPNRSSFVCRASSGGYRRNPDFSRLNKHGYRGNNRQSGGREDFDIENSDMLSSRNGPLFNLSSSPKFQATSSPGPREKEIVELFRKVQAQLRARAAAKKEEKKIEEASKGQGKESETVDSLLKLLRKHSGEQSKRQVSKFSSQGEVQGDTVDKQDRTGNLVTSGNKDNNASSFTRPTSSFRRKSPVPRSQSPPAYSSEATFDQSSSYSVTWAQKKDTVELHDEPEHEPAYEHEHEPENESEPGPVTTMLEPDSELKPKSSSFYQEEEEERERERELPSPPPPPRCVSPIFPLASLPFTQKWRNRRITRRTISLPRRIRTESRSQGDTVTHQPEEWILNS

SEQ ID NO: 13755 - protein, 126 aa, Zea mays
  Coding DNA Sequence Number=SeqID_929
SYKNLESGMAQFGPSMDFLLIYQVLVIVFILKIYFQFIYSNLSQLWTGPQFQRNPGAIPQLIPRLRALLLWTTGLFRVNARSLTQSYKAEGVSRDPSCWIRYGRARLNHYSCEPVRNRVRWIRIKR

SEQ ID NO: 13756 - protein, 157 aa, Zea mays
  misc_feature (81)..(83): Xaa can be any naturally occurring amino acid
  Coding DNA Sequence Number=SeqID_931
LMSDRAPVHSLFLTVRSSASRKIYRDMKREIPPTSSEQSAERQACLSSQKDEEVSQRTFLITRRYGVGVDRSRSGWISVRXXXRVQRRRSRFGGGMVGYQAWECGGESLARDAESMGAPSTCRSPDASALSTGWGEGRARRVESGVVKRRRQNRQEA

SEQ ID NO: 13757 - protein, 101 aa, Zea mays
  Coding DNA Sequence Number=SeqID_933
  Gene Ontology: Biological process=defense response
  Homolog annotation: Hit_ID=Q6H6Z3; Match level="QueryCoverage=65%, HitCoverage=74%, E-value=9e-12, Identity=44%"; Hit description =Putative uncharacterized protein P0030G02.49
  Pfam annotation: Domain name=Gamma-thionin; Domain location=22-66; Score=29.4; E_value=1.4e-05; Accession=PF00304.11; Description=Gamma- thionins family
MKLEMTAAAMVLILLTSGAEAKVCYSRSRTFKGWCYHSINCIAICITEGDTSGFCQAGACMCTYECLNGVVAGGGGGGGQHPSVGSSRGGGAEAKAAVPSV

SEQ ID NO: 13758 - protein, 83 aa, Zea mays
  misc_feature (4)..(5): Xaa can be any naturally occurring amino acid
  misc_feature (8)..(8): Xaa can be any naturally occurring amino acid
  misc_feature (17)..(17): Xaa can be any naturally occurring amino acid
  misc_feature (21)..(22): Xaa can be any naturally occurring amino acid
  misc_feature (26)..(27): Xaa can be any naturally occurring amino acid
  misc_feature (31)..(31): Xaa can be any naturally occurring amino acid
  misc_feature (41)..(41): Xaa can be any naturally occurring amino acid
  misc_feature (45)..(46): Xaa can be any naturally occurring amino acid
  misc_feature (49)..(49): Xaa can be any naturally occurring amino acid
  misc_feature (51)..(51): Xaa can be any naturally occurring amino acid
  misc_feature (56)..(56): Xaa can be any naturally occurring amino acid
  misc_feature (59)..(60): Xaa can be any naturally occurring amino acid
  misc_feature (67)..(67): Xaa can be any naturally occurring amino acid
  Coding DNA Sequence Number=SeqID_934
MAAXXFCXLMLLGLSAXAATXXIFPXXSRAXIASLLPPYLXSPAXXSEXEXPILQXYRXXQEIAAGXILPLSPLFLPQSSALL

SEQ ID NO: 13759 - protein, 83 aa, Zea mays; identical to SEQ ID NO: 13758
  misc_feature (4)..(5): Xaa can be any naturally occurring amino acid
  misc_feature (8)..(8): Xaa can be any naturally occurring amino acid
  misc_feature (17)..(17): Xaa can be any naturally occurring amino acid
  misc_feature (21)..(22): Xaa can be any naturally occurring amino acid
  misc_feature (26)..(27): Xaa can be any naturally occurring amino acid
  misc_feature (31)..(31): Xaa can be any naturally occurring amino acid
  misc_feature (41)..(41): Xaa can be any naturally occurring amino acid
  misc_feature (45)..(46): Xaa can be any naturally occurring amino acid
  misc_feature (49)..(49): Xaa can be any naturally occurring amino acid
  misc_feature (51)..(51): Xaa can be any naturally occurring amino acid
  misc_feature (56)..(56): Xaa can be any naturally occurring amino acid
  misc_feature (59)..(60): Xaa can be any naturally occurring amino acid
  misc_feature (67)..(67): Xaa can be any naturally occurring amino acid
  Coding DNA Sequence Number=SeqID_935

SEQ ID NO: 13760 - protein, 56 aa, Zea mays
  Coding DNA Sequence Number=SeqID_936
  Homolog annotation: Hit_ID=Q9AYP0; Match level="QueryCoverage=94%, HitCoverage=91%, E-value=3e-21, Identity=83%"; Hit description =Mitochondrial ATP synthase 6 KD subunit
MKTFDPWPVFFRREWRRNWPFLTGFAITGFLITKMTANFTEEDLKNSKFVQEHKRH

SEQ ID NO: 13761 - protein, 56 aa, Zea mays; identical to SEQ ID NO: 13760
  Coding DNA Sequence Number=SeqID_937
  Homolog annotation: Hit_ID=Q9AYP0; Match level="QueryCoverage=94%, HitCoverage=91%, E-value=3e-21, Identity=83%"; Hit description =Mitochondrial ATP synthase 6 KD subunit

SEQ ID NO: 13762 - protein, 396 aa, Zea mays
  Coding DNA Sequence Number=SeqID_938
  Gene Ontology: Mol. function=dTDP-glucose 4,6-dehydratase activity; Cellular component=integral to membrane; Biological process=cellular metabolic process
  Homolog annotation: Hit_ID=Q6QP37; Match level="QueryCoverage=96%, HitCoverage=96%, E-value=0.0, Identity=95%"; Hit description=DTDP -glucose 4,6-dehydratase
  Pfam annotation: Domain name=Epimerase; Domain location=26-296; Score= 215.8; E_value=1e-61; Accession=PF01370.11; Description=NAD dependent epimerasedehydratase family
  Pfam annotation: Domain name=NAD_binding_4; Domain location=30-278; Score=-95.4; E_value=0.014; Accession=PF07993.2; Description=Male sterility protein
  Pfam module annotation: Pfam domain module=Epimerase::NAD_binding_4; Domain location=26-296::30-278
MSSSLSPAAAAAPLDLDGNSVAPLTICMIGAGGFIGSHLCEKLMAETRHVVLAVDVYCDKIRHLVDPAPPHLAGRISFHRLNIKNDSRLEGLIKMADLTINLAAICTPADYNTRPLDTIYSNFIDALPVVKYCSENSKRLIHFSTCEVYGKTIGSFLPKDHPLRKEPEFYVLKEDESPCIFGPIVKQRWSYACAKQLIERLIFAEGAENGLEFTIVRPFNWIGPRMDFIPGVDGPSEGVPRVLACFSNNLLRREPLKLVDGGQSQRTFVYIKDAIEAVVLMIENPARANGHIFNVGNPDNEVTVRELAQMMTEVYANVSGEAPLDEPMIDVSSSQFYGEGYDDSDKRIPDMTIINKQLGWNPKTPLKDLLETTLTYQHKTYKEAVKRQMSQASATS

SEQ ID NO: 13763 - protein, 313 aa, Zea mays
  misc_feature (55)..(55): Xaa can be any naturally occurring amino acid
  misc_feature (92)..(92): Xaa can be any naturally occurring amino acid
  misc_feature (156)..(156): Xaa can be any naturally occurring amino acid
  misc_feature (239)..(239): Xaa can be any naturally occurring amino acid
  Coding DNA Sequence Number=SeqID_939
  Gene Ontology: Mol. function=fructokinase activity; Cellular component=cytoplasm; Biological process=carbohydrate metabolic process
  Homolog annotation: Hit_ID=Q6XZ79; Match level="QueryCoverage=83%, HitCoverage=80%, E-value=7e-96, Identity=72%"; Hit description =Fructokinase-1
  Pfam annotation: Domain name=PfkB; Domain location=8-267; Score= -40.2; E_value=9.3e-05; Accession=PF00294.14; Description=pfkB family carbohydrate kinase
DPRGRPGRGFVRRIGDHEFCRMLADILRDNGLHYGGDNFDSRARTEIAYPTLHAXRGSAEFMFYRNPIADVLLTADELTAELIKKAARFHYXSTSLIAETCRTAHLRAMKIAKEAGALISYDPNLREALWTSREEVRTQILSIWDQADIVEDREVXLEVLTSIDSEEDDVVMQLRRTTMRLLLMTLGDQGCEYYARDFHGGAASIKVQQADTPGAGDAFVGALLQRIVNDPSSLQDEKXLVESPKFPNASGTVTSSKKGAIPSLPTKREVLQLIKEAWIIIVLSAMVFTSLYFFGLVRILTPPRTIHRSAASY

SEQ ID NO: 13764 - protein, 323 aa, Zea mays
  misc_feature (300)..(300): Xaa can be any naturally occurring amino acid
  Coding DNA Sequence Number=SeqID_940
  Gene Ontology: Mol. function=voltage-gated chloride channel activity; Cellular component=integral to membrane; Biological process=chloride transport
  Homolog annotation: Hit_ID=A2YWN6; Match level="QueryCoverage=78%, HitCoverage=40%, E-value=1e-100, Identity=74%"; Hit description =Putative uncharacterized protein
  Pfam annotation: Domain name=Voltage_CLC; Domain location=144-324; Score=-96.7; E_value=2.2e-06; Accession=PF00654.10; Description =Voltage gated chloride channel
  Subcellular localization annotation: CTP_CleavageSite=12; ConfidenceScore=5.33e-01
MAGSDLEPLRASAAALPSSSDPDSPAVTPRRSRVRDLLRNLDRRLSNRSRGGAAAGHGDGEAGASPRRPEEDSDELGDGAPPEWALLLVGCLLGLATGICVAVFNRGVHVIHEWAWAGTPTEGAAWLRLQRLADTWHRILLIPVTGGVVVGMMHGLLEIFEQIKQSLSSQREGIDFMAAIFPTIKAIQAAITLGTGCSLGPEGPSVDIGKSCANGCAEMMENNRERRIALVAAGSAAGIASGFNAAVAGCFFAIETVLRPLRAENSPPFTTAMIILASVISSTVSNVLLGEKAAFIVPTXKLYLILGMLCVLIIFGVNKVVVS

SEQ ID NO: 13765 - protein, 157 aa, Zea mays
  Coding DNA Sequence Number=SeqID_941
LLPPRVPPRTSRGVPPRVLVLGGILPEHQESFELRRGPAGRGRAAHERLDGLPRRRATRHLGRRRGPCVASPPPSRRRRRQPTRSSSRTLARAPTATPTTTLPPPSRAPPASATPSHSAAVEPTETPTRAARRAALSFVPATWPCEVGGSSLCPLPA

SEQ ID NO: 13766 - protein, 457 aa, Zea mays
  Coding DNA Sequence Number=SeqID_942
  Gene Ontology: Mol. function=binding
  Homolog annotation: Hit_ID=Q7XCR5; Match level="QueryCoverage=98%, HitCoverage=94%, E-value=0.0, Identity=85%"; Hit description =Expressed protein
GGGSGGAPPRSATAKQEEATAALGSEGSRPFTMRELLGELKEDGETAAGGSSARSAFGDGNRVGSDDAEGSFYSQDSTQQFSSHHDVAMDLINSVTGVDEEGHSRQRILSFAAKRYVNAIESNPDDPDAYYNWALVLQESADNVDPNSSSSKDALLEEACKKYAEATRLCPTLYDAYYNWAIAIADRAKMRGRTKEAEELWKQAILNYEKAVQLNWNSPQALNNWGLGLQELSAIVPARDKQTIIKTAISKFRAAIQLQFDFHRAIYNLGTVLYGLAEDTVRSGKPDVSPNELYSQSAIYVAAAHALKPNYSVYRSALRLVRSMLPLPYLKVGYLTAPPANNSIAPHKDWERSQFILNHEGLQQVDASDQPPSQSPGHLDRGRKPVRINIADIVSVSACADLTLPSGAGLCIETISGPTFLVADSWEALESWLDAIRLVYTIFARGKSDVLAGIITG

SEQ ID NO: 13767 - protein, 154 aa, Zea mays
  misc_feature (123)..(154): Xaa can be any naturally occurring amino acid
  Coding DNA Sequence Number=SeqID_943
HSLQSDMLAYNPSYRRYRECMDRMDRRGWIELNPGTGTYTNNSHSTFDADSESLLQRLEFSASQLSKLISAVPCGSKMLERSTRTEALQRFPVALRPRVCDMPAGGSCGMGEMQELRRAGNEXXXXXXXXXXXXXXXXXXXXXXXXXXXXXXXX

SEQ ID NO: 13768 - protein, 85 aa, Zea mays
  Coding DNA Sequence Number=SeqID_945
  Gene Ontology: Mol. function=protein binding
  Homolog annotation: Hit_ID=Q2QMP5; Match level="QueryCoverage=92%, HitCoverage=14%, E-value=2e-31, Identity=82%"; Hit description =Expressed protein
QPLIDDYAWLQRAGGSRPAAFDRRLVEDGIGQTILTLPLEDQRSLLLAWFGRFLKLGDDCPNLQRAFEVWWRRTFVRPYACSSSG

SEQ ID NO: 13769 - protein, 108 aa, Zea mays
  Coding DNA Sequence Number=SeqID_946
GSKTAARMLIADPPRILRRQAPKPHAPTFPATPPAAKKPDLVERTADYAVIVSSRLPPPAPGGPSRVCSNDIELVPETSQFRASVPGRYWIESLHFFIQCPDVRSEIF

SEQ ID NO: 13770 - protein, 69 aa, Zea mays
  Coding DNA Sequence Number=SeqID_948
LMIIGQHHSTGQWLHRIKRYHAKKKQNAPESRPGFRPTKGQIKVLLLVYESISATHASADAWVGPDILD

SEQ ID NO: 13771 - protein, 151 aa, Zea mays
  misc_feature (20)..(20): Xaa can be any naturally occurring amino acid
  misc_feature (39)..(39): Xaa can be any naturally occurring amino acid
  misc_feature (124)..(124): Xaa can be any naturally occurring amino acid
  Coding DNA Sequence Number=SeqID_950
  Gene Ontology: Mol. function=Rab GTPase activator activity; Cellular component=intracellular; Biological process=regulation of Rab GTPase activity
  Homolog annotation: Hit_ID=Q5N703; Match level="QueryCoverage=90%, HitCoverage=36%, E-value=8e-34, Identity=56%"; Hit description =RabGAP/TBC domain-containing protein-like
RSLHSRLSAALSKKVIDLAXLRMLAGHGAPYASAVPATXVWKLLLGYLPNDRSLLEQELAENTGQHADLKDECHTNPVDRAQQVPTVGHHNLSAEHVDNGFLLRSELTREEHPLSLGKTSAWNXYLEYLEIMEHIDLYLKLTHFDMQFFLV

SEQ ID NO: 13772 - protein, 147 aa, Zea mays
  misc_feature (38)..(38): Xaa can be any naturally occurring amino acid
  misc_feature (50)..(50): Xaa can be any naturally occurring amino acid
  Coding DNA Sequence Number=SeqID_951
  Gene Ontology: Mol. function=pyruvate kinase activity; Cellular component=chloroplast; Biological process=glycolysis
  Homolog annotation: Hit_ID=Q0D867; Match level="QueryCoverage=93%, HitCoverage=24%, E-value=1e-46, Identity=71%"; Hit description =Pyruvate kinase
PKRTINVNYDGFAENVRVGDELLADGCMANAEDIYKIXQMIRRRCADPGXLMPHANLTFSRDLCIGHQRNTMLPTISSKDWLDIDSGIADRVHFIAGSFVLSAEVIRHLKSYIAARSRGSDMAVIANIESIDSLKNWERSSSVRGAM

SEQ ID NO: 13773 - protein, 146 aa, Zea mays
  misc_feature (34)..(34): Xaa can be any naturally occurring amino acid
  Coding DNA Sequence Number=SeqID_952
  Gene Ontology: Mol. function=chaperone activator activity; Cellular component=cytoplasm; Biological process=response to stress
  Homolog annotation: Hit_ID=Q6YUA7; Match level="QueryCoverage=83%, HitCoverage=34%, E-value=2e-35, Identity=59%"; Hit description =Putative activator of 90 kDa heat shock protein ATPase homolog 1
  Pfam annotation: Domain name=Aha1_N; Domain location=29-145; Score =8.5; E_value=2.7e-06; Accession=PF09229.1; Description=Activator of Hsp90 ATPase, N-terminal
MAKYGEGDKRWIVEERADGTNVHNWHWADRACLXWARAAVFFLVGGLNILDRVGGLRLRTGALDKLGGEAYLNLRKGQGIPGYQLSLTLSWEAEAASESGAAKVAGTAEVPYLADENSVPGPLPSCYRPRPLVPIFCYFLRTLSFF

SEQ ID NO: 13774 - protein, 107 aa, Zea mays
  Coding DNA Sequence Number=SeqID_953
TQHTGKTHQSSGHISPLPVLEWKPPKKEGYQVSTASSWEAHTCRPSQLSLYIQLLIGRIRTLPRPAAIREKIAADRSLRAGVAAPKASNAGSRCLKKADRGSHVNEV

SEQ ID NO: 13775 - protein, 83 aa, Zea mays
  Coding DNA Sequence Number=SeqID_955
PSSSLWWWSCSAALSSHHESSRCITAWGEQPTVVTKKGGKAAEAAGSTLLTIVVVMLVVTTTAAVNDALQQGSYYSPSMLSCC

SEQ ID NO: 13776 - protein, 212 aa, Zea mays
  misc_feature (60)..(60): Xaa can be any naturally occurring amino acid
  misc_feature (109)..(109): Xaa can be any naturally occurring amino acid
  misc_feature (180)..(181): Xaa can be any naturally occurring amino acid
  Coding DNA Sequence Number=SeqID_957
  Homolog annotation: Hit_ID=Q6EPV2; Match level="QueryCoverage=86%, HitCoverage=77%, E-value=3e-43, Identity=51%"; Hit description =Putative uncharacterized protein OSJNBa0016D04.15-1
MRAAPRVLFLGRDAAVYGAALGDALGPPPGLTRDASPFELPLGKYTVGLAQWVSPAPRLXDASGSPQETIAALPDYKPPLAACVVNEVLEQISCEATCTERTLNVPYIXERRAIIRGRHMHQRHRLVLDGAELGATSDYTHLLVGGTTNPPTSLKIRSDPILCSLKMVRVLNTPTDLLVXXGGQPPFLRKPPLFKKHGPRGKSFFFKPGVFV

SEQ ID NO: 13777 - protein, 137 aa, Zea mays
  misc_feature (20)..(20): Xaa can be any naturally occurring amino acid
  Coding DNA Sequence Number=SeqID_958
GGGPGAGGGYGGGAGGGYGXGAGGGAGGGYGGGAGGGAGGGYGAGAGAGYGSAPGAGSSSSSNNVIAAHAAVCSAAGACISVYHHGMYVHVCGQRSSVSVCDHHSLGQTESSCRNVTLVDSVGMSLREPYRAHAWSR

SEQ ID NO: 13778 - protein, 152 aa, Zea mays
  Coding DNA Sequence Number=SeqID_960
  Gene Ontology: Mol. function=oxidoreductase activity; Cellular component=integral to membrane; Biological process=electron transport
  Homolog annotation: Hit_ID=A3C2E7; Match level="QueryCoverage=96%, HitCoverage=30%, E-value=6e-29, Identity=43%"; Hit description =Putative uncharacterized protein
TVVLEGFPPHPPGPQIPPPRVREDVEVGDYVGPKGSTINFILFDLGMDDPPWDPPPVFIPERFLPGGETKALDIPGPKEMKIIPFGAGKRICPGLRIAFLLPEYFVANLVTTFPWKKVEKGDVDVPPEDAQLPVLMGKPLRGGLLPKKHLFG

SEQ ID NO: 13779 - protein, 113 aa, Zea mays
  Coding DNA Sequence Number=SeqID_961
ILFSARGRQQEDEEELHLAPSCARAQLKNKPTDLEMLFAPTAGPPQVHKQPQKTGVAFQLASEPAVRKEDNCSQQLRDKVTPSALEPTYMEESHAKRDDDEPSYIQTSRIHVL

SEQ ID NO: 13780 - protein, 84 aa, Zea mays
  Coding DNA Sequence Number=SeqID_963
  Subcellular localization annotation: CTP_CleavageSite=14; ConfidenceScore=5.54e-01
KSLLRLKIKKQKTCARTRRKIFVLKPGTPLFFFNFFFFFFFFFFFFFFFLTYPNIINRDRDVCPTGNYQGTQTRTINTSTKGCC

SEQ ID NO: 13781 - protein, 77 aa, Zea mays
  misc_feature (43)..(43): Xaa can be any naturally occurring amino acid
  Coding DNA Sequence Number=SeqID_965
  Gene Ontology: Mol. function=structural constituent of ribosome; Cellular component=ribonucleoprotein complex; Biological process =translation
  Homolog annotation: Hit_ID=A2X358; Match level="QueryCoverage=74%, HitCoverage=24%, E-value=2e-11, Identity=66%"; Hit description=50S ribosomal protein L21
IGHHWHPNAAVHAVVEEQGRDDKVIVTKFPLVLLLLLVLEHYXLYHRQPNTRLRITGISGYEEYPADPILDPAAALS

SEQ ID NO: 13782 - protein, 102 aa, Zea mays
  misc_feature (31)..(31): Xaa can be any naturally occurring amino acid
  Coding DNA Sequence Number=SeqID_966
  Gene Ontology: Mol. function=structural molecule activity; Cellular component=protein complex; Biological process=microtubule-based movement
  Homolog annotation: Hit_ID=P11139; Match level="QueryCoverage=99%, HitCoverage=22%, E-value=5e-18, Identity=49%"; Hit description =Tubulin alpha-1 chain
  Subcellular localization annotation: CTP_CleavageSite=35; ConfidenceScore=5.31e-01
GFKWGIKYQAPKVVPGPPLPKVQRPVCIFSXNPPRVVGVFSRITTKFALMYPKGGFLHWYVAKGMKKGEFSKAPKDLPPLEKDYKEVPPKGASNSGPEEEEN

SEQ ID NO: 13783 - protein, 176 aa, Zea mays
  misc_feature (162)..(162): Xaa can be any naturally occurring amino acid
  misc_feature (171)..(171): Xaa can be any naturally occurring amino acid
  Coding DNA Sequence Number=SeqID_967
TTKHVSKSRVAYIFSGLGPRSYTSPCIPTRLHTMGYVAPLIRALHERIHTYPPTTRGALDFTLTHPPVAHGGGPPYGRDQSAQKGGLFFAAGLLGLLGGLFFLGGLGEGETPGAHGRRPRDLLLDLGGGRVLRVLFRLGLFVKCEGPGGDGAGLAEGLLGLXLLLLLLVLXELVLA

SEQ ID NO: 13784 - protein, 106 aa, Zea mays
  Coding DNA Sequence Number=SeqID_969
NQPSDWGGGTQCRRQMSPWGTRGLFWQNIYYLVQKQDAWFDACSVRTAKDAFGDLTTPSEIIDHTIGNKIHGLKGRTMHHEPSNGSHMVALGADSPHHGHCHQPWI

SEQ ID NO: 13785 - protein, 212 aa, Zea mays
  misc_feature (23)..(23): Xaa can be any naturally occurring amino acid
  misc_feature (114)..(114): Xaa can be any naturally occurring amino acid
  misc_feature (131)..(132): Xaa can be any naturally occurring amino acid
  Coding DNA Sequence Number=SeqID_970
  Gene Ontology: Mol. function=carbon-nitrogen ligase activity, with glutamine as amido-N-donor; Cellular component=chloroplast
  Homolog annotation: Hit_ID=Q10E52; Match level="QueryCoverage=96%, HitCoverage=34%, E-value=2e-80, Identity=75%"; Hit description =Chloroplast outer membrane translocon subunit, putative, expressed
STDDGILVIPTALGCPPKLNAKXSHLEIYNSQTLRLLSLASRGGCFQVSIPLGTHDKCPISVSFIAKHGGDRFLLDTTQTMYTTIQEQVEILAKSSVSSKQAMNEEAAEASGVXGNPAFKENQWQKPVNYXXTEAIKLNGKLATYSSNRAAAFLELTSSRQAEADCTSAVALDPKSVKAYLRRGTPREMLGYYKEVVDDFTHPLVLNVRLPV

SEQ ID NO: 13786 - protein, 306 aa, Zea mays
  Coding DNA Sequence Number=SeqID_971
  Homolog annotation: Hit_ID=Q10KE5; Match level="QueryCoverage=90%, HitCoverage=48%, E-value=2e-91, Identity=63%"; Hit description =Expressed protein
MQDWRVREFEGKFTDEFAHSSSNEHKGGVEASGVISSKKLKHAVANEKIQGVIPGTNRSGSLKCNSENIQHANGVLSQNISCAGDCKNGSIAFPLREENTITETRCPADNWNSCQFALSNGSSILNNHSAPQDSLTYGDNDLNYIEWPGIDNFEDVDTLFRSSDSTYGQQQLENADGLSWIPSSDAVYSTDVALQQGFDSPYSDYGILDDLSAFQCAEDKSLPSVGPSSDVCDNQFNDTYLFSEQKNVNAYGEQIYQEDGMELLPTDQICSGHENIDMGIEMLSLGSFKTGAILSLWTVWLNLLML

SEQ ID NO: 13787 - protein, 88 aa, Zea mays
  Coding DNA Sequence Number=SeqID_972
LQIKVFGLNNTGSEGIALTLLTPLLTRLCWAGEENGIPPRARETQLAGTTQRVPQKSSLIGLTFHPSFLELPGPHWSWVLHARKCYTC

SEQ ID NO: 13788 - protein, 140 aa, Zea mays
  Coding DNA Sequence Number=SeqID_974
  Gene Ontology: Cellular component=cytoskeleton; Biological process =phagocytosis
  Homolog annotation: Hit_ID=A7PXC9; Match level="QueryCoverage=98%, HitCoverage=58%, E-value=1e-35, Identity=59%"; Hit description =Chromosome chr12 scaffold_36, whole genome shotgun sequence
  Pfam annotation: Domain name=ELMO_CED12; Domain location=1-120; Score= 37.5; E_value=4.8e-08; Accession=PF04727.4; Description=ELMOCED-12 family
  Subcellular localization annotation: CTP_CleavageSite=43; ConfidenceScore=5.14e-01
KGCGFVSLETLLFFARTYPVFFKRLFLNHQGMRPPWGSPFGVGGVTFSSMLIQLLGLNSGGPKFLPGINFFKVLPDPEDGFAVLYCIGFEMMAAQWLAMGAWSMRFKEVLGAPRHQLERGLSLGVFNGIHALPACTLLSK

SEQ ID NO: 13789 - protein, 128 aa, Zea mays
  Coding DNA Sequence Number=SeqID_975
  Gene Ontology: Mol. function=oxidoreductase activity; Biological process=metabolic process
  Homolog annotation: Hit_ID=Q9SLN8; Match level="QueryCoverage=96%, HitCoverage=34%, E-value=1e-29, Identity=51%"; Hit description=Allyl alcohol dehydrogenase
MATTATNRRVILKEYVEGYPREEHMELLRGAEVPLRLTGAEPAGSVLVRNLYLSCDPYMRPKMSRPLRESYTAAFVPGDTITGYGVARVVDSSDPRLAPGDLVWGITGWEDYSVIPVATPARSIRERE

SEQ ID NO: 13790 - protein, 131 aa, Zea mays
  misc_feature (40)..(40): Xaa can be any naturally occurring amino acid
  misc_feature (92)..(92): Xaa can be any naturally occurring amino acid
  misc_feature (97)..(97): Xaa can be any naturally occurring amino acid
  misc_feature (111)..(111): Xaa can be any naturally occurring amino acid
  Coding DNA Sequence Number=SeqID_976
  Gene Ontology: Mol. function=inorganic diphosphatase activity; Cellular component=cytoplasm; Biological process=phosphate metabolic process
  Homolog annotation: Hit_ID=O48556; Match level="QueryCoverage=100%, HitCoverage=61%, E-value=5e-46, Identity=73%"; Hit description =Soluble inorganic pyrophosphatase
  Pfam annotation: Domain name=Pyrophosphatase; Domain location=1-123; Score=-12.0; E_value=5.2e-07; Accession=PF00719.9; Description =Inorganic pyrophosphatase
VAYPHNYGPDTGTLSEHNDPFDALVLMQEPVIPGSLLRAXTIGLMPMIDQGEKDGKIFAAWADDPEYRPYYDISELSPHRLHEIKRLFGGFXKDGNXEVAVDAFLPGATGXEAIQDSMDLDGQYILQSLRQ

SEQ ID NO: 13791 - protein, 180 aa, Zea mays
  misc_feature (52)..(52): Xaa can be any naturally occurring amino acid
  Coding DNA Sequence Number=SeqID_977
  Gene Ontology: Mol. function=RNA-directed DNA polymerase activity; Biological process=RNA-dependent DNA replication
  Homolog annotation: Hit_ID=Q1KSC2; Match level="QueryCoverage=84%, HitCoverage=9%, E-value=9e-13, Identity=34%"; Hit description =Putative non-LTR retroelement reverse transcriptase
LWAVGSILGATQKVDMRYTRKMGVVRILVDVTDVNHISESAEIVVGEGLYEXFFKVDRVLKDGRWIDNDITRNQDGDDKTEGENKDYSEKHDFDLAPTEEAAEDTVMEDTSKQCDHTKSNDVALDLELVVQQEYQDVITMEAATCLVSELLEIDEHAVLNSSLLVCSVLPGSKSNERNDV

SEQ ID NO: 13792 - protein, 99 aa, Zea mays
  Coding DNA Sequence Number=SeqID_978
LNRICPSVPRTPDKPLTTKMARLSNTNHTHQQFAAEILLPNFTSYKIFTVFYRSDYKSISLKYMLAQVTILNKNIKTGYTYIRRPSPPALNTIISSTKL

SEQ ID NO: 13793 - protein, 119 aa, Zea mays
  misc_feature (1)..(1): Xaa can be any naturally occurring amino acid
  Coding DNA Sequence Number=SeqID_980
  Subcellular localization annotation: CTP_CleavageSite=78; ConfidenceScore=5.15e-01
XGRPSVRLGVLRWLLQRGRSPCCESPWQLRRPGFCSPWRTLCSPSQAATLSSSPTCVCVLGSRVFLRSPSCDIVYFVRCALSVRRNVNQRPPWFWALLSAPARPVGPLAIVIQGTPKLH

SEQ ID NO: 13794 - protein, 75 aa, Zea mays
  Coding DNA Sequence Number=SeqID_982
WHTINFDNLGNTHIIINLNPNDMIDTNLMQYVLYLAVSYCPKVTSKNVSGVDTCLTMTALNKSSCMMLRMLLTLS

SEQ ID NO: 13795 - protein, 42 aa, Zea mays
  misc_feature (23)..(23): Xaa can be any naturally occurring amino acid
  Coding DNA Sequence Number=SeqID_984
  Homolog annotation: Hit_ID=Q5JK82; Match level="QueryCoverage=97%, HitCoverage=12%, E-value=8e-08, Identity=68%"; Hit description =Putative GDA2 protein
YPVEEEAFRSIQHQYAGPKFRLXLSVNKALALLDMLAGKDDA

SEQ ID NO: 13796 - protein, 138 aa, Zea mays
  misc_feature (59)..(59): Xaa can be any naturally occurring amino acid
  misc_feature (76)..(76): Xaa can be any naturally occurring amino acid
  Coding DNA Sequence Number=SeqID_985
  Homolog annotation: Hit_ID=Q76H04; Match level="QueryCoverage=61%, HitCoverage=62%, E-value=6e-13, Identity=48%"; Hit description =Putative uncharacterized protein 3C08
MLVLLTITILFCPLRMNLFKSVFSEDPDPPPPGSNHASPDKAPDPHSPPPSNATDSAAXEAAGDRWNLGGLIKTLXSKSESIIETYRRDLQEFRTGLKKEIEVAQGSLGTVGHVIDEFGNTVVKGTAQIISQGKDAIL

SEQ ID NO: 13797 - protein, 69 aa, Zea mays
  Coding DNA Sequence Number=SeqID_986
WLVRERFLCSFALLSLGLPFFFSHSYSQVLCKRGKRHQVCGGPCGVLVTREIKEEGSLGLSDRLREGKG

SEQ ID NO: 13798 - protein, 97 aa, Zea mays
  misc_feature (57)..(57): Xaa can be any naturally occurring amino acid
  misc_feature (66)..(66): Xaa can be any naturally occurring amino acid
  Coding DNA Sequence Number=SeqID_987
  Gene Ontology: Mol. function=nucleic acid binding
  Homolog annotation: Hit_ID=A2YQI7; Match level="QueryCoverage=78%, HitCoverage=25%, E-value=5e-23, Identity=71%"; Hit description =Putative uncharacterized protein
MVQLHSCMKIHAIKSQCRFEQLEYAQDTRPNAWQQFQTTGKAKKAGVFSCRMRESFXESPDDHIGXVGVTASGKGLTDSHRREKLVLLTGELRRCRG

SEQ ID NO: 13799 - protein, 116 aa, Zea mays
  Coding DNA Sequence Number=SeqID_988
  Subcellular localization annotation: CTP_CleavageSite=66; ConfidenceScore=5.71e-01
KTPPPRGVIGYITSRGNTNMPPKKKTRGKSPFFLTPALFFFPFGPKKTRRWRHLTPRFFSHAYPTKAGQTLDAHNLSLKGSGGVAFLNARGPWVGGGGGGPCGLLAFFKKNNKVPP

SEQ ID NO: 13800 - protein, 63 aa, Zea mays
  Coding DNA Sequence Number=SeqID_990
YEYKATSCLIPRIRFRVTYGQNKLTRNTANKQPATTDRRPGCLCVYFSLHTLCETESTGLAGS

SEQ ID NO: 13801 - protein, 52 aa, Zea mays
  Coding DNA Sequence Number=SeqID_992
SSWFSRLLGGLSAPLILHTYCCWYMRAKLHSHIGPVPPFRTGDDATCLILCN

SEQ ID NO: 13802 - protein, 96 aa, Zea mays
  misc_feature (21)..(21): Xaa can be any naturally occurring amino acid
  Coding DNA Sequence Number=SeqID_994
  Gene Ontology: Mol. function=structural constituent of ribosome; Cellular component=ribonucleoprotein complex; Biological process =translation
  Homolog annotation: Hit_ID=P35684; Match level="QueryCoverage=100%, HitCoverage=24%, E-value=6e-31, Identity=70%"; Hit description=60S ribosomal protein L3
  Pfam annotation: Domain name=Ribosomal_L3; Domain location=1-96; Score=-111.7; E_value=0.065; Accession=PF00297.12; Description =Ribosomal protein L3
KTPRGLRTLNSVWALLLSGEXKRTFYKNRRYSNKKASAEYALIYENDAGKKEIQLQLDIMKKYASVIRVIARTQIMGVQGLKQKKAHLMEIQVNGG

SEQ ID NO: 13803 - protein, 147 aa, Zea mays
  Coding DNA Sequence Number=SeqID_995
  Gene Ontology: Mol. function=structural constituent of ribosome; Cellular component=ribonucleoprotein complex; Biological process =translation
  Homolog annotation: Hit_ID=A6SFW2; Match level="QueryCoverage=100%, HitCoverage=100%, E-value=5e-68, Identity=88%"; Hit description=40S ribosomal protein S12
  Pfam annotation: Domain name=Ribosomal_L7Ae; Domain location=31-126; Score=109.0; E_value=1.4e-29; Accession=PF01248.16; Description =Ribosomal protein L7AeL30eS12eGadd45 family
MSDVEDNQPEVQEEVEVSADAASKGQMSVLDALKGVLRLSLIHDGLARGLREASKALDRRQAHMCVLNEACEEDAYKKLVIALCSEHKIPLIKVPDGKQLGEWAGLCVLDREGNARKVVNCSCVVVKDWGEESQERSILLNYFQTEQ

SEQ ID NO: 13804 - protein, 124 aa, Zea mays
  Coding DNA Sequence Number=SeqID_996
EAHLECSCGTLFLGTRWPGDPPIEGQSSHLAVLFDDRHCIPVRSLPRSEFSGAPSDVPRRPVRSMFSLLCRILFIASMVSHRLWYASPSAWRDASSIAVPYPRRARANQVCKGRPTHSGSSSMG

SEQ ID NO: 13805 - protein, 85 aa, Zea mays
  Coding DNA Sequence Number=SeqID_998
IYRRIAVMFLALTRMSRKGNVMPLHHLRLRCSGYTMTIVVEPRCLIQRWVELTRNVRQRSSQRRSGLACRATPAEDRARGRSLPV

SEQ ID NO: 13806 - protein, 84 aa, Zea mays
  misc_feature (11)..(11): Xaa can be any naturally occurring amino acid
  misc_feature (30)..(30): Xaa can be any naturally occurring amino acid
  Coding DNA Sequence Number=SeqID_1000
  Gene Ontology: Mol. function=heat shock protein binding; Biological process=protein folding
  Homolog annotation: Hit_ID=Q9XF14; Match level="QueryCoverage=100%, HitCoverage=65%, E-value=2e-15, Identity=53%"; Hit description =Bundle sheath defective protein 2
QNDQSANKHLXVKSIFSQFWNYNGAIVCPXCERNGVNSVDKYNGPFTGGSLSWLCIRKRQILCGTCTGPGLLGEFLSTCDELVQ

SEQ ID NO: 13807 - protein, 234 aa, Zea mays
  misc_feature (34)..(34): Xaa can be any naturally occurring amino acid
  misc_feature (59)..(59): Xaa can be any naturally occurring amino acid
  Coding DNA Sequence Number=SeqID_1001
  Gene Ontology: Mol. function=nucleic acid binding; Biological process= ubiquitin-dependent protein catabolic process
  Homolog annotation: Hit_ID=Q0P166; Match level="QueryCoverage=61%, HitCoverage=52%, E-value=4e-69, Identity=88%"; Hit description =Putative uncharacterized protein
  Pfam annotation: Domain name=PGAM; Domain location=66-188; Score =47.2; E_value=5.8e-11; Accession=PF00300.12; Description =Phosphoglycerate mutase family
  Subcellular localization annotation: CTP_CleavageSite=48; ConfidenceScore=5.46e-01
SCSRAALPLLLASLLGPAPPPHLLSHAGRLPPAXAVARSVSVSVDAPAAATEPSVLGAXPRCPRRRLILLRHGESTAGGRSTRDHDRPLSKAGRADAISGSNKLQQMGWIPELILCSDAMRTKETLKILQEHVQGLSEAVVHFIPRFYSIAAMDGQTAEHLQKAICEYSSDEILTVMCMGHNKGWEEAASMFSGDSVALETCNAASRAAAGKSWVEAFSVAGLGGWKLHGIAKP

SEQ ID NO: 13808 - protein, 117 aa, Zea mays
  misc_feature (13)..(13): Xaa can be any naturally occurring amino acid
  misc_feature (26)..(26): Xaa can be any naturally occurring amino acid
  misc_feature (32)..(33): Xaa can be any naturally occurring amino acid
  misc_feature (61)..(61): Xaa can be any naturally occurring amino acid
  misc_feature (71)..(71): Xaa can be any naturally occurring amino acid
  misc_feature (96)..(96): Xaa can be any naturally occurring amino acid
  misc_feature (104)..(104): Xaa can be any naturally occurring amino acid
  Coding DNA Sequence Number=SeqID_1002
  Subcellular localization annotation: CTP_CleavageSite=44; ConfidenceScore=5.26e-01
IPRGRLHVVSLSXSCWRGSLLKLHVXQKNSLXXRCVRASIGAISATRVPSVVRKSLSEGSXRYASVIFGHXLGNRVPAEYMPSEIRKTTSPSMPCXGDTSVASXRGNAQRSPSSFSD

SEQ ID NO: 13809 - protein, 168 aa, Zea mays
  Coding DNA Sequence Number=SeqID_86
  Gene Ontology: Mol. function=hydrogen ion transporting ATP synthase activity, rotational mechanism; Cellular component=proton -transporting ATP synthase complex, coupling factor F(o); Biological process=ATP synthesis coupled proton transport
  Homolog annotation: Hit_ID=Q9FT52; Match level="QueryCoverage=100%, HitCoverage=100%, E-value=5e-79, Identity=86%"; Hit description=ATP synthase subunit d, mitochondrial
  Pfam annotation: Domain name=Mt_ATP-synt_D; Domain location=4-163; Score=-18.2; E_value=0.00014; Accession=PF05873.2; Description=ATP synthase D chain, mitochondrial (ATP5H)
MSGAGKKVADVAFKASRTIDWEGMAKVLVTDEARREFSNLRRAFDEVNTQLQTKFSQEPEPIDWDFYRKGIGSGIVDMYKEAYDSVEIPKYVDNVTPEYKPKFDALLVELKEAEQKSLKESERLEKEIIDVQEISKKLSTMTADEYFEKHPELKKKFDDEIRNDYWGY

SEQ ID NO: 13810 - protein, 168 aa, Zea mays
  Coding DNA Sequence Number=SeqID_87
  Gene Ontology: Mol. function=iron-sulfur cluster binding; Biological process=electron transport
  Homolog annotation: Hit_ID=Q3E9S4; Match level="QueryCoverage=93%, HitCoverage=90%, E-value=2e-62, Identity=76%"; Hit description =Uncharacterized protein At4g32590.3
  Pfam annotation: Domain name=Fer2; Domain location=74-151; Score =20.0; E_value=0.004; Accession=PF00111.17; Description=2Fe-2S iron -sulfur cluster binding domain
  Subcellular localization annotation: CTP_CleavageSite=31; ConfidenceScore=5.49e-01
MASLGFNLGFSFSGVKNRQVSVNGRARVISCCSSSSSEASQQGISTTKPPPEIELEFFGPKPGSDGTYPRDKAKAVSGEKLLRSIMQDSKIELYATYGKVMNCGGGGSCGTCIVEILDGRELLNQRTDTENKYLKKKPESWRLACQTIVGNKENSGKVVVQRIPQWKK

SEQ ID NO: 13811 - protein, 273 aa, Zea mays
  Coding DNA Sequence Number=SeqID_88
  Gene Ontology: Mol. function=magnesium ion binding; Cellular component=integral to membrane; Biological process=photosynthesis, light harvesting
  Homolog annotation: Hit_ID=Q0WR83; Match level="QueryCoverage=93%, HitCoverage=93%, E-value=1e-128, Identity=87%"; Hit description=PSI type III chlorophyll a/b-binding protein
  Pfam annotation: Domain name=Chloroa_b-bind; Domain location=61-244; Score=278.4; E_value=1.5e-80; Accession=PF00504.12; Description =Chlorophyll A-B binding protein
  Subcellular localization annotation: CTP_CleavageSite=46; ConfidenceScore=5.83e-01
MAAQALVSSSLTSSVQTARQIFGAKPAVSVSQRKVSLVVKAASTPPAKQGANRQLWFASSQSLSYLDGSLPGDFGFDPLGLSDPEGTGGFIEPRWLAYGEIINGRFAMLGAAGAIAPEILGKAGLIPADTALPWFQTGVIPPAGTYSYWADPYTLFVLEMALMGFAEHRRLQDWYNPGSMGKQYFLGLEKGFAGSGDPAYPGGPFFNPLGFGKDEKSMKELKLKEVKNGRLAMLAILGYFVQGLVTGVGPYQNLLDHLADPVNNNVLTSLKFH

SEQ ID NO: 13812 - protein, 209 aa, Zea mays
  Coding DNA Sequence Number=SeqID_89
FLYTEPSLRECASHNKQKKMARQFAIVAICIVLIAGVGGQAPSAPPTTTPAPPTTTTPPPAATPPPVSAPPPVTTSPPPATTAPPPATPPPVASPPPATPPPVATPPPATPPPVASPPPATPPPVASPPPATPPPAPLASPPAQVPALAPTTPDAPSTSPSSSPPLPATDGPGPSAEGPGPSTDSNDQNGASKTVSSLVLGSVLVWFMI

SEQ ID NO: 13813 - protein, 99 aa, Zea mays
  Coding DNA Sequence Number=SeqID_91
  Gene Ontology: Mol. function=catalytic activity; Cellular component =chromatin; Biological process=response to chitin
  Homolog annotation: Hit_ID=A1YMX7; Match level="QueryCoverage=98%, HitCoverage=98%, E-value=6e-37, Identity=80%"; Hit description=Auxin- induced protein-like
  Pfam annotation: Domain name=Auxin_inducible; Domain location=1-99; Score=154.6; E_value=2.7e-43; Accession=PF02519.5; Description=Auxin responsive protein
  Subcellular localization annotation: CTP_CleavageSite=38; ConfidenceScore=5.31e-01
MALVRSLLGAKKILGRSLTAAASSTSKTTASAAPKGFLAVYVGESQKKRYVVPISYLSQPSFQALLSKSEEEFGFDHPMGGLTIPCPEDIFINLTSRLQ

SEQ ID NO: 13814 - protein, 233 aa, Zea mays
  Coding DNA Sequence Number=SeqID_92
  Gene Ontology: Mol. function=glutathione transferase activity; Cellular component=cytoplasm; Biological process=response to stress
  Homolog annotation: Hit_ID=Q8RW01; Match level="QueryCoverage=100%, HitCoverage=100%, E-value=1e-119, Identity=91%"; Hit description =Glutathione transferase
  Pfam annotation: Domain name=GST_C; Domain location=100-204; Score =7.2; E_value=0.019; Accession=PF00043.15; Description=Glutathione S -transferase, C-terminal domain
  Pfam annotation: Domain name=GST_N; Domain location=5-78; Score=60.2; E_value=7.2e-15; Accession=PF02798.10; Description=Glutathione S -transferase, N-terminal domain
  Pfam module annotation: Pfam domain module=GST_C::GST_N; Domain location=100-204::5-78
MAGDGELKLLGVWTSPFVIRVRVVLNLKSLPYEYVEENLGSKSALLLGSNPVHQSVPVLLHGGRPVNESQVIVQYIDEVWAGAGPSVLPADPYERATARFWAAYVDDKVGSAWTGMLFSCKTEEERAEAVSRAVAALETLEGAFAECSKGKAFFGGDAIGFVDVVLGGYLGWFGAIDKIIGRRLIDPARTPLLARWEEQFRAADAAKGVVPDDADKMLEFLPTVLAWVAAKAK

SEQ ID NO: 13815 - protein, 145 aa, Zea mays
  Coding DNA Sequence Number=SeqID_93
  Gene Ontology: Cellular component=photosystem I reaction center; Biological process=photosynthesis
  Homolog annotation: Hit_ID=Q9SUI7; Match level="QueryCoverage=100%, HitCoverage=100%, E-value=5e-52, Identity=72%"; Hit description =Photosystem I reaction center subunit VI-1, chloroplast precursor
  Pfam annotation: Domain name=PSI_PsaH; Domain location=6-145; Score =326.4; E_value=5.2e-95; Accession=PF03244.4; Description=Photosystem I reaction centre subunit VI
  Subcellular localization annotation: CTP_CleavageSite=49; ConfidenceScore=5.39e-01
MASLATVAAVKPSVAVKGLGGSSLAGAKLSFKPSRLSIKTKSIRSGGVVAKYGDKSVYFDLEDLGNTTGQWDLYGSDAPSPYNPLQSKFFETFAAPFTKRGLLLKFLILGGGSLLTYVSASSTGDVLPIKRGPQEKPKLGPRGKL

SEQ ID NO: 13816 - protein, 161 aa, Zea mays
  Coding DNA Sequence Number=SeqID_94
  Gene Ontology: Mol. function=heat shock protein binding; Cellular component=chloroplast; Biological process=protein folding
  Homolog annotation: Hit_ID=Q9FYB5; Match level="QueryCoverage=100%, HitCoverage=100%, E-value=1e-58, Identity=72%"; Hit description =Chaperone protein dnaJ 11, chloroplast precursor
  Pfam annotation: Domain name=DnaJ; Domain location=65-130; Score =101.0; E_value=3.6e-27; Accession=PF00226.21; Description=DnaJ domain
  Subcellular localization annotation: CTP_CleavageSite=57; ConfidenceScore=5.78e-01
MLSSSPTSFTHPFLSTSPPLSPISPPSRSPRLPPPLVSASCSYTCTEDPPRLHQIPRRTTPANASLYEILEVPRGATSQDIKSAYRRLARICHPDVAAGTDRSNSSADEFMKIHAAYCTLSDPDKRSVYDRRMLRRSRPLTVSTSGMGSYVGRNWETDQCW

SEQ ID NO: 13817 - protein, 164 aa, Zea mays
  Coding DNA Sequence Number=SeqID_95
  Homolog annotation: Hit_ID=Q9ZV57; Match level="QueryCoverage=93%, HitCoverage=94%, E-value=3e-72, Identity=86%"; Hit description =Putative uncharacterized protein At2g32280
  Pfam annotation: Domain name=DUF1218; Domain location=44-152; Score =168.1; E_value=2.3e-47; Accession=PF06749.3; Description=Protein of unknown function (DUF1218)
MTKIGGILVCLVIVGLDVAAAILGIQAEVAQNQVKHMRLWLFECREPSQDAYRLGLGAAAVLVMAHVLINLVGGCLCICSQDEFQRSSSTKQISMACLVLTWIVFAVGFGALVIGTMSNNKSRSSCGFTHHHFLSIGGILCFLHALFCVAYYVSATAAKDAAAK

SEQ ID NO: 13818 - protein, 207 aa, Zea mays
  Coding DNA Sequence Number=SeqID_96
  Gene Ontology: Mol. function=superoxide dismutase activity; Cellular component=chloroplast; Biological process=superoxide metabolic process
  Homolog annotation: Hit_ID=O78310; Match level="QueryCoverage=87%, HitCoverage=86%, E-value=4e-78, Identity=80%"; Hit description =Superoxide dismutase [Cu-Zn], chloroplast precursor
  Pfam annotation: Domain name=Sod_Cu; Domain location=55-206; Score =338.2; E_value=1.5e-98; Accession=PF00080.10; Description=Copperzinc superoxide dismutase (SODC)
  Subcellular localization annotation: CTP_CleavageSite=52; ConfidenceScore=5.90e-01
MASHTFLSFSSPPRLLVSPPSTLRSPFVGVSLNLHRPQSVSFSASKKSLTVVSAAKKAVAVLKGNSDVEGVVTLTQDDSGPTKVSVRITGLTPGPHGFHLHEFGDTTNGCISTGPHFNPNNMTHGAPEDEIRHAGDLGNIIANADGVAETTLVDNQIPLTGPNSVVERAFVVHELKDDLGKGGHELSLTTGNAGGRLACGVVGLTPL

SEQ ID NO: 13819 - protein, 149 aa, Zea mays
  Coding DNA Sequence Number=SeqID_97
  Gene Ontology: Mol. function=metal ion binding; Biological process =metal ion transport
  Homolog annotation: Hit_ID=Q9LF57; Match level="QueryCoverage=100%, HitCoverage=100%, E-value=1e-80, Identity=93%"; Hit description =Farnesylated protein ATFP6-like protein
  Pfam annotation: Domain name=HMA; Domain location=29-89; Score=42.6; E_value=1.4e-09; Accession=PF00403.16; Description=Heavy-metal -associated domain
MGAFDYISSFCSYTYSNAKTKRKPLQTVEIKVKMDCDGCERKLRNVVRRMKGVKTVEVNRKQSRLTVNGHVDPNKVLKRVKSTGKKAEFWPYIPQHMVYYPFAPGMYDKRAPAGHIRNPTQAFPAANAPGENYVSLFSDDNVHAACSIM

SEQ ID NO: 13820 - protein, 168 aa, Zea mays
  Coding DNA Sequence Number=SeqID_98
  Gene Ontology: Mol. function=protein binding; Cellular component =thylakoid membrane; Biological process=photosynthesis
  Homolog annotation: Hit_ID=P49107; Match level="QueryCoverage=100%, HitCoverage=100%, E-value=1e-67, Identity=78%"; Hit description =Photosystem I reaction center subunit N, chloroplast precursor
  Pfam annotation: Domain name=PsaN; Domain location=34-168; Score =322.0; E_value=1.1e-93; Accession=PF05479.2; Description=Photosystem I reaction centre subunit N (PSAN or PSI-N)
  Subcellular localization annotation: CTP_CleavageSite=78; ConfidenceScore=5.20e-01
MAAMNSSVLTCSYAISGAGSAELNQKVGLVNSSVGFGQKKQTLPVIKAAQRVGGDDVNGRRSAMVFLAATLFSSAAVSASANASVFDEYLEKSKANKELNDKKRLATSGANFARAFTVQFGSCKFPENFTGCQDLAKQKKVPFISEDLALECEGKDKFKCGSNVFWKW

SEQ ID NO: 13821 - protein, 289 aa, Zea mays
  Coding DNA Sequence Number=SeqID_99
  Homolog annotation: Hit_ID=Q9FIV0; Match level="QueryCoverage=80%, HitCoverage=81%, E-value=3e-79, Identity=66%"; Hit description =Arabidopsis thaliana genomic DNA, chromosome 5, P1 clone:MRB17
  Subcellular localization annotation: CTP_CleavageSite=49; ConfidenceScore=5.28e-01
MGGGRVMATAAKVAGIGVAKGGFRGGFGVPAAANDQFIVRNTSASKPVSASISSAVHPSVEEDAVVMRKPVWEDEWEFAEVETKTIPRVVFDKPPSLQEAKEATDDLKDALNMACMEGSNEVGSVSRMFSSFQPSENRAVESAVPQVALKAFAFLSENTAAQSVVTSIASDPKVWDAVMENKDLMKFLETNTASTKDEADNDDKSELSSETESEEDSEEKPIQLMEILRDMKLKAVQMMENVSSYFGGLFRTETFTEGGQERKRMLLNDPTTLFGLAVCVIFMVVLKRA

SEQ ID NO: 13822 - protein, 116 aa, Zea mays
  Coding DNA Sequence Number=SeqID_100
HFDTPPNGGDDGPARVLPAAVTVLRRLSLQQRRWRSDAPRLDGATMLILKKARMLLLVFEPIRSYLQRRRCLTCRYVWCSTKWPSAHKLDRKKKKFAATEAKEQRWLHGLSFYAME

SEQ ID NO: 13823 - protein, 143 aa, Zea mays
  Coding DNA Sequence Number=SeqID_102
  Gene Ontology: Mol. function=protein binding
  Homolog annotation: Hit_ID=A9PAP4; Match level="QueryCoverage=83%, HitCoverage=82%, E-value=2e-39, Identity=66%"; Hit description =Putative uncharacterized protein
  Pfam annotation: Domain name=CHCH; Domain location=95-136; Score =49.3; E_value=1.3e-11; Accession=PF06747.3; Description=CHCH domain
  Subcellular localization annotation: CTP_CleavageSite=84; ConfidenceScore=5.45e-01
MGRRSSGGRSAPRPRPAAARAPAPQHVNRAPPPAPAQATSGGGMFSGIGSTIAQGMAFGTGSAVAHRAVDSVMGPRTIQHETVEAASASAAPVGSSMFSSSCDIHAKAFQDCISSYGSDISKCQFYMDMLSECKKNSGSTIGA

SEQ ID NO: 13824 - protein, 62 aa, Zea mays
  misc_feature (24)..(24): Xaa can be any naturally occurring amino acid
  misc_feature (41)..(41): Xaa can be any naturally occurring amino acid
  Coding DNA Sequence Number=SeqID_1004
  Gene Ontology: Mol. function=O-methyltransferase activity
  Homolog annotation: Hit_ID=A2XB68; Match level="QueryCoverage=100%, HitCoverage=18%, E-value=3e-13, Identity=66%"; Hit description =Putative uncharacterized protein
TDSITRTRTLLYNDILLGGAYRTXGRELSEEEFRHLCVNAXCFTGFRAIYFDPFYAWREYTK

SEQ ID NO: 13825 - protein, 71 aa, Zea mays
  Coding DNA Sequence Number=SeqID_1005
  Homolog annotation: Hit_ID=A2Y519; Match level="QueryCoverage=97%, HitCoverage=25%, E-value=3e-24, Identity=76%"; Hit description =Putative uncharacterized protein
AFFAVLQSWVSRKFMTGCVVLLPIAVTFFITWWFIQFVDGFFSPLYAKLGFDIFGNCLSFIGGTSFAMIHY

SEQ ID NO: 13826 - protein, 112 aa, Zea mays
  Coding DNA Sequence Number=SeqID_1006
  Subcellular localization annotation: CTP_CleavageSite=38; ConfidenceScore=5.38e-01
GPSFFPGGNIRGQNPSQGAWGLQFFWETAGSNSFRRPRARSRDAKGRPGAWAPSSQDPDKARSAGRTKPQQRGHQLVWVLLYQFGCKVSCGPSKDIDCWRATNPQESILDGF

SEQ ID NO: 13827 - protein, 130 aa, Zea mays
  Coding DNA Sequence Number=SeqID_1008
ENHVSPDVILVIIYANSACGHYRMTSILWKLTLSILTCTLVICLCQPIQFRLSHIYGVLSFYVARISFVSLPVVLIIELSPYQGFPTIAQREYRMKGSLDQQYYHALIYLLNCSQYSMLHFSENSCSPIR

SEQ ID NO: 13828 - protein, 35 aa, Zea mays
  misc_feature (15)..(15): Xaa can be any naturally occurring amino acid
  Coding DNA Sequence Number=SeqID_1009
NNIYIFIYYFFFFFXWIKAMKKFRGCLNALELIVS

SEQ ID NO: 13829 - protein, 72 aa, Zea mays
  Coding DNA Sequence Number=SeqID_1011
RTQINTDLFIPRKPRPRPYSLGRIASLTSYTGRKRFNFIRLLQRKHAAQTEDGRTTIEELRSGPRSPPHQKP

SEQ ID NO: 13830 - protein, 114 aa, Zea mays
  Coding DNA Sequence Number=SeqID_1013
  Gene Ontology: Mol. function=glutamate decarboxylase activity; Biological process=carboxylic acid metabolic process
  Homolog annotation: Hit_ID=A3AU98; Match level="QueryCoverage=92%, HitCoverage=22%, E-value=2e-24, Identity=62%"; Hit description =Putative uncharacterized protein
RVVTGRCTSICTEHDVPVVAFTCKAKDETQLAFTLSLALGRLGWIVSQYTMAANLEHMAVLLVAGREDLRRPLVERFLSHVRMALEELDHAGQGGPVPRMRLTIELGPSVRGSR

SEQ ID NO: 13831 - protein, 128 aa, Zea mays
  misc_feature (23)..(23): Xaa can be any naturally occurring amino acid
  misc_feature (77)..(77): Xaa can be any naturally occurring amino acid
  misc_feature (101)..(101): Xaa can be any naturally occurring amino acid
  misc_feature (105)..(105): Xaa can be any naturally occurring amino acid
  Coding DNA Sequence Number=SeqID_1014
  Gene Ontology: Mol. function=nucleotide binding; Cellular component =intracellular
  Homolog annotation: Hit_ID=A2X3I4; Match level="QueryCoverage=98%, HitCoverage=17%, E-value=4e-31, Identity=56%"; Hit description =Putative uncharacterized protein
FGGCAIVYAPFDSYGRWAADLSXRDQGPLVAVEGRGSTCYALLTAHARGVVIVQPGLDGDTGHCVWLHLRPDELPVXGREKRAATCVRPNNETTVVVDEPXSYSXDDCLVGIQDDEIEWVTPASMRMC

SEQ ID NO: 13832 - protein, 84 aa, Zea mays
  Coding DNA Sequence Number=SeqID_1015
  Homolog annotation: Hit_ID=Q2R2E7; Match level="QueryCoverage=75%, HitCoverage=16%, E-value=2e-07, Identity=47%"; Hit description=THUMP domain containing protein, expressed
FNSVVARTKNVIVSGDSTPQPHCVDLENSVKTFVVQIAKTISMIGAEGRFGELSMFDRRLLSSPESAKFAYEWQDIALLYMDQL

SEQ ID NO: 13833 - protein, 143 aa, Zea mays
  misc_feature (37)..(37): Xaa can be any naturally occurring amino acid
  misc_feature (43)..(43): Xaa can be any naturally occurring amino acid
  misc_feature (53)..(53): Xaa can be any naturally occurring amino acid
  misc_feature (91)..(91): Xaa can be any naturally occurring amino acid
  misc_feature (108)..(108): Xaa can be any naturally occurring amino acid
  Coding DNA Sequence Number=SeqID_1016
  Gene Ontology: Mol. function=aminoacyl-tRNA ligase activity
  Homolog annotation: Hit_ID=A2YJ32; Match level="QueryCoverage=100%, HitCoverage=23%, E-value=1e-39, Identity=62%"; Hit description =Putative uncharacterized protein
SQRYTQDFVVAVSDVDPNFHSDDNVMGEAGLDDPYLXSRKQMXPSSAFDEDEXFRMVDDAGDDDEEEYSLSTSEDLGEPQRHKKLVTRRRXGTMLRSAGWILSGLKRXKCCSTARMNYWQCDSSDMDTEPRKARKSDASDTDA

SEQ ID NO: 13834 - protein, 94 aa, Zea mays
  Coding DNA Sequence Number=SeqID_1017
  Subcellular localization annotation: CTP_CleavageSite=53; ConfidenceScore=5.04e-01
PWVTKWASSLGSTKLTTVGICVAKVGHIATTADEKTKSRKETYRSSRTTTSFRCGLADPPNQLPVKVLSYTALNLALSFTCLVGDYADGSDSAT

SEQ ID NO: 13835 - protein, 175 aa, Zea mays
  misc_feature (141)..(141): Xaa can be any naturally occurring amino acid
  Coding DNA Sequence Number=SeqID_1019
  Gene Ontology: Mol. function=metalloendopeptidase activity; Cellular component=proteinaceous extracellular matrix; Biological process =metabolic process
  Homolog annotation: Hit_ID=A2YB49; Match level="QueryCoverage=74%, HitCoverage=35%, E-value=3e-28, Identity=53%"; Hit description =Putative uncharacterized protein
  Pfam annotation: Domain name=PG_binding_1; Domain location=78-142; Score=21.5; E_value=0.0011; Accession=PF01471.9; Description =Putative peptidoglycan binding domain
  Subcellular localization annotation: CTP_CleavageSite=29; ConfidenceScore=5.03e-01
SSNSARVLLQAHFFSKGCHGHQAGSFLLLATMAAETDTLAVAPVSATDLPSGVASITSNIPNPWSALQNLTVCHLREQQHGLIKVKDYLSRFGYLPHESSGSFNDLFDADLGEAINVGHRNFGLGITGVMDASTVAHMMAXRRGVADIINGTSTIGRRVAPLIFVGGMRAPLGPF

SEQ ID NO: 13836 - protein, 183 aa, Zea mays
  Coding DNA Sequence Number=SeqID_1020
  Gene Ontology: Mol. function=nucleotide binding; Cellular component =Golgi apparatus; Biological process=small GTPase mediated signal transduction
  Homolog annotation: Hit_ID=P34727; Match level="QueryCoverage=100%, HitCoverage=100%, E-value=1e-94, Identity=92%"; Hit description=ADP -ribosylation factor
  Pfam annotation: Domain name=Arf; Domain location=1-177; Score=418.4; E_value=1e-122; Accession=PF00025.11; Description=ADP-ribosylation factor family
  Pfam annotation: Domain name=MMR_HSR1; Domain location=18-129; Score =7.7; E_value=0.00021; Accession=PF01926.13; Description=GTPase of unknown function
  Pfam annotation: Domain name=Miro; Domain location=19-129; Score =15.7; E_value=0.00034; Accession=PF08477.3; Description=Miro-like protein
  Pfam annotation: Domain name=Ras; Domain location=19-179; Score= -38.5; E_value=1.8e-06; Accession=PF00071.12; Description=Ras family
  Pfam annotation: Domain name=SRPRB; Domain location=15-174; Score= -24.8; E_value=9.1e-06; Accession=PF00071.12; Description=Signal recognition particle receptor bet
  Pfam module annotation: Pfam domain module=Arf::MMR_HSR1::Miro::Ras::S RPRB; Domain location=1-177::18-129::19-129::19-179::15-174
MGLVVSKLLDRLWGKKEMRILMVGLDAAGKTTILYKLKLGEIVTTIPTIGFNVETVEYKNIQFTVWDVGGQDKIRPLWRHYFQNTQGIIFVVDSNDRDRIVEAREELQRMLNEDELRDALLLVFANKQDLPNAMSIAEITQQLGLQSLTRRAWYIQSTCATTGDGLYEGLEWLAETLRKTGRD

SEQ ID NO: 13837 - protein, 65 aa, Zea mays
  Coding DNA Sequence Number=SeqID_1021
LMLHICLLDYAFVQRPLSVLCATWAVAQSCIKLHHIWIERSRSSWHRCCGPPHPIKSPPVFNQTK

SEQ ID NO: 13838 - protein, 72 aa, Zea mays
  Coding DNA Sequence Number=SeqID_1023
  Subcellular localization annotation: CTP_CleavageSite=24; ConfidenceScore=5.33e-01
QPLLASAMSTGALLHGTHAVPLTRVTVPSCCGFFCGIPLLQVAGNLPILCTLGPFSFRVCVSDCTHMSSVYL

SEQ ID NO: 13839 - protein, 90 aa, Zea mays
  misc_feature (44)..(44): Xaa can be any naturally occurring amino acid
  Coding DNA Sequence Number=SeqID_1025
  Gene Ontology: Mol. function=catalytic activity; Biological process =trehalose biosynthetic process
  Homolog annotation: Hit_ID=Q94AH8; Match level="QueryCoverage=94%, HitCoverage=10%, E-value=2e-13, Identity=49%"; Hit description=Alpha, alpha-trehalose-phosphate synthase [UDP-forming] 6
CGYIVHLSITSRAVNVKILHVGVHMGQLRSVVSAQQTEHPVRRXTQAYKGRRHMVAVVDVDLFKGIGLKFLAMDHLLVHHREHRGRRLED

SEQ ID NO: 13840 - protein, 255 aa, Zea mays
  misc_feature (94)..(94): Xaa can be any naturally occurring amino acid
  misc_feature (127)..(127): Xaa can be any naturally occurring amino acid
  misc_feature (157)..(157): Xaa can be any naturally occurring amino acid
  Coding DNA Sequence Number=SeqID_1026
  Gene Ontology: Mol. function=nucleotide binding; Biological process =defense response
  Homolog annotation: Hit_ID=Q8S453; Match level="QueryCoverage=100%, HitCoverage=19%, E-value=3e-85, Identity=64%"; Hit description=Rust resistance-like protein RP1-4
ELSIHKCPLLMFITNNELGQHGLEENVMKIDNLTSKLALMWDVDSGSCIRRALSEDCSSLKQIIMTLMDDDISKHLQIIESSLEEGGEKVWIKXNIMKPWLYCHEQRLSFTYGRAMEMPLVIPPGLXSPSVCSCSITNEAIAVCLGGPTSLRNGESXYNMELTTLPTKGVFEHLAKLDRLFVSGCLCLRSLGGLRAAPSLSFINCWDCPSLELARGAELVPSNLDRYLNIRGCILSADSFINGLLDLKYLSIDSC

SEQ ID NO: 13841 - protein, 128 aa, Zea mays
  Coding DNA Sequence Number=SeqID_1027
VYKFQIRPIHPPSRRLSGTPHEGQAPRSINSIESWGPSPRTSGALLPTPLGHSPPSPLSSFQPKRRESRSLQYTVATVTQTRLSQSYKTLAPLGTITMARARAEGLCGFSKLTQLTRIHLEQAHKRCN

SEQ ID NO: 13842 - protein, 47 aa, Zea mays
  Coding DNA Sequence Number=SeqID_1029
SLKNKWGYERLCMAGHTTVNNDGAARTSMNLHLIGFLYDHTQFNSKD

SEQ ID NO: 13843 - protein, 105 aa, Zea mays
  Coding DNA Sequence Number=SeqID_1031
  Subcellular localization annotation: CTP_CleavageSite=82; ConfidenceScore=5.17e-01
NYFLFNLLLSFFHFFLYFYFFFHIFFFYIFPFFFNFFLLFFLFIFVIYFLIFYFFFFFFFIIFFFIFLSFFFILFFFNFYFYFFYYFSFFYFYIFSFHPIFFFFL

SEQ ID NO: 13844 - protein, 111 aa, Zea mays
  Coding DNA Sequence Number=SeqID_1033
TDPRGHIKNQKGGEQKGGPGKGDLGGGGNQWAPKKGRGKKGGATTKQQGTRNPPWKPANGQGRGLFLGPKNHGGPLIIIGKLNIAKNGNRISFGEVSPQRGAPMALFIGGG

SEQ ID NO: 13845 - protein, 105 aa, Zea mays
  misc_feature (78)..(105): Xaa can be any naturally occurring amino acid
  Coding DNA Sequence Number=SeqID_1035
TYSIFEILGFLFRSLFFLRIINCRINWDRGGTKHSFWGKTETHLIVKIQLSRLSSSILRKYNMLRAVQVPSFRNLQHXXXXXXXXXXXXXXXXXXXXXXXXXXXX

SEQ ID NO: 13846 - protein, 82 aa, Zea mays
  Coding DNA Sequence Number=SeqID_1037
  Gene Ontology: Mol. function=hydrolase activity, hydrolyzing O -glycosyl compounds; Cellular component=cell wall; Biological process= carbohydrate metabolic process
  Homolog annotation: Hit_ID=Q5JZX2; Match level="QueryCoverage=100%, HitCoverage=29%, E-value=1e-30, Identity=71%"; Hit description =Xyloglucan endo-transglycosylase/hydrolase precursor
  Pfam annotation: Domain name=XET_C; Domain location=34-79; Score =44.0; E_value=5.3e-10; Accession=PF06955.3; Description=Xyloglucan endo-transglycosylase (XET) C-ter
KGKVPVDWSPAPFVVSYRGYSPNAWVNGGAFGGGGDNGWMSKQPDNPEWGPIRWAESNYMGYNYCDDGWGFPQGLPPECTPS

SEQ ID NO: 13847 - protein, 94 aa, Zea mays
  Coding DNA Sequence Number=SeqID_1038
IFFAQLFQTTPPTLAVPEDPHVETPMHHWVGQLSENGGVSPQNSNFERPGGGGPQILSENGGVRSPPLKADLHFFACRDPFFGLLTGMTLVVSP

SEQ ID NO: 13848 - protein, 70 aa, Zea mays
  Coding DNA Sequence Number=SeqID_1040
TLSVFGTLAIALSLTPFALLLCFLDPFHLSQRQAFSYPLNLGITLKTTCDHKRQKIVIKPDKGRIAAFFS

SEQ ID NO: 13849 - protein, 77 aa, Zea mays
  misc_feature (26)..(26): Xaa can be any naturally occurring amino acid
  Coding DNA Sequence Number=SeqID_1042
  Homolog annotation: Hit_ID=A1CR97; Match level="QueryCoverage=66%, HitCoverage=45%, E-value=5e-09, Identity=64%"; Hit description =Putative uncharacterized protein
GNNRFVMPLNVLGRTRAPLMYPTSIXPWPTGPGNLGKFHRDGDRSCILLKFARYWMSVYGERTCKTCMLYSRMKLTL

SEQ ID NO: 13850 - protein, 81 aa, Zea mays
  misc_feature (70)..(70): Xaa can be any naturally occurring amino acid
  misc_feature (81)..(81): Xaa can be any naturally occurring amino acid
  Coding DNA Sequence Number=SeqID_1043
  Gene Ontology: Mol. function=transposase activity; Biological process= transposition, DNA-mediated
  Homolog annotation: Hit_ID=Q7XGX1; Match level="QueryCoverage=96%, HitCoverage=17%, E-value=4e-26, Identity=74%"; Hit description =Transposon protein, putative, CACTA, En/Spm sub-class
KNEENVQELLQGHLKNCRVAFRMEPEILKYLASYLKREGLVRDTRIKDEEKLPFFLYMLSHNASFEDLIXEFAHSGDTYHX

SEQ ID NO: 13851 - protein, 182 aa, Zea mays
  misc_feature (1)..(1): Xaa can be any naturally occurring amino acid
  misc_feature (12)..(12): Xaa can be any naturally occurring amino acid
  misc_feature (146)..(146): Xaa can be any naturally occurring amino acid
  Coding DNA Sequence Number=SeqID_1044
  Gene Ontology: Mol. function=hydrolase activity, acting on acid anhydrides, catalyzing transmembrane movement of substances; Cellular component=integral to membrane; Biological process =metabolic process
  Homolog annotation: Hit_ID=A7QR39; Match level="QueryCoverage=86%, HitCoverage=13%, E-value=1e-46, Identity=63%"; Hit description =Chromosome undetermined scaffold_147, whole genome shotgun sequence
XDMEFQGIVTLXDAPELISDANKLPPRTQEVLSSCHALVFVAPKLVGDPLEKAAIKGIDWVSPSDEKAMSKRPGGPPVQIGPRAPFASPLKRMSVFARIQERFSAFLKGAPGPTQEGLVDFPAAYVGPYKKSPRPGSRVLALASKXFPEMPVSEARSLEGLGIVVIYERCLPSFKKKKKKKK

SEQ ID NO: 13852 - protein, 62 aa, Zea mays
  Coding DNA Sequence Number=SeqID_1045
GAANCTGQNGRITPHPMNLSEPHSGGVPMAYSVLATGWEGRVGLGLFTIFPQGKSRMFFKPI

SEQ ID NO: 13853 - protein, 195 aa, Zea mays
  Coding DNA Sequence Number=SeqID_1047
  Subcellular localization annotation: CTP_CleavageSite=62; ConfidenceScore=5.59e-01
FLFDQISPLLPPSSRVSRTPFVSSPPSAPWTYDPAPAWVPPSQFVLCVRALLFFSLFSFICSAARPKEGCRKKKLCASPSVLSDGSAPRWRVWRRSAPVDMSLSEKLEAARVVLGKRKERERELLQAQPLPVAARAEPWNPGPARAAPSAADAAAGENKLLAGHLAHEFLAHGTLLGRRIEPSRGAPAPAPAPAR

SEQ ID NO: 13854 - protein, 137 aa, Zea mays
  Coding DNA Sequence Number=SeqID_1048
  Gene Ontology: Mol. function=aspartic-type endopeptidase activity; Cellular component=chromatin; Biological process=chromatin assembly or disassembly
  Homolog annotation: Hit_ID=Q7XHA9; Match level="QueryCoverage=76%, HitCoverage=31%, E-value=2e-18, Identity=41%"; Hit description =Retrotransposon protein, putative, LINE subclass
RRGLPHPSVCPLCDQEEETIQHLLISCVFARQFWYSLLSRSGLPNLSPDNASCSLDDWWSRAVEKIPRDLQSGFNSLVILGAWSLWRHRNDCVFNGRSPCLASALTLAGDELRMWCSAGARGLNLLSTLMFMLDPGG

SEQ ID NO: 13855 - protein, 165 aa, Zea mays
  Coding DNA Sequence Number=SeqID_1049
  Gene Ontology: Mol. function=protein binding; Cellular component =integral to membrane
  Homolog annotation: Hit_ID=Q9ASD3; Match level="QueryCoverage=98%, HitCoverage=67%, E-value=2e-71, Identity=73%"; Hit description =Putative uncharacterized protein P0456F08.33
  Pfam annotation: Domain name=DUF778; Domain location=34-163; Score =255.4; E_value=1.2e-73; Accession=PF05608.2; Description=Protein of unknown function (DUF778)
MSPKVLSSMEVEAGFAGDGVGSNNGPQDMWSLGEIDPKRARFPCCIVWTPLPVVSWLAPYIGHVGICQEDGAVLDFAGSNLVSVDNFAYGSVARYLQLDRKKCCLPVNLAAHVCKQSYNHSELGAAISWDDALRSGMRRFQHKYYNLFTLNCHSFVASCLNRLPT

SEQ ID NO: 13856 - protein, 47 aa, Zea mays
  Coding DNA Sequence Number=SeqID_1050
  Gene Ontology: Mol. function=potassium ion transmembrane transporter activity; Cellular component=integral to membrane; Biological process=potassium ion transport
  Homolog annotation: Hit_ID=Q8VXB5; Match level="QueryCoverage=100%, HitCoverage=5%, E-value=7e-17, Identity=91%"; Hit description =Putative potassium transporter 8
CKPGSSVLNRLAVDVGYNFLGRNSRGPDVALRVPPASLLEVGMVYVL

SEQ ID NO: 13857 - protein, 77 aa, Zea mays
  Coding DNA Sequence Number=SeqID_1051
  Gene Ontology: Mol. function=ketol-acid reductoisomerase activity; Cellular component=chloroplast; Biological process=branched chain family amino acid biosynthetic process
  Homolog annotation: Hit_ID=A6N0E0; Match level="QueryCoverage=97%, HitCoverage=36%, E-value=5e-18, Identity=65%"; Hit description =Chloroplast reductoisomerase
PTARLGFRKWAPPFDFILTPQGFVSVDKKAPITQGLISNLMFGPVPGAIKVWAQLGPPVDISVAADANLGGPKLCQF

SEQ ID NO: 13858 - protein, 84 aa, Zea mays
  Coding DNA Sequence Number=SeqID_1052
  Gene Ontology: Mol. function=structural constituent of ribosome; Cellular component=intracellular; Biological process=translation
  Homolog annotation: Hit_ID=A6N0A1; Match level="QueryCoverage=98%, HitCoverage=64%, E-value=6e-26, Identity=78%"; Hit description=60S ribosomal protein l28
  Pfam annotation: Domain name=Ribosomal_L28e; Domain location=1-77; Score=-25.5; E_value=0.015; Accession=PF01778.7; Description =Ribosomal L28e protein family
  Subcellular localization annotation: CTP_CleavageSite=62; ConfidenceScore=5.81e-01
QPAAKDSAVVLFSPKPKKQNAPAKLTPKFVMRKEFRKMAKVVKNQVSVNFYRPVLTKPALVRLSSVSPSLQVAKSGVKKKNRQS

SEQ ID NO: 13859 - protein, 117 aa, Zea mays
  misc_feature (24)..(24): Xaa can be any naturally occurring amino acid
  misc_feature (30)..(30): Xaa can be any naturally occurring amino acid
  misc_feature (57)..(57): Xaa can be any naturally occurring amino acid
  misc_feature (62)..(62): Xaa can be any naturally occurring amino acid
  Coding DNA Sequence Number=SeqID_1053
  Homolog annotation: Hit_ID=A2Q660; Match level="QueryCoverage=89%, HitCoverage=14%, E-value=1e-12, Identity=34%"; Hit description=Heat shock protein DnaJ
RKYEFIGLGYAILLISVLAMVILXVYGTLXTTTCVMILGGVLFFLKRETITLLVACXYSMYXARCYVGWLGLLLRLNLSLFSRDILVQFLRDSADLKKFNGSSRYSQRSSGLQGTIF

SEQ ID NO: 13860 - protein, 177 aa, Zea mays
  Coding DNA Sequence Number=SeqID_1054
  Homolog annotation: Hit_ID=A3BFP5; Match level="QueryCoverage=15%, HitCoverage=7%, E-value=1e-07, Identity=85%"; Hit description =Putative uncharacterized protein
KIRNHQYSAAIWFWRKNRAQVLRPLQWVHVLSDGHLQELPIPMPQRSHPRTGRLPWLMVLFSPIRGNIPLCEDLSPASSFSSSQPPFKKTEESIKWAKEPMADDCICLSIRGQGGQASTFHFTQGIYNVRLGLLGCKSSQCLCNASSWHATLYSTNIDPFTGKKYPIKIFFIETRTN

SEQ ID NO: 13861 - protein, 84 aa, Zea mays
  misc_feature (1)..(39): Xaa can be any naturally occurring amino acid
  Coding DNA Sequence Number=SeqID_1055
XXXXXXXXXXXXXXXXXXXXXXXXXXXXXXXXXXXXXXXLSEPIPGWIMNEPLPTQRTLPVYLQQRWLLQVINGAIKGMKIILA

SEQ ID NO: 13862 - protein, 63 aa, Zea mays
  Coding DNA Sequence Number=SeqID_1057
TEEHLIITNPNTINSYSYRQYENAQQLKISKHTATPSKRTTIQGTSSCAGCTDRLLELIFILF

SEQ ID NO: 13863 - protein, 131 aa, Zea mays
  Coding DNA Sequence Number=SeqID_1059
LVGHYCQEERHMMKCIRTYTHEHHHVLALAYHVQLICHLVYNVHDYNEAQYWTGIRMGFRIRLEHSAQLLTGMRHHSMERTHHDRGAPCLSSTRSDNLDLPVADGLITDRWNLVLRFDQQTCNRFLESGGA

SEQ ID NO: 13864 - protein, 284 aa, Zea mays
  Coding DNA Sequence Number=SeqID_1061
  Gene Ontology: Mol. function=calcium ion binding; Cellular component =mitochondrion; Biological process=embryonic development ending in seed dormancy
  Homolog annotation: Hit_ID=Q5QN90; Match level="QueryCoverage=97%, HitCoverage=51%, E-value=1e-114, Identity=74%"; Hit description=Leaf protein-like
  Pfam annotation: Domain name=PPR; Domain location=104-138; Score =31.3; E_value=3.4e-06; Accession=PF01535.11; Description=PPR repeat
  Pfam annotation: Domain name=PPR; Domain location=139-173; Score=9.5; E_value=0.58; Accession=PF01535.11; Description=PPR repeat
  Pfam annotation: Domain name=PPR; Domain location=174-208; Score=1.1; E_value=5.8; Accession=PF01535.11; Description=PPR repeat
  Pfam annotation: Domain name=PPR; Domain location=34-68; Score=37.0; E_value=6.6e-08; Accession=PF01535.11; Description=PPR repeat
  Pfam annotation: Domain name=PPR; Domain location=69-103; Score=19.6; E_value=0.012; Accession=PF01535.11; Description=PPR repeat
  Pfam module annotation: Pfam domain module=PPR::PPR::PPR::PPR::PPR; Domain location=104-138::139-173::174-208::34-68::69-103
CNPIVYALAHAGRFGDAHKVLEKFPLYGVAPNISTFNSLVFGYCRHGDLAGASRVLKAMLGRGISPTARTYNYFFTVFARNLSIDLGMNLYVKMVSNGYAPDRLTYHLLIKMLCEANRLELTLQMLQEMRNSGFEPDLATSTMLIHFLCRRHQFEEAFAEFEQVFERGMVPQYITYRMLMRELKRLGLVKLAQKLADLMRSVPHSTKLPGGYRDKEGDDAIEKKKSILLKAQAVSDVLKDCKDPKKLRELKDPEETDVQIADRIVANIRRRVYGDISRIVPSVS

SEQ ID NO: 13865 - protein, 264 aa, Zea mays
  Coding DNA Sequence Number=SeqID_1062
  Gene Ontology: Mol. function=manganese ion binding; Cellular component=chloroplast; Biological process=isoprenoid biosynthetic process
  Homolog annotation: Hit_ID=A3C1B5; Match level="QueryCoverage=76%, HitCoverage=52%, E-value=1e-106, Identity=91%"; Hit description =Putative uncharacterized protein
  Pfam annotation: Domain name=NUDIX; Domain location=105-225; Score =71.5; E_value=2.7e-18; Accession=PF00293.18; Description=NUDIX domain
  Pfam annotation: Domain name=zf-NADH-PPase; Domain location=67-102; Score=16.7; E_value=0.0026; Accession=PF09297.1; Description=NADH pyrophosphatase zinc ribbon doma
  Pfam module annotation: Pfam domain module=NUDIX::zf-NADH-PPase; Domain location=105-225::67-102
  Subcellular localization annotation: CTP_CleavageSite=60; ConfidenceScore=5.17e-01
MLLPFLRSHPLLHHAARLSSPRTRLILRRDLLPLARSRPIRMAAHSGSGSGASPPAPAPPAAVVQKSKIKFCPACGSPTKLAIPDGDEKMRAVCSSCGGVHYENPKMVVGCLVEHDNKVLLCRRKIEPAYGLWTLPAGYLEVGESAAEGASRETLEEACADVEIISPFAQLDIPLIGQSYIIFRARLKTPNFSPGAESLECALFALDDIPFDSLAFSSIVVTLRMYTEDVRSGNIKYHYCIINKRLGASPSDLRSFDIDNHIAV

SEQ ID NO: 13866 - protein, 112 aa, Zea mays
  misc_feature (38)..(38): Xaa can be any naturally occurring amino acid
  misc_feature (69)..(69): Xaa can be any naturally occurring amino acid
  Coding DNA Sequence Number=SeqID_1063
  Homolog annotation: Hit_ID=A2YZ16; Match level="QueryCoverage=87%, HitCoverage=25%, E-value=4e-16, Identity=44%"; Hit description =Putative uncharacterized protein
PRVRPRVRPRVRSLPHFCKREGSGSSSDALDAVDCYSXDEPLREQLYSYMKQQQSLNQDSVGPRGQGSXPVEVPSPALEEAKIAEPIKAELQNLRGTGGPALSCGSIQIEGP

SEQ ID NO: 13867 - protein, 111 aa, Zea mays
  Coding DNA Sequence Number=SeqID_1064
  Gene Ontology: Mol. function=metal ion transmembrane transporter activity; Cellular component=membrane; Biological process=metal ion transport
  Homolog annotation: Hit_ID=A2XHX3; Match level="QueryCoverage=74%, HitCoverage=23%, E-value=3e-32, Identity=83%"; Hit description =Putative uncharacterized protein
KADAWTALWTISLHKIFAAIAMGIALLRMLPNRPLLSCFAYAFAFAISSPVGVGIGIIIDATTQGRVADWIFAVSMGLATGIFDLRRNQPPPEVPNNAALRVSHQVRCPIS

SEQ ID NO: 13868 - protein, 497 aa, Zea mays
  misc_feature (1)..(426): Xaa can be any naturally occurring amino acid
  Coding DNA Sequence Number=SeqID_1065
XXXXXXXXXXXXXXXXXXXXXXXXXXXXXXXXXXXXXXXXXXXXXXXXXXXXXXXXXXXXXXXXXXXXXXXXXXXXXXXXXXXXXXXXXXXXXXXXXXXXXXXXXXXXXXXXXXXXXXXXXXXXXXXXXXXXXXXXXXXXXXXXXXXXXXXXXXXXXXXXXXXXXXXXXXXXXXXXXXXXXXXXXXXXXXXXXXXXXXXXXXXXXXXXXXXXXXXXXXXXXXXXXXXXXXXXXXXXXXXXXXXXXXXXXXXXXXXXXXXXXXXXXXXXXXXXXXXXXXXXXXXXXXXXXXXXXXXXXXXXXXXXXXXXXXXXXXXXXXXXXXXXXXXXXXXXXXXXXXXXXXXXXXXXXXXXXXXXXXXXXXXXXXXXXXXXXXXXXXXXXXXXXXXXXXXXXXXXXXXXXXXXXXXXXXXXXXXXXXXXXXXXXXRSSSYYSTLPPPPHRWTKVLLRCWSCISDAATASSVAVLPGSRCGGGLDDDDDGAVSDVEHDGAATAARSM

SEQ ID NO: 13869 - protein, 219 aa, Zea mays
  Coding DNA Sequence Number=SeqID_1067
  Subcellular localization annotation: CTP_CleavageSite=77; ConfidenceScore=5.74e-01
RNPVLPASVSSRLPLRAPSDLGRSPSSLPPCRPTSSTGRRRAFPPPMPGPRASTSSGPRSALSFARRVPLLPHARAPCSKSSKVPPDPLPKSASSSISGASPQQQRASHGVCFPNARPVNSRDASSLATWTSFASCPRRAPRNPAASSNSDALRCVALARTGLTSSLYAASACRRRNPRSFNRSPCRRHASRIARRQRAQTNGMHARRESARLFALNDS

SEQ ID NO: 13870 - protein, 237 aa, Zea mays
  Coding DNA Sequence Number=SeqID_1069
SICPPKKRNSEPAHQYKMLLRSTISTMNPNSNISSNTWRASYWTMLLHHQILGFPPHISHISTHIITINHKPHVSIKEISSTRQRDLTDDYELHKSTTRHPWREVLLFPMPWERSARATIGSNKGRGVSRGMARPPGRATGDHGREPGTTGIHGQGRKLREGQDATDAGARGKSRGVEWRCGGWGRTQGLTAAITGVEQGRASACRRQRLGIGRGEDKGMGRRVVGIPAYSALLPLL

SEQ ID NO: 13871 - protein, 125 aa, Zea mays
  Coding DNA Sequence Number=SeqID_1071
QKVNHTGTKIGGNYLTGGAFGKRGLGGQTLKLGGEHETSKGRGKNTPLVWANPDLPDGVSRNQHREGKSLGGFRAPWNLTQHPGGGGRGLRAILLQKRPKSILSRPQELWCPPKASGPYTNQKFF

SEQ ID NO: 13872 - protein, 116 aa, Zea mays
  Coding DNA Sequence Number=SeqID_1072
  Subcellular localization annotation: CTP_CleavageSite=62; ConfidenceScore=5.34e-01
MPSPREQYGGTVHLFIGTGHSSCKITSMPFTFGSNSIVIHRGLNSLFIFKPVSFSAITPKLSCSQLWRCVNLRILWASPTVVPIRVRRYLFTHYTPKTLLNHVFEDLRQAEGPQQF

SEQ ID NO: 13873 - protein, 79 aa, Zea mays
  Coding DNA Sequence Number=SeqID_1074
AAKGALELEGHQAAPVDLHRQAEAVEMNYPAPVLVELAYGGEEPIVSGGACSAEEWTPRKVVGLSRPGHAVHGVYPGPP

SEQ ID NO: 13874 - protein, 61 aa, Zea mays
  Coding DNA Sequence Number=SeqID_1076
  Subcellular localization annotation: CTP_CleavageSite=45; ConfidenceScore=5.25e-01
LNQHTAWMLTEMHTSTCIYRSTCLPTTQNLFQPPRLMSNEARPGRANARQQLTSLTPPATS

SEQ ID NO: 13875 - protein, 202 aa, Zea mays
  misc_feature (28)..(28): Xaa can be any naturally occurring amino acid
  misc_feature (37)..(37): Xaa can be any naturally occurring amino acid
  misc_feature (114)..(114): Xaa can be any naturally occurring amino acid
  Coding DNA Sequence Number=SeqID_1078
  Homolog annotation: Hit_ID=A2XPJ3; Match level="QueryCoverage=97%, HitCoverage=89%, E-value=4e-64, Identity=58%"; Hit description =Putative uncharacterized protein
  Pfam annotation: Domain name=DUF1751; Domain location=1-84; Score =1.4; E_value=0.00038; Accession=PF08551.1; Description=Eukaryotic integral membrane protein (DUF175
KQVLPRAVGRSIGLMFTGKDMQPPRCRXRYLKFIILXNSIQRHSLHIKLWLLALYYVTGKESFLVTPLSGFHGCLAGFLVALKQLLPNLELPMGFLWENKGQRGVPFFGVCFSXIMAFMVPDSINFLPPLVSGMYVSWLSLRYFQRNPLAGLKGDPSDDFSFPSLFPAPIRERGERVFEERLAADNAGDPEASPRGHGPAED

SEQ ID NO: 13876 - protein, 94 aa, Zea mays
  misc_feature (46)..(46): Xaa can be any naturally occurring amino acid
  Coding DNA Sequence Number=SeqID_1079
  Gene Ontology: Mol. function=metal ion binding; Cellular component =endoplasmic reticulum lumen; Biological process=auxin mediated signaling pathway
  Homolog annotation: Hit_ID=P13689; Match level="QueryCoverage=70%, HitCoverage=32%, E-value=7e-22, Identity=78%"; Hit description=Auxin- binding protein 1 precursor
SIPVNDPPQVGNFDEPENLQVLVIKSSPPAKIFLYDDWSIPHTPAXVLKFPFVWDEDCFEPPKADLWVPSVSPNLSASPMTPRGLGSPNSQPPL

SEQ ID NO: 13877 - protein, 107 aa, Zea mays
  Coding DNA Sequence Number=SeqID_1080
  Homolog annotation: Hit_ID=Q5NA51; Match level="QueryCoverage=100%, HitCoverage=25%, E-value=4e-47, Identity=77%"; Hit description=Leaf senescence related protein-like
  Pfam annotation: Domain name=DUF231; Domain location=2-97; Score =18.4; E_value=3e-09; Accession=PF03005.6; Description=Arabidopsis proteins of unknown function
TYEPSHWGDTSQKVCEVTEQPSSEAKGNDKSEFGAILSDVVTNMKVPITVLNVTLMGAFRSDAHVGTWSYPPTILDCSHWCLPGVPDAWNELVFSYLLTNGWRNMPG

SEQ ID NO: 13878 - protein, 101 aa, Zea mays
  Coding DNA Sequence Number=SeqID_1081
FWSPGTAPQGGEGFCSLGAQKGHQVRPCAQKGGGQGPGNRRARVAGYSLAGVHGSITRDFVVQYATVITGAPRGGGVCVSNEARYEATSDCRVNVSGPGCK

SEQ ID NO: 13879 - protein, 179 aa, Zea mays
  Coding DNA Sequence Number=SeqID_1083
  Gene Ontology: Mol. function=metal ion binding; Biological process =lipid metabolic process
  Homolog annotation: Hit_ID=Q9ZTZ1; Match level="QueryCoverage=70%, HitCoverage=25%, E-value=8e-57, Identity=81%"; Hit description =Putative uncharacterized protein
  Subcellular localization annotation: CTP_CleavageSite=26; ConfidenceScore=5.25e-01
RIESNSPSTSSASAHRPRAQSPVRVRSATGDAARERRLHLLRPLRPLLPAPIGLDGIRMLDPSTSRTLRIYPLVSLTRWEVLDATIFAFWAKTIVDIEPKRIRLKSSSYTSNTMLDTVTAATVQFKEIGADARSRGAIETGKPLVQSNEKKKGFDWMFTKPVDEVKDHWVPDEVAKKCH

SEQ ID NO: 13880 - protein, 90 aa, Zea mays
  Coding DNA Sequence Number=SeqID_1084
PLCISLHHDACGVNARDPLLAEVQSMVYDHTEMNKQMHVKNEGSIKLACDEAHRQAEQVQFKTVCYLSIWWQIMGCLRRSGATVGRFRPS

SEQ ID NO: 13881 - protein, 77 aa, Zea mays
  Coding DNA Sequence Number=SeqID_1086
  Gene Ontology: Mol. function=heme transporter activity; Cellular component=chloroplast; Biological process=respiratory chain complex IV assembly
  Homolog annotation: Hit_ID=A9QBN2; Match level="QueryCoverage=100%, HitCoverage=23%, E-value=7e-19, Identity=61%"; Hit description =Cytochrome c heme attachment protein
QWLMMHVSMMSLRYAALVCGSLLSAALLIIRFRKNFDFFSIKENVFLPPFFFSEIEYLYPKSSAFEAPLFPYFLNYF

SEQ ID NO: 13882 - protein, 199 aa, Zea mays
  misc_feature (90)..(90): Xaa can be any naturally occurring amino acid
  misc_feature (132)..(132): Xaa can be any naturally occurring amino acid
  Coding DNA Sequence Number=SeqID_1087
  Homolog annotation: Hit_ID=A7BPF2; Match level="QueryCoverage=29%, HitCoverage=79%, E-value=1e-09, Identity=60%"; Hit description=LacZ alpha peptide
ERPPGQVPISRKKKKKKKKKKKKKKKKPKKIKKKKTKKKKKKKGWSPWGRNPPRGDFGGFPSPGGPLDLPFRGPISPYGGGFNISRAGVXQRGDGKNPGVPKLNRLEANPLFPSGGNTKRARPDRLSKQWPXPDGQRAPPCSGPLSAGGGGVPPRGTVTLASALAPALLVFFPSFFATLAGFPRKALNGGLLLGSQFRV

SEQ ID NO: 13883 - protein, 196 aa, Zea mays
  Coding DNA Sequence Number=SeqID_1088
  Homolog annotation: Hit_ID=Q84XA9; Match level="QueryCoverage=59%, HitCoverage=71%, E-value=9e-08, Identity=29%"; Hit description =Putative allergen I1
  Pfam annotation: Domain name=Tryp_alpha_amyl; Domain location=77-158; Score=6.4; E_value=0.06; Accession=PF00234.12; Description=Protease inhibitorseed storageLTP f
AGARRGIRALDVCGRRPSGRSFGQGQAFFCFVVVFGVLLVAATAARTGRDCWDQVERAQMLSHCQDFLDEVSDAGRCSRDVRGSSGRGGMRGSWLLEQCCDQLTEMDHDCMCEGLKAIVHEQVRLSPRSFFGGRLGTQEEGGECARMLPQLCGMGRTCYQLRAPYRALSPPAMSLLHNKLSTIATTCLYRRSSGGS

SEQ ID NO: 13884 - protein, 69 aa, Zea mays
  Coding DNA Sequence Number=SeqID_1089
ACTLLSLDDNYVHYLATYKRLETSHHKPATALHTELLNPAGIAVRDSTLYCHESIQSMACLCRYMPLIM

SEQ ID NO: 13885 - protein, 122 aa, Zea mays
  Coding DNA Sequence Number=SeqID_1091
FHPTKWGGHHRSFYKHTAKCYTSLALWVMGNITRGSKGSFYLSHTPMHALETTYHLLAWISQLLGTGCPGRFLVRLSWFSSVRAPGTSLLGAPPNSSVGLLRGLEFGFLGVCWSNERVGTTR

SEQ ID NO: 13886 - protein, 48 aa, Zea mays
  misc_feature (4)..(4): Xaa can be any naturally occurring amino acid
  Coding DNA Sequence Number=SeqID_1093
QPRXNEEWAKYLVCGVGWPRLDSLGLQYPYSFFFENIFFCPIRICNFF

SEQ ID NO: 13887 - protein, 92 aa, Zea mays
  Coding DNA Sequence Number=SeqID_1095
PQSTSFTPDCVGRGEGDSTNYIVRQHTTEKPPSEIRHPFNIQEGYATHSCRHHHGPPVVLQELPKLLAPTAVVIKREAQLPDRLTLPLCAAR

SEQ ID NO: 13888 - protein, 156 aa, Zea mays
  Coding DNA Sequence Number=SeqID_1096
  Gene Ontology: Mol. function=RNA-directed DNA polymerase activity; Biological process=RNA-dependent DNA replication
  Homolog annotation: Hit_ID=Q7XBD9; Match level="QueryCoverage=64%, HitCoverage=5%, E-value=2e-39, Identity=80%"; Hit description =Putative gag-pol
MHSRPRSLRQGQVHVGPITWEVLPQQGAGARILFTAHGGEHLRYALQLLFPAFNNATEYEALIHGLNIAISLGIKRLMVYGDSLVVISQINKEWDCSSDSMGKYCTAVRKLMTLNFDLALPLKLKHRLTLYWSGPNNKFQITQKLQKYGECLLMVR

SEQ ID NO: 13889 - protein, 134 aa, Zea mays
  Coding DNA Sequence Number=SeqID_1097
  Subcellular localization annotation: CTP_CleavageSite=56; ConfidenceScore=5.72e-01
FFFFFFFFFFFFFFFFFLVFFFFFFFFFFFFFFFFFFWKEQPWVENNFKKKPRSPIGDERWGRAPQTPLKGGPGRGRTNFLGFWKAQKRGPRGFKAPPTFFQARGDFGLWHSKIPPHYITMGGKSFFPRGEAHP

SEQ ID NO: 13890 - protein, 227 aa, Zea mays
  Coding DNA Sequence Number=SeqID_1099
  Gene Ontology: Mol. function=peptidase activity; Cellular component =anchored to membrane; Biological process=lipid transport
  Homolog annotation: Hit_ID=Q6AVM8; Match level="QueryCoverage=40%, HitCoverage=43%, E-value=2e-28, Identity=62%"; Hit description =Putative uncharacterized protein OJ1119_H02.15
  Pfam annotation: Domain name=Tryp_alpha_amyl; Domain location=3-79; Score=41.9; E_value=2.3e-09; Accession=PF00234.12; Description =Protease inhibitorseed storageLTP f
EECFNAVLNMSDCLTYVTAGSTTRQPDKPCCPEFAGLLESHPVCLCQLLAGGAESYGVSVDYKRALALPGICRLTAPPCFRRAQFSGLPIPRGIGCLHAAARCQALSHIFLAATRKCRAKHAGAGLSQIPSKPRCRDAVKRRRALIHPPSPVTRRPPGIMFLAPSPQKLCSPARSFYNQDLVDSLPSIYSFTHTNIMLCAIYEFLYIYEYYITHRYKTQLIAQAKKK

SEQ ID NO: 13891 - protein, 79 aa, Zea mays
  Coding DNA Sequence Number=SeqID_1100
  Gene Ontology: Mol. function=RNA-directed DNA polymerase activity; Cellular component=chromatin; Biological process=RNA-dependent DNA replication
  Homolog annotation: Hit_ID=A5AGW4; Match level="QueryCoverage=62%, HitCoverage=4%, E-value=9e-09, Identity=56%"; Hit description =Putative uncharacterized protein
DLFSTLSRGLVFISNANPACSCVYICKFQFRPIHPPLGDYHKVSPTKGVQRFGIKGKLAPRYIGPYEIIEACGPVAYKL

SEQ ID NO: 13892 - protein, 433 aa, Zea mays
  Coding DNA Sequence Number=SeqID_1101
  Gene Ontology: Mol. function=adenosylhomocysteinase activity; Cellular component=melanosome; Biological process=one-carbon compound metabolic process
  Homolog annotation: Hit_ID=UPI000051A269; Match level="QueryCoverage =100%, HitCoverage=100%, E-value=0.0, Identity=81%"; Hit description =PREDICTED: similar to Adenosylhomocysteinase at 13 CG11654-PA
  Pfam annotation: Domain name=AdoHcyase; Domain location=5-432; Score =730.2; E_value=1.4e-216; Accession=PF05221.7; Description=S-adenosyl- L-homocysteine hydrolase
  Pfam annotation: Domain name=AdoHcyase_NAD; Domain location=192-353; Score=393.3; E_value=3.8e-115; Accession=PF00670.12; Description=S -adenosyl-L-homocysteine hydrolase, NAD binding domain
  Pfam module annotation: Pfam domain module=AdoHcyase::AdoHcyase_NAD; Domain location=5-432::192-353
MSGKPAFKVADISLADWGRKEIMLAENEMPGLMSLRRKYKESLPLKGARIAGCLHMTVQTAVLIETLVALGAEVQWSSCNIFSTQDHAAAAIAKTGVPVYAWKGETDDEYIWCIEQTLVFKDGQPLNMILDDGGDLTNLVHEKYPQYLANIKGISEETTTGVHNLYKMMTAGKLKVPCINVNDSVTKSKFDNLYGCRESLIDGIKRATDVMLAGKVCVVAGYGDVGKGCAQSLRAFGGRVIITEIDPINALQASMEGYEVVTMDEASKEGQIFVTTTGCKDIITGKHFLSMRNDSIICNIGHFDCEIEVTWLEKNAVEKINIKPQVDRYKLANGHHIILLAEGRLVNLGCAMGHPSFVMSNSFTNQTLAQIELWTKPGQYSVGVHMLPKKLDEQVAALHLDHLGVKLTKLTADQAAYLGIPAEGPYKPDHYRY

SEQ ID NO: 13893 - protein, 229 aa, Zea mays
  Coding DNA Sequence Number=SeqID_1102
  Gene Ontology: Mol. function=transcription factor binding; Cellular component=intracellular; Biological process=multicellular organismal development
  Homolog annotation: Hit_ID=Q9Y295; Match level="QueryCoverage=100%, HitCoverage=62%, E-value=1e-103, Identity=86%"; Hit description =Developmentally-regulated GTP-binding protein 1
  Pfam annotation: Domain name=Dynamin_N; Domain location=67-176; Score= -40.8; E_value=0.022; Accession=PF00350.13; Description=Dynamin family
  Pfam annotation: Domain name=MMR_HSR1; Domain location=65-185; Score =120.2; E_value=6.2e-33; Accession=PF01926.13; Description=GTPase of unknown function
  Pfam module annotation: Pfam domain module=Dynamin_N::MMR_HSR1; Domain location=67-176::65-185
MSGTLAKIAEIEAEMARTQKNKATAHHLGLLKARLAKLRRELITPKGGGGGGPGEGFDVAKTGDARIGFVGFPSVGKSTLLSNLAGVYSEVAAYEFTTLTTVPGVIRYKGAKIQLLDLPGIIEGAKDGKGRGRQVIAVARTCNLILIVLDVLKPLGHKKIIENELEGLGIRLNSKPPNIGFKKKDKGGINLTATCPQSELDAETVKSILAEYKIHNADVTLRSDATADD

SEQ ID NO: 13894 - protein, 113 aa, Zea mays
  Coding DNA Sequence Number=SeqID_1103
  Gene Ontology: Mol. function=potassium ion transmembrane transporter activity; Cellular component=integral to membrane; Biological process=potassium ion transport
  Homolog annotation: Hit_ID=Q1T759; Match level="QueryCoverage=82%, HitCoverage=11%, E-value=1e-16, Identity=54%"; Hit description =Potassium transporter
IGFDRVEGIELPPGAPAPAVVKKQVRFAVAPPRSPGVDKTVLEKLPKLFKAPEAGPGFILGPSHVKTKPGWSILKRLPVGVGYNFLRGNSPGPNVVLGVPPGSLLKVGMVYVL

SEQ ID NO: 13895 - protein, 104 aa, Zea mays
  Coding DNA Sequence Number=SeqID_1104
FSYNNSIKQEVIWNCGSSAPACRTLVYWSLLTEHGRVVSGARPSVQTTFLAVDSFPLAIVRRVSSCTYVCVYATLRWRMLFLMPLSLCVHHRRVRLFFGLSLPQ

SEQ ID NO: 13896 - protein, 92 aa, Zea mays
  Coding DNA Sequence Number=SeqID_1106
  Gene Ontology: Mol. function=nucleotide binding; Biological process =defense response
  Homolog annotation: Hit_ID=Q9AT65; Match level="QueryCoverage=98%, HitCoverage=7%, E-value=8e-34, Identity=78%"; Hit description=Rust resistance protein Rp1-kp3
FKKKDDIGTEIPCTARHLFFHVQSIKKHKQLLRKLYHLRTIRLIDPLMDGPSDIFDGILRNQTKLRVLSLSFYSSSKLPESIGELKRLRYLC

SEQ ID NO: 13897 - protein, 278 aa, Zea mays
  misc_feature (1)..(57): Xaa can be any naturally occurring amino acid
  Coding DNA Sequence Number=SeqID_1107
XXXXXXXXXXXXXXXXXXXXXXXXXXXXXXXXXXXXXXXXXXXXXXXXXXXXXXXXXWRPSPSSSSSQRRPHSSLRSAPFLVPPAARSYRPSPFSPTSLPSFFPVRAQEYGASHGALLPGLPCAGQPWPSSPSPPALHGRGSPSSPSSSQSAGSSPAAMDAQAGKRWNSRSLWFGWSSASLCAQPPQLGALAAGEQQLPIHGATAIFPFLPLGQPWRSASDPSSSHRSSRARPTSPHCAAPRRNAAVPAAPTPSLASSLLALRACHVFGDLSKWGVEQ

SEQ ID NO: 13898 - protein, 149 aa, Zea mays
  Coding DNA Sequence Number=SeqID_1109
  Gene Ontology: Mol. function=DNA binding; Cellular component=nucleus; Biological process=regulation of transcription
  Homolog annotation: Hit_ID=Q6YTS9; Match level="QueryCoverage=81%, HitCoverage=38%, E-value=1e-39, Identity=67%"; Hit description =Proline-rich protein family-like
MADEPPPPPLARKSAPAQPWSHVETTHLIDAYEERWTALRRGQLKAHQWEEVAAEVAARCAATPGVVAQRKTGTQCRHKLEKLRKRYRTEGARPVTSLWPYFRRMDRLERGPLAVASSAYPAATGSPPAADGDEQGEEEDYEVEEHEAE

SEQ ID NO: 13899 - protein, 178 aa, Zea mays
  misc_feature (1)..(1): Xaa can be any naturally occurring amino acid
  Coding DNA Sequence Number=SeqID_1110
  Gene Ontology: Mol. function=structural constituent of myelin sheath; Cellular component=myelin sheath; Biological process=central nervous system development
  Homolog annotation: Hit_ID=P02686; Match level="QueryCoverage=99%, HitCoverage=59%, E-value=4e-94, Identity=93%"; Hit description =Myelin basic protein
  Pfam annotation: Domain name=Myelin_MBP; Domain location=27-177; Score=332.3; E_value=8.4e-97; Accession=PF01669.7; Description =Myelin basic protein
XAATSESLDVMASQKRPSQRHGSKYLATASTMDHARHGFLPRHRDTGILDSIGRFFGGDRGAPKRGSGKDAHHPARTAHYGSLPQKSQHGRPQDENPVVHFFKNIVTPRTPPPSQGKGRGLSLSRFSWGAEGQKPGFGYGGRAPAHKGLKGTDAQGTLSKIFKLGGRDSRSGSPMARR

SEQ ID NO: 13900 - protein, 165 aa, Zea mays
  Coding DNA Sequence Number=SeqID_1111
  Gene Ontology: Cellular component=cellulose and pectin-containing cell wall
  Homolog annotation: Hit_ID=Q2QP50; Match level="QueryCoverage=47%, HitCoverage=65%, E-value=3e-26, Identity=69%"; Hit description=Rapid ALkalinization Factor family protein, expressed
  Pfam annotation: Domain name=RALF; Domain location=100-165; Score =122.9; E_value=9.3e-34; Accession=PF05498.2; Description=Rapid ALkalinization Factor (RALF)
  Subcellular localization annotation: CTP_CleavageSite=61; ConfidenceScore=5.32e-01
SRAQQGGQTGLPQAITTTHKDSSEQVTHRLLSPVAQRAFPHFTRLGAMAKLALALLLLLAVAASASASSGSHLDLDLGFLSSGDRRRECRGTVAECLAEESDEEGLDLAGSHRRALYGGGYISYGALRRDNVPCSRRGASYYNCRPGGQANPYHRGCSRITRCRG

SEQ ID NO: 13901 - protein, 119 aa, Zea mays
  Coding DNA Sequence Number=SeqID_1112
  Gene Ontology: Mol. function=calcium-dependent phospholipid binding; Cellular component=proteinaceous extracellular matrix; Biological process=skeletal development
  Homolog annotation: Hit_ID=UPI0000E21E5E; Match level="QueryCoverage =100%, HitCoverage=28%, E-value=8e-53, Identity=88%"; Hit description= PREDICTED: similar to ANXA2 protein
  Pfam annotation: Domain name=Annexin; Domain location=51-116; Score =80.1; E_value=7.4e-21; Accession=PF00191.10; Description=Annexin
GRSHFSAHGPASVKMSTGHGILCKLSLEGDHSTPPSAYGSVKAYTNFDAERDALSIETAIKTRGVDDVTIVNILTNRSNAQRQDIAFAYHRRTKKELSSTLKSALSGHLETVILGLLKT

SEQ ID NO: 13902 - protein, 132 aa, Zea mays
  misc_feature (74)..(74): Xaa can be any naturally occurring amino acid
  misc_feature (89)..(89): Xaa can be any naturally occurring amino acid
  misc_feature (103)..(103): Xaa can be any naturally occurring amino acid
  misc_feature (122)..(122): Xaa can be any naturally occurring amino acid
  Coding DNA Sequence Number=SeqID_1113
  Homolog annotation: Hit_ID=A3AH64; Match level="QueryCoverage=98%, HitCoverage=7%, E-value=9e-30, Identity=56%"; Hit description =Putative uncharacterized protein
KPRLGTLGLEWRPPCGNFAGGPTYNGTTGGFQTIPVIDPDWGEPVSEITNFIELEPENEVISYDTDSGYNGMDXYSSEGEQGIIRGGSXSGPSYSRGEIGADXWMVLNLRRSRRKEEKSGAXLVPSSGRRGI

SEQ ID NO: 13903 - protein, 161 aa, Zea mays
  Coding DNA Sequence Number=SeqID_1114
  Gene Ontology: Mol. function=protein serine/threonine kinase activity; Cellular component=integral to plasma membrane; Biological process=protein amino acid phosphorylation
  Homolog annotation: Hit_ID=A2ZWR0; Match level="QueryCoverage=65%, HitCoverage=12%, E-value=1e-44, Identity=81%"; Hit description =Putative uncharacterized protein
ICLILFKSDINYCLLAYTGSKRKKAIIAGTLSSLLFLCLVILTFFSAYKYGMLPFKSKDEPRIESFLQKNGNLHPKRYTYADVKRMTRSFTEKLGQGGFGAVYRGSLHDGRQVAVKMLKDTKGDGEEFMNEVASISRTCHVNIVTLTGFCLQGSKRALVYE

SEQ ID NO: 13904 - protein, 91 aa, Zea mays
  misc_feature (81)..(91): Xaa can be any naturally occurring amino acid
  Coding DNA Sequence Number=SeqID_1115
CTRGGGAGGIGTRTCIPWACASSSGVSKAKKLRSMLVGNKHHPYIRQVNCAFCLHITTRSSKDVYTCGELLWYPVKLYAQXXXXXXXXXXX

SEQ ID NO: 13905 - protein, 83 aa, Zea mays
  Coding DNA Sequence Number=SeqID_1117
YPIGKSTTMIQLEKQTHKRREEIQTGIFVRNCLHESTNYTIDTLNFSDINRVSLTTINRENIYCARVLCVVTTACLCVQLLIN

SEQ ID NO: 13906 - protein, 74 aa, Zea mays
  Coding DNA Sequence Number=SeqID_1119
RNDKRVGHTHGPSLLNVLIYVLSRKLYEYIVLVYSIMSSHTRPTTRNRFEMRSHKKGIDLCRTPYVGKQITLNT

SEQ ID NO: 13907 - protein, 154 aa, Zea mays
  misc_feature (140)..(140): Xaa can be any naturally occurring amino acid
  Coding DNA Sequence Number=SeqID_1121
  Gene Ontology: Mol. function=structural constituent of ribosome; Cellular component=intracellular; Biological process=protein modification process
  Homolog annotation: Hit_ID=Q8MY15; Match level="QueryCoverage=98%, HitCoverage=97%, E-value=1e-56, Identity=71%"; Hit description =Ubiquitin
  Pfam annotation: Domain name=Ribosomal_S27; Domain location=98-144; Score=112.4; E_value=1.4e-30; Accession=PF01599.9; Description =Ribosomal protein S27a
  Pfam annotation: Domain name=ubiquitin; Domain location=3-71; Score =138.0; E_value=2.6e-38; Accession=PF00240.13; Description=Ubiquitin family
  Pfam module annotation: Pfam domain module=Ribosomal_S27::ubiquitin; Domain location=98-144::3-71
FVKTLTGKTITLEVESSDTIDNVKAKIQDKEGIPPDQQRLIFAGKQLEDGRTLADYNIQKESTLHLVLRLRGGAKKRKKKPYTKPKKIKHKHKKVKLAVLQFYKVDGSGKVQRLRKECPNATCGAGTFMASHFDRHYCGXCGLTYVYQKEGAQA

SEQ ID NO: 13908 - protein, 109 aa, Zea mays
  misc_feature (57)..(57): Xaa can be any naturally occurring amino acid
  Coding DNA Sequence Number=SeqID_1122
SSAPCCCRCHHGSAAHGRHRFVGSGRRGCGGCAGVGVPLPSDHDLRRRVSSRYIVKXLGAASTRLEQTRCATEIKKKAVGTPPVSLLLCCMFSYILCHVFRLKNELSWE

SEQ ID NO: 13909 - protein, 109 aa, Zea mays
  Coding DNA Sequence Number=SeqID_1123
QSNPTPVRRRFRERSGMDGEAIRMGGGNLAPAYLSGAATRTLTDLIPHDAHKVQHLDPILVMFNPDSTVLELVGSTSVPAKGAAGYINDTAHPALTVVHQARTVHINAL

SEQ ID NO: 13910 - protein, 65 aa, Zea mays
  Coding DNA Sequence Number=SeqID_1125
  Subcellular localization annotation: CTP_CleavageSite=42; ConfidenceScore=5.22e-01
FPCQTKAAGTGSNAVPHAITNLTRLHRGKNSRNSLWHWPYPKAVSNKGKNMAGAPQKTLPIFPEG

SEQ ID NO: 13911 - protein, 112 aa, Zea mays
  misc_feature (1)..(2): Xaa can be any naturally occurring amino acid
  Coding DNA Sequence Number=SeqID_1127
  Subcellular localization annotation: CTP_CleavageSite=28; ConfidenceScore=5.11e-01
XXREMRRRGVLGSSGTARTGHLRGPRVSVDARAGFPRRWVAKMSARRRGPACLMTLKHRQPSWDVPWDTRTGYAVARPTLGPVPNQFLVGVGTSPRICRARGPMSPHHHSLL

SEQ ID NO: 13912 - protein, 143 aa, Zea mays
  Coding DNA Sequence Number=SeqID_1129
  Gene Ontology: Mol. function=microtubule motor activity; Cellular component=microtubule associated complex; Biological process =microtubule-based movement
  Homolog annotation: Hit_ID=Q5JKW1; Match level="QueryCoverage=88%, HitCoverage=13%, E-value=3e-52, Identity=82%"; Hit description =Putative kinesin heavy chain
  Pfam annotation: Domain name=Kinesin; Domain location=2-138; Score= -138.3; E_value=4.1e-06; Accession=PF00225.13; Description=Kinesin motor domain
HRAGKPGATDAAHAAAQVDVFSDIQPLIRAVLDGGKGCIFAYGQTGSGKTYTMSGPGTSKEDWGGNYRAVNDLRDISLRRRNAGSYEGGVQMVEIYNEQVRDRLSNDIAQKRLGIGRTSQPNGLVGPDARGHPVKSTLDVLEL

SEQ ID NO: 13913 - protein, 147 aa, Zea mays
  Coding DNA Sequence Number=SeqID_1130
PVRIFPGCEPTASRGLYTVADDSYWEDTHLYIVGFVQRCADDSCLGDHRKGDPIYSGQLREKYPPPFLDELYTLFGRTTRNKGNLISAGGVREPPRTFGSQDTPDDGVGCSNIRSSSKRPIREATMDSHPKKKMSLEEHIANISESI

SEQ ID NO: 13914 - protein, 125 aa, Zea mays
  misc_feature (79)..(79): Xaa can be any naturally occurring amino acid
  Coding DNA Sequence Number=SeqID_1132
  Gene Ontology: Mol. function=aspartic-type endopeptidase activity; Cellular component=chromatin; Biological process=chromatin assembly or disassembly
  Homolog annotation: Hit_ID=Q8W1D1; Match level="QueryCoverage=100%, HitCoverage=8%, E-value=5e-51, Identity=75%"; Hit description=Gag-pol
DVCQRGKTEHRMLAGLLHPIKIPKWKWEEIGVDIIVGLPRTPKGYDLIWVIVHRLTKVAHFILVKTTYKGSLSAELYMXRIVCLHGVPKKIVSDRGSQITSRFWRSFHENVDTKLSFSSVYHPQT

SEQ ID NO: 13915 - protein, 76 aa, Zea mays
  Coding DNA Sequence Number=SeqID_1133
FFFFFGQTKPLLYMECLQNVVCRRWLTRGVNNDDAQQTLIRVNNIYCGGLRPSGRSVATPTRHLYVEFRSQTQHGV

SEQ ID NO: 13916 - protein, 65 aa, Zea mays
  Coding DNA Sequence Number=SeqID_1135
  Subcellular localization annotation: CTP_CleavageSite=32; ConfidenceScore=5.14e-01
DSQPWISTDALGSLGFSMMFTWRALPHRLRLRQAEGWLRRVGLRIWFGASSRGERMRRERSLACF

SEQ ID NO: 13917 - protein, 116 aa, Zea mays
  misc_feature (60)..(60): Xaa can be any naturally occurring amino acid
  misc_feature (81)..(81): Xaa can be any naturally occurring amino acid
  Coding DNA Sequence Number=SeqID_1137
  Gene Ontology: Mol. function=oxidoreductase activity; Biological process=metabolic process
  Homolog annotation: Hit_ID=Q5KIM7; Match level="QueryCoverage=100%, HitCoverage=43%, E-value=8e-23, Identity=47%"; Hit description =Putative uncharacterized protein
MNITSLFNVKGKVGLVTGGGRGIGFMIVQGFVENGATVIISSRNAKECNKIAEDLINRGXGTCYAIPADLAKMEECVRLAXEIAKEESYLYILVNNSGAGWREEYETYPECAFDKL

SEQ ID NO: 13918 - protein, 103 aa, Zea mays
  Coding DNA Sequence Number=SeqID_1138
  Gene Ontology: Mol. function=protein binding; Cellular component=RCAF complex; Biological process=female meiosis chromosome segregation
  Homolog annotation: Hit_ID=Q4X0D4; Match level="QueryCoverage=79%, HitCoverage=57%, E-value=3e-38, Identity=98%"; Hit description =Histone H4.2
  Pfam annotation: Domain name=CBFD_NFYB_HMF; Domain location=28-91; Score=6.4; E_value=0.041; Accession=PF00808.13; Description=Histone -like transcription factor (CBFNF-Y) and archaeal histone
  Pfam annotation: Domain name=Histone; Domain location=25-94; Score =71.6; E_value=2.5e-18; Accession=PF00125.14; Description=Core histone H2AH2BH3H4
  Pfam annotation: Domain name=TAF; Domain location=28-92; Score=-6.7; E_value=0.024; Accession=PF02969.8; Description=TATA box binding protein associated factor (TAF)
  Pfam module annotation: Pfam domain module=CBFD_NFYB_HMF::Histone::TAF ; Domain location=28-91::25-94::28-92
MTGRGKGGKGLGKGGAKRHRKILRDNIQGITKPAIRRLARRGGVKRISAMIYEETRGVLKSFLEGVIRDAVTYTEHAKRKTVTSLDVVYALKRQGRTLYGFGG

SEQ ID NO: 13919 - protein, 84 aa, Zea mays
  Coding DNA Sequence Number=SeqID_1139
  Gene Ontology: Mol. function=RNA binding
  Homolog annotation: Hit_ID=A7P4I3; Match level="QueryCoverage=80%, HitCoverage=11%, E-value=1e-17, Identity=71%"; Hit description =Chromosome chr4 scaffold_6, whole genome shotgun sequence
ACWGHGSTSIFQDYRPRIGDIPLNLPAGDTSTERTVHIDGTQEQIEHAKQLVAEVTTENRARNPMSGGYSQQGYHPPRPQSNWG

SEQ ID NO: 13920 - protein, 194 aa, Zea mays
  misc_feature (1)..(1): Xaa can be any naturally occurring amino acid
  Coding DNA Sequence Number=SeqID_1140
  Gene Ontology: Mol. function=endonuclease activity; Cellular component=nucleus; Biological process=regulation of transcription, DNA-dependent
  Homolog annotation: Hit_ID=Q5Z4Y8; Match level="QueryCoverage=92%, HitCoverage=22%, E-value=2e-82, Identity=86%"; Hit description =Regulator of nonsense transcripts 1-like
XIRDENNNTYNPKIVRIGVKALHSVKAVSMDYLIQQKLSGVDRTLDGGRRGAGEYDRIRASILDEAAIVFSTLSFSGSSIFSRMTRAFDVVIIDEAAQAVEPATLIPLIHGCRQIFLVGDPVQLPATVISQTAQKLGYGTSLFKRFQAAGFPVQMLKIQYRMHPEISTFPSKEFYEGVLQDFFFFFLINMEQPC

SEQ ID NO: 13921 - protein, 59 aa, Zea mays
  Coding DNA Sequence Number=SeqID_1141
KMQFEHIPKMRRNSFIYKFYLVLYNILFVPLFPIFLSISRFKDSNSYFELQISKYQNSY

SEQ ID NO: 13922 - protein, 222 aa, Zea mays
  misc_feature (1)..(23): Xaa can be any naturally occurring amino acid
  Coding DNA Sequence Number=SeqID_1143
  Subcellular localization annotation: CTP_CleavageSite=44; ConfidenceScore=5.19e-01
XXXXXXXXXXXXXXXXXXXXXXXHGQEKFLPSMAPQISSRRSPCSSIPSARRRCLCSPFHGATPRQNLARLCARLQEQAPPCISHGTWNLQVQATNTFPMAPLCISSPGDYRFSLQFPPLCSLRIGTSSPRPALVFPCVFFHAHSPVGPAALPNQASPMALLPPGWSSTPQRLESDPLSVPLNFKLPWPFFLPCRNSPWALEAPSSRWSTSRLDRHFFHGWL

SEQ ID NO: 13923 - protein, 75 aa, Zea mays
  Coding DNA Sequence Number=SeqID_1145
NDCVAHKRARSHSTPPPYMRVYNLKFQWTLDSSICHVRTYLHQAQARQRRAPGQRACDTRGRLGAHALVCYGRVG

SEQ ID NO: 13924 - protein, 150 aa, Zea mays
  Coding DNA Sequence Number=SeqID_1147
MKAILAIALCLIFVAAASAHVTVVGARGPGINSPGYIKSNSMDPCGNGTYDMTKAINVTANDIFPVTWALFVNHNIPPAVAGSINFYWGLEGNAVIDPVPVTTQPANTYYTTYFVVPDVFDVATLQIEYNTNGAAENYFQCIDFFIAPSA

SEQ ID NO: 13925 - protein, 203 aa, Zea mays
  Coding DNA Sequence Number=SeqID_1149
  Gene Ontology: Mol. function=signal transducer activity
  Homolog annotation: Hit_ID=Q6K493; Match level="QueryCoverage=24%, HitCoverage=8%, E-value=1e-17, Identity=89%"; Hit description =Putative uncharacterized protein OJ1595_D08.27-1
AAGLRRWEIGVVASRIGQLYYARYLRAAEPRSLVGAYVFYEAIYNRDYFGAAAAAVGTDGGGAITGIIALCVVLKPPRHHRPSRTFVRQPSISLRIRAPPHAIPGNPPLPPLTQHPLLAPAALASRIRPPRLLPQPTSLQQLQFPPASSGLSRRLLVQIRPWSAPPASPSSKAPSCSRARGLALGPGPGSPSPASGLRGEREG

SEQ ID NO: 13926 - protein, 75 aa, Zea mays
  Coding DNA Sequence Number=SeqID_1150
  Homolog annotation: Hit_ID=A7Q4A5; Match level="QueryCoverage=100%, HitCoverage=17%, E-value=1e-14, Identity=48%"; Hit description =Chromosome chr9 scaffold_49, whole genome shotgun sequence
  Pfam annotation: Domain name=DUF1666; Domain location=1-75; Score= -133.4; E_value=0.0029; Accession=PF07891.2; Description=Protein of unknown function (DUF1666)
ELLKNRKGRVSETWPGAVEEAQLLLALIDVKVVSRVLRVGKLSREQLPWREEKLSKVGLTENRLRRDGSPILFPC

SEQ ID NO: 13927 - protein, 401 aa, Zea mays
  misc_feature (50)..(50): Xaa can be any naturally occurring amino acid
  Coding DNA Sequence Number=SeqID_1151
  Homolog annotation: Hit_ID=Q7F0P6; Match level="QueryCoverage=29%, HitCoverage=82%, E-value=1e-26, Identity=61%"; Hit description =Putative uncharacterized protein P0039H02.135
YSSAANLLSIPYLCVLNSPSTKSLHPIIVSGGEGKRREGDGGGDGHGFPXLSRRELQALCKRNGVRANMTNAAMAEALQGLTSVDGVDEIGTTLCLPTATPGRSAMKSAAKMVAVEEQQHGSPLPRGRRVSVKSPEAIRMEVGGEDEMKENVKTPGVVLRSTRRGIRATPAPLPTPVPASSARATARRTAVRKTGEVAPTPATRRRTASRKAAGAVEADRHAEDVSEDKTSKMTRALDQEAEVVAVASKEEKGQQDEPRAALSDVKCDDPKGEEKVQQEEPKAVVLDVKCDGPEQEEVVQFLEGDNKVEEVEEGEEVDSSDATTGSAAVLGNSCNDPNVEEVVAVMEEQFTEPHEGIVKEQDPISVDRSASVEVMDDSPFLGVIEKKHDASFEDCEDLADF

SEQ ID NO: 13928 - protein, 103 aa, Zea mays
  Coding DNA Sequence Number=SeqID_1152
SNFKQIEPCHHNLLLRTQHQSCHPLHSTPVGRGEWGHLHTISNSQQNYDQWVQKCPHLAQELKLFIKCVKAHIRSFFKRRHTTKVGRAQICVGIPCQFLMADL

SEQ ID NO: 13929 - protein, 103 aa, Zea mays
  Coding DNA Sequence Number=SeqID_1154
  Gene Ontology: Mol. function=structural constituent of ribosome; Cellular component=ribonucleoprotein complex; Biological process =translation
  Homolog annotation: Hit_ID=A6R3H7; Match level="QueryCoverage=100%, HitCoverage=100%, E-value=9e-35, Identity=75%"; Hit description=60S ribosomal protein L36
  Pfam annotation: Domain name=Ribosomal_L36e; Domain location=3-101; Score=183.7; E_value=4.8e-52; Accession=PF01158.8; Description =Ribosomal protein L36e
MAKERSGLVVGLNKGHKTTPIETKARISRTKGRLSRRTAFVRDIVKEVAGLAPYERRVVELLRNSQDKRARKLAKKRLGTIGRAKAKVDEMQKVIAEARRAGH

SEQ ID NO: 13930 - protein, 92 aa, Zea mays
  misc_feature (53)..(53): Xaa can be any naturally occurring amino acid
  Coding DNA Sequence Number=SeqID_1155
  Gene Ontology: Mol. function=phosphoric diester hydrolase activity; Cellular component=nucleus; Biological process=DNA repair
  Homolog annotation: Hit_ID=Q7XHY3; Match level="QueryCoverage=95%, HitCoverage=13%, E-value=5e-37, Identity=81%"; Hit description =Putative tyrosyl-DNA phosphodiesterase
RTHGRCSIEGYAPGSCSPRPQTNVERDFLKKYWARWKADHVGRCRAMPHIKTXTRYSGQNMAWLLLTSAHLSKAAWRALQNINTQLMIRSYE

SEQ ID NO: 13931 - protein, 144 aa, Zea mays
  Coding DNA Sequence Number=SeqID_1156
  Homolog annotation: Hit_ID=A7P5Z9; Match level="QueryCoverage=84%, HitCoverage=10%, E-value=4e-38, Identity=61%"; Hit description =Chromosome chr4 scaffold_6, whole genome shotgun sequence
MELLTMLILQVYSGYAVRCKDPISAHEMTHMEVQVCNNTKEIIRMNLNISCKDVAGQNCFDENSATVLWAGVLSDIHLEVPPLQEVVHPFSMYFLVPGDYTIQAASVIIDPTDVLRARAKAESPDEPILCRGSPFRIPGSRYRV

SEQ ID NO: 13932 - protein, 68 aa, Zea mays
  Coding DNA Sequence Number=SeqID_1157
  Gene Ontology: Mol. function=structural constituent of ribosome; Cellular component=ribonucleoprotein complex; Biological process =translation
  Homolog annotation: Hit_ID=A8N1T0; Match level="QueryCoverage=79%, HitCoverage=14%, E-value=5e-20, Identity=90%"; Hit description =Putative uncharacterized protein
  Pfam annotation: Domain name=Ribosomal_S28e; Domain location=1-68; Score=145.3; E_value=1.7e-40; Accession=PF01200.9; Description =Ribosomal protein S28e
MDSSKAPVKLVKVTRVLGRTGSRGGVTQVRVEFMDDTTRSIIRNVKGPVREEDILVLLESEREARRLR

SEQ ID NO: 13933 - protein, 63 aa, Zea mays
  Coding DNA Sequence Number=SeqID_1158
EFAPKVIRIEGASHSRRDDLPHSEFISNPNPKCSACSKAIIFRFCLFTPLGDSQNSMCYIICV

SEQ ID NO: 13934 - protein, 40 aa, Zea mays
  Coding DNA Sequence Number=SeqID_1160
FSPHTLLLDVVIVIMDIFNLRGRPAVPHDPYIYRYKYIYS

SEQ ID NO: 13935 - protein, 2002 aa, Zea mays
  Coding DNA Sequence Number=SeqID_1162
  Gene Ontology: Mol. function=helicase activity; Cellular component =chromatin; Biological process=viral genome replication
  Homolog annotation: Hit_ID=Q2R0Z1; Match level="QueryCoverage=87%, HitCoverage=87%, E-value=0.0, Identity=58%"; Hit description=AT hook motif-containing protein, putative
  Pfam annotation: Domain name=DUF889; Domain location=1117-1373; Score= 325.0; E_value=1.4e-94; Accession=PF05970.5; Description=Eukaryotic protein of unknown function (DUF889)
MPDSPCVRVARCHEAKRPRHSAVAHDAYPERSYYGGPEHVCPYCHAVFWFQEHVKNESCSTQRKIVYNLCCKGGKVNLKPFEHPPPLLANLLRFDGGTRSRRFLRLIRSYNSLFAFTSFGAAIDKTINNGTAPYVFKINGVVHHKIGTLLPQRGTQPKFAQLYTYDTEHETQNRLGMFETDDGAGGQPDPEMASSLLDMLNENNSLVKAFRYARERLEREGDQKITLRLLGCNTRHDVQYNLPSNGEIAAIIVGNYTAGEYTYDVLVHDRECGLKHVSCLHPAYMALRYPLLFPYGEHGFHLGIRYFGADDVGSSKRKYVTMLEFVRRHLHYRLDEPNPYTCYGRLSDQIDVDVYSTIEGNMLQFIASHQSDLRSETVQGIADAIDKGSVHADSIGGRVVVPASFTCGRRYHVTNYQDAMAICRVYGPPDLFVTFTCNTKWREIADALRFEPGQQPCDRSDLVVRVFHMKVNEFIADIREGKTFGSILAVLYTVEFQKRGLPHIHCLVWLADGNKEFSASIVDIFICAEIPDIAVDPLGFALVDEFMMHGPCGADNRRCPCMKNDKCNKNFPKPFQDETILDGFGFTIYRLKPDGRHVLKNGVRLDNRNIVPYNTHLLKKYNAHINVEWCNKSNMIKYLFKYVTKGIDRAKVYFEITANTSNASPGAQIAPPNEIQEYINARYLSTCEALWRAFEYDIHFRVPSVERLVVHLPGLNHVLYEPGADLHALLASSAAKNTMLTEWFETNLRHEQARCLTYCDFPKKWTWDASARCWKSRSRCTKIGRMYYVHPTAGELYYLRMLLMIVKGSTSYVDIRTYNSQVYDTFRDACEARGLLESDNEWKMLFDEAIISTSSYQLRQLFVTIVMFCPVSNVRALFDTYWLYFTDDIGRQLRDALGNPNYNIPQEQLMSLLIRKLSDAFANSGGNINDYGLPKIDVQCAFVDENRLINDEIDPDPLMMSMHADSLVTQLNADQRTVYDTIVGRVYSSSPGFFFVCGRGGTGKTFLWNTIIARLRSEKKIVLAMASSGVASLLFPKGRNAHSRFKIPFDVNDASTCNVNRGTMLAELIQVSSLIIWDEAPMTHRWCFEALDKTMRDILSEHTPSNALLPFGGKPVVLGGDFRQILPVVRKGSRSSIVNASITNSNLWRHVVLLRLRTNMRLFDPSLQVDARDELDMFARWVLSVGDGTLPAERRASEREAMWITIPEDLLLRVEGDKVAALVSKVYPDFLLNYRDPTYLSLRAIVCPNNATVDDVNNYVLSLLPGDTIQYLSCDVIAKSSENIPDFDVLYPTEFLNLIDANNFPTHKLELKKGAIVMLLRNLNQNKGLCNGTRLLVTQLGQRILHCVALTGSNVREEVLIPRIALNTTDMGDVLIPELQRGNTSVTICARVSRLWDFCDPQDEAKLLHSDMVLLDEEVQHLHAYLFGKGKVALGNGIHAAIFPLVIQKFKPLIKEGVVYNITYFRVRASNNLYKPVFNENMITFTNWTKLEEVVEVPPAFPVLTYSLTSIDQLHLCVDHREYYTDGLCLSKGSPCKWYINPDVPEAGALMASARKAHSPIKWNEVLSSNQPMPRVPEEQKIAYIRDLHPFENKDREFLVTVTVKKIGDRWWYNACKKCTRTAVAHGDSYKCSDQVCANIGTPNQRYKLLLTAGDETGDTDFILFGWMAQRIIKKSCDMLIANNPIGFIPDPIIDLLEKTYIWNVNVVVAEIDTAKDSIQASSSGPKQSQTVLLQGAPSGIEDTPTKASNLVMPSTLLTPQSSATSVQDKTIGIGSDHVVPGATPAITKEPTTTPRKRTRSSPAKTVTKRLLIDVDEGNTGSKDAADSVAAPSCCVQLLSEGYMIHVHVHKLDTDWSRADLTRSSPSCNQHVIDRFVVHLKAFDRFENTSDAQSAATLIIDSKPSKGLHKFLQKHCEGERLPGVNSDRVENLKWQDQNPEVEVLARNSDRWMNVLLTEISNHTETIEADMEYNTKLSDFCLAKAGPSGDKAHVSTQVVATYG

SEQ ID NO: 13936 - protein, 106 aa, Zea mays
  Coding DNA Sequence Number=SeqID_1163
GRVASSRSRAAALFIFFFFEPSHFYFSQAECCALCITVFHSVTGELIPLCTGNRIYLKKPNLYRCQFHKQNLQTFNHQTGNKPGTAGLKMKTKQDIEGGPRLAPML

SEQ ID NO: 13937 - protein, 79 aa, Zea mays
  Coding DNA Sequence Number=SeqID_1165
PAIYCCPWLPSLGQCLESTPPDDLWPHLVMKIRSSKHASTSRPTSHHTPGTVSISTDLSYHHTTPGENGDPLPSRMILE

SEQ ID NO: 13938 - protein, 74 aa, Zea mays
  Coding DNA Sequence Number=SeqID_1167
GPLSSASNILPRSGLPYIWGFTVGAGCFVYALNSIKFTYFKIIGHFYRSRCWSALKAPPRTLKGIAQLTLKMVF

SEQ ID NO: 13939 - protein, 126 aa, Zea mays
  misc_feature (46)..(46): Xaa can be any naturally occurring amino acid
  Coding DNA Sequence Number=SeqID_1169
  Homolog annotation: Hit_ID=Q7XG35; Match level="QueryCoverage=90%, HitCoverage=19%, E-value=4e-26, Identity=56%"; Hit description=CUE domain containing protein, expressed
MSPGRDKEESSTETSGFIESSNNVADMLPDLNLNHFTSTASTHFKXSVSIEPPGAPAGAAEAIQNDLLPSIELVPKMIEDVELLEEKAKVAKHELSVAGTGILAKVEELREMITYAKEANDMHAGK

SEQ ID NO: 13940 - protein, 131 aa, Zea mays
  Coding DNA Sequence Number=SeqID_1170
LDQHNHFTEGVRIMMQTTTTGVLITTLMVIEMGTNTIEGKISKDKRSEFLLLQIPPIRIRTRHHRDQLLRFSLRYYVRLVICSLKELIRKERIDFIGIQETNKKSFDDSWLQSISGNRNFAWFWSPAKGRS

SEQ ID NO: 13941 - protein, 496 aa, Zea mays
  Coding DNA Sequence Number=SeqID_1172
  Gene Ontology: Mol. function=transferase activity; Cellular component= plastid chromosome; Biological process=positive regulation of transcription, DNA-dependent
  Homolog annotation: Hit_ID=A2Y2N2; Match level="QueryCoverage=98%, HitCoverage=89%, E-value=0.0, Identity=37%"; Hit description =Putative uncharacterized protein
  Pfam annotation: Domain name=PPR; Domain location=127-161; Score =37.4; E_value=5.1e-08; Accession=PF01535.11; Description=PPR repeat
  Pfam annotation: Domain name=PPR; Domain location=162-197; Score =12.6; E_value=0.25; Accession=PF01535.11; Description=PPR repeat
  Pfam annotation: Domain name=PPR; Domain location=198-232; Score =32.9; E_value=1.2e-06; Accession=PF01535.11; Description=PPR repeat
  Pfam annotation: Domain name=PPR; Domain location=233-267; Score =48.8; E_value=1.8e-11; Accession=PF01535.11; Description=PPR repeat
  Pfam annotation: Domain name=PPR; Domain location=268-302; Score =29.1; E_value=1.6e-05; Accession=PF01535.11; Description=PPR repeat
  Pfam annotation: Domain name=PPR; Domain location=303-337; Score =51.3; E_value=3.4e-12; Accession=PF01535.11; Description=PPR repeat
  Pfam annotation: Domain name=PPR; Domain location=338-372; Score =25.6; E_value=0.00018; Accession=PF01535.11; Description=PPR repeat
  Pfam annotation: Domain name=PPR; Domain location=373-407; Score =30.5; E_value=6.2e-06; Accession=PF01535.11; Description=PPR repeat
  Pfam annotation: Domain name=PPR; Domain location=408-442; Score =33.2; E_value=9.2e-07; Accession=PF01535.11; Description=PPR repeat
  Pfam annotation: Domain name=PPR; Domain location=443-477; Score =38.3; E_value=2.8e-08; Accession=PF01535.11; Description=PPR repeat
  Pfam annotation: Domain name=TPR_4; Domain location=128-151; Score =8.5; E_value=3.7; Accession=PF07721.5; Description=Tetratricopeptide repeat
  Pfam annotation: Domain name=TPR_4; Domain location=232-257; Score =0.1; E_value=38; Accession=PF07721.5; Description=Tetratricopeptide repeat
  Pfam annotation: Domain name=TPR_4; Domain location=267-292; Score =8.5; E_value=3.8; Accession=PF07721.5; Description=Tetratricopeptide repeat
  Pfam annotation: Domain name=TPR_4; Domain location=90-115; Score =9.1; E_value=3.2; Accession=PF07721.5; Description=Tetratricopeptide repeat
  Pfam module annotation: Pfam domain module=PPR::PPR::PPR::PPR::PPR::PP R::PPR::PPR::PPR::PPR::TPR_4::TPR_4::TPR_4::TPR_4; Domain location =127-161::162-197::198-232::233-267::268-302::303-337::338-372::373 -407::408-442::...
  Pfam module annotation: Domain location=443-477::128-151::232 -257::267-292::90-115
  Subcellular localization annotation: CTP_CleavageSite=47; ConfidenceScore=5.42e-01
LGTSRPAPAPRSSDQTPTPPLSFLSPAAQALVLAISSHPLPTLAAFLASRRDELLRADITSLLKALELSGHWEWALALLRWAGKEGAADASALEMVVRALGREGQHDAVCALLDETPLPPGSRLDVRAYTTVLHALSRAGRYERALELFAELRRQGVAPTLVTYNVVLDVYGRMGRSWPRIVALLDEMRAAGVEPDDFTASTVIAACCRDGLVEEAVAFFEDLKARGHAPCVVTYNALLQVFGKAGNYTEALRVLGEMEQNGCQPDAVTYNELAGTYARAGFFEEAARCLDTMASKGLLPNAFTYNTVMTAYGNVGKVDEALALFDQMKKTGFVPNVNTYNLVLGMLGKKSRFTVMLEMLGEMSRSGCTPNRVTWNTMLAVCGKRGMEDYVTRVLEGMRSCGVELSRDTYNTLIAAYGRCGSRTNAFKMYNEMTSAGFTPCITTYNALLNVLSRQGDWSTAQSIVSKMRTKGFKPNEQSYSLLLQCYAKGGNLAGI

SEQ ID NO: 13942 - protein, 142 aa, Zea mays
  Coding DNA Sequence Number=SeqID_1173
IYINKVIQLEIVRTHQSSRNEPGLSRYYEVQLVTGVVVLLPASQQQRRRDHHHHSADKKPSRAPTTVRLSSLGDPSHLRTMFSSVVASAFFARRRRRISCAVRTTTPAAAAAAACGELQVFGQRVPGPCAPLEVPPLLRRAA

SEQ ID NO: 13943 - protein, 250 aa, Zea mays
  Coding DNA Sequence Number=SeqID_103
  Gene Ontology: Mol. function=galactosylgalactosylxylosylprotein 3 -beta-glucuronosyltransferase activity; Cellular component=membrane; Biological process=cellulose and pectin-containing secondary cell wall biogenesis
  Homolog annotation: Hit_ID=Q10N05; Match level="QueryCoverage=98%, HitCoverage=58%, E-value=8e-72, Identity=63%"; Hit description =Glycosyltransferase family 43 protein, expressed
  Pfam annotation: Domain name=Glyco_transf_43; Domain location=124 -246; Score=-55.0; E_value=1.3e-05; Accession=PF03360.6; Description =Glycosyltransferase family 43
  Subcellular localization annotation: CTP_CleavageSite=51; ConfidenceScore=5.43e-01
MGSSTDHAAGARGKKQGSQLWKKALLHSSLCFVMGFFTGFAPSSVSDWTSAAAAAGGRVGSSHVVRALPAGGAGAVNRSLLAHDAGGGGLPRDPASPRPLLVVVTTTESTPAATGERAAALTRAAHALRLVAPPLLWVVVEAAPDAPATARLLRATGLMYRHLTYKDNFTSADAAAGRERHHQRNVALGHIEHHRLAGVVLFAGLGDVFDLRFFDELRGIRYQPAIIIACFTARTTCIVARAKLSSSLHK

SEQ ID NO: 13944 - protein, 488 aa, Zea mays
  Coding DNA Sequence Number=SeqID_104
  Gene Ontology: Mol. function=calcium ion binding; Cellular component =mitochondrion; Biological process=embryonic development ending in seed dormancy
  Homolog annotation: Hit_ID=Q6YSW9; Match level="QueryCoverage=100%, HitCoverage=97%, E-value=1e-161, Identity=47%"; Hit description =Pentatricopeptide (PPR) repeat-containing protein-like
  Pfam annotation: Domain name=PPR; Domain location=120-154; Score =29.8; E_value=1e-05; Accession=PF01535.11; Description=PPR repeat
  Pfam annotation: Domain name=PPR; Domain location=156-190; Score =13.4; E_value=0.2; Accession=PF01535.11; Description=PPR repeat
  Pfam annotation: Domain name=PPR; Domain location=192-226; Score =30.8; E_value=5.1e-06; Accession=PF01535.11; Description=PPR repeat
  Pfam annotation: Domain name=PPR; Domain location=227-261; Score =11.9; E_value=0.3; Accession=PF01535.11; Description=PPR repeat
  Pfam annotation: Domain name=PPR; Domain location=262-296; Score =27.0; E_value=7e-05; Accession=PF01535.11; Description=PPR repeat
  Pfam annotation: Domain name=PPR; Domain location=297-331; Score =40.2; E_value=7.2e-09; Accession=PF01535.11; Description=PPR repeat
  Pfam annotation: Domain name=PPR; Domain location=38-72; Score=13.3; E_value=0.2; Accession=PF01535.11; Description=PPR repeat
  Pfam annotation: Domain name=PPR; Domain location=85-119; Score=14.1; E_value=0.17; Accession=PF01535.11; Description=PPR repeat
  Pfam module annotation: Pfam domain module=PPR::PPR::PPR::PPR::PPR::PP R::PPR::PPR; Domain location=120-154::156-190::192-226::227-261::262 -296::297-331::38-72::85-119
SYNCIVHGLCTMPKPGACLRAHQLVMEGTSFGYRPREVTYKVLVDELCRENELAKAKDVLELMLQPTVQCGQDSGGDAGEETRTRIYNVFLGALRVVDNPSEQLGVLVSMLQAGCKPDVITMNTVIHGFCKSRRTQEARRIMDDMLSGKFCAPDVVTFTTLISGYLGAGDHAQALDVLRSLMPRRRCSPTVVTYNCVLKGLFGVGQVDTAMQVLEEMSANKVAADPVTHTVVIKGLCDAGLLEKAKEFWDNVVWPSGIHDDYVYSAVFRGLCKQMKLEQACDFLYELVDCGVAPSVVCYNILIDAACKQGSNKLAYQLVKEMKRNGLAPDAITWRILSKLHHYDEEEREGNQHQMFDVDRISTEGRVERLVLTKDKMPLLPSSENFHEVNEDDNAAETEEEIDYLPDMASKSEAEEVGCSTKMTVEEAPDNTKQTEEQGNCLRDNPTRGTIIDKADITWGEDGLKNSDNQPSVKEPLSTVVRKVFGLL

SEQ ID NO: 13945 - protein, 175 aa, Zea mays
  Coding DNA Sequence Number=SeqID_105
  Gene Ontology: Mol. function=protein binding; Cellular component =integral to membrane; Biological process=electron transport
  Homolog annotation: Hit_ID=Q9LYD6; Match level="QueryCoverage=100%, HitCoverage=18%, E-value=2e-75, Identity=83%"; Hit description =Putative uncharacterized protein F15N18_150
  Pfam annotation: Domain name=DUF1620; Domain location=2-174; Score =182.6; E_value=9.7e-52; Accession=PF07774.3; Description=Protein of unknown function (DUF1620)
  Subcellular localization annotation: CTP_CleavageSite=31; ConfidenceScore=5.07e-01
LTAPISSYSRPEMFTKSQSYFFPQSVKTIAVTSTAKGITSKQLLIGTIGDQILTLDKRFVDPRRTLNPSQAEKEEGIIPLTDSLPIIPQSYITHSLKVEGLRGIVTAPAKLESTTHVFAYGVDLFYTRLAPSKTYDSLTDDFSYALLLITIVALVAAIYITCALSEKKELSEKWR

SEQ ID NO: 13946 - protein, 249 aa, Zea mays
  Coding DNA Sequence Number=SeqID_106
  Homolog annotation: Hit_ID=Q2A9V2; Match level="QueryCoverage=98%, HitCoverage=100%, E-value=1e-111, Identity=82%"; Hit description =Lil3 protein, putative
  Subcellular localization annotation: CTP_CleavageSite=38; ConfidenceScore=5.86e-01
MSISMALFSPPISSSVQNPKISFPLLSTKRFSLLSVTRASSDSAAVSATTVEIPKPASVSVEEVPSKPPAESSSDETDLPTTATGIKFQDAKWVNGTWDLKQFEKDGKTDWDSIIVAEAKRRKWLEDNPETTTNAEPVLFDTSIIPWWAWMKRYHLPEAELLNGRAAMIGFFMAYFVDSLTGVGLVDQMGNFFCKTLLFVAVAGVLFIRKNEDLDKLKGLIEETTLYDKQWQAAWKEPESSSSTLSSKK

SEQ ID NO: 13947 - protein, 147 aa, Zea mays
  Coding DNA Sequence Number=SeqID_107
  Homolog annotation: Hit_ID=Q8LER7; Match level="QueryCoverage=100%, HitCoverage=100%, E-value=4e-21, Identity=41%"; Hit description =Putative uncharacterized protein
MEALIHHFTLLSDQALVDKTFDPATIEDLMRLFEVDSYKAWAALEAEQQQELEAAEESIREAEAELDRDMEWGMEEYRRTLEEMERMEAAELKELEEKAETARRTGSLLEKAATIAAKRHIAAAMGSAAASMRSAWKTASGNKVHPS

SEQ ID NO: 13948 - protein, 115 aa, Zea mays
  Coding DNA Sequence Number=SeqID_108
  Homolog annotation: Hit_ID=Q10RP3; Match level="QueryCoverage=63%, HitCoverage=71%, E-value=1e-09, Identity=42%"; Hit description =Expressed protein
MESKESGERMEKVEVGDGGKKPEEGTKQAAAPVCFKKPAGEDTGILETTKDYFKQLKDTSADTHWDCIKNRFRAAGDYISNKTSSVFGRQKVEPEAKEETPGAKPEGAPAAAETQ

SEQ ID NO: 13949 - protein, 128 aa, Zea mays
  Coding DNA Sequence Number=SeqID_109
  Homolog annotation: Hit_ID=A7PRX4; Match level="QueryCoverage=98%, HitCoverage=98%, E-value=4e-47, Identity=72%"; Hit description =Chromosome chr14 scaffold_27, whole genome shotgun sequence
  Pfam annotation: Domain name=Auxin_repressed; Domain location=7-124; Score=191.2; E_value=2.5e-54; Accession=PF05564.3; Description =Dormancyauxin associated protein
MGLLDHLWDDTVAGPRPENGLGKLRRHHTFSFRPSSGNDQSDGGSVRSYGEESPEEAVKVTRSIMIIKPPGYQGGSAPVSPAGSTPPVSPFSGGKEPFRFRRRSTSDAFDKGAGSENGPRNSPPTYGL

SEQ ID NO: 13950 - protein, 276 aa, Zea mays
  Coding DNA Sequence Number=SeqID_110
  Gene Ontology: Mol. function=carbonate dehydratase activity; Cellular component=extracellular region; Biological process=one-carbon compound metabolic process
  Homolog annotation: Hit_ID=A2YW42; Match level="QueryCoverage=90%, HitCoverage=91%, E-value=1e-102, Identity=69%"; Hit description =Putative uncharacterized protein
  Pfam annotation: Domain name=Carb_anhydrase; Domain location=42-268; Score=104.1; E_value=4.3e-28; Accession=PF00194.11; Description =Eukaryotic-type carbonic anhydrase
MRSSRDLRLAVLLLLFSASVLLPVARAQQETEEEEEFSYSLDAENGPAHWGDIKEEWSACGKGNMQSPIDLASPRVSLVRGLGYLNHSYHPANATIVNRGHDIMLKFEGDAGSVSIGGTPYFLRQLHWHSPTEHSVNGRRYDMELHMFHESAQGKAAVIGVFYEIGAHDAFLHKLEPYLEMIADRKDREEKMGMMDPRGARGKASVYYRYVGSLTAPPCAEGVIWTIVKRVRTVSRHQLELLREAVHDDMEKNARPRQEVNSRDISMFRPFEQNRH

SEQ ID NO: 13951 - protein, 179 aa, Zea mays
  Coding DNA Sequence Number=SeqID_111
  Gene Ontology: Mol. function=metal ion binding; Cellular component =cytoplasm; Biological process=regulation of transcription, DNA -dependent
  Homolog annotation: Hit_ID=Q9S758; Match level="QueryCoverage=100%, HitCoverage=100%, E-value=1e-70, Identity=74%"; Hit description =Squamosa promoter-binding-like protein 5
  Pfam annotation: Domain name=SBP; Domain location=62-140; Score =184.5; E_value=2.6e-52; Accession=PF03110.5; Description=SBP domain
MEGQRSQRWGYLKDKAIATSLAEEEMENSMDGEEDDTGDEDKRKRVMERARGPNTERVPLRLCLVDRCTANLTEAKQYYRRHKVCEVHAKASSATVAGVKQRFCQQCSRFHELAEFDETKRSCRRRLAGHNERRRKISGDSYGEGSGRRAVSLTQTQERNRIDMKLPMTNSPFKRPQIR

SEQ ID NO: 13952 - protein, 217 aa, Zea mays
  Coding DNA Sequence Number=SeqID_112
  Gene Ontology: Biological process=cell adhesion
  Homolog annotation: Hit_ID=Q1KUQ7; Match level="QueryCoverage=83%, HitCoverage=80%, E-value=9e-79, Identity=79%"; Hit description =Putative uncharacterized protein
MGSRQGPPKHQNKFAWVPNAGVKINETEVGGRFRPLSEITGVCHRCREQIAWKRKYGKYKKLTEPAKCQKCLKRNVRQAYHKLCTGCAKEQKVCAKCYSSSEQIMGRDIYEVEPEQKLLDETIKNARERDRRTLLRAMNKDSNPKKSDEEATRSDSSKVGDVFPSTSLEEYANKSGRVSGIVGHGHVVDDEEDDDDVASEPELDEDHSGDDDDELQK

SEQ ID NO: 13953 - protein, 200 aa, Zea mays
  Coding DNA Sequence Number=SeqID_113
  Gene Ontology: Mol. function=nucleic acid binding; Cellular component= cytoplasm; Biological process=RNA processing
  Homolog annotation: Hit_ID=Q8LG23; Match level="QueryCoverage=87%, HitCoverage=87%, E-value=1e-70, Identity=74%"; Hit description=RNA -binding protein, putative
  Pfam annotation: Domain name=RRM_1; Domain location=95-166; Score =76.1; E_value=1.2e-19; Accession=PF00076.12; Description=RNA recognition motif. (a.k.a. RRM, RBD, or
MANIEAEAVDFEPEEDDLMDEDVGASDLSPRAGHPKLRSAISGANDESANRKTKGRGFREEKDSDRQRRLSSRDFESLGSDGGPGPQRSIEGWIVLVTGVHEEAQEDDISNAFGDFGEIKSLHLNLDRRTGFVKGYALIEYEKSEEAQSAIKAMNGAELLTKNVSVDWAFSNGPNNAGSYRRRNMRSGRSQRSRSPRRRF

SEQ ID NO: 13954 - protein, 173 aa, Zea mays
  Coding DNA Sequence Number=SeqID_114
  Gene Ontology: Mol. function=DNA binding; Cellular component =chromatin; Biological process=regulation of transcription, DNA -dependent
  Homolog annotation: Hit_ID=Q2L6T4; Match level="QueryCoverage=61%, HitCoverage=70%, E-value=7e-38, Identity=75%"; Hit description =Uncharacterized protein At1g20696.2
  Pfam annotation: Domain name=HMG_box; Domain location=66-135; Score =120.2; E_value=5.9e-33; Accession=PF00505.9; Description=HMG (high mobility group) box
  Subcellular localization annotation: CTP_CleavageSite=51; ConfidenceScore=5.26e-01
NTRTIPFLCSPLSLSLYKPCDPLPQDSSMKGGKSKTETRSSKLSVAKKPAKAAGRSKAAAKDPNKPKRPASAFFVFMEDFRQTYKKDHPNNKSVAAVGKAGGEKWKSLSDSEKAPFVAKADKRKVEYEKTMKAYNKKLEEGPKEDEEESDKSVSEVNDEDDADDGSDEEEDDD

SEQ ID NO: 13955 - protein, 190 aa, Zea mays
  Coding DNA Sequence Number=SeqID_115
  Gene Ontology: Mol. function=protein tyrosine phosphatase activity; Biological process=protein amino acid dephosphorylation
  Homolog annotation: Hit_ID=Q9FT62; Match level="QueryCoverage=100%, HitCoverage=92%, E-value=5e-74, Identity=76%"; Hit description =Putative uncharacterized protein AT5g10700
  Subcellular localization annotation: CTP_CleavageSite=43; ConfidenceScore=5.48e-01
MASAVVSAALRLPLATRRFSNSSPRISLQHSTIWIRHLRSITTASSMSQLTSETDASRTNDENSAEKPDDVPDDVVVQYVVLRRDLIDSWPLGSVVTQGCHASVAAIWSFKDDPVTLQYCDPQHIDSMHKVTLEVKGETQMLNLSEKLKSGGISHKVWMEQPENIPTCIATKPYLKSQVSPFFKKLKLCK

SEQ ID NO: 13956 - protein, 141 aa, Zea mays
  Coding DNA Sequence Number=SeqID_116
  Gene Ontology: Cellular component=oxygen evolving complex; Biological process=photosynthesis
  Homolog annotation: Hit_ID=P27202; Match level="QueryCoverage=100%, HitCoverage=100%, E-value=2e-62, Identity=86%"; Hit description =Photosystem II 10 kDa polypeptide, chloroplast precursor
  Pfam annotation: Domain name=PsbR; Domain location=43-141; Score =242.1; E_value=1.2e-69; Accession=PF04725.3; Description=Photosystem II 10 kDa polypeptide PsbR
  Subcellular localization annotation: CTP_CleavageSite=41; ConfidenceScore=5.19e-01
MAASVMLSSVTLKPAGFTVEEMSARGLPSLTRASPSSFKIVASGVKKIKTDKPFGVNGSMDLRDGVDASGRKGKGYGVYKFVDKYGANVDGYSPIYNEDEWSASGDVYKGGVTGLAIWAVTLAGILAGGALLVYNTSALAQ

SEQ ID NO: 13957 - protein, 153 aa, Zea mays
  Coding DNA Sequence Number=SeqID_117
  Gene Ontology: Mol. function=calcium ion binding; Cellular component =flagellin-based flagellum; Biological process=ciliary or flagellar motility
  Homolog annotation: Hit_ID=P25070; Match level="QueryCoverage=96%, HitCoverage=96%, E-value=1e-63, Identity=77%"; Hit description =Calmodulin-related protein 2, touch-induced
  Pfam annotation: Domain name=efhand; Domain location=121-149; Score =37.3; E_value=5.5e-08; Accession=PF00036.22; Description=EF hand
  Pfam annotation: Domain name=efhand; Domain location=14-42; Score =38.9; E_value=1.9e-08; Accession=PF00036.22; Description=EF hand
  Pfam annotation: Domain name=efhand; Domain location=50-78; Score =30.5; E_value=6e-06; Accession=PF00036.22; Description=EF hand
  Pfam annotation: Domain name=efhand; Domain location=85-113; Score =38.7; E_value=2e-08; Accession=PF00036.22; Description=EF hand
  Pfam module annotation: Pfam domain module=efhand::efhand::efhand::efh and; Domain location=121-149::14-42::50-78::85-113
MSKSGRYCLGSMEDIRAVFQRFDKNGDGKISIDELKDVIGALSPTASPEETTLMMKEFDLDGNGYIDMDEFVALFQTEDGGDIRDLKEAFDLYDLDGNGRISVNELHSVMKNLGEKCSVEDCKRIISKVDADGDGCVNFEEFKKMMMNGRATA

SEQ ID NO: 13958 - protein, 169 aa, Zea mays
  Coding DNA Sequence Number=SeqID_118
  Gene Ontology: Mol. function=RNA binding; Cellular component =nucleolus; Biological process=ribosome biogenesis and assembly
  Homolog annotation: Hit_ID=A2YPL9; Match level="QueryCoverage=91%, HitCoverage=28%, E-value=6e-29, Identity=46%"; Hit description =Putative uncharacterized protein
RMARYLANKCSIASRIDCYSDMSSSIFGEKLREQVEERLDFYDKGVAPRKNLDVMKAAIDGLTNTEDDDGKENGDASVKKSKKSKAEANSDAMDVENAATEAETGTEKKKKKKHKLEEPQDVEMQANGDDETPKKKKKKNRDAESVDPKTGTEGKSKKKKKKSKADDDE

SEQ ID NO: 13959 - protein, 123 aa, Zea mays
  Coding DNA Sequence Number=SeqID_119
  Gene Ontology: Mol. function=lipid binding; Cellular component =extracellular region; Biological process=lipid transport
  Homolog annotation: Hit_ID=Q9LLR7; Match level="QueryCoverage=93%, HitCoverage=100%, E-value=4e-46, Identity=73%"; Hit description=Non -specific lipid-transfer protein 3 precursor
  Pfam annotation: Domain name=Tryp_alpha_amyl; Domain location=27-111; Score=91.5; E_value=2.6e-24; Accession=PF00234.12; Description =Protease inhibitorseed storageLTP f
MVSALRFFTCLVLAVCIVASVDAAISCNTVVGSLGTCYVYLRQGGIVPPSCCRGVRNLNGMAQTTPDRQQACKCVQSFTKSVPGLNQNLASGLPGKCGVSLPYPISISMNCDNVKLSGTHISS

SEQ ID NO: 13960 - protein, 121 aa, Zea mays
  Coding DNA Sequence Number=SeqID_1174
  Gene Ontology: Mol. function=phospho-N-acetylmuramoyl-pentapeptide -transferase activity; Cellular component=integral to membrane; Biological process=cell wall organization and biogenesis
  Homolog annotation: Hit_ID=A4AKL1; Match level="QueryCoverage=100%, HitCoverage=33%, E-value=1e-34, Identity=61%"; Hit description =Phospho-N-acetylmuramoyl-pentapeptide-transferase
MIALLIAGAVSLVFTLLLTPLFIKLFHRLGWGQFIRDDFSQSHHTKRGTATMGGIDLIIGAVLGYFVGHLVERDSITLSGLLVLFLMVGLGFVGCIDDFLKVRRQRSLELGGWAKVLGQVI

SEQ ID NO: 13961 - protein, 88 aa, Zea mays
  Coding DNA Sequence Number=SeqID_1175
  Gene Ontology: Mol. function=DNA binding; Cellular component=nucleus; Biological process=regulation of transcription
  Homolog annotation: Hit_ID=A2XEB5; Match level="QueryCoverage=67%, HitCoverage=17%, E-value=4e-21, Identity=76%"; Hit description =Putative uncharacterized protein
HGGDVQRPVTALYFNSKTHGFAKEIITVYNATGHELCGYPSKIGLRRCGKSCRLRWLNYLRPNIKHGEFTETEDKVICSMYASIGSRW

SEQ ID NO: 13962 - protein, 106 aa, Zea mays
  Coding DNA Sequence Number=SeqID_1176
RAVVANACDRVCQNFLGQTERCLNRLPPSHADDSVSQEPTDARLLSTLCLVADIYATALHTDTRVAGSDDTLVSKMHPGGRTYGASTPTQGSTDGWTVCHCLHRSM

SEQ ID NO: 13963 - protein, 145 aa, Zea mays
  misc_feature (68)..(68): Xaa can be any naturally occurring amino acid
  Coding DNA Sequence Number=SeqID_1178
  Gene Ontology: Mol. function=phospho-N-acetylmuramoyl-pentapeptide -transferase activity; Cellular component=integral to membrane; Biological process=cell wall organization and biogenesis
  Homolog annotation: Hit_ID=A4AKL1; Match level="QueryCoverage=100%, HitCoverage=39%, E-value=1e-30, Identity=48%"; Hit description =Phospho-N-acetylmuramoyl-pentapeptide-transferase
  Pfam annotation: Domain name=Glycos_transf_4; Domain location=1-128; Score=9.6; E_value=3.9e-06; Accession=PF00953.11; Description =Glycosyl transferase
VIGTILFLAWIVLLTVSTSNGVNVADGLDGLATGSSILAIGSYVIIGFWQSNQLCGSARLDASTEHAXYTVTNPLDLAVVAAAVYGGLIGFLWYNTSPAQIFLGDTGSLGLDGALAGLAILSRTELLLILIGGLFFIVTGSVILQ

SEQ ID NO: 13964 - protein, 254 aa, Zea mays
  misc_feature (177)..(177): Xaa can be any naturally occurring amino acid
  Coding DNA Sequence Number=SeqID_1179
  Gene Ontology: Mol. function=two-component response regulator activity; Cellular component=intracellular; Biological process=two -component signal transduction system (phosphorelay)
  Homolog annotation: Hit_ID=UPI00005FA929; Match level="QueryCoverage =76%, HitCoverage=99%, E-value=7e-37, Identity=44%"; Hit description =COG2197: Response regulator containing a CheY-like receiver domain and an HTH DNA-binding domain
  Pfam annotation: Domain name=GerE; Domain location=193-250; Score =66.9; E_value=6.9e-17; Accession=PF00196.10; Description=Bacterial regulatory proteins, luxR family
  Pfam annotation: Domain name=Response_reg; Domain location=62-176; Score=83.6; E_value=6.4e-22; Accession=PF00072.14; Description =Response regulator receiver domain
  Pfam module annotation: Pfam domain module=GerE::Response_reg; Domain location=193-250::62-176
MNTNGAATSGTTSGNMSASQEHKNTMCKDGRCPDMNKKVETKEGGGHVKHKTDGTTQNCFMAALLLIDDHPLVEVALEAACLNAPIPLQLYAAGDEAQARQLLQQHHIDLIVLDIGLPDSDGLELLRRLRARHPQCPVLIYSAQQSRHTLLSAASLGAAGYVVKSQSMAQLLSAILXVLGGQQAFPPLPERIALPLTEKEQQIVALLVRGLSNIQIGEQLHISNITVSTHKKNILEKTGVQSVVELAELWRAQQ

SEQ ID NO: 13965 - protein, 105 aa, Zea mays
  misc_feature (100)..(100): Xaa can be any naturally occurring amino acid
  Coding DNA Sequence Number=SeqID_1180
  Homolog annotation: Hit_ID=Q0TD68; Match level="QueryCoverage=100%, HitCoverage=47%, E-value=1e-47, Identity=85%"; Hit description =UPF0441 protein ygiB
MKRTKNIRHAAFRKSWQARHLTPVALAVTAVFMLAGCEQSDETVSMYQNADDCAKANPGQSAQCTTAYNNALKEAERTAPKYATREDCVAEFGENQWQQXPAQAG

SEQ ID NO: 13966 - protein, 115 aa, Zea mays
  misc_feature (17)..(17): Xaa can be any naturally occurring amino acid
  Coding DNA Sequence Number=SeqID_1181
  Gene Ontology: Mol. function=kinase activity; Cellular component =integral to membrane; Biological process=DNA mediated transformation
  Homolog annotation: Hit_ID=Q84UX7; Match level="QueryCoverage=97%, HitCoverage=15%, E-value=1e-40, Identity=76%"; Hit description =Global transcription factor group E
  Pfam annotation: Domain name=Bromodomain; Domain location=3-90; Score= 72.7; E_value=1.2e-18; Accession=PF00439.15; Description=Bromodomain
MPLFKQCEAILKKIMEXSNVFNVPVDVEKLQIHDYFDDVKTPMDLGTVHKKLQSGSCTSPSDFAADAMLTFNNAMAYNPWGHAVHDSTTRTFSWNKMFERRWRPNEKKLASAATE

SEQ ID NO: 13967 - protein, 265 aa, Zea mays
  Coding DNA Sequence Number=SeqID_1182
  Gene Ontology: Mol. function=protein binding; Cellular component =cytosol; Biological process=cell communication
  Homolog annotation: Hit_ID=Q10PT8; Match level="QueryCoverage=96%, HitCoverage=26%, E-value=1e-109, Identity=77%"; Hit description =Leucine Rich Repeat family protein, expressed
  Pfam annotation: Domain name=LRR_1; Domain location=119-142; Score =3.1; E_value=83; Accession=PF00560.23; Description=Leucine Rich Repeat
  Pfam annotation: Domain name=LRR_1; Domain location=144-169; Score =0.0; E_value=3e+02; Accession=PF00560.23; Description=Leucine Rich Repeat
  Pfam annotation: Domain name=LRR_1; Domain location=29-50; Score=0.7; E_value=2.3e+02; Accession=PF00560.23; Description=Leucine Rich Repeat
  Pfam annotation: Domain name=LRR_1; Domain location=52-72; Score=5.8; E_value=26; Accession=PF00560.23; Description=Leucine Rich Repeat
  Pfam annotation: Domain name=LRR_1; Domain location=74-94; Score =11.9; E_value=1.9; Accession=PF00560.23; Description=Leucine Rich Repeat
  Pfam annotation: Domain name=LRR_1; Domain location=97-117; Score =5.5; E_value=29; Accession=PF00560.23; Description=Leucine Rich Repeat
  Pfam module annotation: Pfam domain module=LRR_1::LRR_1::LRR_1::LRR _1::LRR_1::LRR_1; Domain location=119-142::144-169::29-50::52-72::74 -94::97-117
TLFHAISDALRHVFASRIMDIKDSPVWSKLSYVSCASNGVVLMDESLQLLPATETLDLSRNKFAKVDNLQKCTKLRNLDLGFNHLRSISSLSEVSSRIVKLVVRNNALTTVNGIENLKSLMGLDLSYNIISIFSELEILGTLPLLQNLWLEGNPICCARWYRAHVFSFFRNPENLKLDDKGMNTQEYWEKQVLFACRQNQPAGYGFYFPAIDDHEDEDILNLKMRKFSRLVSIVEEERNLCDGVEQPSTHCDSDSSKKDETAGMQ

SEQ ID NO: 13968 - protein, 103 aa, Zea mays
  Coding DNA Sequence Number=SeqID_1183
  Homolog annotation: Hit_ID=A4H2S8; Match level="QueryCoverage=88%, HitCoverage=16%, E-value=8e-39, Identity=73%"; Hit description =Putative uncharacterized protein
MDNTPSTLHAARWRGLGGWNFYFLIKFGLLWYGYLNFHALSNLVFLAWLLFPLPSARLHRLRQWISLPIGFALFWHDTWLPGLNSLLSQGSQVAGFSPAYLLD

SEQ ID NO: 13969 - protein, 126 aa, Zea mays
  Coding DNA Sequence Number=SeqID_1184
  Gene Ontology: Mol. function=inorganic phosphate transmembrane transporter activity; Cellular component=1-2nm peptidoglycan-based cell wall; Biological process=phosphate transport
  Homolog annotation: Hit_ID=A0GUQ9; Match level="QueryCoverage=100%, HitCoverage=42%, E-value=2e-52, Identity=80%"; Hit description =Phosphate ABC transporter, inner membrane subunit PstA
MAFGLLWLVWILYTTLSLGVGGLSLSLFTQSTPPPNTDGGGLANAIVGTLMLVGAATVVGTPIGVLAGVYLAEYGGKGWLASTTRFINDILLSAPSIVVGLFAYAVVVAKMGHFSGWAGIVSLALL

SEQ ID NO: 13970 - protein, 80 aa, Zea mays
  Coding DNA Sequence Number=SeqID_1185
QQRQVGFGVVLPVHRHQWFEHRAQGTALSGDATRNPGPHPAGSAGGDLQQIGAFGGRVLGDGLRRRYRRAGVDTVPIGVR

SEQ ID NO: 13971 - protein, 181 aa, Zea mays
  Coding DNA Sequence Number=SeqID_1187
  Gene Ontology: Mol. function=carbamoyl-phosphate synthase (ammonia) activity; Cellular component=cellular_component; Biological process =nitrogen compound metabolic process
  Homolog annotation: Hit_ID=Q42601; Match level="QueryCoverage=100%, HitCoverage=61%, E-value=7e-82, Identity=58%"; Hit description =Carbamoyl phosphate synthetase large chain
  Pfam annotation: Domain name=CPSase_L_D2; Domain location=96-181; Score=-107.1; E_value=0.0017; Accession=PF02786.7; Description =Carbamoyl-phosphate synthase L chain, ATP binding domain
  Pfam annotation: Domain name=CPSase_L_chain; Domain location=1-94; Score=10.7; E_value=0.00023; Accession=PF00289.12; Description =Carbamoyl-phosphate synthase L chain, N-terminal domain
  Pfam module annotation: Pfam domain module=CPSase_L_D2::CPSase_L _chain; Domain location=96-181::1-94
AGYETIMMNSNPETVSTDYDTSDRLYFEPLTVEDVSNVLDLERPDGIIVQFGGQTPLKLALPIQQYIEENKMVSASGTGNVKIWGTSPDSIDAAEDRKRFNAILEELGIEQPKGGIARSESDALAIASEIGYPVVVRPSYVLGGRAMEIVYNDEKLIKYLATAVQVDPERPVLVDKYLIDA

SEQ ID NO: 13972 - protein, 79 aa, Zea mays
  Coding DNA Sequence Number=SeqID_1188
  Homolog annotation: Hit_ID=A0QWJ5; Match level="QueryCoverage=89%, HitCoverage=39%, E-value=2e-07, Identity=47%"; Hit description =Adenine phosphoribosyltransferase
  Pfam annotation: Domain name=Pribosyltran; Domain location=2-67; Score=-2.5; E_value=0.005; Accession=PF00156.17; Description =Phosphoribosyl transferase domain
LRSTPLPVLKIPASGIELAGLKVVILDDVLATGGTLAAACRLLHRAGAEVVAAAVVLELAGLGGRATVAPLRLERLHQI

SEQ ID NO: 13973 - protein, 152 aa, Zea mays
  Coding DNA Sequence Number=SeqID_1189
  Gene Ontology: Mol. function=monooxygenase activity; Cellular component=intracellular
  Homolog annotation: Hit_ID=Q4KDF9; Match level="QueryCoverage=98%, HitCoverage=32%, E-value=3e-77, Identity=90%"; Hit description =Monooxygenase, NtaA/SnaA/SoxA family
SQREIRLNAFDMNCVGHQSPGLWAHPRDRSWQYKDLEYWVDLARLLERGKFDGLFIADVLGIYDVLNGNGDAAIRQATQVPVNDPLALITPMALVTEHLGFGLTASLSFEHPYPFARRLSTLDHLTKGRIGWNIETSYLESGARNIGHKAQT

SEQ ID NO: 13974 - protein, 95 aa, Zea mays
  Coding DNA Sequence Number=SeqID_1190
LEDPLIFLDGERPEQTLSTRRPARPALLTFPQYPPGGGAGRGGAGLGSQTARNSTALRLAASYTRTAFSEKKLPFQGVRLRPSFTGVRATAHVFD

SEQ ID NO: 13975 - protein, 199 aa, Zea mays
  misc_feature (93)..(93): Xaa can be any naturally occurring amino acid
  misc_feature (117)..(117): Xaa can be any naturally occurring amino acid
  misc_feature (146)..(146): Xaa can be any naturally occurring amino acid
  Coding DNA Sequence Number=SeqID_1191
  Gene Ontology: Mol. function=binding; Cellular component=membrane coat; Biological process=intracellular protein transport
  Homolog annotation: Hit_ID=A2WZL8; Match level="QueryCoverage=64%, HitCoverage=12%, E-value=3e-31, Identity=52%"; Hit description =Putative uncharacterized protein
ASLLTFGHRYRLPEGPFTLRNSARRPMLHTLLDPSGILGEDYIYAVLQGGQLRPLRLACQDLFSVNVPTQDVTAPPTEYDEASSRVDFIDHTXKDIRRGATMGPEEGIPSVRPQQMXKVSFQCHSHHHILPVKLSALCTGKRHTTXLHADIGYLVRTLPMDLNTLLCKENQLMGMLEYARRCAFKDHLQKLGHEDSAQH

SEQ ID NO: 13976 - protein, 148 aa, Zea mays
  Coding DNA Sequence Number=SeqID_1192
  Gene Ontology: Mol. function=hydrolase activity
  Homolog annotation: Hit_ID=A4W9S9; Match level="QueryCoverage=88%, HitCoverage=49%, E-value=4e-43, Identity=64%"; Hit description=Beta -lactamase-like protein
MLDEFEDGYDRVPVEVTTTDGQQRTAWIYQLQPQQDERQFVSPGGQQWIDQSALRASHQNQWQQLESGLLSLQTVPDFAINQRALVLQTPHGNILWDCIAHLDDATVTLLRALGGLHAIAISHPHYYSTMQDWADAFDAPVYLHASDS

SEQ ID NO: 13977 - protein, 166 aa, Zea mays
  misc_feature (20)..(21): Xaa can be any naturally occurring amino acid
  Coding DNA Sequence Number=SeqID_1193
  Gene Ontology: Mol. function=2-dehydro-3-deoxygalactonokinase activity
  Homolog annotation: Hit_ID=A7MN09; Match level="QueryCoverage=99%, HitCoverage=56%, E-value=1e-48, Identity=59%"; Hit description =Putative uncharacterized protein
  Pfam annotation: Domain name=DGOK; Domain location=1-162; Score=43.7; E_value=4.6e-17; Accession=PF05035.3; Description=2-keto-3-deoxy -galactonokinase
DLQPAPLYIMPGTHAKWVQXXLYRVIDFRTEMTGELHHLLLKQSLIGAGLPAQEASPDAFRDGLQIGSHDPSILARLFEVRASHVLGARDRRHISDFLSGLLIGHEVAQMTHQLTHSRQPIVIIAGSALAQRYQQALAFIGTDSVTLEGDRAFQHGIRSIAHVLAH

SEQ ID NO: 13978 - protein, 131 aa, Zea mays
  Coding DNA Sequence Number=SeqID_1194
VARGGKTATFQCLTFSDLGEWGLTGQSRMEDKRARIIQQRRDSRMCRHVGATNPGHTKPRGIGIKIGRSRRMAGPGRSAKKKKKVAIRIIVIVVVVVAVLVVIGIISGIVFRKKCKRPRVTTPPVGPVQVP

SEQ ID NO: 13979 - protein, 111 aa, Zea mays
  misc_feature (70)..(70): Xaa can be any naturally occurring amino acid
  Coding DNA Sequence Number=SeqID_1196
  Gene Ontology: Mol. function=hydrogen ion transporting ATP synthase activity, rotational mechanism; Cellular component=proton -transporting ATP synthase complex, catalytic core F(1); Biological process=plasma membrane ...
  Gene Ontology: Biological process=ATP synthesis coupled proton transport
  Homolog annotation: Hit_ID=Q3ZJ68; Match level="QueryCoverage=81%, HitCoverage=18%, E-value=5e-12, Identity=50%"; Hit description=ATP synthase subunit beta
MRVDPCLSEYRAGLGRYPLYMVLCNLGVFQHVQFGLHQVAPVCGVIDEPRIASLLVGCPALCMAGSLRDXVNKQVVPLCVKDSFGFVLAGWTVSPLLGRMPSAVGYPPTPS

SEQ ID NO: 13980 - protein, 155 aa, Zea mays
  misc_feature (32)..(32): Xaa can be any naturally occurring amino acid
  misc_feature (35)..(35): Xaa can be any naturally occurring amino acid
  misc_feature (58)..(58): Xaa can be any naturally occurring amino acid
  misc_feature (64)..(64): Xaa can be any naturally occurring amino acid
  misc_feature (82)..(82): Xaa can be any naturally occurring amino acid
  Coding DNA Sequence Number=SeqID_1197
  Gene Ontology: Mol. function=translation initiation factor activity; Biological process=regulation of translational initiation
  Homolog annotation: Hit_ID=P55876; Match level="QueryCoverage=100%, HitCoverage=33%, E-value=1e-29, Identity=52%"; Hit description =Eukaryotic translation initiation factor 5
  Subcellular localization annotation: CTP_CleavageSite=42; ConfidenceScore=5.38e-01
KKINTATPKDGSHNGSAKRIPNYQPAVNKPSXPNXELNGNIKGSLRSGSAPTQVQAGXAFFTLXPREVKKGFLEAFFGWVGXKEFPKRVLKTKRTLQVVGQNKGAKTFWVRAIRVLVGKRTLKALKKVPVVFKAFSKEKILAKEPIVDWSNKAVA

SEQ ID NO: 13981 - protein, 178 aa, Zea mays
  misc_feature (110)..(110): Xaa can be any naturally occurring amino acid
  misc_feature (132)..(132): Xaa can be any naturally occurring amino acid
  misc_feature (165)..(165): Xaa can be any naturally occurring amino acid
  Coding DNA Sequence Number=SeqID_1198
  Homolog annotation: Hit_ID=O00361; Match level="QueryCoverage=100%, HitCoverage=52%, E-value=2e-71, Identity=76%"; Hit description=P40
  Pfam annotation: Domain name=Transposase_22; Domain location=1-177; Score=64.5; E_value=3.6e-16; Accession=PF02994.5; Description=L1 transposable element
MGKKQSRKTGNSKNQSASPPPKERGSLPAMEQSWMENDFDKLREEGFRRSNYYELQEEIRTNGKEVKSFEKKLDEWITRITNAGKSLKDLMELKTKARELHDKCGSLSSXCDQLEERVSVMEDEMNEMKQEXEFREKRIKRNKQSLQEIWDCVQRPNLCLIRKPXSGRENGTKLVSTL

SEQ ID NO: 13982 - protein, 262 aa, Zea mays
  Coding DNA Sequence Number=SeqID_1199
  Gene Ontology: Mol. function=hydrolase activity
  Homolog annotation: Hit_ID=A7MMD9; Match level="QueryCoverage=82%, HitCoverage=56%, E-value=3e-48, Identity=51%"; Hit description =Putative uncharacterized protein
TSLTHTRALYDRLSTALTVAQVAGVQRLCNHYSARLNPLPGPDSSRESNNRLTQITQYARQLAMQPELITASSISALDAVGLTEPDIVTLNQLVGYVSYQARVVAALQAMMGLPVRWIPGVTPPTDADAVLFSQAAAWQHALKPVELRYASADQLAAVTFCQGMAGLDDAVWLLVHDAQALYGWATLRQRLEAYGGEEEQLAQAVSARVLGCRRQFAQLANGWRTRLLHDVDQASDDSLTQQSKSAERPADPAAGALQCRPV

SEQ ID NO: 13983 - protein, 286 aa, Zea mays
  Coding DNA Sequence Number=SeqID_1200
  Gene Ontology: Mol. function=transcription factor activity; Cellular component=intracellular; Biological process=regulation of transcription, DNA-dependent
  Homolog annotation: Hit_ID=A9MWU3; Match level="QueryCoverage=84%, HitCoverage=96%, E-value=1e-77, Identity=60%"; Hit description =Putative uncharacterized protein
  Pfam annotation: Domain name=DeoR; Domain location=115-270; Score =127.4; E_value=4.2e-35; Accession=PF00455.13; Description=Bacterial regulatory proteins, deoR family
  Pfam annotation: Domain name=FaeA; Domain location=49-119; Score= -3.7; E_value=0.037; Accession=PF04703.3; Description=FaeA-like protein
  Pfam annotation: Domain name=GntR; Domain location=49-102; Score=0.8; E_value=0.054; Accession=PF00392.11; Description=Bacterial regulatory proteins, gntR fa
  Pfam annotation: Domain name=HTH_11; Domain location=49-101; Score =26.0; E_value=0.00014; Accession=PF08279.2; Description=HTH domain
  Pfam annotation: Domain name=HTH_5; Domain location=47-94; Score=9.6; E_value=0.042; Accession=PF01022.11; Description=Bacterial regulatory protein, arsR family
  Pfam annotation: Domain name=HTH_DeoR; Domain location=49-105; Score =74.6; E_value=3.2e-19; Accession=PF08220.3; Description=DeoR-like helix-turn-helix domain
  Pfam annotation: Domain name=HTH_IclR; Domain location=52-130; Score=- 16.0; E_value=0.086; Accession=PF09339.1; Description=IclR helix-turn- helix domain
  Pfam module annotation: Pfam domain module=DeoR::FaeA::GntR::HTH _11::HTH_5::HTH_DeoR::HTH_IclR; Domain location=115-270::49-119::49 -102::49-101::47-94::49-105::52-130
MYIPAAPMCDKNADYAQQVAQALATGVSPGDFPKEDYEASWRAGSMNARHQHIIQLVSERGSVSVNELAQTTGVSEVTVRQDLNLLEKGGFLRRVHGSAVAPESDDVGARMQTRFAVKKRLAEYAAGLVNPGETVFIEGGSTNALLARELSHRQDITIITVSHYIAGLLREQGGDVIILGGLFQKSSESVVGPLTRLCIQHLNFHKAFIGIDGWDEATGFTSRDMLRCDVVNAIMEKPTHTVALTDSSKFGQIHPYALAPLQPFKQVITDTELAAGWQQQLRAQSL

SEQ ID NO: 13984 - protein, 59 aa, Zea mays
  misc_feature (52)..(52): Xaa can be any naturally occurring amino acid
  Coding DNA Sequence Number=SeqID_1201
GLDLPALYLALERIVPAYLTVMVVPVCQLQLMVILWPQLNWPVCPSDRLLAXRSQVILQ

SEQ ID NO: 13985 - protein, 111 aa, Zea mays
  misc_feature (94)..(94): Xaa can be any naturally occurring amino acid
  Coding DNA Sequence Number=SeqID_1203
  Gene Ontology: Mol. function=uroporphyrin-III C-methyltransferase activity; Cellular component=chloroplast; Biological process =porphyrin biosynthetic process
  Homolog annotation: Hit_ID=Q6D2V5; Match level="QueryCoverage=94%, HitCoverage=37%, E-value=2e-29, Identity=62%"; Hit description =Uroporphyrin-III C-methyltransferase
  Pfam annotation: Domain name=TP_methylase; Domain location=11-111; Score=-23.0; E_value=0.00053; Accession=PF00590.10; Description =Tetrapyrrole (CorrinPorphyrin) Methylases
YWARTPYEGGIVWLVGAGPGDVDLLTVKALRLLQRADVVVYDRLVSEAVMAEVASSALCIDVGKQPGHHGLKQTQINQLLVALAASGRNVVRLXGDDPFIFGRGGEEMVSL

SEQ ID NO: 13986 - protein, 66 aa, Zea mays
  Coding DNA Sequence Number=SeqID_1204
VRVVGFFGKVFVGCEGSGYNEGQVSLHFVGILYLIGFYEVVMGVSGCYMRIVKWMLWEMFDVCWGL

SEQ ID NO: 13987 - protein, 374 aa, Zea mays
  Coding DNA Sequence Number=SeqID_1206
  Homolog annotation: Hit_ID=A7MQ23; Match level="QueryCoverage=98%, HitCoverage=62%, E-value=7e-70, Identity=44%"; Hit description =Putative uncharacterized protein
QAIVHITAAGECRLTNRGNVTRVLLNDIPLERGRQVELQDGDVLGIDDYQLLVNDLNGAQQPQAATLAPQPVVQAPVMADVPPAEKDASTAAIPSEIWDSLAKEFSISDDLSKRKAAAEVLTEANPLTAPASLDRNPADPLAQLVNDAPLDIGQQPKNTSLFDEGDALFAQESIFDDRTPSTLSAQQNAAAQPQVESATELDPLSLFGSQSSSDVRNHDDPLGLMMGNAVPLAQPEIAPAQTVQPQPVAQPETPSEPSPKTAPVELADLSSSPLFDDTETQATSPLIEPQAEQPETVAPQMDYGGITLPTPQAVQRVPSPTPKGRLRIDPVASSHQNAAPASQATASHSSGDALKGELLDALLEGMGCAICRHA

SEQ ID NO: 13988 - protein, 229 aa, Zea mays
  misc_feature (64)..(64): Xaa can be any naturally occurring amino acid
  Coding DNA Sequence Number=SeqID_1207
  Gene Ontology: Mol. function=zinc ion binding; Cellular component =intracellular; Biological process=regulation of transcription
  Homolog annotation: Hit_ID=A2X7T1; Match level="QueryCoverage=88%, HitCoverage=84%, E-value=5e-43, Identity=47%"; Hit description =Putative uncharacterized protein
  Pfam annotation: Domain name=zf-B_box; Domain location=1-47; Score =41.2; E_value=3.7e-09; Accession=PF00643.14; Description=B-box zinc finger
  Pfam annotation: Domain name=zf-B_box; Domain location=62-109; Score =49.4; E_value=1.3e-11; Accession=PF00643.14; Description=B-box zinc finger
  Pfam module annotation: Pfam domain module=zf-B_box::zf-B_box; Domain location=1-47::62-109
MKVQCDVCAAEAASVFCCADEAALCEACDRRVHRANKLAGKHRRLSLLGPAAPSSSAQQTPAAXPLCDICQEKRGLLFCKEDRAILCRDCDVPVHTASELAMRHTRFLLTGVRLSAEPAARPPPSEEDENDSSGSSISEYLTKTLPGWHVEDFLVDETAAAATTIGVSTDVSYQAGGLARTGGPQDGYYSAWMAPEQIFCEGKGSRMPQMAMCSSSKRPRATSSSYSYW

SEQ ID NO: 13989 - protein, 60 aa, Zea mays
  Coding DNA Sequence Number=SeqID_1208
  Gene Ontology: Mol. function=ATP-dependent helicase activity; Cellular component=nucleus; Biological process=ribosome biogenesis and assembly
  Homolog annotation: Hit_ID=Q8ZQN8; Match level="QueryCoverage=100%, HitCoverage=13%, E-value=6e-21, Identity=85%"; Hit description =Putative ATP-dependent RNA helicase
MSFDSLGLNADILRAVAEQGYREPTPIQRQAIPVVLGRRDLLASAQTGTGKTRRFTLPLL

SEQ ID NO: 13990 - protein, 264 aa, Zea mays
  Coding DNA Sequence Number=SeqID_1209
  Gene Ontology: Mol. function=cytosol alanyl aminopeptidase activity; Cellular component=cytoplasm; Biological process=peptide metabolic process
  Homolog annotation: Hit_ID=Q6D3E2; Match level="QueryCoverage=100%, HitCoverage=64%, E-value=1e-118, Identity=79%"; Hit description =Peptidase
  Pfam annotation: Domain name=M20_dimer; Domain location=130-234; Score=69.9; E_value=8.6e-18; Accession=PF07687.4; Description =Peptidase dimerisation domain
FITHIDTVDVGLSPDIHPQTLRFEGADLCLNAQQDIWLRVAEHPEILPYVGQEIVFSDGTSVLGADNKAAVSVVMTLVENLRGEHGDVVVAFVPDEEIGLRGAKALDLETRFNVDFAWTIDCCELGEVVYECFNGASAEITFTGVPAHPMSGKGVLVNPLLMAHDFIARFDRLATPEHTAGREGYIWFNDMQANASQAVLKASIRDFDLKGFDAKKQQLVEVADQIAAHYPTGHVALKINDIYSNISNAIGEDRRAIDLIFAAL

SEQ ID NO: 13991 - protein, 184 aa, Zea mays
  Coding DNA Sequence Number=SeqID_1210
  Gene Ontology: Mol. function=peptidyl-prolyl cis-trans isomerase activity; Cellular component=integral to membrane; Biological process=protein folding
  Homolog annotation: Hit_ID=A6T5I4; Match level="QueryCoverage=100%, HitCoverage=29%, E-value=2e-71, Identity=72%"; Hit description =Peptidyl-prolyl cis-trans isomerase D
  Pfam annotation: Domain name=Rotamase; Domain location=31-112; Score =70.9; E_value=4.1e-18; Accession=PF00639.11; Description=PPIC-type PPIASE domain
QENASEADIQSWYDQHKADYSQPQRNRYSIIQTKTEADANAVLDALKKGEDFATLAKSKSIDPISARKGGDMGWLEPNTTPDELKNANLTQKGQLSGVIKSSVGFLVVRLDDIQPEQVKPLAEVHDAVADKVKQEKAVDAFYKMQQKVSEAASNDNESLAGAAQASGLKVVETGWITRDNVPAD

SEQ ID NO: 13992 - protein, 126 aa, Zea mays
  misc_feature (56)..(56): Xaa can be any naturally occurring amino acid
  misc_feature (91)..(91): Xaa can be any naturally occurring amino acid
  misc_feature (114)..(114): Xaa can be any naturally occurring amino acid
  Coding DNA Sequence Number=SeqID_1211
  Gene Ontology: Mol. function=pyruvate kinase activity; Cellular component=cytoplasm; Biological process=glycolysis
  Homolog annotation: Hit_ID=A2XYZ3; Match level="QueryCoverage=96%, HitCoverage=23%, E-value=3e-24, Identity=55%"; Hit description =Pyruvate kinase
  Pfam annotation: Domain name=PK_C; Domain location=6-124; Score=38.8; E_value=1.9e-08; Accession=PF02887.6; Description=Pyruvate kinase, alphabeta domain
MLCMYADKAKTAMIVVVSSDGTADILVVKHRSTVPIVSVVVAVLIMESIWVLISWXGTARHSLIYRGVIPILWEGSRKGMDSESTEVHLVXALKSSVHKQLCKSGDAIVDLVLXGVASVITICIGK

SEQ ID NO: 13993 - protein, 105 aa, Zea mays
  Coding DNA Sequence Number=SeqID_1212
  Gene Ontology: Mol. function=structural molecule activity; Cellular component=protein complex; Biological process=microtubule-based movement
  Homolog annotation: Hit_ID=P33628; Match level="QueryCoverage=61%, HitCoverage=57%, E-value=3e-24, Identity=81%"; Hit description =Tubulin alpha chain
  Pfam annotation: Domain name=Tubulin; Domain location=1-105; Score= -65.0; E_value=0.012; Accession=PF00091.15; Description=TubulinFtsZ family, GTPase domain
TFFSETGAGKHVPRALFVDLEPTRIDEVKTGAYRRLFHPEQLISHKEDAANNFACGHYTGAQNVLGNKGTEIAKVVSGSLHRRTDAEAGVEALDAVQQSVVVTTS

SEQ ID NO: 13994 - protein, 104 aa, Zea mays
  Coding DNA Sequence Number=SeqID_1213
  Gene Ontology: Mol. function=DNA topoisomerase activity; Cellular component=chromosome; Biological process=DNA unwinding during replication
  Homolog annotation: Hit_ID=A7MPF3; Match level="QueryCoverage=100%, HitCoverage=54%, E-value=6e-39, Identity=73%"; Hit description =Putative uncharacterized protein
  Pfam annotation: Domain name=Sua5_yciO_yrdC; Domain location=1-104; Score=-11.0; E_value=7.4e-05; Accession=PF01300.8; Description=yrdC domain
  Subcellular localization annotation: CTP_CleavageSite=31; ConfidenceScore=5.25e-01
AFWPGPATYVAPASPHTPRWLTGLFDSLAIRVSDHPQVQALCRGFGKPLVSTSANLTGQPPCRSAAEVAEQFGSQFPVLQAATGGRLNPSEIRDAISGELIRQG

SEQ ID NO: 13995 - protein, 234 aa, Zea mays
  Coding DNA Sequence Number=SeqID_1214
  Gene Ontology: Mol. function=catalytic activity; Cellular component =cytoplasm; Biological process=metabolic process
  Homolog annotation: Hit_ID=Q7X3V5; Match level="QueryCoverage=99%, HitCoverage=72%, E-value=4e-76, Identity=61%"; Hit description=ThiF
  Pfam annotation: Domain name=MoeZ_MoeB; Domain location=70-145; Score= 92.1; E_value=1.7e-24; Accession=PF05237.3; Description=MoeZMoeB domain
  Pfam annotation: Domain name=ThiF; Domain location=1-68; Score=-16.3; E_value=4e-05; Accession=PF00899.11; Description=ThiF family
  Pfam module annotation: Pfam domain module=MoeZ_MoeB::ThiF; Domain location=70-145::1-68
RNPEVQIEAVPEALSASNIAQALAECDLVIDAADNFAVTYQLSDACFQAGIPLISASVLGRQGYAGGFCGGAPSYRALFPQLPASAANCNTAGVIGPAVAALGAMQAQMALSILLGLQPSPLGCMVNCDFVSWHFRSFRFDAAQEPAQPGVPFIDAHLLQPGDCIVELRSCEEAPASVADRVERVLPHELDAWQPPADRRIVLVCASGIRAAQAASALAQRGFNQLAILAARRP

SEQ ID NO: 13996 - protein, 71 aa, Zea mays
  Coding DNA Sequence Number=SeqID_1215
MEEERRDGAGRQVEGRITDDAAEGDAGNGGIGEVCGGGNAEEDLDGGEEAVEKITVTKMKDKTKDSSGAQE

SEQ ID NO: 13997 - protein, 137 aa, Zea mays
  Coding DNA Sequence Number=SeqID_1217
  Gene Ontology: Mol. function=binding
  Homolog annotation: Hit_ID=Q8LAB3; Match level="QueryCoverage=94%, HitCoverage=45%, E-value=8e-34, Identity=55%"; Hit description =Putative uncharacterized protein
MTQRSPDAFDGLMLQLLLKASQDIRFVCEEADRALGLMVGSMTPLPLFQKMRVYGSHKNLRVRAKDAVSLSRCVSKMGLQEMEQFGLVELIEVAADLLNDRLPEARDAARSVATSMYEALTKDSEEKMELWQSFCQS

SEQ ID NO: 13998 - protein, 137 aa, Zea mays
  Coding DNA Sequence Number=SeqID_1218
  Subcellular localization annotation: CTP_CleavageSite=64; ConfidenceScore=5.56e-01
DPAEPGTGESSSPPPRRRTTSTRPHRRQVGALRRSPSRAGPGPTWPRLDPASVVARLALLLLTRLAALARPHLVGDGDGRRVENSAAAATSPVISQRRNSGTRQAATNSPRPPHRRPASSLPCVCSVPGDAELASGQ

SEQ ID NO: 13999 - protein, 161 aa, Zea mays
  Coding DNA Sequence Number=SeqID_1220
VAATDGWVTRTTIWKASERLHGRQAEHVTPTLLCSRRTCIWCICCPPVKPKMRRSFVSSIWPVALAGTGRCLLASSRLVLSRGKHAIKQQRMSRESWTRARSIINHRLGKIPSALNFPTHDSRSAPACEMWTSHEQRILINDCTQATLLRASCQEDKTRAT

SEQ ID NO: 14000 - protein, 97 aa, Zea mays
  misc_feature (50)..(50): Xaa can be any naturally occurring amino acid
  misc_feature (73)..(73): Xaa can be any naturally occurring amino acid
  Coding DNA Sequence Number=SeqID_1222
  Gene Ontology: Mol. function=peptidyl-prolyl cis-trans isomerase activity; Cellular component=periplasmic space; Biological process =protein folding
  Homolog annotation: Hit_ID=P0ABZ8; Match level="QueryCoverage=94%, HitCoverage=21%, E-value=2e-16, Identity=55%"; Hit description =Chaperone surA precursor
KIGRVVFWQVLSSAKNVYIVGPIRSGVGFDILQVNDLHVESKNITVSEVXFGTLCSIRHRSFSKMQARHKIEXIAADINSGKTTFTLASIQLSADEG

SEQ ID NO: 14001 - protein, 131 aa, Zea mays
  misc_feature (11)..(11): Xaa can be any naturally occurring amino acid
  Coding DNA Sequence Number=SeqID_1223
  Gene Ontology: Mol. function=peptidase activity; Cellular component =cytoplasm
  Homolog annotation: Hit_ID=A8GK38; Match level="QueryCoverage=100%, HitCoverage=29%, E-value=2e-55, Identity=81%"; Hit description =Peptidase U62 modulator of DNA gyrase
QSYCSSRHSLXSCVIAEHGGDMERDYAYTIGRAMGDLQSADWVGAECARRVLSRLSPRKLPTMKAPVLFAPEVATGLFGHMVGMISGSSVYRKSAFLLDALGQHILLWWLAIEDKQHLVKGLASTPFDSEG

SEQ ID NO: 14002 - protein, 75 aa, Zea mays
  misc_feature (22)..(22): Xaa can be any naturally occurring amino acid
  Coding DNA Sequence Number=SeqID_1224
  Gene Ontology: Mol. function=carbamoyl-phosphate synthase (ammonia) activity; Biological process=nitrogen compound metabolic process
  Homolog annotation: Hit_ID=Q42601; Match level="QueryCoverage=100%, HitCoverage=6%, E-value=8e-13, Identity=56%"; Hit description =Carbamoyl phosphate synthetase large chain
RFYAILEELSIAPPKGGIARRXFYALAIALEGGYPGGARPLFVFGGRAMEIVVHEQKLVKVLATGGQVKQERPGL

SEQ ID NO: 14003 - protein, 132 aa, Zea mays
  Coding DNA Sequence Number=SeqID_1225
  Gene Ontology: Mol. function=signal transducer activity; Cellular component=integral to membrane; Biological process=signal transduction
  Homolog annotation: Hit_ID=A8GG61; Match level="QueryCoverage=100%, HitCoverage=10%, E-value=1e-39, Identity=57%"; Hit description=ImcF domain protein precursor
QESQRARDGAEWHNFIKLLKRYRTRQPINGVIMTISVADLLTDSAEARHAQASALRSRMVELHQQTGIHFPVYVMVTKTDLLKGFISFYGNLSKPQRDAIWGFTFPWEPGKPHKDDWYRSFSERFQQLEQCL

SEQ ID NO: 14004 - protein, 151 aa, Zea mays
  Coding DNA Sequence Number=SeqID_1226
  Gene Ontology: Mol. function=hydrolase activity; Cellular component =membrane; Biological process=metabolic process
  Homolog annotation: Hit_ID=UPI00005F76B8; Match level="QueryCoverage =88%, HitCoverage=60%, E-value=5e-54, Identity=77%"; Hit description =COG1285: Uncharacterized membrane protein
  Pfam annotation: Domain name=MgtC; Domain location=5-138; Score =203.1; E_value=6.6e-58; Accession=PF02308.7; Description=MgtC family
MLIRIALAGILGGLIGLERQMRAKEAGLRTHILVGIGSAMFMLVSKYGFADMLTNDHVALDPSRIAAQVVSGMGFLGAGTIIIQKQIVKGLTTAAGLWVTAAIGLVIGSGMYEIGIYGTVLALVVLETFRRISHWLIGRHHTLIVHLKAKS

SEQ ID NO: 14005 - protein, 195 aa, Zea mays
  Coding DNA Sequence Number=SeqID_1227
VSPVSRRRNPAAICCCLSGLLVAEAPGPCVAWCSTYRYGGGGDGCSMVGNLEGCVFIRGVSRPAHDLVEPAHGRVGMVVMPLPSRPDWSMGTLRKDPALALGGMRLPNERVALAHVWLVQVPPVGVCRCLGSRALRLVRRRPAHLAHSSRRATGHSVQCQSCPPCPSVSRHPCTRGPESWGRHTLPQPKRRNGPR

SEQ ID NO: 14006 - protein, 112 aa, Zea mays
  Coding DNA Sequence Number=SeqID_1229
LVETPTRGGLINRERSDIVGQRPLSCRLSKWTAFLLFSFVWLFLLFFFFFFFFFASKLLNSQGERQIIQTFDLLPSSNIIDRCGKKRKESHQKSDVRPVQGCCDKFKKENLI

SEQ ID NO: 14007 - protein, 131 aa, Zea mays
  Coding DNA Sequence Number=SeqID_1231
  Gene Ontology: Mol. function=transferase activity, transferring phosphorus-containing groups; Cellular component=outer membrane -bounded periplasmic space; Biological process=two-component signal transduction system (phosphorelay)
  Homolog annotation: Hit_ID=A8GB99; Match level="QueryCoverage=86%, HitCoverage=10%, E-value=4e-23, Identity=51%"; Hit description=Hpt sensor hybrid histidine kinase precursor
  Pfam annotation: Domain name=HisKA; Domain location=18-79; Score =52.2; E_value=1.8e-12; Accession=PF00512.15; Description=His Kinase A (phosphoacceptor) domain
QQRRERLQREQAERANAAKSQFLATASHELRTPMQAILGLLELEQQQHPSARLDLMHSSARSLMTLLNDLQDHARIENHSFRLTPRPLDLTLWLQQQQQFYHPLMRDGGPQLHVAALTPLPASVMLDSDRL

SEQ ID NO: 14008 - protein, 189 aa, Zea mays
  Coding DNA Sequence Number=SeqID_1232
  Gene Ontology: Mol. function=transferase activity, transferring glycosyl groups; Cellular component=membrane; Biological process=UDP- glucose metabolic process
  Homolog annotation: Hit_ID=A4JDK6; Match level="QueryCoverage=98%, HitCoverage=23%, E-value=8e-95, Identity=91%"; Hit description =Cellulose synthase, subunit B precursor
  Subcellular localization annotation: CTP_CleavageSite=32; ConfidenceScore=5.13e-01
LYFSHFVHYAQLPNLAFFANSGFPFTRFADLSQTAVVVPDRPSPQELEAYLTMLGHMGQWTGFPALRVQVARPGDVAALAGRKDLLVIDGSPASPLLSRWRTALPLAIDRQGGTGATRVAFSVKERWRNGVGMADGGAHIEQTGQLAALAGFELPGSHGRSVVALTATDQSRLGDLLDVFQKPGLVSQL

SEQ ID NO: 14009 - protein, 139 aa, Zea mays
  misc_feature (123)..(124): Xaa can be any naturally occurring amino acid
  misc_feature (128)..(128): Xaa can be any naturally occurring amino acid
  Coding DNA Sequence Number=SeqID_1233
  Homolog annotation: Hit_ID=A0FPM1; Match level="QueryCoverage=93%, HitCoverage=64%, E-value=9e-52, Identity=77%"; Hit description =Putative uncharacterized protein precursor
QDIKPGSFVGTAATTGVDGKLTATEVLVFPEAARGTGEGHYAWDLGSNSTMTNANVDQVVQGTSGRDLKLSYKGGSNAVTVPENVPVVTFAPATRDDLKSGKQVFVVASPAGSDYKAQRIVVXXDGVXPPVNRDGVAAM

SEQ ID NO: 14010 - protein, 147 aa, Zea mays
  Coding DNA Sequence Number=SeqID_1234
  Gene Ontology: Mol. function=metal ion binding
  Homolog annotation: Hit_ID=B0FLE0; Match level="QueryCoverage=87%, HitCoverage=30%, E-value=3e-32, Identity=51%"; Hit description=Yrg1
MGNVAASGGVQVRRRPPAVDERLTRPRRLVRELPDLDAGRLRRLIRTGDLAPCFDPAEDASAGLTEECPICFFFYPSLNRSRCCGKGICTECFLQLMPSEASKLVHCPFCKTKAYAIEYQGAQMTSGKEIKQEGEPNVNETKPSVYI

SEQ ID NO: 14011 - protein, 169 aa, Zea mays
  misc_feature (16)..(26): Xaa can be any naturally occurring amino acid
  misc_feature (28)..(28): Xaa can be any naturally occurring amino acid
  misc_feature (155)..(155): Xaa can be any naturally occurring amino acid
  Coding DNA Sequence Number=SeqID_1235
  Homolog annotation: Hit_ID=A7NWE7; Match level="QueryCoverage=97%, HitCoverage=12%, E-value=2e-55, Identity=66%"; Hit description =Chromosome chr5 scaffold_2, whole genome shotgun sequence
  Subcellular localization annotation: CTP_CleavageSite=30; ConfidenceScore=5.21e-01
SVPLLGENSLALRKSXXXXXXXXXXXTXNSCMVLSRECKTNSQKKFQTVMSFEYLSSSASLCHGASHSALWIPLDLVLEDSMDGYQVSATSSIETISGLIKTLRAINGTSWHDTFLGLWLATLRLVQRERDPIDGPMPHLDTRLCMLLCIIPLVXGDLIEEEEERTPVD

SEQ ID NO: 14012 - protein, 86 aa, Zea mays
  Coding DNA Sequence Number=SeqID_1236
  Gene Ontology: Mol. function=protein tyrosine/serine/threonine phosphatase activity; Biological process=protein amino acid dephosphorylation
  Homolog annotation: Hit_ID=A2V7M8; Match level="QueryCoverage=98%, HitCoverage=10%, E-value=3e-27, Identity=75%"; Hit description=MAP kinase phosphatase
QPLAITRRSLDEWPRAGSDDVCEWPNPTTPGASKAGGGPSSARPGEGLRLDLSSLRSQGRKDQIAFFDKECSKVADHVYLGGDVVF

SEQ ID NO: 14013 - protein, 84 aa, Zea mays
  Coding DNA Sequence Number=SeqID_1237
  Subcellular localization annotation: CTP_CleavageSite=48; ConfidenceScore=5.40e-01
HSGMATSIGRHGLRMSSRRRNPPNMNLRCAATRCAPPAGDAADAASCRASATGCPSFLAHRQAAMSSPSPSSPGAQPSVDDVTS

SEQ ID NO: 14014 - protein, 204 aa, Zea mays
  Coding DNA Sequence Number=SeqID_1239
  Subcellular localization annotation: CTP_CleavageSite=26; ConfidenceScore=5.15e-01
MAAQRNAREACTCKSKSSSRPVMRVTTDERREGGSTARRAGRDSRTGVSRSEFVPTARHMIDEAQDKTRTRSAAPVPVPSSTTGGSGGDRPSTHAGREENTHAIGVQQHYYHYAAVDFRSSPFISLPSGRLPTHPLVRLEDSSRPGPVLTSSSVYSPRRRTVEVETTTTTTTTTSLVRTRPCTALTCFLVANLPAAPPPNYNTP

SEQ ID NO: 14015 - protein, 141 aa, Zea mays
  misc_feature (106)..(106): Xaa can be any naturally occurring amino acid
  Coding DNA Sequence Number=SeqID_1241
  Gene Ontology: Mol. function=GTP binding; Cellular component =intracellular
  Homolog annotation: Hit_ID=A2ZQV3; Match level="QueryCoverage=86%, HitCoverage=16%, E-value=2e-46, Identity=77%"; Hit description =Putative uncharacterized protein
GLETAATSGSILARTADMTGNVLARSQFAIFLIDVRGGLQPLDLEGGQWLPKPSFGIHTLVAMNKSQSLDEHGFLTAAAGKTHQLGFGDPGAIFPKTSLGMAKLYXILKPLVEEFLVQLPNNKPGAIYWMNWSILTSSQNK

SEQ ID NO: 14016 - protein, 183 aa, Zea mays
  Coding DNA Sequence Number=SeqID_1242
  Subcellular localization annotation: CTP_CleavageSite=33; ConfidenceScore=5.35e-01
GVPSRRPLVRLVAMADVRLRVRQSSLARLCPVRAQPKSPARSRGFLCTAFLLPSLRRARQHVIHVEAVAAIPCVALVRSSLALSICADRFRRLSISYSPWLSRRLFVSKLVQLASRRALFTRWAVCCRVHLIVSSWLYRHIAMIPGSRSPQLERVVLPSSSSNGNCCAGMSILLIAILVYVKS

SEQ ID NO: 14017 - protein, 169 aa, Zea mays
  misc_feature (155)..(155): Xaa can be any naturally occurring amino acid
  Coding DNA Sequence Number=SeqID_1244
  Gene Ontology: Mol. function=DNA binding; Cellular component=nucleus; Biological process=embryonic development ending in seed dormancy
  Homolog annotation: Hit_ID=A7QC14; Match level="QueryCoverage=100%, HitCoverage=23%, E-value=5e-66, Identity=71%"; Hit description =Chromosome chr10 scaffold_76, whole genome shotgun sequence
  Pfam annotation: Domain name=JmjC; Domain location=1-52; Score=18.8; E_value=1.5e-05; Accession=PF02373.13; Description=JmjC domain
EQVTQFSPSILKSEGVPVYRTVQHSGEFVITFPRAYHAGFNCGFNCAEAVNVAPIDWLMHGQSAVELYRLQCRKTSLSHDKLLFGSALESVRALAELALGKETPKNLKWGSVCGKDGDLTKAVRARIKMEEERLDCLPTHLKLLKMNSNFDLYRXRECFSCFYDLHLSA

SEQ ID NO: 14018 - protein, 89 aa, Zea mays
  Coding DNA Sequence Number=SeqID_1245
EFYGLEHFAEHLALTNGRSVAGSWARLLACGLDGGAAGTGRTAGPLGAGGTVEEERPAGWARGRTAELAAAGAWFPLQFWFPGEWLDGG

SEQ ID NO: 14019 - protein, 104 aa, Zea mays
  Coding DNA Sequence Number=SeqID_1247
  Gene Ontology: Mol. function=hydrolase activity, hydrolyzing O -glycosyl compounds; Cellular component=anchored to membrane; Biological process=carbohydrate metabolic process
  Homolog annotation: Hit_ID=Q6YVU2; Match level="QueryCoverage=79%, HitCoverage=28%, E-value=1e-31, Identity=75%"; Hit description =Putative beta-1,3-glucanase
  Pfam annotation: Domain name=X8; Domain location=15-95; Score=153.4; E_value=6.4e-43; Accession=PF07983.3; Description=X8 domain
AAILGLAVLLISGSSWCVANAAVGDARLQAALDYACGHGADCSTIQPGATCFEPNTKVAHASHAFNSYYQRNGRASGTCDFAGAASVVYQAPGEYIFVIICDDH

SEQ ID NO: 14020 - protein, 121 aa, Zea mays
  Coding DNA Sequence Number=SeqID_1248
  Gene Ontology: Mol. function=sequence-specific DNA binding; Cellular component=intracellular; Biological process=regulation of transcription, DNA-dependent
  Homolog annotation: Hit_ID=Q1LEN9; Match level="QueryCoverage=96%, HitCoverage=37%, E-value=3e-36, Identity=62%"; Hit description =Transcriptional regulator, AraC family with amidase-like domain
QAQAPRARRVAGICTGAFVLGQAGLLSERRATTHWVHAQSLQLLHPTTRIEEDRIFIIDDHIWTSAGLTAGLDMALGMVEKDLGAEVARSVAHLLVMHHRRSGGQTQHSEMLMLSPRSDRL

SEQ ID NO: 14021 - protein, 220 aa, Zea mays
  misc_feature (188)..(189): Xaa can be any naturally occurring amino acid
  misc_feature (191)..(191): Xaa can be any naturally occurring amino acid
  Coding DNA Sequence Number=SeqID_1249
  Gene Ontology: Mol. function=nucleic acid binding; Cellular component= chromatin; Biological process=chromatin assembly or disassembly
  Homolog annotation: Hit_ID=Q6YNJ6; Match level="QueryCoverage=100%, HitCoverage=16%, E-value=1e-104, Identity=85%"; Hit description =Chromatin-remodeling factor CHD3
  Pfam annotation: Domain name=SNF2_N; Domain location=1-153; Score= -18.2; E_value=1e-07; Accession=PF00176.13; Description=SNF2 family N- terminal domain
VDEGHRLLNKDSKLFGQRKDYNTKHRVLLTGTPVQNNLDELFMLMHFLEGESFGSITDLQEEFKDINQDKQIEKLHGMLKPHLLRRFKKDVMKELPPKKELILRVELTRKQKEYYKPILTKNYDVLARRNGGHTSLINVVMELRKLCCHGFMIDEPDLEPANPEEGLKTLLYSSGKMQLLHKMMEKLXXQXHRSLIYSQFHHMLDLLEDYLNYRKWTYER

SEQ ID NO: 14022 - protein, 92 aa, Zea mays
  Coding DNA Sequence Number=SeqID_1250
  Homolog annotation: Hit_ID=Q37953; Match level="QueryCoverage=68%, HitCoverage=62%, E-value=8e-07, Identity=51%"; Hit description=LacZ protein
GDPLKSTCRLPTWALPVFLHRGDGKTPGVPQLNGLENIPFSTCGNIEEARPIRLSKQFATLIGNVALIRIFFFHPFVRILTPIMGHFKSILF

SEQ ID NO: 14023 - protein, 84 aa, Zea mays
  Coding DNA Sequence Number=SeqID_1251
LLESYPCLGGGDCVLVLSRLFTCRGLGSRLPMPFSWASSVPAGTTCPPLTYGWSAEGRAMSERGAGVTDRNVLDRLNDACCAPT

SEQ ID NO: 14024 - protein, 234 aa, Zea mays
  misc_feature (204)..(204): Xaa can be any naturally occurring amino acid
  Coding DNA Sequence Number=SeqID_1253
  Gene Ontology: Mol. function=metal ion binding; Cellular component =plasma membrane; Biological process=cytokinin metabolic process
  Homolog annotation: Hit_ID=Q69V56; Match level="QueryCoverage=99%, HitCoverage=52%, E-value=1e-101, Identity=81%"; Hit description =Putative copine I
  Pfam annotation: Domain name=Copine; Domain location=110-234; Score =161.5; E_value=2.3e-45; Accession=PF07002.6; Description=Copine
  Subcellular localization annotation: CTP_CleavageSite=34; ConfidenceScore=5.38e-01
MGQKDSKPSNGYGYSSDYGGTSSGYNLRNTGSTSSSYGARYVPSSENNVQPETHARLQRKYSRIGDDYRSLSQVTEALAQAGLESSNLIVGIDFTKSNEWTGKISFNRRCLHDIGNTPNPYEQAISIIGRTLSVFDEDNLIPCFGFGDASTHDQEVFSFYPENRPCNGFEEALDRYREIVPTLRLAGPTSFAPMIETAIGIVDXSTGGQYHVLLRIADGQGTPSVDTHSWQVSA

SEQ ID NO: 14025 - protein, 90 aa, Zea mays
  Coding DNA Sequence Number=SeqID_1254
  Gene Ontology: Mol. function=maleylacetoacetate isomerase activity; Cellular component=cytoplasm; Biological process=aromatic amino acid family metabolic process
  Homolog annotation: Hit_ID=Q0KEQ8; Match level="QueryCoverage=88%, HitCoverage=36%, E-value=6e-26, Identity=68%"; Hit description =Maleylacetoacetate isomerase
  Pfam annotation: Domain name=GST_N; Domain location=1-67; Score=11.5; E_value=0.057; Accession=PF02798.10; Description=Glutathione S -transferase, N-terminal domain
MRGGVDGIGEFAQLSYDYVPVHLLRDGGEQLKPEYRCMNQDGIVPTLVDDDAHVIQQSLAIIEYLDETHPEPPLLPGSAADRAHVRSIAL

SEQ ID NO: 14026 - protein, 224 aa, Zea mays
  misc_feature (205)..(205): Xaa can be any naturally occurring amino acid
  Coding DNA Sequence Number=SeqID_1255
  Gene Ontology: Mol. function=2,4-dienoyl-CoA reductase (NADPH) activity; Cellular component=cytosol; Biological process=metabolic process
  Homolog annotation: Hit_ID=A6T9B7; Match level="QueryCoverage=100%, HitCoverage=61%, E-value=2e-90, Identity=73%"; Hit description =Putative NADH:flavin oxidoreductase/NADH oxidase
  Pfam annotation: Domain name=Oxidored_FMN; Domain location=1-222; Score=6.4; E_value=2.5e-12; Accession=PF00724.10; Description =NADH:flavin oxidoreductase  NADH oxid
VRRYATLPIGIQLGHAGRKASCAAPWQGGAQLSEEHGGWQTVAPSAQPFAQDERPPAALSKQDLAQLKQAFVDSALRAVRIGIQLVELHAAHGYLLHQFLSPLSNQRDDEYGGSLENRLRFPLEVFKALRAALPAEIPVGVRLSATDWIEGGWDNQQSIVFSQQLEAAGCAYIHVSSGGLAPQQQISVGPGYQLPFAREIRQQVXIPVIGVGLITKPKQAEQAL

SEQ ID NO: 14027 - protein, 85 aa, Zea mays
  Coding DNA Sequence Number=SeqID_1256
  Subcellular localization annotation: CTP_CleavageSite=41; ConfidenceScore=5.40e-01
HQSVSHSSQQTPRSRPRSQTRPSKAQSPPTADQSAASMAPKAEKKPAAKKPAEEEPATEKAEKAPGRGGFAVFAVSSEGQLVVIV

SEQ ID NO: 14028 - protein, 110 aa, Zea mays
  Coding DNA Sequence Number=SeqID_1258
MHSYTPPLPSAGPPAAAQLLVLMLAYFRFLADSDCDREEMLALACGLPTYIQSLPARTPVSILKMTWVSYSVSCLMAEEASAESRAAGTRLATLLEQTESVERAYTHHPT

SEQ ID NO: 14029 - protein, 74 aa, Zea mays
  Coding DNA Sequence Number=SeqID_1259
MITLSDSSDRERAGAASESSSFDKVLCHLLFRYKFGIKRRSRQQEGGPALLDLSHGEGGGGGGASGGCARAEFR

SEQ ID NO: 14030 - protein, 118 aa, Zea mays
  misc_feature (79)..(79): Xaa can be any naturally occurring amino acid
  Coding DNA Sequence Number=SeqID_1261
  Homolog annotation: Hit_ID=Q6CYV0; Match level="QueryCoverage=99%, HitCoverage=27%, E-value=2e-41, Identity=64%"; Hit description =Putative uncharacterized protein
QPRHWLRAAPDGSAIAFLQADEQGIVQLWTVSPNGGAARQITSLRSSIQSAFSWQPDGAAIAFICDNSVMRCEIASGQXTRLTARSAQPPGGDAVVWSPDGKQIAYMREVDGWRQLFC

SEQ ID NO: 14031 - protein, 200 aa, Zea mays
  Coding DNA Sequence Number=SeqID_1262
  Homolog annotation: Hit_ID=Q5N8I8; Match level="QueryCoverage=43%, HitCoverage=35%, E-value=4e-08, Identity=42%"; Hit description =Putative uncharacterized protein P0047E11.2
MPAVDAWPRALVRTRFLLLKRKRSVASRTLAALLQTKGDSSPWTPMCRWYRCASTVLDHPVSPIHLDMYRVLLATSVPSRSSMMVDVVMVPSRRTSPEREGMVDEVEEEVHAMVVQEPEVVEALEVTKVHPVLESEPRVDEVLVVNETPVVPEIQEPEVKGVGATVVLKEQETNSGNVVVKDSDEALPSQEVAGVHTTDR

SEQ ID NO: 14032 - protein, 82 aa, Zea mays
  Coding DNA Sequence Number=SeqID_1263
CVEGAQYTVSNPEQMSKDTIQHQAPLAIQLGQLMVGPIGSILFGINAAVESGMCCKANNRVSPGIFQYLRCTQRASAEIASP

SEQ ID NO: 14033 - protein, 104 aa, Zea mays
  Coding DNA Sequence Number=SeqID_1264
  Gene Ontology: Mol. function=microtubule motor activity; Cellular component=microtubule associated complex; Biological process =microtubule-based movement
  Homolog annotation: Hit_ID=A5C8Q9; Match level="QueryCoverage=87%, HitCoverage=5%, E-value=3e-32, Identity=74%"; Hit description =Putative uncharacterized protein
MFIFCFLTNPFPEKTHTMEGSSYDRGLYARCFEELFDLANLDATSTSRYKFCVTVCELYNEQTRDLLLEAGKSAPKLCLGSPECFIELVQENVDNPLEFSEVLK

SEQ ID NO: 14034 - protein, 121 aa, Zea mays
  Coding DNA Sequence Number=SeqID_1265
  Homolog annotation: Hit_ID=A9AQ73; Match level="QueryCoverage=100%, HitCoverage=29%, E-value=5e-52, Identity=83%"; Hit description=Type VI secretion protein, VC_A0114 family
MAGELSTHLRTDTRRPLASQPAYRHTAPYASLKPIVDDTHRLLNAVLVRSAQSIALKDLSHGMHDAVVDPADMRGFTALVLAVHAAMPPDVLQQQFLAQAKVGPSDKLPSLVGSHLPGIGL

SEQ ID NO: 14035 - protein, 76 aa, Zea mays
  misc_feature (24)..(24): Xaa can be any naturally occurring amino acid
  misc_feature (44)..(44): Xaa can be any naturally occurring amino acid
  Coding DNA Sequence Number=SeqID_1266
  Gene Ontology: Mol. function=cytochrome-c oxidase activity; Cellular component=mitochondrial envelope; Biological process=electron transport
  Homolog annotation: Hit_ID=P92683; Match level="QueryCoverage=98%, HitCoverage=44%, E-value=7e-22, Identity=61%"; Hit description =Cytochrome c oxidase subunit Vb
  Pfam annotation: Domain name=COX5B; Domain location=1-63; Score= -12.9; E_value=0.0007; Accession=PF01215.9; Description=Cytochrome c oxidase subunit Vb
IQPYTWNEEPTMIESYNNKRTIGXSGGEGEDEHDVVWFWLQKDXPHECPVYSQYFVLKVIGDGGDPNGHYDKDDHQ

SEQ ID NO: 14036 - protein, 57 aa, Zea mays
  Coding DNA Sequence Number=SeqID_1267
RYSCHCSITDSFRFVVLLCRALYLFQRQAFNYPLNLGITFKTIRDHKANKTALNLIK

SEQ ID NO: 14037 - protein, 251 aa, Zea mays
  Coding DNA Sequence Number=SeqID_1269
  Gene Ontology: Mol. function=oxidoreductase activity; Cellular component=integral to membrane; Biological process=potassium ion transport
  Homolog annotation: Hit_ID=A0JVH3; Match level="QueryCoverage=100%, HitCoverage=77%, E-value=1e-126, Identity=87%"; Hit description =Aldo/keto reductase
  Pfam annotation: Domain name=Aldo_ket_red; Domain location=8-251; Score=89.7; E_value=9.2e-24; Accession=PF00248.11; Description =Aldoketo reductase family
MTDYRRVGNSGLTVSAVGLGCNNLGRAGTATETQEGTDAVVHAALDAGITFFDVADVYGREPGLSETMLGKALAGRRDDAVIGTKFGLDMNGANGNDFGARGSRRYIIRAVEASLRRLGTDWIDLYQFHTPDPQTPIEETLDALNELVASGKVRYIGHSNRAGWQIAEAEYVARARGGARFISSQNHYNLLDRRAEQEVTPAAEAYGLGVLPYFPLANGLLTGKYAKGQAPEGSRLSHTRTNLVNDADWDQ

SEQ ID NO: 14038 - protein, 77 aa, Zea mays
  Coding DNA Sequence Number=SeqID_1270
  Homolog annotation: Hit_ID=Q8W0Y1; Match level="QueryCoverage=100%, HitCoverage=10%, E-value=2e-34, Identity=83%"; Hit description =Putative transposase
CWEQMVDRWWSSKWDVAHNASQERRMMMQGPSHHQGSHSLGKYAEAWSASHGGYPCSIFSAYAMAHKGKATSDVTYN

SEQ ID NO: 14039 - protein, 151 aa, Zea mays
  Coding DNA Sequence Number=SeqID_1271
  Gene Ontology: Mol. function=transferase activity; Cellular component= membrane; Biological process=teichoic acid biosynthetic process
  Homolog annotation: Hit_ID=A6V998; Match level="QueryCoverage=98%, HitCoverage=12%, E-value=5e-58, Identity=68%"; Hit description=O -antigen biosynthesis protein
QSLRNQGKKPRVGWAGGSSHTGDLEMIVDVVRHFANDVEWVFFGMCPPKLRPFIHEYHHGVEIERYPAKLASLNLDLALAPVEDNFFNTCKSNLRLMEYGACGIPVICSDVACYRGDLTVTRVKNRHKDWVDAINMHLLDPAASAQMGARL

SEQ ID NO: 14040 - protein, 112 aa, Zea mays
  Coding DNA Sequence Number=SeqID_1272
LARRPDSLHLPATFRAQERIGVQRRGLAHGVRHQLPHTIRRRPVLDRLWLRHRPRSSLRHPPGREAAQLIGISNHGDKGPLITSSSTIARRCVNPPMHRPFTAPGSLDIDRS

SEQ ID NO: 14041 - protein, 81 aa, Zea mays
  Coding DNA Sequence Number=SeqID_1274
RQGNGEDDNDANALRRLSLGDVKNASQGDAQSKRELVQCRVAVVLMLQKGKVEVQLLQAMYSSQLLSFTESCICSRPNSRL

SEQ ID NO: 14042 - protein, 125 aa, Zea mays
  Coding DNA Sequence Number=SeqID_1276
SLLVLACAGVARFVVGVSVFADVGDWALGPLAAAFLRLLVGPVGFGLLGVALRFFGPVLGGGVRPGVSRAGAVLWASLAAGRLRAPVGVAGGVLLAHPVLCRVALRRLLPRALRVLRGANLEALL

SEQ ID NO: 14043 - protein, 71 aa, Zea mays
  Coding DNA Sequence Number=SeqID_1278
  Gene Ontology: Mol. function=nucleoside-triphosphatase activity; Cellular component=integral to membrane; Biological process =proteolysis
  Homolog annotation: Hit_ID=Q8GU88; Match level="QueryCoverage=91%, HitCoverage=4%, E-value=3e-11, Identity=60%"; Hit description =Putative pleiotropic drug resistance protein 7
EVDLEARKMHVEDVAELVELIPLRGGLVGLPGVNGLSTEQRKRLPIAVEVVAHPSLIIMDEPTSGRCDGRG

SEQ ID NO: 14044 - protein, 79 aa, Zea mays
  Coding DNA Sequence Number=SeqID_1279
  Homolog annotation: Hit_ID=P58266; Match level="QueryCoverage=98%, HitCoverage=24%, E-value=4e-07, Identity=44%"; Hit description =Cytochrome c biogenesis protein ccsA
MVCVHFSFKTISIVITIHLITLLVRELRGLRDSSEKRMIATFFSITGFLVSRYGLTRSWASRSMVSSYLFSMSFHYVYH

SEQ ID NO: 14045 - protein, 101 aa, Zea mays
  Coding DNA Sequence Number=SeqID_1280
VQARLSPSLQSSRFLRAPLQSVEGVAVRTPFCNPHAFLDSLFDLPSSTMEQIDTGKVDQYLQQLPLMAVIVSATARRLALFSTSLASYDAQSHRDAELLVR

SEQ ID NO: 14046 - protein, 60 aa, Zea mays
  Coding DNA Sequence Number=SeqID_1282
  Gene Ontology: Mol. function=nucleoside-triphosphatase activity; Cellular component=membrane; Biological process=protein catabolic process
  Homolog annotation: Hit_ID=Q8LQJ8; Match level="QueryCoverage=100%, HitCoverage=8%, E-value=3e-16, Identity=70%"; Hit description=Cell division protein ftsH (FtsH)-like
FSLVPDSGSALFNFGLYTGLGLNEEVRPNMDSKTKFSDVKGVDEAKAELEEIVHYLRDPK

SEQ ID NO: 14047 - protein, 166 aa, Zea mays
  Coding DNA Sequence Number=SeqID_1283
  Subcellular localization annotation: CTP_CleavageSite=3; ConfidenceScore=5.05e-01
CVTAAVPLPPACLPPFFPFFGGILPGDVWMALGAAACHCATRRRGPARREVDPRRLRLQTRLDSGTRISSSLPRDRDSRLKRGVGPGLRDGRLLLVEEDMGTGPPATASTEQRCKEPRTSRVAFACLRMLMPLLGPAEFWNNLLRSHRVLERIQAHDAENETRGIP

SEQ ID NO: 14048 - protein, 58 aa, Zea mays
  Coding DNA Sequence Number=SeqID_1285
  Gene Ontology: Mol. function=transcription factor activity; Cellular component=intracellular; Biological process=regulation of transcription, DNA-dependent
  Homolog annotation: Hit_ID=P03023; Match level="QueryCoverage=93%, HitCoverage=15%, E-value=4e-11, Identity=66%"; Hit description =Lactose operon repressor
NSSCYLPPLATIVQHFGILWRTSVERLAQLSQGQAVKRIHLLPVSVEKTKPTLALDPR

SEQ ID NO: 14049 - protein, 247 aa, Zea mays
  Coding DNA Sequence Number=SeqID_1286
  Gene Ontology: Mol. function=protein serine/threonine kinase activity; Cellular component=nuclear speck; Biological process =protein amino acid phosphorylation
  Homolog annotation: Hit_ID=Q53N86; Match level="QueryCoverage=96%, HitCoverage=41%, E-value=1e-108, Identity=80%"; Hit description =Protein kinase homolog F21B7.1-Arabidopsis thaliana
  Pfam annotation: Domain name=Pkinase; Domain location=79-247; Score =83.1; E_value=8.8e-22; Accession=PF00069.15; Description=Protein kinase domain
  Pfam annotation: Domain name=Pkinase_Tyr; Domain location=79-243; Score=-38.0; E_value=4.5e-10; Accession=PF07714.7; Description =Protein tyrosine kinase
  Pfam module annotation: Pfam domain module=Pkinase::Pkinase_Tyr; Domain location=79-247::79-243
GTPVGQHTKSSMHHRLKIWISSGHNGIMGKYGNKLELVMPHEARPLLLDEHAKPGWPDWLINVAPEAVRGWFPRRQDSFEKLDKVGQGTYSSVYKARDLKTDKFVALKKVRFVNVDPESVRFMAREILILRKLNHPNIIKLEGIITSSVSRSLYLVFEYMEHDLVGLAATPGLKFTEPQVKCLFQQLLSGLDHCHSNGVVHRDLKCSNLLIDNNGVLKIADFGLATTFDPDNQQPLTSRVATLWYRP

SEQ ID NO: 14050 - protein, 118 aa, Zea mays
  misc_feature (86)..(86): Xaa can be any naturally occurring amino acid
  Coding DNA Sequence Number=SeqID_1287
  Gene Ontology: Mol. function=protein serine/threonine kinase activity; Biological process=protein amino acid phosphorylation
  Homolog annotation: Hit_ID=A3B6F8; Match level="QueryCoverage=52%, HitCoverage=14%, E-value=5e-09, Identity=53%"; Hit description =Putative uncharacterized protein
  Subcellular localization annotation: CTP_CleavageSite=73; ConfidenceScore=5.41e-01
ISHLVSWFKKEKLVLNPTVTNSPTSWAGPSSTALKHGRLALSVLAHTRPVTLSLFTAGEGEPVAVKSADVATAAAHLRREGEIMAXLSSPHVLPCLGFRAAAGGEFQLLLEFAAVATR

SEQ ID NO: 14051 - protein, 201 aa, Zea mays
  Coding DNA Sequence Number=SeqID_1288
  Gene Ontology: Mol. function=serine carboxypeptidase activity; Biological process=proteolysis
  Homolog annotation: Hit_ID=A4F815; Match level="QueryCoverage=99%, HitCoverage=40%, E-value=6e-57, Identity=56%"; Hit description =Peptidase S10, serine carboxypeptidase
QSAHGLYLNGIMLISSVLDLDTVDFEYRNDRAYVDYLPTYAATAHHHGKHGRKALRTVLAEAEEYAARDYPWALARGSRLTAAERAEHVRRISELTGLSPEYVDRADLRIEHVHFLTELLRDRGLAVGRLDTRFSGPLHQGNAATWDADPSMDAILGPYSAALNHYLRQELGYRQDLAYTASSSRAYKEWSFKEFEGKPVD

SEQ ID NO: 14052 - protein, 76 aa, Zea mays
  misc_feature (29)..(29): Xaa can be any naturally occurring amino acid
  Coding DNA Sequence Number=SeqID_1289
  Gene Ontology: Mol. function=nucleoside-triphosphatase activity; Cellular component=nucleolus; Biological process=ribosomal large subunit export from nucleus
  Homolog annotation: Hit_ID=A2Y8F3; Match level="QueryCoverage=82%, HitCoverage=7%, E-value=3e-12, Identity=65%"; Hit description =Putative uncharacterized protein
ICKLASCWSGPPGCGKTLIAKAVAHEGRXANFIHIKGPEVLNQYGGEEGIRKVRKKSIGEGILPQAIVFFDEGVSN

SEQ ID NO: 14053 - protein, 57 aa, Zea mays
  Coding DNA Sequence Number=SeqID_1290
LRRYSSRSSNTGPLQSAMQLTLFVLYFFLQSQVTWSLDVFIGGRICRFEMSSSHVCY

SEQ ID NO: 14054 - protein, 129 aa, Zea mays
  Coding DNA Sequence Number=SeqID_1292
MTAGALRAADGSQRAVTSRYGAHGVGVLRRQDRMTMLALDQRGSLRTMLARDRPVPQVPDAELISFKAQAVAALASDASAVLLDSTYGRAAMAALPGETPLILAADQFRQQPGGPVDQSGFDELVTPGT

SEQ ID NO: 14055 - protein, 72 aa, Zea mays
  Coding DNA Sequence Number=SeqID_1293
GGELPLGENVFTSYIPCEVFYPEYAALILGRLLYQDISPSLQIQKIIKHRQLPLVKAPLLKSLIQIPHQEEH

SEQ ID NO: 14056 - protein, 169 aa, Zea mays
  Coding DNA Sequence Number=SeqID_1295
  Gene Ontology: Mol. function=transcription regulator activity; Cellular component=nucleus; Biological process=regulation of transcription
  Homolog annotation: Hit_ID=Q10LR1; Match level="QueryCoverage=87%, HitCoverage=85%, E-value=6e-44, Identity=68%"; Hit description=BHLH transcription factor bHLH033, putative, expressed
MMSRERKKAAAALQEKLKILRSTTHSHALSNTSIIMDASAYIKQPQQKVVRLNQEIACAQDALRHKSSSYPTVSVETLGVQGFLVNVFSDKSCPGLLVSVLEAFDELGLSVLQATASCAADSFRLEAVGGENVVDNVDEHVVKQAVLQAVRSCPESGCGGEHDDEESLG

SEQ ID NO: 14057 - protein, 104 aa, Zea mays
  misc_feature (16)..(16): Xaa can be any naturally occurring amino acid
  Coding DNA Sequence Number=SeqID_1296
  Gene Ontology: Mol. function=two-component sensor activity; Cellular component=integral to membrane; Biological process=two-component signal transduction system (phosphorelay)
  Homolog annotation: Hit_ID=A1FFW6; Match level="QueryCoverage=89%, HitCoverage=13%, E-value=1e-25, Identity=63%"; Hit description =Diguanylate cyclase/phosphodiesterase with PAS/PAC sensor
  Pfam annotation: Domain name=EAL; Domain location=1-93; Score=-72.6; E_value=8.6e-06; Accession=PF00563.11; Description=EAL domain
RWACRLRSDDFGTGFXKLSYLRSFPFDKIKLDKSFINVMGDSREALAIIRAITGMSRSLDIQITAEGVESNEQFVRLREEGWTLFQGYLFGRPQASELTLKALE

SEQ ID NO: 14058 - protein, 159 aa, Zea mays
  Coding DNA Sequence Number=SeqID_1297
  Gene Ontology: Mol. function=signal transducer activity; Cellular component=membrane; Biological process=signal transduction
  Homolog annotation: Hit_ID=A7MQ09; Match level="QueryCoverage=99%, HitCoverage=13%, E-value=9e-71, Identity=79%"; Hit description =Putative uncharacterized protein
QFPLADKFGKAALRGIGGTRNCDWWFTNEAVLLDTAGRYTTQESQQERDASEWHHFLDLLRKYRGRQPVNGVIVTLSVSDLLTQSPEAQRNQAIALRQRLMELHDRLGIRFPVYVLVTKTDLLKGFRSYFAALDKTQREQIWGFTFPWAQASTAEFELN

SEQ ID NO: 14059 - protein, 112 aa, Zea mays
  Coding DNA Sequence Number=SeqID_1298
  Gene Ontology: Mol. function=solute:hydrogen antiporter activity; Cellular component=integral to membrane; Biological process =regulation of pH
  Homolog annotation: Hit_ID=Q10SB8; Match level="QueryCoverage=66%, HitCoverage=30%, E-value=2e-29, Identity=89%"; Hit description=K+ efflux antiporter, putative, expressed
MDEQVGAAGRQQVGLSLAQIEEFAFVLLSRASHLHLVGGKMYLLLVGTIALSLVTTPLIFKLIPVVMHLGILMCWFPSKNSMQSEVSFTTLFAVFLLKKLDIWTLLAGAVKA

SEQ ID NO: 14060 - protein, 65 aa, Zea mays
  Coding DNA Sequence Number=SeqID_1299
MDHGKRGRGDSAPNWLLTRIYFFPLHFKLTIGPENKETTGKGAWTTWVFHGATFLKSMTCKASTQ

SEQ ID NO: 14061 - protein, 159 aa, Zea mays
  Coding DNA Sequence Number=SeqID_1301
  Gene Ontology: Mol. function=protein binding; Cellular component =periplasmic space; Biological process=cell wall catabolic process
  Homolog annotation: Hit_ID=A7FHJ4; Match level="QueryCoverage=95%, HitCoverage=42%, E-value=1e-57, Identity=67%"; Hit description =ErfK/YbiS/YcfS/YnhG family protein
  Pfam annotation: Domain name=ErfK_YbiS_YhnG; Domain location=1-73; Score=47.6; E_value=4.4e-11; Accession=PF03734.5; Description =ErfKYbiSYcfSYnhG
RASRLPAMVPPGPDTPMGLFALRLARGSGQYLIHGTNADFGIGMRVSSGCIRLRPDDIEALFNSVPQGTRVQVINQPIKFAIEPDGKRYIEVHQPLSRNEQDDPQTMPIALSAPLKAFIKSAKSDSVLIKAAIERRSGMPVLVSSGEPVNEATPLPAVL

SEQ ID NO: 14062 - protein, 84 aa, Zea mays
  Coding DNA Sequence Number=SeqID_1302
  Gene Ontology: Mol. function=ATP binding
  Homolog annotation: Hit_ID=A2XN24; Match level="QueryCoverage=85%, HitCoverage=3%, E-value=7e-17, Identity=61%"; Hit description =Putative uncharacterized protein
RFVTSKIIARRLEDIFLDKVRKVPCIPLSDGSFTSISDGRIWLPYDVANFIPECRSIPNFLALYGNLRTVSTNLLPACCKNKYL

SEQ ID NO: 14063 - protein, 225 aa, Zea mays
  Coding DNA Sequence Number=SeqID_1303
  Gene Ontology: Mol. function=transporter activity; Cellular component= integral to membrane; Biological process=transport
  Homolog annotation: Hit_ID=A0FZS9; Match level="QueryCoverage=99%, HitCoverage=55%, E-value=1e-21, Identity=32%"; Hit description=Major facilitator superfamily MFS_1
  Subcellular localization annotation: CTP_CleavageSite=34; ConfidenceScore=5.18e-01
MRPLLTSVSPLLGQLRHSLHLSGLAASLLPAVPMVMMGAVALFSARLMQREALKPLLLAGLTLLLLALAARGVIDSGSGLVLSALFAGIGVGVVQMAMPGLIRQRFSRRSAAVTGLWAGALMGGGGLGAALSPWLSAQLGVPLALSGWALPVLLAILLWLRVRVPAAPDAAQVTLPPLWRKPRAWSLALSFGLVNGGYATCVAWLPDAYHRLGWSAQAGGSLLGV

SEQ ID NO: 14064 - protein, 94 aa, Zea mays
  misc_feature (14)..(14): Xaa can be any naturally occurring amino acid
  misc_feature (27)..(27): Xaa can be any naturally occurring amino acid
  misc_feature (36)..(36): Xaa can be any naturally occurring amino acid
  misc_feature (39)..(39): Xaa can be any naturally occurring amino acid
  misc_feature (46)..(46): Xaa can be any naturally occurring amino acid
  misc_feature (58)..(58): Xaa can be any naturally occurring amino acid
  Coding DNA Sequence Number=SeqID_1304
  Gene Ontology: Mol. function=nucleoside-triphosphatase activity
  Homolog annotation: Hit_ID=Q079L1; Match level="QueryCoverage=84%, HitCoverage=66%, E-value=5e-20, Identity=63%"; Hit description =Hypothetical ABC transporter ATP-binding protein
ALSGGERGLLLSGXLMMHKPNILVMDXPTYHLHMEXTDXLNMALEXYEGTLIFLSHDXRRSSVSLATHVIEMKGDRIVDFTGNYYHYLRCPGID

SEQ ID NO: 14065 - protein, 306 aa, Zea mays
  misc_feature (1)..(67): Xaa can be any naturally occurring amino acid
  misc_feature (306)..(306): Xaa can be any naturally occurring amino acid
  Coding DNA Sequence Number=SeqID_1305
XXXXXXXXXXXXXXXXXXXXXXXXXXXXXXXXXXXXXXXXXXXXXXXXXXXXXXXXXXXXXXXXXXXKSSVSFPTPFTPQIPDSHRFPRLLSPPPPWSRTSPTSHSSSSLLPPLPQHPPRSSPSTRPPTRSPSSRLPPLPLPFPPPPCERLPRRRRLPAHLLLSRSRRRPPPSLPTTRLPSPRCTTSTSRTSATSSRSSQARRPTSCRRSQRPFPPAPPSWRRLLLRRRYRRWRYPPPPPHPATATHGRGRDAASTRAGEGWGVVAVTRGGEIGAPPCAGREGAVLVRGVERRSLLRRGEAWSLPX

SEQ ID NO: 14066 - protein, 83 aa, Zea mays
  misc_feature (21)..(21): Xaa can be any naturally occurring amino acid
  Coding DNA Sequence Number=SeqID_1307
  Gene Ontology: Mol. function=4 iron, 4 sulfur cluster binding; Cellular component=integral to membrane; Biological process=protein -chromophore linkage
  Homolog annotation: Hit_ID=P09144; Match level="QueryCoverage=95%, HitCoverage=10%, E-value=3e-18, Identity=60%"; Hit description =Photosystem I P700 chlorophyll a apoprotein A2
RIPLPAGRKSRSLRAWTFLFXQTAGATGLMHLIFWRGYGQESTDTLSRAHERTPLANLIWRTDKPEALSIAQASIVGSAHFCV

SEQ ID NO: 14067 - protein, 72 aa, Zea mays
  Coding DNA Sequence Number=SeqID_1308
  Gene Ontology: Mol. function=dephospho-CoA kinase activity; Cellular component=cytoplasm; Biological process=coenzyme A biosynthetic process
  Homolog annotation: Hit_ID=A4AJQ8; Match level="QueryCoverage=98%, HitCoverage=34%, E-value=3e-17, Identity=64%"; Hit description =Dephospho-CoA kinase
  Pfam annotation: Domain name=CoaE; Domain location=2-72; Score=-55.8; E_value=0.00012; Accession=PF01121.11; Description=Dephospho-CoA kinase
MPLIALTGGIASGKSTIAARLAEHGAVIVDADQIVRDVQGPGSPVLAAIAAEFGQDVIRTDGALDRAALGAR

SEQ ID NO: 14068 - protein, 170 aa, Zea mays
  Coding DNA Sequence Number=SeqID_1309
  Gene Ontology: Mol. function=catalytic activity; Biological process =metabolic process
  Homolog annotation: Hit_ID=A2UF67; Match level="QueryCoverage=95%, HitCoverage=53%, E-value=3e-21, Identity=35%"; Hit description =Deoxyribose-phosphate aldolase/phospho-2-dehydro-3-deoxyheptonate aldolase
MLIIWRAADDPGYRAEQITRFMALARQTGRIALLEAITRPAAGDRFPTAAAHGAAVIAAARELTAYQPDVYKAEVPAYLPGQLELVEAYSRRLSEQIAQPWVVLSNGVRAEDFADGVRRAVTGGASGFLAGRAIWEDAARSGNPAEALRSISVPRLRALAAIARQSDPEK

SEQ ID NO: 14069 - protein, 171 aa, Zea mays
  Coding DNA Sequence Number=SeqID_1310
  Gene Ontology: Mol. function=protein dimerization activity; Cellular component=endoplasmic reticulum lumen; Biological process=proteolysis
  Homolog annotation: Hit_ID=Q6CZG0; Match level="QueryCoverage=100%, HitCoverage=44%, E-value=7e-59, Identity=63%"; Hit description =Putative peptidase
  Pfam annotation: Domain name=M20_dimer; Domain location=4-110; Score =25.9; E_value=0.00015; Accession=PF07687.4; Description=Peptidase dimerisation domain
KAGALTAAVDRFDIRITGTGSHAAKPHQGNDPIVIAAQIVSAAQTLISRNAPSADNAVVSITQLHSGSTWNVIPDSAWLEGTVRTFSQSTRERLEQRFREIVLGLGAAFAAEVEFNWHAGPPAVVNDAHWADFALQQATASGLEARVVEASPIGEDFAFYQQQLPGAFVMI

SEQ ID NO: 14070 - protein, 244 aa, Zea mays
  misc_feature (211)..(211): Xaa can be any naturally occurring amino acid
  Coding DNA Sequence Number=SeqID_1311
TAREKPTPVAVVGIRRRRRSTTTAGHGLLPRPGVRAAAEPRVRHVPLRRRRRRGRHPEAAARLPANGVAGAPGMAPRPHLHPPPQRPPRPPPPRLPPRGGPRHPAPCAPPPPARPPPPAAGRRPLGPRLGGQPPRPLPPRRPPPSPRPHPGPTSSCAVCVLKGLSFNRVFSFRWTRHPQKHTPPFFTKNQPYRTNTTPGPIFLTGHSWMGXWERILNPFFPAAKHHPIGPLGLFTNPREQLAPR

SEQ ID NO: 14071 - protein, 99 aa, Zea mays
  misc_feature (49)..(49): Xaa can be any naturally occurring amino acid
  Coding DNA Sequence Number=SeqID_1312
  Gene Ontology: Mol. function=structural constituent of ribosome; Cellular component=ribonucleoprotein complex; Biological process =translation
  Homolog annotation: Hit_ID=A1EA53; Match level="QueryCoverage=92%, HitCoverage=58%, E-value=2e-13, Identity=51%"; Hit description =Chloroplast 30S ribosomal protein S7
  Subcellular localization annotation: CTP_CleavageSite=29; ConfidenceScore=5.33e-01
TLLVARLAPRKATTNVGVKTRRAPNGSTRAAPAGIRPKPGRELAIRWLXEACQNRSRPSTATKLSPESGDAAKGRGERLAAQRKRLINMAKGNIGDHWH

SEQ ID NO: 14072 - protein, 139 aa, Zea mays
  Coding DNA Sequence Number=SeqID_1313
  Gene Ontology: Mol. function=nucleoside-triphosphatase activity; Cellular component=cytoplasm; Biological process=protein metabolic process
  Homolog annotation: Hit_ID=A4XUS3; Match level="QueryCoverage=98%, HitCoverage=15%, E-value=2e-59, Identity=80%"; Hit description =ATPase AAA-2 domain protein
CSDPQALPDPDAVASQLRKPLLEIFPPALLGRLVTIPYYPLSDAMLKAITRLQLERIRKRVEGTHKVGFAYDEGVVELIVSRCTETESGGRMIDAILTNGLLPDMSREFLTRMLEGKPLASVRISRRENDLHYDFGAAD

SEQ ID NO: 14073 - protein, 165 aa, Zea mays
  Coding DNA Sequence Number=SeqID_1314
  Homolog annotation: Hit_ID=Q3J8J6; Match level="QueryCoverage=93%, HitCoverage=83%, E-value=4e-26, Identity=42%"; Hit description =Putative uncharacterized protein precursor
  Pfam annotation: Domain name=DUF1791; Domain location=38-165; Score =24.2; E_value=3.6e-07; Accession=PF08754.1; Description=Domain of unknown function (DUF1791)
KTEPADFWSTPAIAGYGKIHFVNTPDYNPANTPGLSNKIVFQINRSEGDIHQPNLGLERVARVTNLYYAAGVPLNQLNFVVSINSDAVPAALNNDQFRKAYGSDNPNLKLIDELKKAGVKVTICDQSVAFHQLERDWIDTRVTHTLSSGTTVASLQNEGYAFLML

SEQ ID NO: 14074 - protein, 69 aa, Zea mays
  Coding DNA Sequence Number=SeqID_1315
LRRVGRVQRRVRAPARGAGGGARQARREGVAVGHADRVRACDVRRVSEKQALERLMVMSPIIKPSHWGT

SEQ ID NO: 14075 - protein, 113 aa, Zea mays
  Coding DNA Sequence Number=SeqID_1317
  Gene Ontology: Mol. function=nucleotide binding; Cellular component =chloroplast; Biological process=response to stress
  Homolog annotation: Hit_ID=Q43532; Match level="QueryCoverage=71%, HitCoverage=14%, E-value=1e-20, Identity=56%"; Hit description=HSP70
MSEPQRAGPFPSLVATPAARALRRLRTACERAKRTLSYVFETTIQIDCLCEDIDIYATITRGKFEDLNMEDKMDVWSVHYVILVVGSSRIPRVQQLLQERFNGKEQCKSIDPD

SEQ ID NO: 14076 - protein, 167 aa, Zea mays
  Coding DNA Sequence Number=SeqID_1318
  Gene Ontology: Mol. function=asparaginase activity; Cellular component=cytoplasm; Biological process=glycoprotein catabolic process
  Homolog annotation: Hit_ID=Q6DAX0; Match level="QueryCoverage=95%, HitCoverage=49%, E-value=2e-61, Identity=72%"; Hit description=L -asparaginase
  Pfam annotation: Domain name=Asparaginase_2; Domain location=4-168; Score=15.6; E_value=9.1e-13; Accession=PF01112.9; Description =Asparaginase
LQRALGSEQMLLDHDGAAQGSDPLDPDRKFGTVGAVALDLQGNLAAATSTGGMTNKQAGRVGDSPLAGAGCYANNATVAVSCTGTGEVFIRTLAAYDVSAQMEYGGRSLQQATASVIHDKVQELEGSGGLIAVDAHGNVALPFNSEGMYRGFAYVGGEVEVAIYRDS

SEQ ID NO: 14077 - protein, 130 aa, Zea mays
  misc_feature (47)..(47): Xaa can be any naturally occurring amino acid
  misc_feature (101)..(101): Xaa can be any naturally occurring amino acid
  Coding DNA Sequence Number=SeqID_1319
  Gene Ontology: Mol. function=structural constituent of ribosome; Cellular component=ribonucleoprotein complex; Biological process =translation
  Homolog annotation: Hit_ID=A9NN19; Match level="QueryCoverage=69%, HitCoverage=56%, E-value=1e-33, Identity=76%"; Hit description =Putative uncharacterized protein
  Pfam annotation: Domain name=Ribosomal_S17; Domain location=41-110; Score=101.8; E_value=2.1e-27; Accession=PF00366.10; Description =Ribosomal protein S17
SDYRYYDAHAAVVASGISARSSWLELPLPSLGLFRGGIIAGTCHSAXMNRTIIARRDYLHFGKKDQRYEKSHSTIPAHIAPCFRVKEGDHVIIGQCRPASXTVRFNVVDVIPAGSKSGPLEERFHCRLGS

SEQ ID NO: 14078 - protein, 84 aa, Zea mays
  misc_feature (20)..(20): Xaa can be any naturally occurring amino acid
  misc_feature (62)..(62): Xaa can be any naturally occurring amino acid
  Coding DNA Sequence Number=SeqID_1320
  Gene Ontology: Mol. function=nutrient reservoir activity
  Homolog annotation: Hit_ID=A8HNE9; Match level="QueryCoverage=95%, HitCoverage=46%, E-value=5e-10, Identity=46%"; Hit description=Z1A alpha zein protein
TTPSTINSDCSTAPIVSLPXPHSLSPALNQAWENPVLHPYTIQHAVTDGILSLSPLIIPQSXRLLHEFPLVHGQAQNIQVQQLP

SEQ ID NO: 14079 - protein, 113 aa, Zea mays
  Coding DNA Sequence Number=SeqID_1321
MAADTQLNSFGVSLTHQLAERGTCSRVMGGAPIRHDDVQMADGAPDDFAFGSGGGSGNAGSPSWSCEGVGGGVDTRGSTTTRSAPRTIMSWSSPLLGTSRLVQQISPDHAAGA

SEQ ID NO: 14080 - protein, 135 aa, Zea mays
  misc_feature (98)..(98): Xaa can be any naturally occurring amino acid
  Coding DNA Sequence Number=SeqID_1323
  Gene Ontology: Mol. function=peptidase activity; Cellular component =cytoplasm
  Homolog annotation: Hit_ID=Q6DAH1; Match level="QueryCoverage=98%, HitCoverage=29%, E-value=2e-46, Identity=72%"; Hit description =Putative modulator of DNA gyrase
MNVSTQVAEQRKVLEQAVAQALELAQASTDGAEVAVTKTTGIGVSTRYGEVENVEFNSDGALGITVYHQNRKGSASSTDLSPDAIKRTVQAAIDIARXYTSPDPCAAPAERDLLAFEAPDLDLYHPGEIDADRAQ

SEQ ID NO: 14081 - protein, 104 aa, Zea mays
  misc_feature (29)..(29): Xaa can be any naturally occurring amino acid
  Coding DNA Sequence Number=SeqID_1324
  Gene Ontology: Cellular component=membrane
  Homolog annotation: Hit_ID=A8GEU9; Match level="QueryCoverage=94%, HitCoverage=30%, E-value=6e-35, Identity=70%"; Hit description =Putative uncharacterized protein
QIHWQQPDFALPFGPQPARFIWLMLAIGXFCSWLAALCWNASSQRLPTVVMGPLIVFETLSGLLWTFIYRQSWPPLLTSIGIGCLIVGVIYAMRIKPQRLTALP

SEQ ID NO: 14082 - protein, 182 aa, Zea mays
  misc_feature (42)..(42): Xaa can be any naturally occurring amino acid
  misc_feature (87)..(87): Xaa can be any naturally occurring amino acid
  misc_feature (134)..(134): Xaa can be any naturally occurring amino acid
  Coding DNA Sequence Number=SeqID_1325
  Gene Ontology: Mol. function=nucleotide binding; Cellular component =membrane; Biological process=defense response
  Homolog annotation: Hit_ID=Q9XEQ9; Match level="QueryCoverage=89%, HitCoverage=12%, E-value=6e-49, Identity=66%"; Hit description =Disease resistance protein RPM1 homolog
VRGWRTGEGLVSLVATLPRPQRVGEVSLVTTSPRLRGCWSGXTALPTRRPRYFIFAILDYYKLDGEIWGIEVFRLLKLHHKSQGINXKHPKPSALCCLTQREMDVLFMASVATWVMSSLLAKLAELLREDYKMXEGMRCEVVFLKDEMSSMNALLERLASSDALDPQTKEWRDQVREMSYEI

SEQ ID NO: 14083 - protein, 135 aa, Zea mays
  Coding DNA Sequence Number=SeqID_1326
  Gene Ontology: Cellular component=flagellin-based flagellum
  Homolog annotation: Hit_ID=A4WBN4; Match level="QueryCoverage=59%, HitCoverage=61%, E-value=8e-16, Identity=52%"; Hit description =Flagellar FlhE family protein precursor
  Pfam annotation: Domain name=FlhE; Domain location=6-135; Score =111.5; E_value=2.5e-30; Accession=PF06366.3; Description=Flagellar protein FlhE
  Subcellular localization annotation: CTP_CleavageSite=87; ConfidenceScore=5.19e-01
MRGVTLSWLLAALLALPLTGQAASGAWQASASGPSLGVRGNWLLSPALKAPSAAPGTISVVNWRYTLSRPAPSGLVVRLCASQRCVELDGASGSTRGLANVAADETLHLAFGFQGQGALPPGLRVVSSEVMVNYQ

SEQ ID NO: 14084 - protein, 145 aa, Zea mays
  Coding DNA Sequence Number=SeqID_1327
FTDGWTDVVNLVAGRYDDDQNLLKLGGNIVKPALWDAVDSVPANDRYSFLYTENFGPIQGYTKAGSGNPGRTVPTFQVLDHALLNLPARLRFLRMQYGRADLDAPVQVEDDAASASDWTRAIGVSDHDGFVVDLFDPLIPPLARH

SEQ ID NO: 14085 - protein, 84 aa, Zea mays
  misc_feature (45)..(45): Xaa can be any naturally occurring amino acid
  Coding DNA Sequence Number=SeqID_1329
  Gene Ontology: Mol. function=methyltransferase activity; Biological process=tRNA processing
  Homolog annotation: Hit_ID=Q8H4D4; Match level="QueryCoverage=88%, HitCoverage=7%, E-value=5e-23, Identity=67%"; Hit description=tRNA wybutosine-synthesizing protein 2/3/4 (EC 2.1.1.-) [Includes: tRNA ...
  Homolog annotation: Hit description=wybutosine-synthesizing protein 3 homolog (EC 2.1.1.-); tRNA wybutosine synthesizing protein 2 homolog (EC 2.1.1.-)]
CRNEVVVDLFAGIGYFVLPFLVKANGKLFYACEWNPHALEALWRXCIILEGDNRVTAPEVCAGQISRGATLSSDDQLITIPSLC

SEQ ID NO: 14086 - protein, 85 aa, Zea mays
  Coding DNA Sequence Number=SeqID_1330
  Gene Ontology: Mol. function=protein binding; Cellular component =periplasmic space; Biological process=cell wall catabolic process
  Homolog annotation: Hit_ID=A8GDU6; Match level="QueryCoverage=100%, HitCoverage=25%, E-value=4e-22, Identity=64%"; Hit description =ErfK/YbiS/YcfS/YnhG family protein precursor
MKPALRLAGALLLSCFGLSAPAFATEYPLPAADSRLIGENTLTTVPDDKRPLESIAARYKIGMLGMLEANPGVDPWLPKAGTQLT

SEQ ID NO: 14087 - protein, 110 aa, Zea mays
  Coding DNA Sequence Number=SeqID_1331
AARPRTPSAKREETMSRWRAAAYSISAAAASRNSAAEAGALSRALAKAPSPPSLPLQTLTRNFAKSAAAATATSPGPGASSPPAGPRPEDLINDFKSPSRLVEPWDRPGD

SEQ ID NO: 14088 - protein, 90 aa, Zea mays
  Coding DNA Sequence Number=SeqID_1333
  Homolog annotation: Hit_ID=Q16J84; Match level="QueryCoverage=97%, HitCoverage=4%, E-value=3e-20, Identity=53%"; Hit description=Down syndrome cell adhesion molecule
AEHGEWEEHRVDGTWSTHSLSGLRCGTLYHVYVTASNRVGSGSASKPLDLRTRGGVPAKAAALVRPNVTSLLLRLDEWPDGGCPLLYFVV

SEQ ID NO: 14089 - protein, 189 aa, Zea mays
  Coding DNA Sequence Number=SeqID_1334
  Homolog annotation: Hit_ID=Q39EI0; Match level="QueryCoverage=100%, HitCoverage=67%, E-value=8e-95, Identity=86%"; Hit description =Putative uncharacterized protein
  Pfam annotation: Domain name=DUF519; Domain location=7-189; Score =135.3; E_value=1.7e-37; Accession=PF04378.3; Description=Protein of unknown function (DUF519)
RYLNKKDKSYWYIDTHAGAGVYSLRDGYAAKTGEFDTGIGPLWSDKNLPEALGDYIDEVRALNDDGELRYYPGSPYLAWRSMREQDRMRLFEMHTTEIDVLRHNFRDAGRRAMIFAGDGFEGIKALLPPPPRRALVLIDPSYEDKKDYARTVTCVTECLKRFATGCYAIWYPQVARVESQRFAEQYKRL

SEQ ID NO: 14090 - protein, 154 aa, Zea mays
  Coding DNA Sequence Number=SeqID_1335
MLVDDDDGYGGAVLGPGSTTYGGGHGGDDEDVRDGVAPEEEGEKKKEKKKKGETMVASVPPSNQVELCKAESVSSSSGSGSAPRRSVETAPPSAPCMGFAAAAGGRGRDCGGGWSIGRPRLLRKLRGWAAGGGTKAGGSKTTRCRIAGPCCQKQ

SEQ ID NO: 14091 - protein, 184 aa, Zea mays
  Coding DNA Sequence Number=SeqID_1337
  Gene Ontology: Mol. function=ubiquitin-protein ligase activity; Cellular component=ubiquitin ligase complex; Biological process =protein amino acid phosphorylation
  Homolog annotation: Hit_ID=Q6K9X8; Match level="QueryCoverage=85%, HitCoverage=16%, E-value=8e-39, Identity=59%"; Hit description =Putative uncharacterized protein OJ1136_C04.3
GTPVQLLQEIEEDRPETPTSDAGEMDDALYDKLKRALMEAESLKHEAYEETRRRQMAERELAEASRMVVVTKLHHFLPADEAERSNQREARHRKEVEEMVARERAAIEQDRRELDDILEKIRKVDDRSAELELQITSSERTMNDLEARLSESYNLLHTLRQGDPWSTATESASESTEDGGGEQR

SEQ ID NO: 14092 - protein, 90 aa, Zea mays
  Coding DNA Sequence Number=SeqID_1338
  Gene Ontology: Mol. function=hydrolase activity; Cellular component =cytoplasm
  Homolog annotation: Hit_ID=A8AL81; Match level="QueryCoverage=100%, HitCoverage=27%, E-value=5e-31, Identity=70%"; Hit description =Putative uncharacterized protein
MSEAAFNFQTLNPDVILDALWDAGLRVESGLTALNSYENRVYQFSDEDKRRYVAKFYRPQCWSAAQIAEEHRFAQDLLDDEVPVAAPLAL

SEQ ID NO: 14093 - protein, 116 aa, Zea mays
  Coding DNA Sequence Number=SeqID_1339
  Gene Ontology: Mol. function=malate dehydrogenase (acceptor) activity; Cellular component=plasma membrane; Biological process =tricarboxylic acid cycle
  Homolog annotation: Hit_ID=A4WCM3; Match level="QueryCoverage=99%, HitCoverage=20%, E-value=2e-40, Identity=70%"; Hit description =Probable malate:quinone oxidoreductase
  Pfam annotation: Domain name=Mqo; Domain location=1-116; Score= -260.8; E_value=2e-09; Accession=PF06039.5; Description =Malate:quinone oxidoreductase (Mqo)
QSDDDRMEALRAYVPQAKQEDWKLVTAGQRVQIIKNDEKEGGVLRLGTEVVTSADGSISALLGASPGASTAAPIMLELMAKVFPEQMRSPEWQTKIRAVIPSWGRKLNGDVALTEK

SEQ ID NO: 14094 - protein, 226 aa, Zea mays
  Coding DNA Sequence Number=SeqID_1340
  Gene Ontology: Mol. function=actin binding; Cellular component=plasma membrane; Biological process=cytoskeleton organization and biogenesis
  Homolog annotation: Hit_ID=A2XLI6; Match level="QueryCoverage=99%, HitCoverage=48%, E-value=6e-92, Identity=76%"; Hit description =Adenylyl cyclase-associated protein
  Pfam annotation: Domain name=CAP_C; Domain location=64-224; Score =163.4; E_value=5.9e-46; Accession=PF08603.1; Description=DE Adenylate cyclase associated (CAP
  Subcellular localization annotation: CTP_CleavageSite=40; ConfidenceScore=5.12e-01
AKEGMSAVFGEISSKPVTAGLRKVTDDMKSKNRADRSGVVSSTAPAPAAAPEKTSRAGSFSFKSGPPKLELQMGRKWVAENQVGKKTLAIDDCDSRQSVYVYGCKDSVLQVHGKVNDITGDKCTKVGIVFKNVVAAFEIVNCKVAHVQCQGKSRSISLAHSYVWRLYLSIDTLGASITSAKSSQIDVMVPSSDAHGDWVEHALPQQYIHSFKDGQFTTSPVSHSGA

SEQ ID NO: 14095 - protein, 131 aa, Zea mays
  Coding DNA Sequence Number=SeqID_1341
  Gene Ontology: Mol. function=sequence-specific DNA binding; Biological process=signal transduction
  Homolog annotation: Hit_ID=A0U1K4; Match level="QueryCoverage=99%, HitCoverage=41%, E-value=2e-49, Identity=78%"; Hit description =Transcriptional regulator, XRE family
RNVLRQILHPDGLASRIVNRHEWRAHILHRLQRQIDASGDRTLHTLRDELAAYPAPAGQPDDPPARTDYADIAVPLRLSTAAGELTFFSTTTVFGTPVDVTLSELAIEAFFPANQETAEAMRALADGMPRK

SEQ ID NO: 14096 - protein, 71 aa, Zea mays
  Coding DNA Sequence Number=SeqID_1342
VRCLESKVTAVSFDHSRLKQEVKYAHGLALGEVGHLLVVPPEGLARQADRPEELRLQVEAELLEDPFGGVL

SEQ ID NO: 14097 - protein, 194 aa, Zea mays
  Coding DNA Sequence Number=SeqID_120
  Gene Ontology: Mol. function=molecular_function; Cellular component =integral to membrane; Biological process=retrograde vesicle-mediated transport, Golgi to ER
  Homolog annotation: Hit_ID=O48671; Match level="QueryCoverage=88%, HitCoverage=86%, E-value=7e-87, Identity=88%"; Hit description =Protein RER1B
  Pfam annotation: Domain name=Rer1; Domain location=2-184; Score =469.4; E_value=4.6e-138; Accession=PF03248.4; Description=Rer1 family
MDGSGGGGGSLATPVQKRAHEAWRIYKYYLDKTTPHSTYRWIGTLVVFLIYSLRVFSIHGFYIISYALGIYLLNLLIGFLSPLVDPELDLSSDGGPSLPTRGSDEFKPFIRRLPEFKFWYSMTKAFCIAFLMTFFSVFDVPVFWPILLCYWVVLFFLTMRRQISHMIKHKYIPFSIGKQKYSGRRSSASSGRAD

SEQ ID NO: 14098 - protein, 200 aa, Zea mays
  Coding DNA Sequence Number=SeqID_121
  Gene Ontology: Mol. function=hydrogen ion transporting ATP synthase activity, rotational mechanism; Cellular component=proton -transporting ATP synthase complex, catalytic core F(1); Biological process=ATP synthesis coupled proton transport
  Homolog annotation: Hit_ID=Q96252; Match level="QueryCoverage=100%, HitCoverage=100%, E-value=5e-96, Identity=88%"; Hit description=ATP synthase subunit delta', mitochondrial precursor
  Pfam annotation: Domain name=ATP-synt_DE_N; Domain location=69-152; Score=67.3; E_value=5.2e-17; Accession=PF02823.6; Description=ATP synthase, DeltaEpsilon chain, beta-sandwich domain
  Subcellular localization annotation: CTP_CleavageSite=14; ConfidenceScore=5.43e-01
MFRQASRLVSRSITAKSATNRAFSTEVPSTIDSSFVEAWKKVAPNMDPPQTPSSFMKPRPSTASSIPTKLTVNFVLPYASELSGKEVDMVIIPATTGQMGVLPGHVPTIAELKPGIMSVHEGTDIKKYFVSSGFAFLHANSVADIIAVEAVPLENIDASQVQKGLAEFTQKLASATTDLEKAEAQIGVEVHSAMNAALSG

SEQ ID NO: 14099 - protein, 183 aa, Zea mays
  Coding DNA Sequence Number=SeqID_122
  Gene Ontology: Mol. function=molecular_function; Cellular component =integral to membrane; Biological process=biological_process
  Homolog annotation: Hit_ID=Q8LEK2; Match level="QueryCoverage=100%, HitCoverage=100%, E-value=9e-75, Identity=81%"; Hit description =Uncharacterized FAM18-like protein At1g09330
  Pfam annotation: Domain name=DUF846; Domain location=4-152; Score =340.1; E_value=3.8e-99; Accession=PF05832.3; Description=Eukaryotic protein of unknown function (DUF846)
MDPNQPPVENYANPNTCLFHVLFKGAALAFYILSALFFNSFVIIFVVTVLLAALDFWVVKNVSGRILVGLRWWNEINDLGESVWKFESLDQESLARMNKKDSWLFWWTLYLAAAAWLILGVFSLIRFQADYLLVVGVCLSLNVANIIGFTKCKKDAKKQFQQFASQTIASRFQSTVQSAFTLV

SEQ ID NO: 14100 - protein, 144 aa, Zea mays
  Coding DNA Sequence Number=SeqID_123
  Gene Ontology: Mol. function=nucleic acid binding
  Homolog annotation: Hit_ID=Q8RYC3; Match level="QueryCoverage=94%, HitCoverage=97%, E-value=1e-41, Identity=59%"; Hit description =Expressed protein
  Subcellular localization annotation: CTP_CleavageSite=48; ConfidenceScore=5.45e-01
EISSAPMASNTSRNSKQRNGPPPGRKKKHKVNQLKPGTSGHTLTFKVVDQYSVTSFIRPGRIAECLVGDETASIIFTARNDQVDLMKPGTTVNLRNTKINMFHGFMGLAVNKFGRIEVVTEPADDITVKEDNNLSLVEYEPVYL

SEQ ID NO: 14101 - protein, 202 aa, Zea mays
  Coding DNA Sequence Number=SeqID_124
  Gene Ontology: Mol. function=protein transporter activity; Cellular component=mitochondrial inner membrane; Biological process=protein transport
  Homolog annotation: Hit_ID=A2ZRN4; Match level="QueryCoverage=96%, HitCoverage=83%, E-value=4e-70, Identity=70%"; Hit description =Putative uncharacterized protein
SMEAVDNPEETIPGNSSRLAGNPNWGTATVVGIFAGMLYGGSKEASASVSKDAEVMLKMGSTQDKREQHRLMRDAMEKRFTRVTRGSLIGGMRLGMFTASYFSLQNFLAETRGVHDVFNFVGAGSATAAVFGLIMPGSLAWRARNVMLGSVLGATVCFPLGWLQLKLMEKANEGNKQDTSHIGEVTSGVGAAIERLEQQLRK

SEQ ID NO: 14102 - protein, 158 aa, Zea mays
  Coding DNA Sequence Number=SeqID_125
  Homolog annotation: Hit_ID=A7R3K2; Match level="QueryCoverage=72%, HitCoverage=60%, E-value=9e-23, Identity=46%"; Hit description =Chromosome undetermined scaffold_533, whole genome shotgun sequence
MDMKKQIMDESENLCFKKSLTPPPPPPPPLPPSPGYGSRKIEGDSITNKQIKKFWRQKQIIEEEHLFAAIKAAARVRARNLSDEDYKRFEESLDMEDPETEVDEGIKDWWMKSKYAYLNQPALGSADSLKRKRFSSYVPNYFSFKPCIPLYATSLNVF

SEQ ID NO: 14103 - protein, 123 aa, Zea mays
  Coding DNA Sequence Number=SeqID_126
  Gene Ontology: Mol. function=protein binding; Cellular component =cytoplasm; Biological process=cell redox homeostasis
  Homolog annotation: Hit_ID=P68177; Match level="QueryCoverage=100%, HitCoverage=100%, E-value=1e-63, Identity=98%"; Hit description =Thioredoxin H-type 1
  Pfam annotation: Domain name=Redoxin; Domain location=9-118; Score= -16.8; E_value=0.077; Accession=PF08534.1; Description=Redoxin
  Pfam annotation: Domain name=Thioredoxin; Domain location=13-117; Score=134.1; E_value=4.1e-37; Accession=PF00085.10; Description =Thioredoxin
  Pfam module annotation: Pfam domain module=Redoxin::Thioredoxin; Domain location=9-118::13-117
MAATAELIPAGEVIACHTVEDWNNKLKAAKESNKLIVIDFTAVWCPPCRFIAPIFVELAKKHLDVVFFKVDVDELATVAKEFDVQAMPTFVYMKGEEKLDKVVGAAKEEIEAKLLKHSQVAAA

SEQ ID NO: 14104 - protein, 179 aa, Zea mays
  Coding DNA Sequence Number=SeqID_127
  Gene Ontology: Mol. function=cysteine-type peptidase activity; Cellular component=anchored to membrane; Biological process =carbohydrate metabolic process
  Homolog annotation: Hit_ID=Q8L855; Match level="QueryCoverage=59%, HitCoverage=53%, E-value=6e-44, Identity=74%"; Hit description =Putative uncharacterized protein At1g13830
  Pfam annotation: Domain name=X8; Domain location=20-106; Score=128.3; E_value=2.2e-35; Accession=PF07983.3; Description=X8 domain
MRMFLGVLLLLALTTSSSAIYCLCKDGIGDNQLQTSIDYACGTLADCNPIHDKGACYQPNTIKNHCDWAVNSYFQKAAQAPGSCNFSGTATTSQNPPSNLVTGCIYPSSASSAGSPPSTTPPTGTTPTTNGTGGFTPFPGTPPAFGPTGTGGFSPSKAASSLVISSVFTLCFSSLALLM

SEQ ID NO: 14105 - protein, 144 aa, Zea mays
  Coding DNA Sequence Number=SeqID_128
  Gene Ontology: Mol. function=NAD+ ADP-ribosyltransferase activity; Cellular component=nucleus; Biological process=intracellular protein transport across a membrane
  Homolog annotation: Hit_ID=Q8GWI1; Match level="QueryCoverage=99%, HitCoverage=99%, E-value=1e-65, Identity=86%"; Hit description =Putative uncharacterized protein
  Pfam annotation: Domain name=Ank; Domain location=43-75; Score=48.6; E_value=2.2e-11; Accession=PF00023.20; Description=Ankyrin repeat
  Pfam annotation: Domain name=Ank; Domain location=76-108; Score=31.7; E_value=2.6e-06; Accession=PF00023.20; Description=Ankyrin repeat
  Pfam module annotation: Pfam domain module=Ank::Ank; Domain location =43-75::76-108
MGAETVVEAEKIDDLLEAARYNDIDDLKSLAFDGVSLNSRDSQGRTALHMAAANGHMSIVEYLISQGVDINALNEENNAPLHWACLNGHIEVVKKMILAGASLSLLNRYERTPMDEAIGAGKMEIIDAINTTVTQMELENTTVA

SEQ ID NO: 14106 - protein, 199 aa, Zea mays
  Coding DNA Sequence Number=SeqID_129
  Gene Ontology: Mol. function=transferase activity; Cellular component= integral to membrane; Biological process=vesicle-mediated transport
  Homolog annotation: Hit_ID=Q9ZRD6; Match level="QueryCoverage=100%, HitCoverage=100%, E-value=1e-106, Identity=95%"; Hit description =VAMP-like protein YKT61
  Pfam annotation: Domain name=Synaptobrevin; Domain location=102-189; Score=42.7; E_value=1.3e-09; Accession=PF00957.11; Description =Synaptobrevin
  Subcellular localization annotation: CTP_CleavageSite=49; ConfidenceScore=5.14e-01
MKITALLVLKAAPETSDPVILANASDVSHFGYFQRSSVKEFVVFVGRTVASRTPPSQRQSVQHEEYKVHAYNRNGLCAVGFMDDHYPVRSAFSLLNQVIDEYQKSFGEAWRSAKEDSSQPWPYLAEALTKFQDPAEADKLLKIQRELDETKIILHKTIDSVLARGEKLDSLVEKSSDLSMASQMFYKQAKKTNSCCTIL

SEQ ID NO: 14107 - protein, 157 aa, Zea mays
  Coding DNA Sequence Number=SeqID_130
  Gene Ontology: Mol. function=unfolded protein binding; Cellular component=endoplasmic reticulum; Biological process=protein folding
  Homolog annotation: Hit_ID=Q8LBI4; Match level="QueryCoverage=100%, HitCoverage=100%, E-value=1e-71, Identity=88%"; Hit description =Nicotiana lesion-inducing like
  Pfam annotation: Domain name=DoxX; Domain location=4-104; Score=-8.4; E_value=0.073; Accession=PF07681.2; Description=DoxX
  Pfam annotation: Domain name=HR_lesion; Domain location=1-138; Score =259.0; E_value=1e-74; Accession=PF05514.2; Description=HR-like lesion-inducing
  Pfam module annotation: Pfam domain module=DoxX::HR_lesion; Domain location=4-104::1-138
MGFFSFLGRVLFASLFILSAWQMFNDFGVDGGPAATELAPKLHLAKSHLSSRLGVTLPSVEVKQVVAAIVALKGVGGLLFVIGNIFGAYLLAFYLVVVSPILYDFYNYGPEERHFSPLLTEFLQSVALFGALLFFIGMKNSTPTKRNLKRTPKPKAA

SEQ ID NO: 14108 - protein, 168 aa, Zea mays
  Coding DNA Sequence Number=SeqID_131
  Gene Ontology: Cellular component=chloroplast thylakoid membrane
  Homolog annotation: Hit_ID=Q2V2V3; Match level="QueryCoverage=61%, HitCoverage=100%, E-value=3e-55, Identity=95%"; Hit description =Uncharacterized protein At5g65158.1
  Pfam annotation: Domain name=PLAT; Domain location=31-156; Score =20.5; E_value=0.0001; Accession=PF01477.13; Description=PLATLH2 domain
MLRSSSTVLPCLLLISAVAIALSLDNDDDVCVFTVYIRTGSVWKAGSDSVMSLRLYDSYGQNAVISDLVSWGGLMGPFHDYYERGNLDIFTGLGSCLSGPVCAMNLTSDGSGDHHGWYCNYVEVTMSESRRRSCSQEKFTVEQWLARDTSPYELSAIRNQCSDSVENR

SEQ ID NO: 14109 - protein, 144 aa, Zea mays
  Coding DNA Sequence Number=SeqID_132
  Gene Ontology: Mol. function=structural constituent of ribosome; Cellular component=mitochondrial ribosome; Biological process =translation
  Homolog annotation: Hit_ID=A9PBH0; Match level="QueryCoverage=100%, HitCoverage=100%, E-value=2e-54, Identity=74%"; Hit description =Putative uncharacterized protein
  Pfam annotation: Domain name=MRP-L47; Domain location=38-124; Score =191.4; E_value=2.3e-54; Accession=PF06984.4; Description =Mitochondrial 39-S ribosomal protein L4
  Pfam annotation: Domain name=Ribosomal_L29; Domain location=62-124; Score=9.9; E_value=0.0075; Accession=PF00831.13; Description =Ribosomal L29 protein
  Pfam module annotation: Pfam domain module=MRP-L47::Ribosomal_L29; Domain location=38-124::62-124
MFLTRFIGRRFLAVAASTRSESTTAAAASTVKIAKNPLEEFFEFDRSQDEDKPVVYGRGWKASELRLKSWDDLQKLWYVLLKEKNMLMTQRQMLQAQNMMFPNPERIPKVRRSMCRIKHVLTERAIEEPDPRRSAEMKRMVNAM

SEQ ID NO: 14110 - protein, 155 aa, Zea mays
  Coding DNA Sequence Number=SeqID_133
  Gene Ontology: Mol. function=endonuclease activity; Cellular component=cytoplasm; Biological process=response to biotic stimulus
  Homolog annotation: Hit_ID=A8IXG5; Match level="QueryCoverage=100%, HitCoverage=100%, E-value=5e-84, Identity=99%"; Hit description=Bet v I allergen family protein
  Pfam annotation: Domain name=Bet_v_I; Domain location=2-152; Score =144.9; E_value=2.2e-40; Accession=PF00407.9; Description =Pathogenesis-related protein Bet v I family
MGLSGVLHVEVEVKSPAEKFWVALGDGINLFPKEFPKDYKTMQVLAGDGNSPGSIRLIIYGEGSPLVKVSAERIETVDLENKSMTYSIIGGEMLEYYKTFKGTITVTPKGGGSILKWSAEFEKTGHEIEDPHVIKDFAVKNFKEIDEYLLKKSSV

SEQ ID NO: 14111 - protein, 111 aa, Zea mays
  Coding DNA Sequence Number=SeqID_134
  Homolog annotation: Hit_ID=Q9FK81; Match level="QueryCoverage=88%, HitCoverage=88%, E-value=5e-46, Identity=90%"; Hit description =Uncharacterized protein At5g22580
  Pfam annotation: Domain name=Dabb; Domain location=6-100; Score=96.0; E_value=1.2e-25; Accession=PF07876.3; Description=Stress responsive AB Barrel Domain
MATSGFKHLVVVKFKEDAKVDEILKGLENLVSQIDSVKSFEWGEDNESHEMLRQGFTHAFSMTFENKDAYVSFTGHPLHVEFSAAFTAVIDKIVVMDFTVAAVKSPVVVAP

SEQ ID NO: 14112 - protein, 99 aa, Zea mays
  misc_feature (81)..(81): Xaa can be any naturally occurring amino acid
  Coding DNA Sequence Number=SeqID_135
  Homolog annotation: Hit_ID=Q9T036; Match level="QueryCoverage=98%, HitCoverage=98%, E-value=1e-33, Identity=83%"; Hit description =Putative uncharacterized protein T22F8.200
  Subcellular localization annotation: CTP_CleavageSite=73; ConfidenceScore=5.91e-01
MASVCRSFLMSGSRNLVSRSRTVTQKCINLKPTTTTTSSHFASVSQSIPRASRVLSALGSVETMIPLHSAVASARLRSSIXAVDSSCWSWLSLELGVPR

SEQ ID NO: 14113 - protein, 184 aa, Zea mays
  Coding DNA Sequence Number=SeqID_136
  Gene Ontology: Cellular component=integral to membrane
  Homolog annotation: Hit_ID=Q1PFB8; Match level="QueryCoverage=88%, HitCoverage=87%, E-value=2e-61, Identity=72%"; Hit description =UPF0497 membrane protein At1g79780
  Pfam annotation: Domain name=DUF588; Domain location=14-169; Score =166.4; E_value=7.6e-47; Accession=PF04535.3; Description=Domain of unknown function (DUF588)
MNRNGEEEVAEKKRRRREGVQVSLRGGCLAASATAIAVMLMATEKGVADIYGLPLPLNSSWSFSPSYQYVVGACTVTILYSLFHLCLGIYRLLTGSPITPSRSQAWLCFIFDQLFSYLIMSAGSAGIGVTNLNKTGIKHTPLPDFCKTLSYFCNHVALSLLLVLLSFIFLASSSLFNVLVLSTL

SEQ ID NO: 14114 - protein, 89 aa, Zea mays
  misc_feature (12)..(12): Xaa can be any naturally occurring amino acid
  Coding DNA Sequence Number=SeqID_1344
  Gene Ontology: Mol. function=oxidoreductase activity, acting on the CH-OH group of donors, NAD or NADP as acceptor; Biological process =electron transport
  Homolog annotation: Hit_ID=B0KU77; Match level="QueryCoverage=100%, HitCoverage=20%, E-value=3e-40, Identity=86%"; Hit description =Nucleotide sugar dehydrogenase
MEEIQRHYGPRXDLQLVPCKYDALRGADALVIVSEWQDYRVLNMVKVPQQLADRVVFDARNLFEPEHMPAAGMTYYGIGRGQVQPACPY

SEQ ID NO: 14115 - protein, 67 aa, Zea mays
  Coding DNA Sequence Number=SeqID_1345
  Gene Ontology: Mol. function=transferase activity, transferring glycosyl groups; Biological process=sucrose metabolic process
  Homolog annotation: Hit_ID=P31924; Match level="QueryCoverage=83%, HitCoverage=6%, E-value=1e-14, Identity=73%"; Hit description =Sucrose synthase 2
IRYTPWVALSICPRPGVWEYVRVNVIKLAVEELKVPEYLQFKEQLMEEGPCSSNLALVLFVMLMFAF

SEQ ID NO: 14116 - protein, 146 aa, Zea mays
  Coding DNA Sequence Number=SeqID_1346
  Gene Ontology: Mol. function=protein histidine kinase activity; Cellular component=integral to membrane; Biological process=two -component signal transduction system (phosphorelay)
  Homolog annotation: Hit_ID=A1JLC2; Match level="QueryCoverage=98%, HitCoverage=16%, E-value=2e-26, Identity=47%"; Hit description =Putative two component sensor kinase precursor
  Pfam annotation: Domain name=Hpt; Domain location=65-141; Score=44.9; E_value=2.8e-10; Accession=PF01627.13; Description=Hpt domain
QGWALLLAGDEMGHHALNDQQFRVNFNLSNALLDALLALIEKQLAHDSIEESDDDEAATPLLSGGYFQLFTETVPPDVKRLYTESAEKDYPSLAQTAHRLKGVFAMLNLLPGKQLCEELEQHIKLCDDLTIKNTTSEIDAYVNQLL

SEQ ID NO: 14117 - protein, 176 aa, Zea mays
  Coding DNA Sequence Number=SeqID_1347
  Gene Ontology: Mol. function=aminoacyl-tRNA ligase activity
  Homolog annotation: Hit_ID=A6THY1; Match level="QueryCoverage=76%, HitCoverage=88%, E-value=8e-49, Identity=72%"; Hit description =Putative uncharacterized protein
  Pfam annotation: Domain name=YbaK; Domain location=53-176; Score =120.0; E_value=7.2e-33; Accession=PF04073.5; Description=YbaK prolyl-tRNA synthetases associated domain
MIPRNGAMERRSCCQRYRIPDVERCAFPPYGSFYALFLPEKKMSLESVRHFFAEHAPDIDIIEMPESTATVELAARVHGVAPGQIAKTLSLKVKESVVLIVTRGDARLDNRKLKAALGAKARMLSVDEVVNWTGHPVGGVCPFGLENPLTVYCDVSLRSFDEVLPAAGLIYSVVSI

SEQ ID NO: 14118 - protein, 116 aa, Zea mays
  misc_feature (100)..(116): Xaa can be any naturally occurring amino acid
  Coding DNA Sequence Number=SeqID_1348
GRRRLLCDNLGVLGYLHLYRVLGNLSLGSRHLFTLLLSLLVVYEDFLVSISCIHSHLLPPYGTWTSVLLTLGDQCGGKARAPSSRYPAGVNPTVGGCRAXXXXXXXXXXXXXXXXX

SEQ ID NO: 14119 - protein, 137 aa, Zea mays
  misc_feature (47)..(47): Xaa can be any naturally occurring amino acid
  misc_feature (118)..(118): Xaa can be any naturally occurring amino acid
  Coding DNA Sequence Number=SeqID_1350
  Gene Ontology: Mol. function=catalytic activity; Biological process =cellular metabolic process
  Homolog annotation: Hit_ID=Q6H817; Match level="QueryCoverage=97%, HitCoverage=37%, E-value=7e-41, Identity=66%"; Hit description =Putative cinnamoyl-CoA reductase
QPRVNTSTLHKLECLAGQAREYVNESHAYVHVKNAAEAHVSVLEAPXGRRYVCAAHTLHRGELRRILVGLFPEYPIPAASTTHQDIPKRGYKFTNQPPLLCLLKDLGIKFTPVHIEYXLNGAVRSLQEKGFLQKITA

SEQ ID NO: 14120 - protein, 87 aa, Zea mays
  misc_feature (15)..(15): Xaa can be any naturally occurring amino acid
  misc_feature (68)..(68): Xaa can be any naturally occurring amino acid
  Coding DNA Sequence Number=SeqID_1351
  Gene Ontology: Mol. function=nucleic acid binding
  Homolog annotation: Hit_ID=Q2QLR6; Match level="QueryCoverage=94%, HitCoverage=16%, E-value=2e-34, Identity=78%"; Hit description=Zinc finger family protein, putative, expressed
CVECPECHTDICINXGVPWHIMLGCDEYQSLPGVERDAGDLSLHRLAHNNLWRRSQRCRRMIELTQGXYHMTCCCAVGLSYSGTSKQ

SEQ ID NO: 14121 - protein, 126 aa, Zea mays
  misc_feature (33)..(33): Xaa can be any naturally occurring amino acid
  misc_feature (83)..(83): Xaa can be any naturally occurring amino acid
  misc_feature (102)..(102): Xaa can be any naturally occurring amino acid
  misc_feature (117)..(117): Xaa can be any naturally occurring amino acid
  Coding DNA Sequence Number=SeqID_1352
  Gene Ontology: Mol. function=oxidoreductase activity; Biological process=metabolic process
  Homolog annotation: Hit_ID=UPI000045BE29; Match level="QueryCoverage =99%, HitCoverage=46%, E-value=2e-22, Identity=52%"; Hit description =COG1028: Dehydrogenases with different specificities (related to short-chain alcohol dehydrogenases)
ACLQIPNEMIHYGMTKTALLAVSRGLAEDAWLXPGVTSEFGACPGATTASERVSDFFAKLAEEQGVSTEELEANFLAGATGPXSLIKAGGTGSEVANMVVYXASMQANATTGAALRXDGGVLRSIA

SEQ ID NO: 14122 - protein, 132 aa, Zea mays
  Coding DNA Sequence Number=SeqID_1353
  Gene Ontology: Mol. function=NADH dehydrogenase activity; Cellular component=plasma membrane; Biological process=electron transport
  Homolog annotation: Hit_ID=P00393; Match level="QueryCoverage=100%, HitCoverage=30%, E-value=2e-59, Identity=85%"; Hit description=NADH dehydrogenase
QTTLDDDIYAIGDCASCALPGGGFVPPRAQSAHQMASRALENILAQRKGKPLKAYVYKDHGSLVSLSRFSTVGSLMGNLMRGSMMVEGRIARFVYISLYRMHQIALHGYFKTGLMMLVGSLNRVLRPRLKLH

SEQ ID NO: 14123 - protein, 210 aa, Zea mays
  Coding DNA Sequence Number=SeqID_1354
  Gene Ontology: Mol. function=hydrolase activity; Cellular component =membrane; Biological process=metabolic process
  Homolog annotation: Hit_ID=A8G7Q6; Match level="QueryCoverage=100%, HitCoverage=77%, E-value=2e-77, Identity=65%"; Hit description=Cof -like hydrolase
  Pfam annotation: Domain name=Hydrolase_3; Domain location=6-208; Score=84.0; E_value=4.9e-22; Accession=PF08282.2; Description =haloacid dehalogenase-like hydrolase
MAIKLIAIDMDGTLLNPQHEITAGVKAAIGRARDKGVSIVLATGRPFVGVERYLMELDLRQPGQYCISNNGALAHSADSGEVVAEKTLGFDDYLYLEQLARDLGVHFQAFDKSFLYTPNKDISEYTIHEASLTGIPVRYRAVEEMDPATRFPKLMMIDKPELLDKAIAALPARARDSYTILKSAPYYLEILNPLVNKGYGVKMLAEKLGL

SEQ ID NO: 14124 - protein, 93 aa, Zea mays
  misc_feature (24)..(24): Xaa can be any naturally occurring amino acid
  misc_feature (77)..(77): Xaa can be any naturally occurring amino acid
  Coding DNA Sequence Number=SeqID_1355
  Gene Ontology: Mol. function=transferase activity, transferring glycosyl groups
  Homolog annotation: Hit_ID=A2YMV5; Match level="QueryCoverage=95%, HitCoverage=15%, E-value=7e-35, Identity=83%"; Hit description =Putative uncharacterized protein
LQSLVPLVKRPEHHSSEKWYALLXRNHMGGDGQTYAMLDKTICALSNVFIGSSGSTFTQDIFRLGRGGWGSVSRCDXEYLCQGELPNFIAEPD

SEQ ID NO: 14125 - protein, 104 aa, Zea mays
  Coding DNA Sequence Number=SeqID_1356
  Gene Ontology: Mol. function=transferase activity; Biological process= sulfate transport
  Homolog annotation: Hit_ID=Q4J334; Match level="QueryCoverage=91%, HitCoverage=18%, E-value=6e-31, Identity=69%"; Hit description =Rhodanese-like
CLQQQGKALLPDAGRYVLTCGSSLLASYAVEQIATLSGKPVRVLAGGNAAWRAAGLPTEQGEQRLLSPPIDRYRRPYEGTDIEPDVMQAYLDWEYGLVAQLDRD

SEQ ID NO: 14126 - protein, 71 aa, Zea mays
  Coding DNA Sequence Number=SeqID_1357
LACLQFMAELARGYPHVRTGTPQQLNFTRSDFATADHQHRTVFEIGKERQKRTTTMFATLRRSVLAALIAG

SEQ ID NO: 14127 - protein, 125 aa, Zea mays
  Coding DNA Sequence Number=SeqID_1358
  Gene Ontology: Cellular component=integral to membrane
  Homolog annotation: Hit_ID=A4WB73; Match level="QueryCoverage=100%, HitCoverage=51%, E-value=4e-26, Identity=51%"; Hit description =UPF0259 membrane protein Ent638_2284
  Pfam annotation: Domain name=UPF0259; Domain location=1-125; Score =0.6; E_value=1e-10; Accession=PF06790.2; Description=Uncharacterised protein family (UPF0259)
MALLTSFITVIVGHALTPGEDQLSLLSQTDSSASSLFEIVQNMSPDQQRILLRASAAGTFAALIGNTLLLGGMLCLLPMVSSGQRVSALRAIGASAPLLPKLLVQTFLITLLEQLGFMVLMVPGV

SEQ ID NO: 14128 - protein, 75 aa, Zea mays
  Coding DNA Sequence Number=SeqID_1359
  Gene Ontology: Mol. function=binding; Cellular component=ribosome; Biological process=metabolic process
  Homolog annotation: Hit_ID=Q2QNX6; Match level="QueryCoverage=93%, HitCoverage=15%, E-value=7e-19, Identity=62%"; Hit description =Transposon protein, putative, Pong sub-class
  Pfam annotation: Domain name=Plant_tran; Domain location=1-75; Score =36.1; E_value=3.2e-11; Accession=PF04827.5; Description=Plant transposon protein
GHTYNMGYYLADGIYPDWSFFVMRIRNPYDVRTQHFATIQESARKDIERAFGVLQKRWAIVQGINRGWRRRRPIS

SEQ ID NO: 14129 - protein, 166 aa, Zea mays
  Coding DNA Sequence Number=SeqID_1360
  Gene Ontology: Mol. function=molecular_function; Cellular component =cytoplasm; Biological process=phagocytosis, engulfment
  Homolog annotation: Hit_ID=A7Q8N8; Match level="QueryCoverage=98%, HitCoverage=10%, E-value=1e-56, Identity=66%"; Hit description =Chromosome chr5 scaffold_64, whole genome shotgun sequence
  Pfam annotation: Domain name=WD40; Domain location=1-38; Score=16.6; E_value=0.096; Accession=PF00400.22; Description=WD domain, G-beta repeat
  Pfam annotation: Domain name=WD40; Domain location=42-80; Score=36.0; E_value=1.3e-07; Accession=PF00400.22; Description=WD domain, G-beta repeat
  Pfam annotation: Domain name=WD40; Domain location=84-125; Score =47.4; E_value=5.1e-11; Accession=PF00400.22; Description=WD domain, G-beta repeat
  Pfam module annotation: Pfam domain module=WD40::WD40::WD40; Domain location=1-38::42-80::84-125
MNYVRLIIHARKVLAATFDRTGRYVITGSDDRLVKIWAMETAFCLASCRGHEGDITDLAVSSNNSVVASSSNDFIIRVWRMPDGMPVSVLKGHTGAVTAIAFSPRPGAAFQLLSSSDDGTCRIWDARYSQQPPRLYTPKPPDVAPGKSGDASSSAAQVQPTNHQIL

SEQ ID NO: 14130 - protein, 79 aa, Zea mays
  misc_feature (44)..(44): Xaa can be any naturally occurring amino acid
  Coding DNA Sequence Number=SeqID_1361
  Gene Ontology: Mol. function=potassium ion transmembrane transporter activity; Cellular component=integral to membrane; Biological process=potassium ion transport
  Homolog annotation: Hit_ID=A2XXE1; Match level="QueryCoverage=92%, HitCoverage=10%, E-value=5e-25, Identity=79%"; Hit description =Putative uncharacterized protein
FGRTMLLALQTLAVVFGDIGIGPLYTFDVIVNKYPILGKEDVPXALSTILDTLIVVPLVKYVLDVLWAHDDGERILEGG

SEQ ID NO: 14131 - protein, 209 aa, Zea mays
  Coding DNA Sequence Number=SeqID_1362
  Gene Ontology: Mol. function=nucleoside-triphosphatase activity
  Homolog annotation: Hit_ID=A2XDW7; Match level="QueryCoverage=49%, HitCoverage=5%, E-value=8e-34, Identity=70%"; Hit description =Putative uncharacterized protein
ACLQVTVQTESERQLDKIRRKEERRSKRSADSGNNDIGVDDFSSLLLASERKEAFDDVIGSGEGSDSFTVTSLPQGTTRKHMKGYEEVKIPPTPTASLKPNEKLIKNIAFFLEKRRRTVPHLYIRRKEKRSKKTQNTRHSLRRPEATIQIIEAPRVMREFSPLLAIPVTTADVLSHQSKKEIAADCGAKELYQKTLVKTQDTNRWLIDS

SEQ ID NO: 14132 - protein, 157 aa, Zea mays
  Coding DNA Sequence Number=SeqID_1363
  Subcellular localization annotation: CTP_CleavageSite=39; ConfidenceScore=5.58e-01
LVVPPLPLFGAWSGGVLVPSSVCWLVGLRLPGSCCSFVVCFPLVVSACLWVLFVCFLRAFLLCRIVLVLAPFFLCSLFPRSLGGFALGAVLPVGVHSLVAFVVPLAGSVLGLFLGPVWFVGPAFRGFASSPSLALPLRGVQIKCLLWGSLGFCVFLV

SEQ ID NO: 14133 - protein, 74 aa, Zea mays
  misc_feature (29)..(29): Xaa can be any naturally occurring amino acid
  Coding DNA Sequence Number=SeqID_1364
  Gene Ontology: Mol. function=alpha-1,4-glucan-protein synthase (UDP -forming) activity; Cellular component=cellulose and pectin -containing cell wall; Biological process=cellulose biosynthetic process
  Homolog annotation: Hit_ID=O82705; Match level="QueryCoverage=71%, HitCoverage=15%, E-value=4e-15, Identity=73%"; Hit description=RGP1 protein
VAKDPSGKDINALEQHINNILSPATPLFXNTMYDACRQGSDGVREDPLSLREGCSLLPYPVGLGLTSLPIMIPH

SEQ ID NO: 14134 - protein, 64 aa, Zea mays
  Coding DNA Sequence Number=SeqID_1365
QAEGFPQTYLGLPLSWEIVLGCKFVGGLEVRDLELFNTCLHLKLIHRLHTSSCSSWGAWVRVAL

SEQ ID NO: 14135 - protein, 180 aa, Zea mays
  Coding DNA Sequence Number=SeqID_1366
  Gene Ontology: Mol. function=transferase activity, transferring nitrogenous groups; Cellular component=intracellular; Biological process=regulation of transcription, DNA-dependent
  Homolog annotation: Hit_ID=A3M9S7; Match level="QueryCoverage=97%, HitCoverage=38%, E-value=2e-62, Identity=66%"; Hit description =Putative transcriptional regulator
QGFEQDAPVIYMGTFSKTLYPALRLGYLVVPKALAQPLRVAAAELYRGGHLLVQRALAEFIQKGHYMTHIRRMRKLYSQRRHFMMTLIERYLGAAFMPVVNHEAGLHLVLNLPPGCDDVAIAALALRRGVKVRPLSQYYMHPQERRGLLLGYACVDERQCQDAFGVLKACLVEAGIAGRG

SEQ ID NO: 14136 - protein, 108 aa, Zea mays
  Coding DNA Sequence Number=SeqID_1367
  Gene Ontology: Cellular component=membrane; Biological process=amino acid transport
  Homolog annotation: Hit_ID=Q6D1Y8; Match level="QueryCoverage=86%, HitCoverage=47%, E-value=9e-25, Identity=56%"; Hit description =Putative membrane protein
MLFGILLGCALQMLLASVALELLLHWMASVRLPLTVVGCSYLLWLSWKIFRAGAPQLRERPRPMTLLGGVCFQAVNPKAWLMVTNVALMYANSNGVLAVLLGFAALNL

SEQ ID NO: 14137 - protein, 98 aa, Zea mays
  Coding DNA Sequence Number=SeqID_1368
  Subcellular localization annotation: CTP_CleavageSite=42; ConfidenceScore=5.13e-01
MSHDTGAGVETLSLDLLAHALAAVRDPRDRKSCRLASRAFARAEAASRRAARVLRRDALPRALRAFPALSSLDLSACAGLDDASLAAALLEEPLPVRR

SEQ ID NO: 14138 - protein, 147 aa, Zea mays
  Coding DNA Sequence Number=SeqID_1370
DAQDDGETDRRPAAPDYVEELDEGHRAAFRSGFEEQPMTRILVVWEGNFWRSPYVERLLRHRFAVAGLACLIERAGTRAWSGTGIGDRFGLGLRTGGIDPGGHRSGHLFEGTGLGEGGLVLNLERQHRAGGLELGAGLLERNFTLGE

SEQ ID NO: 14139 - protein, 188 aa, Zea mays
  misc_feature (188)..(188): Xaa can be any naturally occurring amino acid
  Coding DNA Sequence Number=SeqID_1372
  Gene Ontology: Mol. function=hydrolase activity, hydrolyzing O -glycosyl compounds; Cellular component=extracellular region; Biological process=carbohydrate metabolic process
  Homolog annotation: Hit_ID=Q6YUP4; Match level="QueryCoverage=21%, HitCoverage=30%, E-value=6e-11, Identity=80%"; Hit description =Xyloglucan endo-1,4-beta-D-glucanase-like
  Subcellular localization annotation: CTP_CleavageSite=35; ConfidenceScore=5.13e-01
MASSAKPSSAARNAERAREGQQRDGRPRRDDRRARAGTGFSVGRAFRASPARMGRLSAVLGWCRQPRRAARPGTIIWPGSNGPGSNGPGWNGLGLGRAVPPVWTSIGTWLLAEFPTRTHAPFFFHSRHESSIPPSVLCRRYGLLISRLLARPAAGSGFVSSDYYLHGFFSASIKLPRGYTAGVVVAFX

SEQ ID NO: 14140 - protein, 108 aa, Zea mays
  Coding DNA Sequence Number=SeqID_1373
MFGGIPVLSSRGGLDGQVLDPDTLAYTVSTFAQLGYLGIALLTVVFLVRTDGGRRAVRAAFVVGTVLSSLRSAIVAVGADGLEWLFDKKHDRALQPDRPRRPGSWRLQ

SEQ ID NO: 14141 - protein, 130 aa, Zea mays
  Coding DNA Sequence Number=SeqID_1375
  Gene Ontology: Cellular component=flagellin-based flagellum; Biological process=protein transport
  Homolog annotation: Hit_ID=A1JSY8; Match level="QueryCoverage=82%, HitCoverage=41%, E-value=8e-15, Identity=41%"; Hit description =Flagellar biosynthetic protein FliR
  Pfam annotation: Domain name=Bac_export_1; Domain location=1-123; Score=-114.3; E_value=0.068; Accession=PF01311.11; Description =Bacterial export proteins, family 1
MGLGTLLFLTLKGHLGMLRFGTDSLVALPVSDAPFKGQIFLWLSTWAAAIFASELMLCLPVMMVLLCINLTLGVLNRFTPQLSIFVVGFPLTLTSGLVALWVITGAIGPWFEALMGENFARLVLLVQGLR

SEQ ID NO: 14142 - protein, 160 aa, Zea mays
  Coding DNA Sequence Number=SeqID_1376
  Homolog annotation: Hit_ID=Q6D2T9; Match level="QueryCoverage=98%, HitCoverage=98%, E-value=6e-35, Identity=45%"; Hit description =Putative membrane protein
MDAIKQILIDEIDTLNREERRDNLPRFSFNFLKTHPGLWGVMYLCYGLCVALIFSTEMLGWPAFWFATVFVLVMSFLMLLDINPKYRFEDIDTLDLRVCYNGEWYYVQPVSQQALDKILENPGTPERVRSGIDRLMQQKGEVDFYDVYYLTWGHQRAAKI

SEQ ID NO: 14143 - protein, 220 aa, Zea mays
  misc_feature (18)..(18): Xaa can be any naturally occurring amino acid
  misc_feature (42)..(42): Xaa can be any naturally occurring amino acid
  misc_feature (58)..(58): Xaa can be any naturally occurring amino acid
  misc_feature (95)..(95): Xaa can be any naturally occurring amino acid
  misc_feature (106)..(106): Xaa can be any naturally occurring amino acid
  misc_feature (144)..(144): Xaa can be any naturally occurring amino acid
  misc_feature (151)..(151): Xaa can be any naturally occurring amino acid
  Coding DNA Sequence Number=SeqID_1377
  Gene Ontology: Mol. function=catalytic activity; Cellular component =ribosome; Biological process=metabolic process
  Homolog annotation: Hit_ID=Q6K1V9; Match level="QueryCoverage=89%, HitCoverage=22%, E-value=6e-40, Identity=48%"; Hit description =Ribosomal protein-like
  Pfam annotation: Domain name=Plant_tran; Domain location=62-167; Score=20.3; E_value=1.4e-09; Accession=PF04827.5; Description=Plant transposon protein
LDCLHRMWKHSPSAYQGXYAGHDHTPTIILEEVASHDLWTWXFFGLPRSLNDIIVLRXSPLFAKLSKEALQVNFSINSHNYSMGYYLVDVIFPSXAILVKTILEPXTVRIYIVQRHKKKMKGCGVNSYGFTISFRGPSRLWVNXTLNDIMXLCIIMHSMIVEDREMWIHMNVLRMGGNNVEPSHKHNVDFEKIITNHKNLGTKKLTRKLGTKNSLPTRED

SEQ ID NO: 14144 - protein, 134 aa, Zea mays
  Coding DNA Sequence Number=SeqID_1378
  Gene Ontology: Mol. function=alkaline phosphatase activity; Cellular component=periplasmic space; Biological process=metabolic process
  Homolog annotation: Hit_ID=A8AK81; Match level="QueryCoverage=97%, HitCoverage=27%, E-value=2e-58, Identity=85%"; Hit description =Putative uncharacterized protein
  Pfam annotation: Domain name=Alk_phosphatase; Domain location=1-133; Score=-152.4; E_value=0.00015; Accession=PF00245.10; Description =Alkaline phosphatase
LACLQVEGASIDKQDHAANPCGQIGETVDLDEAVQVALAYAREHGDTLVVVTADHAHSSQIVENGTKAPGLTQALNTKDGAVMTISYGNSEEDSQEHTGTQLRIAAYGPHAANVVGLTDQTDLFFTLKQAMALK

SEQ ID NO: 14145 - protein, 192 aa, Zea mays
  Coding DNA Sequence Number=SeqID_1379
  Gene Ontology: Mol. function=metal ion binding; Biological process =intein-mediated protein splicing
  Homolog annotation: Hit_ID=Q8LQ58; Match level="QueryCoverage=91%, HitCoverage=29%, E-value=1e-36, Identity=50%"; Hit description=Zinc finger (C3HC4-type RING finger)-like protein
  Pfam annotation: Domain name=VWA; Domain location=54-191; Score=53.5; E_value=7.5e-13; Accession=PF00092.18; Description=von Willebrand factor type A domain
MHAGAQATSVLRGGADRVRLVPHSVDRAPLEANRHLVLLELIDTSSPAERSGLDLVAVLDVSGSMWGDKLDKLKTAMKFVISKLGSMDRLSIVSFSNDAARLCPLRSMTGDTKEEMVKGIVEKKLHAGGGTNMRAGLETGLRVLAGRQLSSGRVASIILMSDGQDSLHEPRAVDTSGVAVYTFGFGADQDAE

SEQ ID NO: 14146 - protein, 102 aa, Zea mays
  Coding DNA Sequence Number=SeqID_1380
  Gene Ontology: Mol. function=sugar:hydrogen symporter activity; Cellular component=integral to membrane; Biological process =carbohydrate transport
  Homolog annotation: Hit_ID=Q6ZD70; Match level="QueryCoverage=70%, HitCoverage=20%, E-value=7e-25, Identity=72%"; Hit description =Putative GDP-Mannose transporter
ARSFCVDDNDLEDGKSSKERESSAQLLRLPKIQNQALLSGLAYCVSSCSMILVNKFVLSGYAFNAPVFLMLYQVYYWCLLSISHATQLCACLKASFSCSVTA

SEQ ID NO: 14147 - protein, 198 aa, Zea mays
  Coding DNA Sequence Number=SeqID_1381
  Gene Ontology: Mol. function=quinate dehydrogenase (pyrroloquinoline -quinone) activity; Cellular component=outer membrane-bounded periplasmic space; Biological process=quinate metabolic process
  Homolog annotation: Hit_ID=A8GEH6; Match level="QueryCoverage=98%, HitCoverage=24%, E-value=5e-80, Identity=72%"; Hit description =Pyrrolo-quinoline quinone precursor
IGGGKLVALGGSWYFLIAGIVMLLSAIQFFRRKSSAVTLFILVFAGTLIWALYDAGWQFWPLVSRLMVPAGLMVLAFITWPALRKREGKASLAKLSYALSAVIAVGMVVTFVQMFQPHPTVAFTGKQLPLIPVDKSKPQQDWSSYGRTPQGDRFAAIDQITRDNVKDLQVAWTFHTGDTPISPTGNGAEDQETPLQAC

SEQ ID NO: 14148 - protein, 60 aa, Zea mays
  Coding DNA Sequence Number=SeqID_1382
  Gene Ontology: Mol. function=protein serine/threonine kinase activity; Cellular component=ubiquitin ligase complex; Biological process=protein amino acid phosphorylation
  Homolog annotation: Hit_ID=A2Y9P2; Match level="QueryCoverage=90%, HitCoverage=6%, E-value=3e-10, Identity=62%"; Hit description =Putative uncharacterized protein
IGEGGFGRVYKCTLQNMTLAIKALKSDGLQGQSHFEQEVGQLSQMMHTIVYALLSHAYKL

SEQ ID NO: 14149 - protein, 153 aa, Zea mays
  Coding DNA Sequence Number=SeqID_1383
  Gene Ontology: Mol. function=oxidoreductase activity, acting on the aldehyde or oxo group of donors, NAD or NADP as acceptor; Cellular component=cytoplasm; Biological process=amino acid biosynthetic process
  Homolog annotation: Hit_ID=Q6D2N6; Match level="QueryCoverage=100%, HitCoverage=45%, E-value=9e-46, Identity=64%"; Hit description =Probable semialdehyde dehydrogenase
  Pfam annotation: Domain name=Semialdhyde_dh; Domain location=6-121; Score=125.9; E_value=1.2e-34; Accession=PF01118.15; Description =Semialdehyde dehydrogenase, NAD binding domain
MSDGWNIALLGATGAVGNAVLELLAERQFPVGELYLLASENSAGENVRFDGRSLRVQDAAEFDWSQAQLAFFTAGREASARYAEEAASQGCLVIDSSDLFALEPDVPLVVPDVNPQVLADYRNRNIITVADALVSQLLSAIKPLVDTAGLGRL

SEQ ID NO: 14150 - protein, 249 aa, Zea mays
  Coding DNA Sequence Number=SeqID_1384
  Gene Ontology: Mol. function=transporter activity; Cellular component= membrane; Biological process=transport
  Homolog annotation: Hit_ID=A9H7L3; Match level="QueryCoverage=99%, HitCoverage=31%, E-value=1e-52, Identity=43%"; Hit description =Putative TonB-dependent receptor
  Pfam annotation: Domain name=Plug; Domain location=4-77; Score=10.5; E_value=0.076; Accession=PF07715.5; Description=TonB-dependent Receptor Plug Domain
MRFVAGVTPETRGSSAEVYDQFKLRGFDAPIYLDGLKLFNSASGYAIPQVDVSRLDRIEIVKGPSSALYGQSGPGGLVVEDSKLPLDRDFYGAVSGTYGNYDLYRIDADIGGKISDSAQWRLYGSANGANAQQTYGRRERQTVSGAITLGSGSTTSLTVLAAYSHDPRNGNYGVFPALGTLIPNPAGQISTSFYGGEPDDFFKREQLGLTYIFRHDFGGGWSFRALGRYQHISSRLGIVYTGGYPVDSP

SEQ ID NO: 14151 - protein, 96 aa, Zea mays
  misc_feature (48)..(48): Xaa can be any naturally occurring amino acid
  misc_feature (52)..(52): Xaa can be any naturally occurring amino acid
  Coding DNA Sequence Number=SeqID_1385
  Gene Ontology: Cellular component=mitochondrion
  Homolog annotation: Hit_ID=UPI00003B934C; Match level="QueryCoverage =64%, HitCoverage=77%, E-value=1e-22, Identity=87%"; Hit description =UPI00003B934C related cluster
MNWGYISFQFSFKSFYLLPCPFFETSKHEMDKFLLLGTHTRKRIMVAXPLTXFMNFIVIEIHVLPRQNFELAILLPNRQRTSIERLIHLDRSTIQK

SEQ ID NO: 14152 - protein, 94 aa, Zea mays
  misc_feature (16)..(16): Xaa can be any naturally occurring amino acid
  misc_feature (29)..(29): Xaa can be any naturally occurring amino acid
  Coding DNA Sequence Number=SeqID_1386
  Gene Ontology: Mol. function=nucleic acid binding; Cellular component= spliceosome; Biological process=mRNA processing
  Homolog annotation: Hit_ID=A2YQU8; Match level="QueryCoverage=98%, HitCoverage=17%, E-value=2e-37, Identity=76%"; Hit description=Pre -mRNA-splicing factor SLU7
MTVTLKTREDHRKQFXLEEARKVGLAPAXVDDDGNYINPHIPQYMSSAPWYPNAENPSLKHHRKCKSDPTYTESWYDRGVKLFQSNKYSKGACE

SEQ ID NO: 14153 - protein, 138 aa, Zea mays
  Coding DNA Sequence Number=SeqID_1387
  Gene Ontology: Mol. function=transferase activity
  Homolog annotation: Hit_ID=A2Z3N2; Match level="QueryCoverage=90%, HitCoverage=27%, E-value=3e-46, Identity=79%"; Hit description =Putative uncharacterized protein
MEVKVLSSKLVKPAYNAGAGPAPAASADEYTPLTIFDVVTYKMQMAIIYAFPPPAPSTAAIENGLAAVLAEYRAFAGQLGEAPDGTPAVLLNDRGARLVEAAVDADLVDMAPAKPTPKLLRLHPDLEEEELQEVVLLQ

SEQ ID NO: 14154 - protein, 150 aa, Zea mays
  misc_feature (14)..(14): Xaa can be any naturally occurring amino acid
  Coding DNA Sequence Number=SeqID_1388
  Gene Ontology: Mol. function=ribulose-bisphosphate carboxylase activity; Cellular component=chloroplast ribulose bisphosphate carboxylase complex; Biological process=carbon utilization by fixation of carbon dioxide
  Homolog annotation: Hit_ID=Q2WGH3; Match level="QueryCoverage=100%, HitCoverage=31%, E-value=2e-25, Identity=45%"; Hit description =Ribulose bisphosphate carboxylase large chain
IEPAPGEETTADGXRARPKDRLKRGLNEQDTATAGNGPGDRATRAPGVEEPRTGAAHAKTDQGERHGIQKERDKGNKDGTTEVGGTKKPKLGAHAQDYRGGADERTHGALDYTREEEDVNAQTGRRGRDRLAVGAEAIYNARAETCENKG

SEQ ID NO: 14155 - protein, 101 aa, Zea mays
  Coding DNA Sequence Number=SeqID_1389
QATWYGIEEAANEHKRETQRVRRPTSGKPLPDQKQTLSIKRQRLSSNNTRDSKAPRERERPDESAAAKRGEDEQHAHAHQQLSLGLRRSKAKPERYGGQGP

SEQ ID NO: 14156 - protein, 124 aa, Zea mays
  Coding DNA Sequence Number=SeqID_1391
ACLQQSFQIRTAVAQPRTEIDHAVGLHDAITFSCLVIKSQTEKRGAQRGTAPGDNHRSIPDRDYRGFLAERLDGAANADQYHAAQHFRPFAHYRTDKASVQHTGGRHDSGGRTDGERGEHNVNL

SEQ ID NO: 14157 - protein, 158 aa, Zea mays
  Coding DNA Sequence Number=SeqID_1393
MVLCLVKVEGNDRNGSVVIGVINTASCAKSRHHRLERSFVRLALPHGSGFRMNSRISLSSARIISPSYCPHPLSSPPPSSSPPLAIFDAQRVSNGRRFPQYMQSTARNSSQMSHIVNSTPLPRNHLHIGCVGSFPGFEISVLVADLVDFEIAGRTQTR

SEQ ID NO: 14158 - protein, 226 aa, Zea mays
  Coding DNA Sequence Number=SeqID_1395
  Homolog annotation: Hit_ID=A9BQS9; Match level="QueryCoverage=93%, HitCoverage=71%, E-value=6e-73, Identity=62%"; Hit description =Putative uncharacterized protein
MPHREVRMNHQAHRSVVLDIDCSVGPLPGGLVLPLAGWQEAIRFGCSLATMRRFRALLDAQLPERYGTVFTGSGDFHHLSWPLIARLKPAQPIQVVVLDNHPDNMRFPFGVHCGSWVRRVAALPFVEHVHVLGITSCDIGAGHAWENYLTPLLRGKLSYWSMGVDTGWSHRLGIARAFRGFDTPDALVDAFVERQRTQPLPTYLTIDKDAFAPEVARTNWDQGRLQ

SEQ ID NO: 14159 - protein, 176 aa, Zea mays
  Coding DNA Sequence Number=SeqID_1396
  Gene Ontology: Mol. function=transporter activity; Cellular component= outer membrane-bounded periplasmic space; Biological process=transport
LACLQSARSLPFCQDVIHGASPLYLENPVPPEAPRDRNKRRTKLDTNLWPVNHPGKCLAPEFYPSRGLPDSSCVPPSPIYVARIFGGDISGLGMAAAGQRAAAYWSRARGWGLAAAWEPGRGRVAGGLGLSQCRVPAWPRGVLGSWPPGKAGMTGSGGWGSGVGGRDGWEGKGVGS

SEQ ID NO: 14160 - protein, 169 aa, Zea mays
  misc_feature (64)..(64): Xaa can be any naturally occurring amino acid
  misc_feature (81)..(81): Xaa can be any naturally occurring amino acid
  misc_feature (100)..(100): Xaa can be any naturally occurring amino acid
  misc_feature (126)..(126): Xaa can be any naturally occurring amino acid
  Coding DNA Sequence Number=SeqID_1397
  Gene Ontology: Mol. function=hydrolase activity
  Homolog annotation: Hit_ID=A7PE65; Match level="QueryCoverage=97%, HitCoverage=61%, E-value=8e-39, Identity=50%"; Hit description =Chromosome chr11 scaffold_13, whole genome shotgun sequence
FLFSLDVSQEEMVIINRYGEILVGVLHEVGSKDLVVLCHRFRSSKEGRIMLSLADALTSENVSXMCFDYSGNGESEGTFGXGYYNEVDVLCDAILHFKNXKRDAHAIAGHSKGENVVILYTSMYHXIHGISKAINLSGRFKLERRIGDHSVNDYMERINQHGFIDVEDK

SEQ ID NO: 14161 - protein, 175 aa, Zea mays
  misc_feature (136)..(136): Xaa can be any naturally occurring amino acid
  Coding DNA Sequence Number=SeqID_1398
MTVSVPSRNFLRQGVPTGGVMDMDQTGSNLFLPTIVFASVTDPLDTSTPPVAGVDLGSTPADDAAKFFYPVSASTNDPNATADSFYDSSPTPSPAPTNETVPGTRLPSGYVVQPSGGVNRPFYEEVTTLSTLIYQXRVMAMISISDANGNNERVIDISEDLDAGNMSCAPRACTP

SEQ ID NO: 14162 - protein, 70 aa, Zea mays
  Coding DNA Sequence Number=SeqID_1400
YGPFARPPGREGGRKRHLRRTRLDEHDGDYGGYPAGHPQAQQGGPGPPAGPITQLSDQRPADKTPGHRQT

SEQ ID NO: 14163 - protein, 94 aa, Zea mays
  Coding DNA Sequence Number=SeqID_1402
  Subcellular localization annotation: CTP_CleavageSite=47; ConfidenceScore=5.47e-01
GGGTTAESFFFFFFFFFLVFFFFFFFLEGFRNSTYLQPGYRSSTTLVATQGEPSGAIQGNIALYRGSRPNEAKRRSSSKTKDRLCRHKSQNWLA

SEQ ID NO: 14164 - protein, 126 aa, Zea mays
  misc_feature (75)..(75): Xaa can be any naturally occurring amino acid
  Coding DNA Sequence Number=SeqID_1404
  Homolog annotation: Hit_ID=O48968; Match level="QueryCoverage=78%, HitCoverage=43%, E-value=3e-23, Identity=57%"; Hit description =Putative uncharacterized protein
MQYFMAVRGLERQFKGFSVSMWPAPGNEEEYMLFKASAKGETVPSFVFQDVIGLPAVRNPEGLQVSNDAEGHSIXVSLIMHEDWRAVITLYLQAHCLPSYAHQDNTASAEAEFPSPGQGDLRVTAA

SEQ ID NO: 14165 - protein, 171 aa, Zea mays
  Coding DNA Sequence Number=SeqID_1405
  Gene Ontology: Cellular component=integral to membrane
  Homolog annotation: Hit_ID=Q1IBR3; Match level="QueryCoverage=97%, HitCoverage=67%, E-value=7e-27, Identity=40%"; Hit description =Transmembrane regulator PrtR
RYQRLALACSLVLALGIGSLSGWQMTERLQNHPLPMEDAVQAYRLFGDGAQQATMDISTHQTTQLASWLGRYFINGTLPPNLERFGYQLIGARLMANEHGASALVLYQTASGTRVGWYIRPQTVRLEKGSRQADNLVAQYWSDRHYNYALVSPMSGEAAPALRAAIGSEVG

SEQ ID NO: 14166 - protein, 73 aa, Zea mays
  Coding DNA Sequence Number=SeqID_1406
  Homolog annotation: Hit_ID=A2YF20; Match level="QueryCoverage=82%, HitCoverage=17%, E-value=9e-09, Identity=55%"; Hit description =Putative uncharacterized protein
MPNTVARVLGDELEPVSPHQQAQETQSVDDRRLLRSQYLAVKGLISDDKNRMASADFDKFCSIINRVDSLPQL

SEQ ID NO: 14167 - protein, 175 aa, Zea mays
  Coding DNA Sequence Number=SeqID_1407
  Subcellular localization annotation: CTP_CleavageSite=59; ConfidenceScore=5.53e-01
PSRVTPASLIGVRPWVSTACGTTLPCAQAVPVSTALASSPAASKTGRVAILETARKRPNAALVAAPYSLGSRACGEGPNEVPCGNYSRQGRDIFRIRRRPCRPTLCRPKPPLGTATMTTRTLPALSPLAPSVRALLLAGSLALSNAAIAATAPAAPAGRNVTWEDIANDHLTTQD

SEQ ID NO: 14168 - protein, 135 aa, Zea mays
  Coding DNA Sequence Number=SeqID_1409
  Gene Ontology: Cellular component=membrane
  Homolog annotation: Hit_ID=A6T617; Match level="QueryCoverage=100%, HitCoverage=32%, E-value=2e-53, Identity=74%"; Hit description =Putative transport
MPDNGISGEVIDIALHTITIRNWDNTLSRIPTKNFLTETYTNWQAMFSSGARRIMRSFHLDQTSIRFLDQQMVQQMSQIRGVSEQLSILMDGRDSSVVGDRWFAENGITNLTVFRHYLTAWLAQRDDIKKDMYIV

SEQ ID NO: 14169 - protein, 95 aa, Zea mays
  Coding DNA Sequence Number=SeqID_1410
  Gene Ontology: Mol. function=selenium binding; Biological process =cell redox homeostasis
  Homolog annotation: Hit_ID=A6TD16; Match level="QueryCoverage=96%, HitCoverage=94%, E-value=1e-33, Identity=67%"; Hit description =Putative uncharacterized protein
  Pfam annotation: Domain name=Seleno_W_rel; Domain location=1-95; Score=166.6; E_value=6.5e-47; Accession=PF05169.3; Description =Selenoprotein W-related family
MADKPAVTIHYCTQCNWLLRSAWMAQELLHTFAGDLSAVTLQPGSGGVFEISIDGQVIWERKQEGGFPDAAALKQRVRDVCWPDREPGQVDKKKP

SEQ ID NO: 14170 - protein, 75 aa, Zea mays
  Coding DNA Sequence Number=SeqID_1411
MWRQQAGRHLLLIAWAIFDVRASERRAALHCSPALVWSAYLSAAPGGPVVQYYMAATATDGNGATGFNARHSTTA

SEQ ID NO: 14171 - protein, 170 aa, Zea mays
  Coding DNA Sequence Number=SeqID_1412
  Subcellular localization annotation: CTP_CleavageSite=28; ConfidenceScore=5.57e-01
RYPARRPSLRSSSHPAPFPTPRARAPPLAMDAARAHPMGASPAPRQPAGSSVSSPMAPSSLPSLFQIGIRAVRAKLSQPWTAPSLGFPARPSLGPSRRAPSGLLSALSSAQASPLLYPPHGDKHQLHSYMAMAPPCSPLGRGPLCPRAKLLARARHGRISAPLAERPCCV

SEQ ID NO: 14172 - protein, 196 aa, Zea mays
  Coding DNA Sequence Number=SeqID_1414
  Gene Ontology: Mol. function=drug transporter activity; Cellular component=membrane; Biological process=multidrug transport
  Homolog annotation: Hit_ID=A3AJR2; Match level="QueryCoverage=81%, HitCoverage=28%, E-value=9e-66, Identity=75%"; Hit description =Putative uncharacterized protein
  Pfam annotation: Domain name=MatE; Domain location=2-152; Score =112.2; E_value=1.6e-30; Accession=PF01554.9; Description=MatE
LQVTVLMAGLLKDPEIALDSLAVCMSISGWVFMASVGFNAAASVRVSNELGAGHPKAASFSVKVVTIVSFTVASTIAVVLMCLRDYLSYVFTKGDDVARAVSAMTPLLAVTIVFNGIQPVLSGVAVGCGWQSFVAYVNVACYYGVGIPLGCVLGFYFDLGAMVMKKSRTYLPFIIYSIQKPHLFYFSCVYFIVTFI

SEQ ID NO: 14173 - protein, 136 aa, Zea mays
  misc_feature (45)..(45): Xaa can be any naturally occurring amino acid
  misc_feature (67)..(67): Xaa can be any naturally occurring amino acid
  Coding DNA Sequence Number=SeqID_1415
  Gene Ontology: Mol. function=oxidoreductase activity; Biological process=electron transport
  Homolog annotation: Hit_ID=A5W541; Match level="QueryCoverage=99%, HitCoverage=38%, E-value=3e-58, Identity=83%"; Hit description =Oxidoreductase domain protein
LQLANGALCRLTGSDAEAAPWSWELDSGESHVYARQDGQPCYLAXAGTQGALSIPQLKRWHYAEVGXGWHTQLLHSEESIPAGEALTLQLQHLVRLDRCEQAPLIDAANGGRTLALIEAIRQASETGRACAPEHIA

SEQ ID NO: 14174 - protein, 91 aa, Zea mays
  Coding DNA Sequence Number=SeqID_1416
  Homolog annotation: Hit_ID=Q7XIT1; Match level="QueryCoverage=100%, HitCoverage=10%, E-value=2e-16, Identity=45%"; Hit description =OsIre1p
PCQTPRKLPNTGGKSNILLDDSQNQTHDVARSHAISADPEATLNPTRNTCGWLYPLFTIFLITGYLVSLISASKSCRQFMIQLIEPFTHNK

SEQ ID NO: 14175 - protein, 89 aa, Zea mays
  Coding DNA Sequence Number=SeqID_1417
  Homolog annotation: Hit_ID=UPI000166254C; Match level="QueryCoverage =58%, HitCoverage=26%, E-value=5e-09, Identity=59%"; Hit description =UPI000166254C related cluster
CLLLIARGFRVPAINATNEGGERVITTPNGLVTGHVPISLNAMLEAVELPAPPSDLDTGLTDVDRDALPHGVDGMGWSCSGGGRKWKKL

SEQ ID NO: 14176 - protein, 160 aa, Zea mays
  misc_feature (40)..(40): Xaa can be any naturally occurring amino acid
  Coding DNA Sequence Number=SeqID_1418
  Gene Ontology: Mol. function=carbonate dehydratase activity; Cellular component=chloroplast; Biological process=carbon utilization
  Homolog annotation: Hit_ID=Q41728; Match level="QueryCoverage=39%, HitCoverage=47%, E-value=2e-16, Identity=64%"; Hit description =Carbonic anhydrase
  Pfam annotation: Domain name=Pro_CA; Domain location=1-93; Score= -56.7; E_value=0.04; Accession=PF00484.9; Description=Carbonic anhydrase
  Subcellular localization annotation: CTP_CleavageSite=39; ConfidenceScore=5.16e-01
MVSMIQFRHFFSSKKKKKKKKKKKIKITKKKKKKNHTSVXSMTQCSIIEKEAVNLSLENLKTYPLRKDGLANRTLKLVGGHYNFVSREYLTWDNKQSSRMYIYTLHDACSYSACRYIHIYIAGSPTAMCECALCNKQYHIFYHSTAFYFLTPSIHVLCIL

SEQ ID NO: 14177 - protein, 152 aa, Zea mays
  Coding DNA Sequence Number=SeqID_1419
  Subcellular localization annotation: CTP_CleavageSite=4; ConfidenceScore=5.09e-01
CPVRSVMRLRCVACLRTGVPGLSLSTFLASAFGWFGRGFLVWLGFPGLSLRVSCLSVPAGCSGVSWGSHAAAAAPVLWAGLVRPGRAWPVRRAFWPWAFAVGLLRLCVSCGVFGVRVLRLVSLFGSGCRVPVGPFLSVPLAVGGGVSWLVIV

SEQ ID NO: 14178 - protein, 101 aa, Zea mays
  Coding DNA Sequence Number=SeqID_1420
PHLAHAAVGLPELMVPYHYLGDILYYWKLRITELEEALAPYHAAFPGARPPGPRGYRRGHRREVSSAAPDEGGRPGGHPGRRDMRAARRPRRGGGGPLWRG

SEQ ID NO: 14179 - protein, 343 aa, Zea mays
  Coding DNA Sequence Number=SeqID_1422
  Homolog annotation: Hit_ID=A2WWT9; Match level="QueryCoverage=87%, HitCoverage=70%, E-value=2e-61, Identity=50%"; Hit description =Putative uncharacterized protein
  Pfam annotation: Domain name=DUF966; Domain location=43-343; Score =355.6; E_value=8.5e-104; Accession=PF06136.4; Description=Domain of unknown function (DUF966)
MAVAAAGSRARAEQARLQWREQEPRSPEMAAPPRPPRPRPARAAVVYYLARNGHLEHPHFMEVALSCPDGLYLRDVIDRLDALRGKGMARVYSWASKRSYRNGFVWHDLADDDYIHPVVGREYVLKGTERLHPVPPPALLDAAAASSSSSGSQETPTSSSSAGWEARGRTAHRMKSASACGAADAELGEYVAYKGEERAADAATQTEDGGRGHGHSHSQRRVLAPAAQEELSRAETTSPPTASTSPETLEALIRADGRVVAAVSGSGRARASSVLMQLISCGSVSVRDASVVPRAQAQAQAHHHHHHHHRARRPHRKPASAAVDLPSYRAKIVEDKEYFRGVL

SEQ ID NO: 14180 - protein, 153 aa, Zea mays
  Coding DNA Sequence Number=SeqID_1423
  Homolog annotation: Hit_ID=A2YA21; Match level="QueryCoverage=98%, HitCoverage=27%, E-value=7e-11, Identity=34%"; Hit description =Putative uncharacterized protein
MAELRAQMERLLVDARADARSCTGRPSASGGRSDCASAVKGSVARAGGEDEEVGALSRSNGDGGRDMDRMEAELEAELSRLQLHGVSDVEDSPPSRRRDDQLVVQAGPKSGSSSRRHSAICSEGDSDDGETDNSGDESQEDEGEYEHDADEGN

SEQ ID NO: 14181 - protein, 61 aa, Zea mays
  Coding DNA Sequence Number=SeqID_1424
HGSRPGHCRIWRMTVKSPSTITPIIRKTVSPASPAPPKQHQRHILKKDKPGRSVLFGHNRL

SEQ ID NO: 14182 - protein, 124 aa, Zea mays
  Coding DNA Sequence Number=SeqID_1426
  Subcellular localization annotation: CTP_CleavageSite=14; ConfidenceScore=5.12e-01
MANPSNDKGGGSPAARTRRSRTKRDPSGDKVYSVPPQEFADTVQRLTGAGTSHSCQHQQAARAPVAASSTAPRQRSSSGSPPAPAPALLLSVSSSAPRSMQEAYLAWCACNKRGLSPGTMADME

SEQ ID NO: 14183 - protein, 95 aa, Zea mays
  Coding DNA Sequence Number=SeqID_1428
  Subcellular localization annotation: CTP_CleavageSite=58; ConfidenceScore=5.14e-01
QMTYKERADAWARLTDSRLFFSLLLAQALSHAQLSLPRTAAPPGPRARSSPAPHRRARSAANATAHSCPPFRLSPSARARCWLAWSTRFGQTPAS

SEQ ID NO: 14184 - protein, 258 aa, Zea mays
  misc_feature (142)..(142): Xaa can be any naturally occurring amino acid
  misc_feature (159)..(159): Xaa can be any naturally occurring amino acid
  Coding DNA Sequence Number=SeqID_1429
  Homolog annotation: Hit_ID=A2XBB4; Match level="QueryCoverage=52%, HitCoverage=35%, E-value=2e-27, Identity=41%"; Hit description =Putative uncharacterized protein
MNSKWTYYPPQTEVVGSSDSKSAALPPVVDEQYRNEASPLPFVHDDTAKVVSSDSSDDLGIQQISKLFASLGYNAIASPALLLVDLTNSKDPSDLATIQHLADTLVDDNMFDRLIHNLSWFSMIGPDDADSVHQILGILLQXQPANQKRFDQINGVNAXFRDPKNPDEEEKLENIFHYLCDVLMPLENKEKFVKAEGVEFSTSSVLVTEEDEVLNALPNSIIFVGVVEVAVRLDLSTFHEVADDGEQLGERVAELDVP

SEQ ID NO: 14185 - protein, 116 aa, Zea mays
  Coding DNA Sequence Number=SeqID_1430
  Homolog annotation: Hit_ID=A2YV47; Match level="QueryCoverage=96%, HitCoverage=34%, E-value=1e-27, Identity=58%"; Hit description =Putative uncharacterized protein
  Pfam annotation: Domain name=DUF581; Domain location=22-80; Score =47.6; E_value=4.4e-11; Accession=PF04570.5; Description=Protein of unknown function (DUF581)
APGRAEWLGGNRARRAPALGGLPRNSADLWAAETPGFLRAWGFCNPPLGPGRDPFMYRGDPGFCSLECRHQPLPIEEWKEKWALAPPPTAPGSDPVVPLPPNGGGSDKPGTLPPAS

SEQ ID NO: 14186 - protein, 101 aa, Zea mays
  Coding DNA Sequence Number=SeqID_1431
  Gene Ontology: Mol. function=phosphoprotein phosphatase activity
  Homolog annotation: Hit_ID=Q5MFV5; Match level="QueryCoverage=100%, HitCoverage=26%, E-value=2e-36, Identity=80%"; Hit description=BTH -induced protein phosphatase 2C 2 K2 form
FHRQVRQECIVRPRLAAVGSCCLLGAISGNTLYVTNFEDSRAVLGSRVGDVGGGPAVAERLSAEHNAASEEVRRELAALNPDDAQIVVHARGAWRVKGIIQ

SEQ ID NO: 14187 - protein, 167 aa, Zea mays
  Coding DNA Sequence Number=SeqID_1432
  Gene Ontology: Mol. function=glycine hydroxymethyltransferase activity; Cellular component=cytoplasm; Biological process=serine family amino acid metabolic process
  Homolog annotation: Hit_ID=A8CY88; Match level="QueryCoverage=98%, HitCoverage=45%, E-value=2e-82, Identity=89%"; Hit description =Glycine hydroxymethyltransferase precursor
  Pfam annotation: Domain name=SHMT; Domain location=4-167; Score=89.4; E_value=1.2e-23; Accession=PF00464.10; Description=Serine hydroxymethyltransferase
WPRKLAIDRVKQLFGADYANVQPHSGSQANQAVYFALLQPGDTILGMSLAHGGHLTHGAKVNLSGKILDAVQYGVNDDGIVDMDEVERLALEHKPKMIVAGFSAYSQVMDWARFRAIADKVGAYLFVDMAHVAGLVAAGVYPSPLPHAHVVTSTTHKTLRGPRDGII

SEQ ID NO: 14188 - protein, 129 aa, Zea mays
  misc_feature (9)..(9): Xaa can be any naturally occurring amino acid
  Coding DNA Sequence Number=SeqID_1433
  Gene Ontology: Mol. function=nucleotide binding; Cellular component =chromosome; Biological process=response to DNA damage stimulus
  Homolog annotation: Hit_ID=A7MHW6; Match level="QueryCoverage=100%, HitCoverage=35%, E-value=1e-61, Identity=93%"; Hit description =Putative uncharacterized protein
QPLGKVASXSELSRIALAIQVITAQKMETPAMIFDEVDVGISGPTAAVVGQMLRQLGESTQVMCVTHLPQVAGCGHQHFFVSKETDGAMTETHMQPLDKRARLQELARLLGGSEVTRNTLANAKELLAA

SEQ ID NO: 14189 - protein, 90 aa, Zea mays
  Coding DNA Sequence Number=SeqID_1434
  Gene Ontology: Mol. function=transferase activity
  Homolog annotation: Hit_ID=A7NY18; Match level="QueryCoverage=77%, HitCoverage=9%, E-value=5e-26, Identity=81%"; Hit description =Chromosome chr6 scaffold_3, whole genome shotgun sequence
LCGSLCCSEVDQHFGKDHLFKKSIILIKDWCYYESRILGAHHGLISTYALETLVLYIFHIFHKSLDGPLAVSYGLIFLLPFLPILYFQSS

SEQ ID NO: 14190 - protein, 200 aa, Zea mays
  Coding DNA Sequence Number=SeqID_1435
MAEQRGTRSERRSAANLKVSRQGRTRQEQESRCQGHDSREEQEGWAAEKEKSQHHGKHGSSGRRRRATAASAMASRGAGRKELEAELDIGGELTAAMATGRGRSAGEVGESSDGRTQTSTPWRCGTWQKQGARYTAVGTKKQGTERDRGTGMHWRWPAAKQTRPGSSTTRAMEASREIHWERIMTGVDEADCGREETRGT

SEQ ID NO: 14191 - protein, 63 aa, Zea mays
  Coding DNA Sequence Number=SeqID_1437
  Homolog annotation: Hit_ID=P30792; Match level="QueryCoverage=100%, HitCoverage=11%, E-value=5e-07, Identity=46%"; Hit description=2,3 -bisphosphoglycerate-independent phosphoglycerate mutase
NASMKILAWHTFHYVSASLEAHGIHRLIKSVRDIRTCGLANVTATVINLPAFEAHASYDQSLV

SEQ ID NO: 14192 - protein, 142 aa, Zea mays
  misc_feature (29)..(29): Xaa can be any naturally occurring amino acid
  Coding DNA Sequence Number=SeqID_1438
  Gene Ontology: Mol. function=carboxylesterase activity
  Homolog annotation: Hit_ID=Q680G4; Match level="QueryCoverage=100%, HitCoverage=34%, E-value=6e-50, Identity=74%"; Hit description =Putative LEA protein
FEDIGGEFTLPLAANAEPVRDFDDGLTRXVSFGFKSVDGCYSKWGSSKAIKHVRIPLLCIQAANDPLAPERGIPRDAIKANPNWVLIVPPRGGPLGWVAGEEAPPGAPWAAQVVMGFLPHVENREPLTGEGSFGDVHDQIQV

SEQ ID NO: 14193 - protein, 80 aa, Zea mays
  Coding DNA Sequence Number=SeqID_1439
MQPPPISSPPNLALLGTSTVAAAADPEGDMTEVDLREQQDGGKEWRPRQGPTEGRLRTQAKAARGRAMRLPCTSVRKGEM

SEQ ID NO: 14194 - protein, 127 aa, Zea mays
  Coding DNA Sequence Number=SeqID_1441
  Gene Ontology: Biological process=intracellular signaling cascade
  Homolog annotation: Hit_ID=A2YQ79; Match level="QueryCoverage=53%, HitCoverage=11%, E-value=2e-23, Identity=68%"; Hit description =Putative uncharacterized protein
MGGVGHCRRSCRAFPRDGAELGGVFRRPQARRARYPRIRGSLYDGDGGAQAQEQPPAPGTCDLYKGRWVYDESRAPLYKESDCSFLTEQVTCMRNGRRDDDYQKWRWQPDGCDLPRYHRLASSLACH

SEQ ID NO: 14195 - protein, 91 aa, Zea mays
  Coding DNA Sequence Number=SeqID_1442
  Subcellular localization annotation: CTP_CleavageSite=48; ConfidenceScore=5.07e-01
SGWVFLENRTFPPPAWFLQNPLMRSQSCTPNCLCCCTILQHQMPTCPRTSYLRAKPLYLVAIPLTLPDPMYPSDKASAPEWLPDGLSPIYS

SEQ ID NO: 14196 - protein, 227 aa, Zea mays
  misc_feature (16)..(16): Xaa can be any naturally occurring amino acid
  Coding DNA Sequence Number=SeqID_1444
  Gene Ontology: Mol. function=oxidoreductase activity; Cellular component=integral to membrane; Biological process=electron transport
  Homolog annotation: Hit_ID=A8CWN7; Match level="QueryCoverage=96%, HitCoverage=25%, E-value=2e-73, Identity=61%"; Hit description =Aldehyde oxidase and xanthine dehydrogenase, molybdopterin binding
TNIANHHVALHTPKKXVTVLWWRSVGHSHSAFVMESLMDELAHAAGQDPLEYRRALLKNHPRHLAALNLAAEKAGWGDALPAGRFRGIAVHESFGSYVAHVAEVSVDQGQVKVHRVVCAIDCGLVVNPESLVAQMESGIAFGLGAALQSEITFQDGRVQQSNFHDYQVLRMNQMPVVEVHIVPSTEKMGGAGEPGLPPVAPAVANAVFAATGKRIRSLPIGQQLTSA

SEQ ID NO: 14197 - protein, 70 aa, Zea mays
  Coding DNA Sequence Number=SeqID_1445
  Gene Ontology: Mol. function=nucleic acid binding
  Homolog annotation: Hit_ID=Q10LF6; Match level="QueryCoverage=98%, HitCoverage=4%, E-value=5e-22, Identity=72%"; Hit description =Transcriptional activator, putative, expressed
ESRYPQINVSCADRNFAYKFTDEMYDPWVMKLFLGFARTSEFNGPRQPVALHPLIQELNTDLPILEPMLQ

SEQ ID NO: 14198 - protein, 64 aa, Zea mays
  Coding DNA Sequence Number=SeqID_1446
RRFKTAVHAKGIGQNILELHAHYMLWNVCTVHFMALLLSRIVLLPSEHLSDTINKVFGFTCPPH

SEQ ID NO: 14199 - protein, 179 aa, Zea mays
  Coding DNA Sequence Number=SeqID_1448
ACLQREAAANHPALIAAVEIVAVIHKAARAVIAVVTGVAGHKQIRTPLCARLLRAAAEQRLQVVCHAVEGGGQRDVGRHLRNHRRAHLARLRFWLWLRHLRIFRFRLWFWIGLRFRLRLRFRLRLRQIRFAVIPFRQQNVLQAVIPELIPFARHQTLIATGAARCEGVQTVSPGAARHI

SEQ ID NO: 14200 - protein, 100 aa, Zea mays
  Coding DNA Sequence Number=SeqID_1450
  Gene Ontology: Mol. function=RNA binding; Cellular component =spliceosome; Biological process=nuclear mRNA splicing, via spliceosome
  Homolog annotation: Hit_ID=A7QIL5; Match level="QueryCoverage=82%, HitCoverage=7%, E-value=1e-13, Identity=52%"; Hit description =Chromosome chr9 scaffold_104, whole genome shotgun sequence
ALEPTEPYLPVHNYGWIFSCQIICLVADTNDHSVSIHKELSGNLTTYPINDGIVNISARTDQFYMKEIHVYVQTRPAAQFSLAKMEQMRQRLCISTELFL

SEQ ID NO: 14201 - protein, 214 aa, Zea mays
  misc_feature (101)..(214): Xaa can be any naturally occurring amino acid
  Coding DNA Sequence Number=SeqID_1451
  Subcellular localization annotation: CTP_CleavageSite=23; ConfidenceScore=5.62e-01
TTGSSPHSVVTTFFFGRAPLSVSCDSISLTNPSLPGWPTSQPPATPLLSPPSAPHHRVAPGSAPPVLLSHDTERRRRSPLPLPRAARFRQGGVRRRREPEXXXXXXXXXXXXXXXXXXXXXXXXXXXXXXXXXXXXXXXXXXXXXXXXXXXXXXXXXXXXXXXXXXXXXXXXXXXXXXXXXXXXXXXXXXXXXXXXXXXXXXXXXXXXXXXXXX

SEQ ID NO: 14202 - protein, 157 aa, Zea mays
  Coding DNA Sequence Number=SeqID_1453
ATLNVLGRSTLAGDINLSGTASSLIADIAQYVSTLGELASTISANISGQGSVIKSGDGRLTLSGDVSNQQGVEVQQGELEVSGKLHTPLNMAAGTLLSGGGVINHASLADNVTLAPGWNNAPDSWSTMRLGDLHHGRYTALVLNSAFRQDASDRLLI

SEQ ID NO: 14203 - protein, 148 aa, Zea mays
  Coding DNA Sequence Number=SeqID_1455
AALVQVYRDNEDLRLILPEEEDADMANGEMVLMIIDTVVVVARHRTRVVADVLLHDVVASCRQVLEPHGPIWGMMVMTCASMTGPSECGSRVVMDGTWPVATTTSKSTGAMESALAIVEKLLVPPRPLPARLPAKRKPMLFASFFSTP

SEQ ID NO: 14204 - protein, 63 aa, Zea mays
  Coding DNA Sequence Number=SeqID_1457
  Homolog annotation: Hit_ID=A2X255; Match level="QueryCoverage=61%, HitCoverage=2%, E-value=7e-12, Identity=89%"; Hit description =Putative uncharacterized protein
MLKVLKVPELGNGNEELWTFVIYAGEDHTNTQTLVAFLGLLSTLVCIIDTALFSFSLFAFAPT

SEQ ID NO: 14205 - protein, 193 aa, Zea mays
  misc_feature (187)..(187): Xaa can be any naturally occurring amino acid
  Coding DNA Sequence Number=SeqID_1458
  Pfam annotation: Domain name=GerE; Domain location=131-188; Score =43.5; E_value=7.7e-10; Accession=PF00196.10; Description=Bacterial regulatory proteins, luxR family
MLNIFTMDSDRWITEGLRLYFSGQMISCLTLTSPDDPIPTGRGRNVVISELHFASKNLEETLRSLLLIQLKTPGVELVILTDISDEAVLNYVARHLKKARMLSKKCPLATLVSAVLTPENVAAVAAPHGNADVLTEREFTLLRWLAGPRRMTEIGHALHLSNKTISHYKNTISRKLGCKNHMDFYHXLTSYGF

SEQ ID NO: 14206 - protein, 68 aa, Zea mays
  Coding DNA Sequence Number=SeqID_1460
  Subcellular localization annotation: CTP_CleavageSite=47; ConfidenceScore=5.48e-01
EKNGHVYKFPQRKKIANINLGRRGGGARCRAPFSPNSGQRRGRGSSSGMQTTSPSQASLALSRSSLSL

SEQ ID NO: 14207 - protein, 72 aa, Zea mays
  Coding DNA Sequence Number=SeqID_1462
  Homolog annotation: Hit_ID=UPI00003BE9A4; Match level="QueryCoverage =77%, HitCoverage=42%, E-value=3e-08, Identity=55%"; Hit description =UPI00003BE9A4 related cluster
RDLCPFFFNSPKNQCGWGIKESALFIYPYCWIVILIHILTIRFSERGKDFLTGIFPKHLAVLNHSTDTIKRC

SEQ ID NO: 14208 - protein, 68 aa, Zea mays
  Coding DNA Sequence Number=SeqID_1463
TSRISEQGPIQLFPLLYHTILHSPYTGARRAQHQPGPTVLLSPRPPPPLESSPKRRGCMTKLISLLNK

SEQ ID NO: 14209 - protein, 207 aa, Zea mays
  misc_feature (10)..(10): Xaa can be any naturally occurring amino acid
  Coding DNA Sequence Number=SeqID_1465
  Gene Ontology: Mol. function=hydrolase activity, hydrolyzing O -glycosyl compounds; Cellular component=periplasmic space; Biological process=metabolic process
  Homolog annotation: Hit_ID=A4W6B0; Match level="QueryCoverage=87%, HitCoverage=28%, E-value=7e-75, Identity=71%"; Hit description =Peptidoglycan lytic transglycosylase. Glycosyl Hydrolase family 23. precursor
  Pfam annotation: Domain name=SLT; Domain location=19-139; Score =119.7; E_value=8.8e-33; Accession=PF01464.10; Description =Transglycosylase SLT domain
ITVKMWDSLXERFPLAWRNLYQQYTSDKGITSSYSMAISRQESAWNLKARSPVGASGLMQVIPGTASHTVKMYNTPGYVNSSQLLDPQTNIQIGTQYLEYVYQQFGQNRILSSAAYNAGPGRVSSWLNTSGGKLDAVAFIETIPFSETRGYVKNVLAYDAYYRYFMGKPDKILADGEWNRRNRLCYASVLVNEYGSLHEPTPFPAAG

SEQ ID NO: 14210 - protein, 81 aa, Zea mays
  Coding DNA Sequence Number=SeqID_1466
  Subcellular localization annotation: CTP_CleavageSite=2; ConfidenceScore=5.17e-01
SSGNNAEAFFFFFFFFFFFFFFFFFFFHPIIIHNPLLALAENTASTLPIAMQGKATGGGALTPWKAALKHVAPWDTSSIVQ

SEQ ID NO: 14211 - protein, 65 aa, Zea mays
  Coding DNA Sequence Number=SeqID_1468
  Pfam annotation: Domain name=ELK; Domain location=30-51; Score=37.0; E_value=6.9e-08; Accession=PF03789.4; Description=ELK domain
VSGQGQSHSQRGSGGETELHEVDAHGVDQELKNHLLKKYSGYLSSLKQELSKKEEKEQTPCSGHN

SEQ ID NO: 14212 - protein, 246 aa, Zea mays
  Coding DNA Sequence Number=SeqID_1470
  Gene Ontology: Mol. function=alpha,alpha-trehalose-phosphate synthase (UDP-forming) activity; Cellular component=alpha,alpha-trehalose -phosphate synthase complex (UDP-forming); Biological process =trehalose biosynthetic process
  Homolog annotation: Hit_ID=Q125H9; Match level="QueryCoverage=99%, HitCoverage=53%, E-value=1e-44, Identity=40%"; Hit description=Alpha, alpha-trehalose-phosphate synthase
  Pfam annotation: Domain name=Glyco_transf_20; Domain location=1-246; Score=-171.8; E_value=4.2e-06; Accession=PF00982.11; Description =Glycosyltransferase family 20
QDYHFIPTVKMLRDTGLTNRIGLFLHQPFPSGQLFEAIPDWRSLAESLLCCDLIGFQTGQDMNNFLLWLESEFRAERLGRNRLRVHGHIITTGVFPVGIDLAEVQALLESNSCQYMEQQSREHLPANTVLSGGHLDDSAGLPYRISALEVLLRHHPDYAGNMMLLQLASAASGHPHRQQAISHNLENLCGEVNGVHGMLNWYPVSYLNHDYRREELAGLYRAARVALVTPLMAGMSLMAKMYAALQ

SEQ ID NO: 14213 - protein, 59 aa, Zea mays
  Coding DNA Sequence Number=SeqID_1471
  Homolog annotation: Hit_ID=P21529; Match level="QueryCoverage=93%, HitCoverage=10%, E-value=2e-08, Identity=52%"; Hit description =Serine carboxypeptidase 3 precursor
MTLDEFLVRAKNPANVSGTDGKASCMAAYMVCNNIFNSIMKLVGTCPAVGTQTPCSGHN

SEQ ID NO: 14214 - protein, 97 aa, Zea mays
  Coding DNA Sequence Number=SeqID_1472
  Subcellular localization annotation: CTP_CleavageSite=19; ConfidenceScore=5.24e-01
NPSAHMVQVSKTCGRSKIQRTMVANFLTKDVSKNSNPGERLERRSTQKVHGAPSETVESPAGSQERVAHHAGHPGPEIRSAGRLQTGIHSTGLLGLN

SEQ ID NO: 14215 - protein, 61 aa, Zea mays
  Coding DNA Sequence Number=SeqID_1474
IPLWNEYGSWGLLILGSSSMSGLPLVCAMLRLLGERPCFGYGALAKGSNGLFHPGGAPYIT

SEQ ID NO: 14216 - protein, 187 aa, Zea mays
  misc_feature (22)..(22): Xaa can be any naturally occurring amino acid
  misc_feature (66)..(66): Xaa can be any naturally occurring amino acid
  misc_feature (75)..(75): Xaa can be any naturally occurring amino acid
  misc_feature (89)..(89): Xaa can be any naturally occurring amino acid
  misc_feature (121)..(121): Xaa can be any naturally occurring amino acid
  Coding DNA Sequence Number=SeqID_1476
  Gene Ontology: Cellular component=chloroplast; Biological process =translation
  Homolog annotation: Hit_ID=A2YMU2; Match level="QueryCoverage=100%, HitCoverage=69%, E-value=9e-67, Identity=73%"; Hit description =Ribosome recycling factor, chloroplast precursor
  Pfam annotation: Domain name=RRF; Domain location=20-185; Score =164.1; E_value=3.6e-46; Accession=PF01765.9; Description=Ribosome recycling factor
DKSLIEDHRQQHMEKVIEISQXTLCSLVRTGRANPSMLDRIDAEYYRTTPSLKSIAQITTRDGTSXLLIQPYDKXRLELIEKTIDAANXAVTPSHDGELIRVTVPPLTSDLRQELSETPAXLPGDGEVAIRNIRRDALKAYDKLQKEQKLSEDNVKDLSADLQKVTDEYMKKIDSIQKQKEQELMKI

SEQ ID NO: 14217 - protein, 72 aa, Zea mays
  misc_feature (43)..(43): Xaa can be any naturally occurring amino acid
  Coding DNA Sequence Number=SeqID_1477
  Gene Ontology: Mol. function=hydrolase activity, acting on ester bonds; Biological process=DNA catabolic process
  Homolog annotation: Hit_ID=A2XY07; Match level="QueryCoverage=94%, HitCoverage=24%, E-value=5e-23, Identity=72%"; Hit description =Putative uncharacterized protein
TSRRGGLLTCQIAQGLLEPDAAHTVRNLLPEDAGGDLLALCVXPDQVRHWYRYMCTGPLHFMDTPDEACRHA

SEQ ID NO: 14218 - protein, 129 aa, Zea mays
  misc_feature (55)..(55): Xaa can be any naturally occurring amino acid
  misc_feature (61)..(61): Xaa can be any naturally occurring amino acid
  misc_feature (75)..(75): Xaa can be any naturally occurring amino acid
  misc_feature (80)..(80): Xaa can be any naturally occurring amino acid
  misc_feature (104)..(104): Xaa can be any naturally occurring amino acid
  Coding DNA Sequence Number=SeqID_1478
  Gene Ontology: Mol. function=RNA-directed DNA polymerase activity; Biological process=RNA-dependent DNA replication
  Homolog annotation: Hit_ID=Q8SA85; Match level="QueryCoverage=95%, HitCoverage=9%, E-value=7e-22, Identity=47%"; Hit description=Prpol
SRSRFPYILDLRSLVLRQYFQAKKNNVPFLQPVEDIIRNKGGTGRNGKLAAEVNXFTLNKXPRSLIQFPAMAEFXPDWTXGVKGKKRNKKPKPGQLFGKGSWGXWNQPPALVWVSPSKVKTCYAARLDF

SEQ ID NO: 14219 - protein, 164 aa, Zea mays
  Coding DNA Sequence Number=SeqID_1479
  Gene Ontology: Mol. function=binding; Cellular component=mitochondrion
  Homolog annotation: Hit_ID=A1XFD1; Match level="QueryCoverage=89%, HitCoverage=10%, E-value=2e-63, Identity=83%"; Hit description=AF-4 domain containing protein-like protein
YFSSLDLLLERLCLEGTRRQAKYSVHALAAITKDDGLMSLSVLYKRLVDLLEEKKVNIPSILQSLGCIAQIAMPIFETRKEEIISFITKKILECNDVRNSSNKSEWGDSTENCLLKIYGIKTLVKSYLPCKDAHAQPGIEKLIDILKNILTYGDVSPNMVSRYQ

SEQ ID NO: 14220 - protein, 121 aa, Zea mays
  Coding DNA Sequence Number=SeqID_1480
  Gene Ontology: Mol. function=transcription repressor activity; Cellular component=intracellular; Biological process=negative regulation of transcription, DNA-dependent
  Homolog annotation: Hit_ID=P0ACP8; Match level="QueryCoverage=100%, HitCoverage=35%, E-value=2e-53, Identity=88%"; Hit description=HTH -type transcriptional repressor purR
  Pfam annotation: Domain name=LacI; Domain location=2-27; Score=49.2; E_value=1.4e-11; Accession=PF00356.11; Description=Bacterial regulatory proteins, lacI family
MATIKDVAKHAGVSTTTVSHVINKTRFVAEETRNAVWEAIKALHYSPSAVARSLKVNHTKTLGLLATSSEAPYFAEIIEAVENHCFERGYTLILGNAHNDLQKQRAYLSMMAQKRVDGLLV

SEQ ID NO: 14221 - protein, 105 aa, Zea mays
  Coding DNA Sequence Number=SeqID_1481
  Gene Ontology: Mol. function=protein binding; Cellular component =plasma membrane; Biological process=metabolic process
  Homolog annotation: Hit_ID=A8GDV8; Match level="QueryCoverage=98%, HitCoverage=37%, E-value=3e-45, Identity=79%"; Hit description =NLP/P60 protein precursor
  Pfam annotation: Domain name=NLPC_P60; Domain location=3-97; Score =119.8; E_value=8.1e-33; Accession=PF00877.10; Description=NlpCP60 family
STCSGLVWYAYKDLVKFKFPRTANEMYHLRDAAPIKREMLEKGDLVFFRINNRGTADHVGVYLGNGKFIQSPRTGKDIQISALGEDYWQKHYVGARRMMTPKTVR

SEQ ID NO: 14222 - protein, 111 aa, Zea mays
  misc_feature (95)..(95): Xaa can be any naturally occurring amino acid
  Coding DNA Sequence Number=SeqID_1482
  Gene Ontology: Mol. function=insulin-like growth factor binding; Cellular component=extracellular region; Biological process=positive regulation of nitric oxide biosynthetic process
  Homolog annotation: Hit_ID=P01308; Match level="QueryCoverage=78%, HitCoverage=78%, E-value=1e-43, Identity=97%"; Hit description =Insulin precursor [Contains: Insulin B chain; Insulin A chain]
  Pfam annotation: Domain name=Insulin; Domain location=28-110; Score =142.4; E_value=1.3e-39; Accession=PF00049.9; Description =InsulinIGFRelaxin family
MALWMRLLPLLALLALWGPDPAAAFVNQHLCGSHLVEALYLVCGERGFFYTPKTRREAEDLQVGQVELGGGPGAGSLQPLALEGSLQKRGIVQQXCCTSICSLYQLENYCN

SEQ ID NO: 14223 - protein, 102 aa, Zea mays
  Coding DNA Sequence Number=SeqID_1483
TIERAGNGGVEPGGKGTCSEMRGEQGVTAWGLCAGPPMICGDSCWVRCGMGGYGEGGDEAGERAHAGRRVGWVGFDWGARGWQGRGVGWVGFDWGAQRGRGA

SEQ ID NO: 14224 - protein, 247 aa, Zea mays
  misc_feature (127)..(127): Xaa can be any naturally occurring amino acid
  Coding DNA Sequence Number=SeqID_1485
  Gene Ontology: Mol. function=DNA binding; Biological process=DNA recombination
  Homolog annotation: Hit_ID=A4VPS9; Match level="QueryCoverage=99%, HitCoverage=33%, E-value=5e-89, Identity=67%"; Hit description=Site -specific recombinase, phage integrase family
VPAGKTFKAFDKPAFCVFKKDEDIWLRERSQEQAALTDERTGEKVRYLFQNRGKPVGRDIINLTGIPVLCARAGMPAEDSRGPITSHRGRASAVTALASGTGGMSLHELMQWSGHSYAQSTMHYIRXRPTQLAASFVKADRVAHMISVLIDHHPEAASLTGPSTYYDLGDSYCTNPFWSSCQHRMACIGCDFNLLKQSARGLILESKASVRRYLEEVPLTPDERAIVEQDAEKIEQALKRLSLKPEG

SEQ ID NO: 14225 - protein, 107 aa, Zea mays
  Coding DNA Sequence Number=SeqID_1486
  Homolog annotation: Hit_ID=A1JNI2; Match level="QueryCoverage=100%, HitCoverage=93%, E-value=5e-24, Identity=51%"; Hit description=Phage shock protein C
  Pfam annotation: Domain name=PspC; Domain location=1-58; Score=67.9; E_value=3.4e-17; Accession=PF04024.3; Description=PspC domain
RIPHQGKVRGVCAGLAEYLDIPVRLLRVIVVLSLFFGLFMFTVTAYFILGYVLDEKPLDAPSERTPTARELLDELESTLTADERNVRDIERYVTSETFSVRSRFRQI

SEQ ID NO: 14226 - protein, 112 aa, Zea mays
  Coding DNA Sequence Number=SeqID_1487
  Gene Ontology: Mol. function=nucleotide binding; Cellular component =microtubule
  Homolog annotation: Hit_ID=Q9SDX4; Match level="QueryCoverage=83%, HitCoverage=10%, E-value=9e-20, Identity=57%"; Hit description =Dynamin homolog
LKRCKLSLQGKSQMAQEESARLGESMEQRPEGTRAVAAELRRENEDKVLAHITPGEGSGRKNVERHEGTASDRTKQLPLDRHIDPNKSEKGTETHVNYKPWKPLGRTRQATR

SEQ ID NO: 14227 - protein, 57 aa, Zea mays
  Coding DNA Sequence Number=SeqID_1488
YERLTELTFCLYLQAPVALLSWLSVFQEKQIRALFNEGFSRGLLSPDISYSYWDKNE

SEQ ID NO: 14228 - protein, 204 aa, Zea mays
  misc_feature (13)..(13): Xaa can be any naturally occurring amino acid
  Coding DNA Sequence Number=SeqID_1490
  Homolog annotation: Hit_ID=Q2QYT7; Match level="QueryCoverage=81%, HitCoverage=41%, E-value=3e-26, Identity=39%"; Hit description =Expressed protein
TCALVACCVCVEXHRLQYETFHGAGTFPCRAAAPRKLRRALLPLRRNLTQDDHKDDGDDDDDNDKDVGVVYDEAYLGRVLAKIHELGGVRTTNAPPPAPWFLPVRSWQLHSCLVGPTLDMDRVSSILDRGPCVGSIWLCPWWSLFDASIDDNWVYRGCGRSRTDMSLSALMFGEENVGMHAVVCCAYRICCAAAEEEEASAGMQ

SEQ ID NO: 14229 - protein, 128 aa, Zea mays
  Coding DNA Sequence Number=SeqID_1491
  Homolog annotation: Hit_ID=A9WTW4; Match level="QueryCoverage=80%, HitCoverage=24%, E-value=4e-09, Identity=36%"; Hit description=Two component system histidine kinase
  Pfam annotation: Domain name=HATPase_c; Domain location=32-128; Score= 20.2; E_value=0.00041; Accession=PF02518.16; Description=Histidine kinase-, DNA gyrase B-, and HSP90-like ATPase
DLDAELVSARAALDAAGIDATLPADGSAAGDDVRSLFAWVLREGVTNVVFYAAASTVRVTLARTALTIEDDGTGATAGSAASVDGRFSVTGGNGLRGLRERADAVGATITTGPSDLGGFLLRVERSSR

SEQ ID NO: 14230 - protein, 73 aa, Zea mays
  Coding DNA Sequence Number=SeqID_1492
  Gene Ontology: Mol. function=metal ion binding; Biological process =metal ion transport
  Homolog annotation: Hit_ID=Q7FNW1; Match level="QueryCoverage=72%, HitCoverage=76%, E-value=8e-18, Identity=81%"; Hit description=ATX protein
  Pfam annotation: Domain name=HMA; Domain location=1-56; Score=13.4; E_ value=0.067; Accession=PF00403.16; Description=Heavy-metal-associated domain
MHCERCVKAIKKAIRTIDDMESYHLETEINKATVTGKVTPEEVVKALHKIDPTYHYQLDHAPRARAMFETLST

SEQ ID NO: 14231 - protein, 132 aa, Zea mays
  Coding DNA Sequence Number=SeqID_1493
  Gene Ontology: Mol. function=protein binding
  Homolog annotation: Hit_ID=A2YYN7; Match level="QueryCoverage=72%, HitCoverage=35%, E-value=3e-24, Identity=66%"; Hit description =Putative uncharacterized protein
  Pfam annotation: Domain name=LRR_1; Domain location=32-53; Score =11.7; E_value=2.1; Accession=PF00560.23; Description=Leucine Rich Repeat
  Pfam annotation: Domain name=LRR_1; Domain location=8-30; Score=10.2; E_value=3.9; Accession=PF00560.23; Description=Leucine Rich Repeat
  Pfam module annotation: Pfam domain module=LRR_1::LRR_1; Domain location=32-53::8-30
RELASCAYLKVIDLHGNQLYGSITQELGLLVRLSTLDVSYNSLSGPITVLLALCSGAGTATVCTARFYASSFVRNKGLCAYQMPPIRTRGLSVLAIVGIGFGSGLLSLVLSLSAVCLWLRATNRRTPTTSPL

SEQ ID NO: 14232 - protein, 144 aa, Zea mays
  Coding DNA Sequence Number=SeqID_1494
QCVACYAFCRAPSKHQRHCAAARKHGGECCTQGETHQGCHGKGGAELLQSMEKEGAQLGQSLPVLAPRTGGSSICAAAGKGRHGGKEELLRRTESRGKWGVGQRRVLVLGVSWSRAGKSRGAPWPWRNGDSRGEVRGRRALSLL

SEQ ID NO: 14233 - protein, 143 aa, Zea mays
  Coding DNA Sequence Number=SeqID_1496
WLQEELEVLPTVVTNLMSFASLITCDGSVNALSCEGCRHFEVVDLMLKRSAGALYDRMWGPHGRDNVRERSDRAMELMTHDEEVDDLGGLESTLPEASGAKEGAGGELAPPSDVGEGPLVAPAPTSACEDLVPAAALIGGDTR

SEQ ID NO: 14234 - protein, 216 aa, Zea mays
  Coding DNA Sequence Number=SeqID_1497
  Gene Ontology: Mol. function=metalloexopeptidase activity; Biological process=proteolysis
  Homolog annotation: Hit_ID=A4WU80; Match level="QueryCoverage=86%, HitCoverage=46%, E-value=2e-14, Identity=30%"; Hit description =Creatinase
  Pfam annotation: Domain name=Creatinase_N; Domain location=19-118; Score=-30.6; E_value=0.0021; Accession=PF01321.8; Description =Creatinase
MEGIVCGPGGKYNTMPDERVEISEFLDMDEPWMVLRQLDAAPCRAQSPQLAIDAYRDEDDPWLAVAQSLTRRGYQRARLGADYASYGMTVHSWQQLARHLPGVRWCDVSGISDRLRSVKFQAEIASLHQAASIADATLAQLGAQVQGGWRVRDVAALAAAQFLRLGADSGETGPIVIASGDSGFLHASGHEQRLQAGDVLHVELIPKVRHYSARLM

SEQ ID NO: 14235 - protein, 96 aa, Zea mays
  Coding DNA Sequence Number=SeqID_1498
  Gene Ontology: Mol. function=oxidoreductase activity; Cellular component=integral to membrane; Biological process=electron transport
  Homolog annotation: Hit_ID=A2Z1M4; Match level="QueryCoverage=95%, HitCoverage=10%, E-value=4e-36, Identity=83%"; Hit description =Putative uncharacterized protein
GDPSGDDYLSAHIRTNGDWTQELMRIFVEKYSSPHLNRVALIAELCAAEPSLPKLRRDGPYGAPAQDFRNYDVLLLVGLRIGATPLISILRDLLNN

SEQ ID NO: 14236 - protein, 247 aa, Zea mays
  Coding DNA Sequence Number=SeqID_1499
  Gene Ontology: Mol. function=penicillin binding; Cellular component =integral to membrane; Biological process=peptidoglycan-based cell wall biogenesis
  Homolog annotation: Hit_ID=A5CS57; Match level="QueryCoverage=97%, HitCoverage=40%, E-value=2e-54, Identity=47%"; Hit description =Putative peptidoglycan glycosyltransferase/penicillin-binding protein
  Pfam annotation: Domain name=Transpeptidase; Domain location=18-247; Score=40.0; E_value=8.3e-09; Accession=PF00905.13; Description =Penicillin binding protein transpeptidase domain
  Subcellular localization annotation: CTP_CleavageSite=17; ConfidenceScore=5.07e-01
MGGQDIATAAQSLKATSATATVSNAKTGEVLALADYPTVDPNNVTPTAQSDPGALGSRALTAAYEPGSTMKAIVASALIQEGKATPTSGVTVPYSRTFPWGGRISDAELHPTEKLTMTGVLAQSSNVGITELGDQLSAQTRFDYMKKFGLFQQNPDIQFPGQPSWPNQTSPNWDPQTNENSMFGQGIAATALQVANVYQTLANVGVRIPLHFVKGCTKPDGTVIDAPKATPTRVVSQSTATQVVDML

SEQ ID NO: 14237 - protein, 106 aa, Zea mays
  Coding DNA Sequence Number=SeqID_1500
CMPAEAVSLGTGFPGETDEQLWFFTPRVMRSCRPEEQPNGNSAVGIFIAVAAWRRGWSGGGDGRWLRARATRLGRRRHPSRQVKQASQGQGAGVHRPTDGYGEDVP

SEQ ID NO: 14238 - protein, 402 aa, Zea mays
  Coding DNA Sequence Number=SeqID_1502
  Subcellular localization annotation: CTP_CleavageSite=17; ConfidenceScore=5.52e-01
GRALDFSCRPSVIPKPSLDSSWSCRNLHFLRALFLDSALRLVTTARSFSSSLVLGRSLVSTRTASAPSFSLSAARPSLELRSASSSSAQPSGFLACLLLCCSPVLAAAPISLFASAHSSPSSMAGSLLASWSFSSSALVQSSRFARPQIPAPRPALVVQRRPARAWPWWCCDVATSCASRQLSWPRSSPRHRVRSATVSSNCEAPLPCALASAAADSAIMFMSALCSSYFAVDNFSTLQIRAARPACAHSSSIGFWRVRVCRRVVEPVIPCLTPKQTPWSVFCSSSTLGTTSSSSLMHIFIDHVSSHVCVIGLVVVPCVIKKSQESGEDGASRVIFTKCSAKGQNKNHHRLCGVLVNMERFQELWIEEKVKLRSILVSCLIEDFNRRLSPFLQILNQVNNGM

SEQ ID NO: 14239 - protein, 66 aa, Zea mays
  Coding DNA Sequence Number=SeqID_1504
MRSRTQDRSQCRAPKRTEDDNNKKQDLNSPKRYKNAAGRDNGDRQRAEETAGTGRHKKTAPKPKEG

SEQ ID NO: 14240 - protein, 102 aa, Zea mays
  Coding DNA Sequence Number=SeqID_1506
LVPVGGARPGANDHERVSGRGWRQVRIVCSELGGASVRVAVAEVRTSRLARPPWTFSTGFLDLPKRWFPGLKRQPLPDVDTSTRRGTHHQVPPLACIHLHAA

SEQ ID NO: 14241 - protein, 123 aa, Zea mays
  Coding DNA Sequence Number=SeqID_1508
  Gene Ontology: Mol. function=orotidine-5'-phosphate decarboxylase activity; Biological process='de novo' pyrimidine base biosynthetic process
  Homolog annotation: Hit_ID=A2WCS1; Match level="QueryCoverage=72%, HitCoverage=33%, E-value=3e-27, Identity=73%"; Hit description =Orotidine 5'-phosphate decarboxylase
KWNAKNGQLGLVVGATFPNEIEIVRGIVGDMPLLIPGIGAQGGDVQATVRAGRTEDGTGMMINSRRDPVPAREDFAKPGLAGKPDTINACVVDDLSIFVDTSPATGRGWRQARARGPAPHPPV

SEQ ID NO: 14242 - protein, 71 aa, Zea mays
  Coding DNA Sequence Number=SeqID_1509
  Gene Ontology: Mol. function=mismatched DNA binding; Cellular component=nucleus; Biological process=mismatch repair
  Homolog annotation: Hit_ID=Q5JN46; Match level="QueryCoverage=95%, HitCoverage=9%, E-value=4e-12, Identity=58%"; Hit description =Putative MutL homolog 1 protein
MDPARIRGLEEQVGNRIAAGEGIQRPGSAAKELVKNTLNAGAYTDYDIGKDGGLNLIQETDHAIQMMDMLR

SEQ ID NO: 14243 - protein, 64 aa, Zea mays
  Coding DNA Sequence Number=SeqID_1510
TYHCVVTIQKKRYETMCIGSGCSRCNLNFCNSCIWLSIQYISRIVVQKEQVLGLPDQFVSKPPQ

SEQ ID NO: 14244 - protein, 170 aa, Zea mays
  Coding DNA Sequence Number=SeqID_1512
  Gene Ontology: Mol. function=transferase activity; Cellular component= cytoplasm; Biological process=glycine catabolic process
  Homolog annotation: Hit_ID=Q1N575; Match level="QueryCoverage=100%, HitCoverage=80%, E-value=1e-73, Identity=77%"; Hit description =Putative uncharacterized protein
  Pfam annotation: Domain name=DUF1989; Domain location=1-169; Score =273.8; E_value=3.6e-79; Accession=PF00905.13; Description=Domain of unknown function (DUF1989)
NQAADTLFFNADDTAERYSMSETLRGQHNVFLTAGSVLRSNLDRPMLTITADTCGRHDTLGGACSCESNTVRYDLEKRHMHSCRDSWMLAVAAHPESGLTRRDITHNINFFMNVPVTHDGGLTFADGISAPGKYVEMVAQMNILVLISNCPQLNNPCNGYNPTPIAVSVW

SEQ ID NO: 14245 - protein, 110 aa, Zea mays
  misc_feature (14)..(14): Xaa can be any naturally occurring amino acid
  Coding DNA Sequence Number=SeqID_1513
  Gene Ontology: Mol. function=isoleucine-tRNA ligase activity; Cellular component=cytoplasm; Biological process=tRNA aminoacylation for protein translation
  Homolog annotation: Hit_ID=Q9FI67; Match level="QueryCoverage=100%, HitCoverage=11%, E-value=9e-49, Identity=80%"; Hit description =Isoleucyl-tRNA synthetase
LLQNHKVSFVPGWXCHGLPIELKVLKSMDKETLSALTPIKLRQKAAKFAKATVDAQMKSFKRYGVWADWDNPYLTLSPEYEAAQLEVFGQMVMKGYIYRGRKPVHWSPSS

SEQ ID NO: 14246 - protein, 206 aa, Zea mays
  misc_feature (163)..(163): Xaa can be any naturally occurring amino acid
  Coding DNA Sequence Number=SeqID_137
  Gene Ontology: Mol. function=DNA binding; Cellular component =nucleosome; Biological process=regulation of transcription, DNA -dependent
  Homolog annotation: Hit_ID=Q9SEH2; Match level="QueryCoverage=100%, HitCoverage=100%, E-value=9e-56, Identity=61%"; Hit description=High mobility group protein I/Y
  Pfam annotation: Domain name=AT_hook; Domain location=128-140; Score =13.9; E_value=0.096; Accession=PF02178.9; Description=AT hook motif
  Pfam annotation: Domain name=AT_hook; Domain location=155-167; Score =8.0; E_value=1; Accession=PF02178.9; Description=AT hook motif
  Pfam annotation: Domain name=AT_hook; Domain location=188-200; Score =9.9; E_value=0.47; Accession=PF02178.9; Description=AT hook motif
  Pfam annotation: Domain name=AT_hook; Domain location=98-110; Score =15.7; E_value=0.047; Accession=PF02178.9; Description=AT hook motif
  Pfam annotation: Domain name=Linker_histone; Domain location=23-92; Score=42.5; E_value=1.5e-09; Accession=PF00538.9; Description=linker histone H1 and H5 family
  Pfam module annotation: Pfam domain module=AT_hook::AT_hook::AT _hook::AT_hook::Linker_histone; Domain location=128-140::155-167::188- 200::98-110::23-92
MATETEFEPQQSPMAEEQPSPFSLPPYPQMIMEAIEASNDANGCNKTAIAKHIESTQASLPPSHMTLLSYHLNQMKQSGQIAMVKNNYMKPDPHAPPKRGRGRPPKAKPQGDSSHVAVPAPAPPVSSPRPRGRPPKAKEPSSEVETKVAEPSGSGRPRGRPPXKQKTESEAVKADVEPAEAPAGTGERRGRGRPPKAKPAMVPVGC

SEQ ID NO: 14247 - protein, 144 aa, Zea mays
  Coding DNA Sequence Number=SeqID_138
  Gene Ontology: Mol. function=peptidase activity; Cellular component =chloroplast thylakoid membrane; Biological process=lipid transport
  Homolog annotation: Hit_ID=A6N0R3; Match level="QueryCoverage=59%, HitCoverage=60%, E-value=9e-22, Identity=57%"; Hit description =Cortical cell-delineating protein
  Pfam annotation: Domain name=GRP; Domain location=1-58; Score=-29.6; E_value=0.085; Accession=PF07172.2; Description=Glycine rich protein family
  Pfam annotation: Domain name=Tryp_alpha_amyl; Domain location=59-141; Score=76.5; E_value=8.6e-20; Accession=PF00234.12; Description =Protease inhibitorseed storageLTP f
  Pfam module annotation: Pfam domain module=GRP::Tryp_alpha_amyl; Domain location=1-58::59-141
MSSNAALFVALSLLLSAVAAHGCGSIYCQPPVVVPTPPIVVPPPYHGGGHGHGHGAGQCSINVLNLRVCAKVLGRLLGLKVGVPAHDQCCPLLQGLADLDAAVCLCTAVRADILGLRLNVPVDIRLLLNHCGKKCPSGFTCPAH

SEQ ID NO: 14248 - protein, 217 aa, Zea mays
  Coding DNA Sequence Number=SeqID_139
  Gene Ontology: Mol. function=nucleic acid binding
  Homolog annotation: Hit_ID=Q9LZD9; Match level="QueryCoverage=92%, HitCoverage=87%, E-value=8e-24, Identity=39%"; Hit description =Putative uncharacterized protein F12E4_250
MSPTEGSATKEMSLLTLNERDTTKRTTRPRKRDIGRIRVMGYSIDLPHDDVVNALRKHFSSCGEITDVCVHVLTDNLLDSFGFIYFLGGQGTVDRAMQLSGTDVGGWNVTVKPYPFLEDADWDPVAIVQGYDTCLGKTDIKRMLFDHFSSCGQIKDIKFQRSSIGLASVYLYGEGAEDKVLDLDGSYMGGCKILVKLIPSSGIYTVHPRSRHLGWPR

SEQ ID NO: 14249 - protein, 138 aa, Zea mays
  Coding DNA Sequence Number=SeqID_140
  Gene Ontology: Mol. function=protein binding
  Homolog annotation: Hit_ID=A2YHN2; Match level="QueryCoverage=100%, HitCoverage=100%, E-value=3e-43, Identity=60%"; Hit description =Putative uncharacterized protein
  Pfam annotation: Domain name=DUF538; Domain location=4-137; Score =91.8; E_value=2.1e-24; Accession=PF04398.3; Description=Protein of unknown function, DUF538
MASQLVESHRPGAEVHKGNDICKKKTVELLEELGLPKGLFPMDDIEEVGHNCESGFVWILQKKKLEHTFNKLNQTVSYDTEVTAFVEKGKMKKVTGVKIEDMSLVEVYVDESSADKVTIKTNTGLSDTHDAAVFALGE

SEQ ID NO: 14250 - protein, 119 aa, Zea mays
  Coding DNA Sequence Number=SeqID_141
  Gene Ontology: Mol. function=structural constituent of ribosome; Cellular component=ribosome; Biological process=embryonic development ending in birth or egg hatching
  Homolog annotation: Hit_ID=Q9M1A3; Match level="QueryCoverage=100%, HitCoverage=100%, E-value=1e-61, Identity=95%"; Hit description =Putative uncharacterized protein T16L24.200
  Pfam annotation: Domain name=L51_S25_CI-B8; Domain location=18-91; Score=75.7; E_value=1.5e-19; Accession=PF05047.6; Description =Mitochondrial ribosomal protein L51  S25  CI-B8 domain
MALRGVWQLQKLVVSYCNWGGSSRGIRAFMESELPALIEKNPQLEVVTELSRGQHPYLKGIYRNRNERVVCVKNMDPDQVLLNATRLRNSLGRKVVKLRTRHVTKHPSVQGTWTTAVKF

SEQ ID NO: 14251 - protein, 237 aa, Zea mays
  misc_feature (125)..(125): Xaa can be any naturally occurring amino acid
  Coding DNA Sequence Number=SeqID_142
  Gene Ontology: Mol. function=hydrolase activity; Cellular component =ribosome; Biological process=translation
  Homolog annotation: Hit_ID=A7PZK0; Match level="QueryCoverage=91%, HitCoverage=93%, E-value=3e-90, Identity=70%"; Hit description =Chromosome chr15 scaffold_40, whole genome shotgun sequence
MQRLRSQLLARPLLEESRLRGYCTSSSSEKMVASVLFERLRVVIPKPDPTVYAFQEFKFNWQQQFRRRYPDEFLDIAKNRAKGEYQMDYVPAPRVTEADKNNDKKSLYRALDKKLYLLIFGKPFXATSDKPVWHFPEKVYDSEPTLRKCAESALKSVLGDLTHTYFVGNAPMAHLAIQPTEETPDLPSYKRFFFKCSVVAASKYNISNCEDFLWVTKDELLEFFPEQADFFNKMIIS

SEQ ID NO: 14252 - protein, 246 aa, Zea mays
  Coding DNA Sequence Number=SeqID_143
  Gene Ontology: Mol. function=glutathione transferase activity; Cellular component=cytoplasm; Biological process=glutathione metabolic process
  Homolog annotation: Hit_ID=Q9ZRT5; Match level="QueryCoverage=100%, HitCoverage=99%, E-value=1e-115, Identity=84%"; Hit description =Glutathione transferase AtGST 10
  Pfam annotation: Domain name=GST_C; Domain location=107-210; Score =14.5; E_value=0.0031; Accession=PF00043.15; Description=Glutathione S-transferase, C-terminal domain
  Pfam annotation: Domain name=GST_N; Domain location=1-76; Score=57.0; E_value=6.6e-14; Accession=PF02798.10; Description=Glutathione S -transferase, N-terminal domain
  Pfam module annotation: Pfam domain module=GST_C::GST_N; Domain location=107-210::1-76
MKLKVYADRMSQPSRAVIIFCKVNGIEFDEVLIILAKRQQLSPEFKEINPLGKVPTIVDGRLKLFESHAILIYLSSAFPSVADHWYPNDLSKRAKIHSVLDWHHSNLRPGAAGYVMNSVLAPFLGGSLDSKAAAEAEQILTKSLSTLETFWLKGNAKFLLGSNQPSIADLSLVCELMQLQVLDEKDRLRLFSPYKKVEEWIENTRKATQPHFDVVHKTLYGAKDKFEKQRKMGTTTVSKPGFQSKM

SEQ ID NO: 14253 - protein, 117 aa, Zea mays
  Coding DNA Sequence Number=SeqID_144
  Gene Ontology: Mol. function=lipid binding; Cellular component =extracellular region; Biological process=lipid transport
  Homolog annotation: Hit_ID=Q9XFS7; Match level="QueryCoverage=100%, HitCoverage=100%, E-value=3e-54, Identity=87%"; Hit description=Non -specific lipid-transfer protein 5 precursor
  Pfam annotation: Domain name=Tryp_alpha_amyl; Domain location=28-113; Score=102.1; E_value=1.7e-27; Accession=PF00234.12; Description =Protease inhibitorseed storageLTP f
MEGFIKLSTLLIVCMLVSAPMAEAAISCGAVASNLGQCINYLTRGGFVPRGCCSGVQRLHSMARTTRDRQQACRCIQGAARALGSRLNPGRAARLPGACRVRISYPISARTNCNNIR

SEQ ID NO: 14254 - protein, 73 aa, Zea mays
  Coding DNA Sequence Number=SeqID_145
  Gene Ontology: Mol. function=metal ion binding; Cellular component =mitochondrial intermembrane space protein transporter complex; Biological process=intracellular protein transport across a membrane
  Homolog annotation: Hit_ID=A3BV86; Match level="QueryCoverage=75%, HitCoverage=64%, E-value=5e-22, Identity=87%"; Hit description =Putative uncharacterized protein
  Pfam annotation: Domain name=zf-Tim10_DDP; Domain location=8-73; Score=98.0; E_value=3e-26; Accession=PF02953.6; Description=Tim10DDP family zinc finger
MDASPELQQFLEQEKQKMVMSEMVTKLTNVCWDKCITSTPGSKFSSGETTCLTNCAQRYLDMSMIIAKRFQMQ

SEQ ID NO: 14255 - protein, 202 aa, Zea mays
  Coding DNA Sequence Number=SeqID_146
  Gene Ontology: Mol. function=zinc ion binding; Cellular component =nucleus
  Homolog annotation: Hit_ID=Q9LYB9; Match level="QueryCoverage=88%, HitCoverage=96%, E-value=2e-81, Identity=77%"; Hit description =Putative uncharacterized protein T20O10_130
  Pfam annotation: Domain name=MBD; Domain location=98-171; Score=69.3; E_value=1.3e-17; Accession=PF01429.10; Description=Methyl-CpG binding domain
  Pfam annotation: Domain name=zf-CW; Domain location=42-91; Score =86.2; E_value=1.1e-22; Accession=PF07496.5; Description=CW-type Zinc Finger
  Pfam module annotation: Pfam domain module=MBD::zf-CW; Domain location=98-171::42-91
NKKEAENFSLILPNKLMEEEELGNAVTPRAKKDVAPGRVVDTYAAQCDTCHKWRVIDSQEEYEDIRSRVLEDPFTCDKKKQVSCEDPADLDYDSSRTWVIDKPGIPKTPKGFKRSLVLRKDYSKMDTYYITPAGKKLRSRNEVASFIETNPEFKDAPLRDFTFTVPKVMEDTCPPDAKLASPAVTTTDDVSEKSFKPKPFKG

SEQ ID NO: 14256 - protein, 151 aa, Zea mays
  Coding DNA Sequence Number=SeqID_147
  Homolog annotation: Hit_ID=A5BQJ7; Match level="QueryCoverage=96%, HitCoverage=99%, E-value=2e-14, Identity=35%"; Hit description =Putative uncharacterized protein
MKQPTFPSAAAEETKSEQNQTGAKQKSKKFPTATELISHYQKQGGLEAAEASVKVIEDLQNALVRVASSSKNASSKSKLLADARKIDAISGRLAVVDAKLETKPGYVETFALGLASGAALNGISAVWPHVTRGISQVWSAVKSGTDPSAAS

SEQ ID NO: 14257 - protein, 189 aa, Zea mays
  Coding DNA Sequence Number=SeqID_148
  Gene Ontology: Mol. function=RNA binding; Cellular component=exosome (RNase complex); Biological process=rRNA processing
  Homolog annotation: Hit_ID=A7PZ33; Match level="QueryCoverage=98%, HitCoverage=94%, E-value=8e-77, Identity=76%"; Hit description =Chromosome chr4 scaffold_39, whole genome shotgun sequence
MTEMVTPGDVLGNAAELKPGKGAYVNDNTIYASLTGSRRIVSPLPESLDQRATVEVTGHKAHGLIPEPGSLVLARVTKVMARMASVDILCVGSKAVREKFAGVIRQQDVRETEIDKVEIHQSFRPGDIVRAVVLSLGDSRAYYLSTAKNELGVVSAESAAGETMVPISWTEMQCPLSGQTEQRKVAKVA

SEQ ID NO: 14258 - protein, 89 aa, Zea mays
  misc_feature (67)..(67): Xaa can be any naturally occurring amino acid
  misc_feature (75)..(75): Xaa can be any naturally occurring amino acid
  Coding DNA Sequence Number=SeqID_149
  Homolog annotation: Hit_ID=A2X149; Match level="QueryCoverage=86%, HitCoverage=11%, E-value=5e-29, Identity=80%"; Hit description =Putative uncharacterized protein
MQLVTESVMFLNSECPQEALEAVSTRIFAAARFPDLPELCDLRHLFTERYGSSVEPFVNSEFVQNLXNKSFTDEXKLRVMKRVAEEFSV

SEQ ID NO: 14259 - protein, 112 aa, Zea mays
  Coding DNA Sequence Number=SeqID_150
  Subcellular localization annotation: CTP_CleavageSite=95; ConfidenceScore=5.79e-01
GSRAGASRPLSPGAPPPPPQAPGALSPVHYPAATTTTHATAGRVSPSNLPSSPLPGSVPARGRREHLGWQRTWPSAACSRRRSRDVLATCVSCIRLAHNKEVDHAPTSDHFV

SEQ ID NO: 14260 - protein, 172 aa, Zea mays
  Coding DNA Sequence Number=SeqID_152
  Gene Ontology: Mol. function=peptidyl-prolyl cis-trans isomerase activity; Cellular component=cytoplasm; Biological process=protein folding
  Homolog annotation: Hit_ID=A8CYN7; Match level="QueryCoverage=100%, HitCoverage=100%, E-value=3e-67, Identity=71%"; Hit description =Peptidyl-prolyl cis-trans isomerase
  Pfam annotation: Domain name=Pro_isomerase; Domain location=5-171; Score=410.4; E_value=2.7e-120; Accession=PF00160.11; Description =Cyclophilin type peptidyl-prolyl cis-tr
MANPRVFFDMTLDGAPAGRIVMELYKDTTPNTAENFRALCTGEKGVGKKGKPLHFKGSAFHRVIPGFMCQGGDFTAGNGTGGESIYGDKFKDENFAKKHTGAGILSMANSGPNTNGSQFFICTAETSWLDGKHVVFGKVVEGMEVVKAIEKVGSSSGTTKKKVVVADCGQVA

SEQ ID NO: 14261 - protein, 125 aa, Zea mays
  Coding DNA Sequence Number=SeqID_153
  Gene Ontology: Mol. function=transporter activity; Cellular component= membrane; Biological process=oligopeptide transport
  Homolog annotation: Hit_ID=Q5VPM1; Match level="QueryCoverage=76%, HitCoverage=16%, E-value=1e-26, Identity=66%"; Hit description =Putative nitrate transporter NTL1
MEEGGGGGAGARRVERWEGYVDWRNRPATRGRHGGMAAASFVLVVEVLENLAFLATASNLVTYLMGSMGYSPSHSATAVTSFMGTAFLLALLGGFLSDAFLTTYTVYIASALVELTVRDARRHIT

SEQ ID NO: 14262 - protein, 255 aa, Zea mays
  Coding DNA Sequence Number=SeqID_1514
  Gene Ontology: Mol. function=transporter activity; Cellular component= integral to membrane; Biological process=transport
  Homolog annotation: Hit_ID=A6THK1; Match level="QueryCoverage=99%, HitCoverage=51%, E-value=3e-93, Identity=68%"; Hit description =Putative sulfate transporter
  Pfam annotation: Domain name=Sulfate_transp; Domain location=3-252; Score=9.9; E_value=3.5e-11; Accession=PF00916.10; Description =Sulfate transporter family
MLVAGSGLLILWLWTTPAIKAVKALSWIPGPLVAVLFGCLATVLGDRLFPSLGEGLPRIVLPAFDSMSALVAELETPDWLAWQNPSVWVVAITLALVASLETLLSQEALKKLRPQHPAPSPNKEMFAQGIGNLTAGLLGAMPITAVIVRSSVNVSVGAQTKLSILLHGVLLLICGLWFSALLNAIPLASLAAVLLYTGYKLATPRLFVEQIRMGAQQYVPFLATIGGIIVFGMLAGIGIGIATQILCSIYQSHRN

SEQ ID NO: 14263 - protein, 154 aa, Zea mays
  Coding DNA Sequence Number=SeqID_1515
  Gene Ontology: Mol. function=pyridoxal phosphate binding
  Homolog annotation: Hit_ID=A3AN05; Match level="QueryCoverage=68%, HitCoverage=12%, E-value=4e-30, Identity=65%"; Hit description =Putative uncharacterized protein
LPPPIPLIRGCRLIPGPNHAPCPVGERVGREGEHAELPQCCDGWGHRRGGVLSKSRDVTLLDEGDDTKEGSVGRSWSLARLHARRDFLRVTALVTERAFQSLDALLVLERVLAKFLIMYPNYASASDVDRLRADEYLHLDKVCLHCGFGLFSYL

SEQ ID NO: 14264 - protein, 152 aa, Zea mays
  misc_feature (62)..(62): Xaa can be any naturally occurring amino acid
  Coding DNA Sequence Number=SeqID_1516
  Gene Ontology: Mol. function=copper ion transmembrane transporter activity; Cellular component=integral to membrane; Biological process=copper ion transport
  Homolog annotation: Hit_ID=Q10KT6; Match level="QueryCoverage=23%, HitCoverage=19%, E-value=9e-09, Identity=88%"; Hit description=Ctr copper transporter family protein
  Pfam annotation: Domain name=Ctr; Domain location=23-119; Score=2.2; E_value=1.4e-05; Accession=PF04145.6; Description=Ctr copper transporter family
  Subcellular localization annotation: CTP_CleavageSite=52; ConfidenceScore=5.03e-01
MKGMGATETAPAGKAAPASHMPMPMTRVLLLLCLLLVLALAALTEALAAASRCVARRGAGAXRDAASRASSAALLAAAHAARMGTAYLVMLAVMSFNGGVLLAAVAGHSLGFLLARSRVVHPGGGGAAAAAGRDHGLGGGVVGVHPPDGSKA

SEQ ID NO: 14265 - protein, 175 aa, Zea mays
  Coding DNA Sequence Number=SeqID_1517
  Homolog annotation: Hit_ID=Q851F3; Match level="QueryCoverage=91%, HitCoverage=63%, E-value=3e-19, Identity=39%"; Hit description =Putative uncharacterized protein OSJNBb0011H13.9
TGSGIGFGEGAQQPLPLPPCRVHPSGRVGPARAVGGPHPHGRVLRRAPHDPFLAAYVACSKSAAEAVDRPHQKRRQKQGRRRKEKEEEEATGKKCGEVLFRGCGVWSGWAAGAKYAGAMSCRYGCAVAGQDGDADADAAKTKTKSEDDAPGGPTLDLSWTPAVLSARALERREQR

SEQ ID NO: 14266 - protein, 65 aa, Zea mays
  Coding DNA Sequence Number=SeqID_1518
FLNGHMLLHPSKGCGFFLYQWGLSLHHPHGVVHRVHNYPSYLVPSVFTPLCSKSSCWAGGGLNIV

SEQ ID NO: 14267 - protein, 87 aa, Zea mays
  Coding DNA Sequence Number=SeqID_1519
  Gene Ontology: Mol. function=protein serine/threonine kinase activity; Biological process=protein amino acid phosphorylation
  Homolog annotation: Hit_ID=Q2RA93; Match level="QueryCoverage=52%, HitCoverage=10%, E-value=8e-13, Identity=73%"; Hit description =Protein kinase domain containing protein, expressed
MFVSHLENNKLLCRRMFCFPGLSKVPRTRTTIGGPNTLRGSVTLLRSLHHKHILKLYTSWVDNKKRAVNIITELFTSGNLREYVNVT

SEQ ID NO: 14268 - protein, 102 aa, Zea mays
  Coding DNA Sequence Number=SeqID_1520
MANKHETHESGTKLTLWVRFELSTAQFYAGLGRPDTNKRAGPGQKTKHEKETLLRPGCGPSGLVPRIVRASAEGADRRFVPMFDVRASAESTDRWSVLVFDV

SEQ ID NO: 14269 - protein, 249 aa, Zea mays
  Coding DNA Sequence Number=SeqID_1522
  Gene Ontology: Mol. function=oxidoreductase activity, acting on CH-OH group of donors; Cellular component=plasma membrane; Biological process=aromatic compound metabolic process
  Homolog annotation: Hit_ID=A8GDC8; Match level="QueryCoverage=99%, HitCoverage=41%, E-value=3e-86, Identity=61%"; Hit description =Gluconate 2-dehydrogenase
  Pfam annotation: Domain name=GMC_oxred_N; Domain location=17-223; Score=-75.2; E_value=0.0031; Accession=PF00732.10; Description=GMC oxidoreductase
QDYPFSYSEIEPYFDKFEKICGASGQAGNLNGNIIEGGNPFEAQRANPFPTKPLLYQYSAMLFEKTTKELGYNPFPGPAAICTEAYTNPYGVALGVCNYCGFCEKFGCYNYSKASPQTSVIPALKQYDNFELRCKSHVLRVNKDNTGKLATGVTYIDENGSEVEQPAAMVILSAFQLHNVRLLLLSKIGKPYNPETGEGVVGRNYAYQMLGGAKLFFNKETYFNHFAATGASGAYIDNYNSENFDHSAA

SEQ ID NO: 14270 - protein, 93 aa, Zea mays
  Coding DNA Sequence Number=SeqID_1523
QQGTYRETSRNKDGPRGPEQQKNPDLKKGQARTRRQRRGLGKGVQQDPPPQSIEKVPHRTCCVGRTTKAKRCGNPGLSRMRCEAPSTKPKKKP

SEQ ID NO: 14271 - protein, 92 aa, Zea mays
  Coding DNA Sequence Number=SeqID_1525
  Gene Ontology: Mol. function=RNA-directed DNA polymerase activity; Biological process=RNA-dependent DNA replication
  Homolog annotation: Hit_ID=Q8SA85; Match level="QueryCoverage=93%, HitCoverage=6%, E-value=5e-17, Identity=54%"; Hit description=Prpol
AVVIVSPSKVMASYAIRLQFQSTNNIAECEALLLGLRKLKVMGVRRAVLKSGFHVTTSQVDKSSKVKSSNIEKYLNMVRRMESSFECTCIIL

SEQ ID NO: 14272 - protein, 123 aa, Zea mays
  Coding DNA Sequence Number=SeqID_1526
  Gene Ontology: Cellular component=extracellular region; Biological process=response to biotic stimulus
  Homolog annotation: Hit_ID=A2XAD4; Match level="QueryCoverage=78%, HitCoverage=59%, E-value=2e-30, Identity=66%"; Hit description =Putative uncharacterized protein
EELSPGCGAWADALEFLYYHNLVRMALLEPPLFLSPGLEQYSDWWAALCRGDWALGHSFPDGQLALRENVFCGGPCGAWRPRYAVSDWAGEGADYSNADNACAPGRECPHYTQIARRRTTPVR

SEQ ID NO: 14273 - protein, 157 aa, Zea mays
  Coding DNA Sequence Number=SeqID_1527
  Gene Ontology: Mol. function=transporter activity; Cellular component= integral to membrane; Biological process=transport
  Homolog annotation: Hit_ID=A1WB02; Match level="QueryCoverage=31%, HitCoverage=16%, E-value=2e-15, Identity=78%"; Hit description =Binding-protein-dependent transport systems inner membrane component
QQIDPRLSEAAAIEGASRGYFFRRVQWPLLLPTTLFVLINASMNAFRIVDQFLGHASRVGHDGSAAAASSPGGFALNLLIWLAVLLWSLPMLVALWIAIHPAAGQGHFSLLAPLTLANFINAWHAAPFARYFLNTTLLVLMIVMVQLVLATLAAYAL

SEQ ID NO: 14274 - protein, 92 aa, Zea mays
  Coding DNA Sequence Number=SeqID_1528
  Subcellular localization annotation: CTP_CleavageSite=27; ConfidenceScore=5.36e-01
PLRRAPPRPRPGPARRRPRHAPAPRAPAPHAGGRALTARPARTLAAPCRALGHALSRLAAPSAAPLAVPPAAPSRVPALPEPVPRRPHGPCA

SEQ ID NO: 14275 - protein, 175 aa, Zea mays
  Coding DNA Sequence Number=SeqID_1530
  Gene Ontology: Mol. function=transferase activity, transferring nitrogenous groups; Cellular component=intracellular; Biological process=regulation of transcription, DNA-dependent
  Homolog annotation: Hit_ID=A7MMR0; Match level="QueryCoverage=99%, HitCoverage=36%, E-value=1e-60, Identity=63%"; Hit description =Putative uncharacterized protein
MTNRQNPLGFTLSAERKQQLVALLTRYQVAMIEDDVYSDLYHGHDKPLPARAFDREGYVLHCGSFSKNLVAGFRVGWVAAGRYAQRVQRIQMMSTLSTSAPMQLALADFLSTRSYDTHLKKLRQTLAKRKQLAQQALRRVLPAEAHISDTPGGYFLWITLPEQINATQLYHLALH

SEQ ID NO: 14276 - protein, 141 aa, Zea mays
  Coding DNA Sequence Number=SeqID_1531
  Gene Ontology: Mol. function=hydrolase activity
  Homolog annotation: Hit_ID=Q6D5P6; Match level="QueryCoverage=61%, HitCoverage=27%, E-value=6e-31, Identity=71%"; Hit description =Putative uncharacterized protein
QRQVVADMLRDWDKRYPFRIETMFSAMQNIVPSHMADINLFDFKGIKHGDAVVDGGDIGFDRESLPAQPVGWQADEDDQPDLSARLDARRSGNAPFVLAVRWRIANRRKFRIVRRLRLGNGLRLRHGFGNRWRIGRDRFAG

SEQ ID NO: 14277 - protein, 105 aa, Zea mays
  misc_feature (4)..(4): Xaa can be any naturally occurring amino acid
  Coding DNA Sequence Number=SeqID_1532
  Homolog annotation: Hit_ID=Q2R860; Match level="QueryCoverage=99%, HitCoverage=22%, E-value=8e-42, Identity=75%"; Hit description =Expressed protein
GAPXAKRPHGWAYRFLSTNTTIVYHWSSTLCDLEPLNASDRATNYAMHLDRPPAFLKSNLHRLHVLFLNTRHHCNRGKLKANKWQKYLFGTPNNDRNTTGILEGK

SEQ ID NO: 14278 - protein, 88 aa, Zea mays
  misc_feature (82)..(82): Xaa can be any naturally occurring amino acid
  Coding DNA Sequence Number=SeqID_1533
  Gene Ontology: Mol. function=oxidoreductase activity; Cellular component=extracellular region; Biological process=negative regulation of transcription
  Homolog annotation: Hit_ID=A6T793; Match level="QueryCoverage=100%, HitCoverage=44%, E-value=6e-32, Identity=75%"; Hit description=TrpR binding protein WrbA
MRNFWDRTGGLWASGALYGKIASVFASTGTGGGQEQTITSVWTTLAHHGMVIVPIGYGTKELFDISQVRGGTPYGATTLAGXDGSRQP

SEQ ID NO: 14279 - protein, 114 aa, Zea mays
  Coding DNA Sequence Number=SeqID_1534
  Homolog annotation: Hit_ID=A7Q5X6; Match level="QueryCoverage=85%, HitCoverage=25%, E-value=2e-32, Identity=67%"; Hit description =Chromosome chr14 scaffold_54, whole genome shotgun sequence
SDDLANHIADILDFFGLDSVMCLRVTAGAYILTLFAVCIYSLLQTTYRERVLGLILASPLCKAPSWSEWLYNKVMSNLLHYYGMCNVLKDIMLQRYFGKVTKWLMLWYANAIFA

SEQ ID NO: 14280 - protein, 85 aa, Zea mays
  Coding DNA Sequence Number=SeqID_1535
RVAARELLAQSGESLVDGQRAGAGGVARERGLRTAEAVARRGLGLGRLDDLSLVGLPSSLGSRVLLIPCLALGVEILLPAPVFAS

SEQ ID NO: 14281 - protein, 268 aa, Zea mays
  Coding DNA Sequence Number=SeqID_1537
  Gene Ontology: Mol. function=nucleic acid binding; Cellular component= chromatin; Biological process=DNA integration
  Homolog annotation: Hit_ID=A2YL89; Match level="QueryCoverage=71%, HitCoverage=35%, E-value=1e-44, Identity=45%"; Hit description =Putative uncharacterized protein
  Pfam annotation: Domain name=Retrotrans_gag; Domain location=105-187; Score=5.6; E_value=0.015; Accession=PF03732.7; Description =Retrotransposon gag protein
ALADAQRRLQEADAATHVPGGDDSTTPEADDIASLHAQALGILNVRALVPVVLDLDTLSFSRWRRLILLVLDKYALVDHVLSDVARPDVPHWTRMDSHVLSWLYTAITIDLYDIVTTSAPTARTTWLALEQQFVGNVDTEFRNLNQGTLSIIDYCRKMKTLADSLVELGEPVTDHVLTLNVLRGLYERFEYIRSFLKRQRPLSKFVEVCSELLLEELSMAPPSVAPTAPTTALIASAPAPSPCSTSSSAGGGGGGNRRRCCKTDGSCK

SEQ ID NO: 14282 - protein, 173 aa, Zea mays
  Coding DNA Sequence Number=SeqID_1538
ACSRPSQRPAKTEQPPPPPYLVQVDYGCRSAAHMAPILDGHLCVACFAQRVPARHHRGVHRGRHAYRAHPVLGQGRQVAALLLKLLERAQERRVHVRALLQVRDAAAELAFRMVVRPADGEVQQLHAVQGLLDVLVDLLLLRLVLLGTLVAADIAFGRQQVARAQGGDAVGDA

SEQ ID NO: 14283 - protein, 188 aa, Zea mays
  Coding DNA Sequence Number=SeqID_1540
RTLFPVPAHVASSAAVQMDTAAPLQLKACAGDAAEKLLLAVAAEGPICGVPDFKMRGKKSDELEPVDAGDEDDDGGDDGDEDGDFGEEGEEDVSEGEGYDNPKGNETKKQRGDPEENGEEDEEEPEDQEGGGDDDDDDDDDDENGDDEDDDNGDDDEEGVDEEDDDQDEDEEEDDDEDSLQPPKKRKK

SEQ ID NO: 14284 - protein, 117 aa, Zea mays
  Coding DNA Sequence Number=SeqID_1542
CSRDVSVGRQEGWWEDCLGEEEHQNLCDCSQWHGGGITHFLVAGAMGRDWRIFGKAKYVALQATEAGRPTDAGDADTTGRGRPASCCRACKWFGAHLGGVGRGVPNDCPVLCKNQRI

SEQ ID NO: 14285 - protein, 139 aa, Zea mays
  Coding DNA Sequence Number=SeqID_1544
  Subcellular localization annotation: CTP_CleavageSite=48; ConfidenceScore=5.15e-01
SLVCLIVRAAERASSSQQKKLPHRCRRAGPDGAARPPRRRRPGAAPAPASPASQSHPRGDDLPSVAVRGLHSQDDDDVGRAAVVPARDRGGRRGQDGPAWGEHAHHQARRDSAGVSWERHRPPRGAAVKAARGRRLVSS

SEQ ID NO: 14286 - protein, 166 aa, Zea mays
  Coding DNA Sequence Number=SeqID_1546
  Gene Ontology: Mol. function=two-component response regulator activity; Cellular component=intracellular; Biological process=two -component signal transduction system (phosphorelay)
  Homolog annotation: Hit_ID=Q3IE68; Match level="QueryCoverage=83%, HitCoverage=36%, E-value=4e-43, Identity=67%"; Hit description=LuxR -type transcription regulator required for testosterone degradation
  Pfam annotation: Domain name=GerE; Domain location=76-133; Score =18.2; E_value=8.6e-05; Accession=PF00196.10; Description=Bacterial regulatory proteins, luxR family
LACLQRLIRAAFSPDAPKGAEAMSVTRPSGLVNLGLVVESIPSLDWADERGKPAALVYIRDAASKSLASEVVTKQLFNLTRAETALAMELANGLSLEEAAEELNIRRNTARAHLRSIFSKTGVRRQTELVRILLNSVVALGKPKVALKAPERLKVPLPQLAVARRA

SEQ ID NO: 14287 - protein, 98 aa, Zea mays
  Coding DNA Sequence Number=SeqID_1547
AALSALGPYDTNQRTYVILPIVYPRARGVERPCWAVVPHAGKDGAGIPPGPVLRGRRDRSRGGRTTRLRSPGSRVAGTRSQPLGASVGAETALAAKSA

SEQ ID NO: 14288 - protein, 107 aa, Zea mays
  Coding DNA Sequence Number=SeqID_1548
MAGDNVLARPSFSPSWSKKSGRAPARAAAAAEMGPAADEERKGGSCEGGARDNAGSGPAGEYNKPNHWALNRGHAVRGAARAGRTRTTPSARAHARAGLGVAGALAL

SEQ ID NO: 14289 - protein, 132 aa, Zea mays
  Coding DNA Sequence Number=SeqID_1550
LYSALLARRLNCWLALLHTKETSRPASHDQQGAPVAPQARRVLRPPASVGYWWLPARACGIRSGGCRLELEGDVNASWRAGGEKFAIMKAHRCRRSHLTLALVLVGDARSPPDPTAAFASRQCSPSIRRLNT

SEQ ID NO: 14290 - protein, 213 aa, Zea mays
  Coding DNA Sequence Number=SeqID_1552
  Gene Ontology: Mol. function=protein serine/threonine kinase activity; Cellular component=cell surface; Biological process =protein amino acid phosphorylation
  Homolog annotation: Hit_ID=Q8H4I0; Match level="QueryCoverage=92%, HitCoverage=29%, E-value=7e-92, Identity=80%"; Hit description =Putative receptor-type protein kinase LRK1
  Pfam annotation: Domain name=Pkinase; Domain location=51-213; Score =3.0; E_value=8.3e-09; Accession=PF00069.15; Description=Protein kinase domain
  Pfam annotation: Domain name=Pkinase_Tyr; Domain location=51-212; Score=-18.8; E_value=3e-11; Accession=PF07714.7; Description=Protein tyrosine kinase
  Pfam module annotation: Pfam domain module=Pkinase::Pkinase_Tyr; Domain location=51-213::51-212
MPAALLLSLGAVAFLLVRRHVRYAEVREDWELEFGPHRFSYKDLFHATGGFENKNLLGIGGFGRVYKGELPRSRLKIAVKRVSHDSKQGMKEFIAEIVSIGRLQNRNLVQLLGYCRRKGELLLVYEYMPNGSLDKYLHNAKEGNSALSWAQRFRIIKGIASGLLYLHEEWEKVVVHRDIKGSNVLLDSEMNGRLGDFGLARLYDHGVDPQTTH

SEQ ID NO: 14291 - protein, 173 aa, Zea mays
  misc_feature (144)..(144): Xaa can be any naturally occurring amino acid
  Coding DNA Sequence Number=SeqID_1553
  Gene Ontology: Mol. function=3-alpha-hydroxysteroid dehydrogenase (B -specific) activity; Biological process=metabolic process
  Homolog annotation: Hit_ID=A8H4E7; Match level="QueryCoverage=99%, HitCoverage=66%, E-value=9e-52, Identity=58%"; Hit description=3 alpha-hydroxysteroid dehydrogenase/carbonyl reductase
LERSGGVLDGLVCCAAVGVTAPSCGLILSVNYFGVSQLLEGLQGALARGRNPAAMVIGSVAATQPGAEQQPMTGAMLEGDETRALDLANDLGQPHLAYACSKYAITHHARSLASGWGQRGMRLNVVAPGAVQTPLHQASLEHAXFGKAVREFVAPLGRAGRPQEIAALVTFLQ

SEQ ID NO: 14292 - protein, 83 aa, Zea mays
  misc_feature (26)..(26): Xaa can be any naturally occurring amino acid
  misc_feature (37)..(37): Xaa can be any naturally occurring amino acid
  Coding DNA Sequence Number=SeqID_1554
  Gene Ontology: Mol. function=transferase activity, transferring glycosyl groups; Cellular component=plastid; Biological process =response to temperature stimulus
  Homolog annotation: Hit_ID=A2WX22; Match level="QueryCoverage=85%, HitCoverage=8%, E-value=8e-21, Identity=74%"; Hit description =Phosphorylase
  Subcellular localization annotation: CTP_CleavageSite=29; ConfidenceScore=5.28e-01
SSFTALSPLPQLLPGSKFLQHISSTXGMEASGTSNMXFSMNGCVIIGTLDGANVEIREKVGEEYFFLFGAKALAYIGHRNQRL

SEQ ID NO: 14293 - protein, 142 aa, Zea mays
  Coding DNA Sequence Number=SeqID_1555
MMMMFLDEEMVARTVTTAQEKAKSGKETSRSSKTTTSFRCGLAETPNGPYQVHCTHVERLHRRLHKEQERRCQEQEQQDSSPSPQQEVEYGKQPSPAPQPEMPRAPPQGIPVAGGDPDGDDNDAGGSSRHDIELLEEPEPEG

SEQ ID NO: 14294 - protein, 212 aa, Zea mays
  Coding DNA Sequence Number=SeqID_1557
  Gene Ontology: Mol. function=ATP binding; Biological process=apoptosis
  Homolog annotation: Hit_ID=A3CCU7; Match level="QueryCoverage=76%, HitCoverage=12%, E-value=3e-18, Identity=37%"; Hit description =Putative uncharacterized protein
MRYHVKVLSPLLPPPAEEGALTTEAAYAAGDEDDDQPDADGSAALASHRRAVLFKHRALDDYFQGKLVEWTEQVMERGDVMHSAAVVAPEADQEVIALARRALAQGHRSVLVDIPQVHMDFEPLRPQEILYYILCQLQQDRASSPPQLGSLEGSPDTLVKQYLLYRSKREISHGKESLLGQTEIQQDIQNVMGKLDEVKRGIQDEQLLLQGY

SEQ ID NO: 14295 - protein, 93 aa, Zea mays
  misc_feature (29)..(29): Xaa can be any naturally occurring amino acid
  Coding DNA Sequence Number=SeqID_1558
  Gene Ontology: Mol. function=protein serine/threonine kinase activity; Biological process=protein amino acid phosphorylation
  Homolog annotation: Hit_ID=Q75H77; Match level="QueryCoverage=96%, HitCoverage=24%, E-value=2e-15, Identity=46%"; Hit description =Serine/threonine-protein kinase SAPK10
IKNPPWFFKNLLAGPKDGHSISKQAEEPXQPIQSKKEFLQILGEGALPPGGFRGLNQFLKEDHGPPEDKEGLDSKAGFYLENNGEIVYSILQQ

SEQ ID NO: 14296 - protein, 185 aa, Zea mays
  misc_feature (23)..(23): Xaa can be any naturally occurring amino acid
  misc_feature (29)..(29): Xaa can be any naturally occurring amino acid
  Coding DNA Sequence Number=SeqID_1559
  Gene Ontology: Mol. function=protein binding; Cellular component =chromosome; Biological process=chromosome organization and biogenesis
  Homolog annotation: Hit_ID=A1FSC1; Match level="QueryCoverage=100%, HitCoverage=15%, E-value=1e-23, Identity=34%"; Hit description =Chromosome segregation protein SMC
EKVAGELSALIEQIDECRAQTRXARARLXESVGHMGDLEDQRRELENERRALLESREEARMNAREAADQAHALALSLESKRSSLASLEQSLARMETQLRQIEARRGEIATQLAAGSDPIAELEAERQTYLDQRLLVDKQLVEARRALEDCDIEFRKLEQQRQLAEQGLASLREGLSQKRLAEQAL

SEQ ID NO: 14297 - protein, 220 aa, Zea mays
  Coding DNA Sequence Number=SeqID_1560
  Gene Ontology: Mol. function=structural molecule activity; Cellular component=chloroplast
  Homolog annotation: Hit_ID=A7PKG2; Match level="QueryCoverage=79%, HitCoverage=78%, E-value=1e-59, Identity=64%"; Hit description =Chromosome chr15 scaffold_19, whole genome shotgun sequence
  Pfam annotation: Domain name=PAP_fibrillin; Domain location=43-212; Score=145.4; E_value=1.5e-40; Accession=PF04755.3; Description=PAP _fibrillin
  Subcellular localization annotation: CTP_CleavageSite=29; ConfidenceScore=5.36e-01
MAPLLFVPNKTLAPPILHARHRFAPRPPSAAAFLRRFFPTRPPAAKADLLRLIADQGRGLETQSAPSRLADIVSCIDALAAVSPGADTVSDAAKLSGTWRLLWTTEQEQLFIVRNAPFFRTAAGDVLQVIDVAGGALNNVITFPPSGAFVVNGDIEVQPPQRVNFRFTRAALRGNNWEVPFPPFGKGWFDTVYLDDDIRVAKDIRGDYLVVERAPYSWDV

SEQ ID NO: 14298 - protein, 157 aa, Zea mays
  Coding DNA Sequence Number=SeqID_1561
  Gene Ontology: Mol. function=protein histidine kinase activity; Cellular component=membrane; Biological process=response to stress
  Homolog annotation: Hit_ID=A2VYX2; Match level="QueryCoverage=99%, HitCoverage=91%, E-value=7e-65, Identity=85%"; Hit description =Universal stress protein UspA
  Pfam annotation: Domain name=Usp; Domain location=1-146; Score=100.7; E_value=4.5e-27; Accession=PF00582.16; Description=Universal stress protein family
MYKRIFVGLDGSPSARLALNEAIRIAAASGGEVTCAYVVEHRPQLVDVDAGFAAERAGDVAAVDAATPVLDDAKAVLEQQHVPGTVRALDAYGEDVAAVLMRTAAEADADLIVMGTSGRHGLRRLLLGSVAESLLRAADRPVLLVRHDEPVAAAKAR

SEQ ID NO: 14299 - protein, 226 aa, Zea mays
  misc_feature (218)..(218): Xaa can be any naturally occurring amino acid
  Coding DNA Sequence Number=SeqID_1562
  Gene Ontology: Mol. function=two-component response regulator activity; Cellular component=intracellular; Biological process=two -component signal transduction system (phosphorelay)
  Homolog annotation: Hit_ID=A7ME76; Match level="QueryCoverage=99%, HitCoverage=24%, E-value=1e-95, Identity=78%"; Hit description =Putative uncharacterized protein
ACSRSETLAQKRQYVNLNALFAQLFNELASWQQPLWLIIDDYHHITNPAVHEAMRFFLRHQPDNLTLVVLSRNLPQLGIANLRVREQLLELGSQQLAFTHQEAKQFFHCRLSAPLAPDESNRLCDDVSGWATALQLIALSTRQGAASAHDSARRLSGINASHLSDYLVEEVLDNVYAATRHFLLKSALLQSMNDALVACVTGEDNGRMRLEEIERQGXLFIQRMYD

SEQ ID NO: 14300 - protein, 72 aa, Zea mays
  misc_feature (25)..(25): Xaa can be any naturally occurring amino acid
  Coding DNA Sequence Number=SeqID_1563
  Homolog annotation: Hit_ID=Q2QYW3; Match level="QueryCoverage=90%, HitCoverage=14%, E-value=8e-23, Identity=73%"; Hit description =Expressed protein
  Pfam annotation: Domain name=DUF231; Domain location=1-72; Score= -24.2; E_value=1.1e-05; Accession=PF03005.6; Description=Arabidopsis proteins of unknown function
ESSFLDNPVTVINITRMSDYRKDAXHTSLYTIPQGKLLTLKQRADPETYTDCIHWCVPGVPDTWNQILYAHL

SEQ ID NO: 14301 - protein, 94 aa, Zea mays
  misc_feature (52)..(52): Xaa can be any naturally occurring amino acid
  misc_feature (58)..(58): Xaa can be any naturally occurring amino acid
  Coding DNA Sequence Number=SeqID_1564
  Gene Ontology: Mol. function=hydrolase activity, acting on acid anhydrides, catalyzing transmembrane movement of substances; Cellular component=ATP-binding cassette (ABC) transporter complex; Biological process=...
  Gene Ontology: Biological process=regulation of transcription, DNA -dependent
  Homolog annotation: Hit_ID=A8GBB0; Match level="QueryCoverage=96%, HitCoverage=35%, E-value=2e-21, Identity=56%"; Hit description =Transcriptional regulator, ModE family
  Pfam annotation: Domain name=TOBE; Domain location=27-90; Score=52.0; E_value=2.1e-12; Accession=PF03459.7; Description=TOBE domain
  Pfam annotation: Domain name=TOBE_2; Domain location=13-91; Score =3.6; E_value=0.079; Accession=PF08402.1; Description=TOBE domain
  Pfam module annotation: Pfam domain module=TOBE::TOBE_2; Domain location=27-90::13-91
ACLQLDSGKDVLVLIKAPWIRLTPDAADGDNQLPGLVHTIEPGETQSEVLIXLTGGEXLCATVPSQVLRQLNVQPGSAVTACFDAEHAIIATLL

SEQ ID NO: 14302 - protein, 205 aa, Zea mays
  Coding DNA Sequence Number=SeqID_1565
  Gene Ontology: Mol. function=extracellular-glutamate-gated ion channel activity; Cellular component=integral to membrane; Biological process=G-protein coupled receptor protein signaling pathway
  Homolog annotation: Hit_ID=Q9SW97; Match level="QueryCoverage=99%, HitCoverage=21%, E-value=7e-72, Identity=63%"; Hit description =Glutamate receptor 3.5 precursor
  Pfam annotation: Domain name=Lig_chan; Domain location=18-205; Score =76.9; E_value=6.4e-20; Accession=PF00060.17; Description=Ligand -gated ion channel
STVKSSSSDEWAFLKPFTPELWATVVAFCIFVGAVVWILEHRHNDEFRGPLKKQMVTIFWFSFSSMFFTQREDTVSVPGRFVVIMWLFVVLIITQSYTASLTSILTVQQLSTGIQGLSDLLASNDPIGYQVGSFAGSYMNKELGVAATRLRELDPDDYADSLQRGPRGGGVAAIVDELPYMELFLSSNCQFQTVGQEFTKSGWGF

SEQ ID NO: 14303 - protein, 139 aa, Zea mays
  Coding DNA Sequence Number=SeqID_1566
  Gene Ontology: Mol. function=transferase activity, transferring phosphorus-containing groups; Cellular component=intracellular; Biological process=two-component signal transduction system (phosphorelay)
  Homolog annotation: Hit_ID=Q8DB68; Match level="QueryCoverage=98%, HitCoverage=18%, E-value=7e-36, Identity=56%"; Hit description =Chemotaxis protein
  Pfam annotation: Domain name=H-kinase_dim; Domain location=14-74; Score=59.8; E_value=9.6e-15; Accession=PF02895.5; Description=Signal transducing histidine kinase, homodimeric domain
  Subcellular localization annotation: CTP_CleavageSite=8; ConfidenceScore=5.02e-01
APSLQVVRTSPAAKATVRVDTARLYGLVNRAGELVLARNRLLSLATRSGDEALQLAAAELDRIADELHGALLGMRMQPVRRLFQRFPRIVRDLARQLGKDIELVLEGEDTDLDRGLVEALADPLIHLLRNAVDHGLETA

SEQ ID NO: 14304 - protein, 93 aa, Zea mays
  Coding DNA Sequence Number=SeqID_1567
  Gene Ontology: Cellular component=integral to membrane
  Homolog annotation: Hit_ID=A8GDQ4; Match level="QueryCoverage=67%, HitCoverage=30%, E-value=1e-19, Identity=73%"; Hit description =Putative uncharacterized protein
QHRSWQMMAAGLLAVLVFSRLFGMHELWQQLMLDGYNRVVKNMAEEGSELFGYSLCLVASLRYLWQTRPALATARASRRVVSIEAAEAHFASR

SEQ ID NO: 14305 - protein, 170 aa, Zea mays
  Coding DNA Sequence Number=SeqID_1568
  Homolog annotation: Hit_ID=Q5K2M9; Match level="QueryCoverage=92%, HitCoverage=21%, E-value=3e-80, Identity=85%"; Hit description=START domain-containing protein
EDDDERSTLTHRPTIGNGPPDSIHDWTKESDIGVTNQNDPIQFCSKKNWRLLRCQNGLRIFEELLEVDYLARSCSRAMRAVGVVEATCEAIFGLIMSMDVTRYEWDCSFRNGSLVEEVDGHTAILYHRLHLHWCPMLVWPRDLCYARYWRRNDDGSYGNSFSFPKISAST

SEQ ID NO: 14306 - protein, 89 aa, Zea mays
  Coding DNA Sequence Number=SeqID_1569
  Homolog annotation: Hit_ID=A7MH46; Match level="QueryCoverage=69%, HitCoverage=27%, E-value=8e-07, Identity=46%"; Hit description =Putative uncharacterized protein
LKAAIDKAFNDMRKDGTYDKIAKKIEPMLYGYSEVILKGTLVTLELALSSVVLAVVLGLIGAGAKLSRNRPLAMIFEGYTTLIRGVPDL

SEQ ID NO: 14307 - protein, 158 aa, Zea mays
  misc_feature (129)..(129): Xaa can be any naturally occurring amino acid
  Coding DNA Sequence Number=SeqID_1570
  Gene Ontology: Mol. function=ubiquitin thiolesterase activity; Cellular component=intracellular; Biological process=ubiquitin -dependent protein catabolic process
  Homolog annotation: Hit_ID=A2XB54; Match level="QueryCoverage=81%, HitCoverage=41%, E-value=1e-45, Identity=71%"; Hit description =Putative uncharacterized protein
  Pfam annotation: Domain name=Peptidase_C12; Domain location=2-107; Score=-3.3; E_value=1.7e-06; Accession=PF01088.11; Description =Ubiquitin carboxyl-terminal hydrolase, family 1
  Subcellular localization annotation: CTP_CleavageSite=47; ConfidenceScore=5.52e-01
PGPAPLRSLPSSSPNRSSSSSLNPFSSLSTTHNSFARPESFISDEQRAATKDDDVYHFISYLPFEGVLYELDELKEGPVNLGQCGGADDLDWLRVVQLVIQERIERYSQNGIRSTIKNRKEVYCAGVTXKRREQILQEMNKTSATESLSKSLKEVISA

SEQ ID NO: 14308 - protein, 46 aa, Zea mays
  Coding DNA Sequence Number=SeqID_1571
  Gene Ontology: Mol. function=oxidoreductase activity; Biological process=electron transport
  Homolog annotation: Hit_ID=O04709; Match level="QueryCoverage=86%, HitCoverage=3%, E-value=4e-15, Identity=97%"; Hit description=Lysine- ketoglutarate reductase/saccharopine dehydrogenase bifunctional enzyme
LQARNLSKQSQSTKRVFQLYGCVVTSRDMVSHKDPTKQFDKVIHLS

SEQ ID NO: 14309 - protein, 137 aa, Zea mays
  Coding DNA Sequence Number=SeqID_1572
  Homolog annotation: Hit_ID=Q5JKG7; Match level="QueryCoverage=80%, HitCoverage=22%, E-value=6e-40, Identity=71%"; Hit description =Pherophorin-dz1 protein-like
  Pfam annotation: Domain name=DUF618; Domain location=54-112; Score =31.9; E_value=2.1e-06; Accession=PF04818.4; Description=Protein of unknown function, DUF618
MSAGFDKQILAQKLSKLNSSQQTIETLSHWCVFHHRCCQQVVETWDSEFHAAPGERRVSLLYLANDIMQNSRKEGNGYIAEFMRVIPAALNGVLTVRDDFGRNVPKRLADYSIKHACCFASNQRRSMEAENSLTTNV

SEQ ID NO: 14310 - protein, 149 aa, Zea mays
  misc_feature (56)..(149): Xaa can be any naturally occurring amino acid
  Coding DNA Sequence Number=SeqID_1573
PHGSTMFATTNVSATTFLISRPCLYNFRAQNTLDLDAWFLQEISIWPKNRRQILMXXXXXXXXXXXXXXXXXXXXXXXXXXXXXXXXXXXXXXXXXXXXXXXXXXXXXXXXXXXXXXXXXXXXXXXXXXXXXXXXXXXXXXXXXXXXXX

SEQ ID NO: 14311 - protein, 148 aa, Zea mays
  Coding DNA Sequence Number=SeqID_1575
  Pfam annotation: Domain name=HAMP; Domain location=41-112; Score =30.6; E_value=5.9e-06; Accession=PF00672.15; Description=HAMP domain
MQAFQQQFNDAWFSEIEQANQQLGSVNQHSLSTLKQSRNLALAIAALLMALLLLAAALLMRGVLLPLRHANAQLAQIATGDLVASPAPTRRQSLETRQLLLSIDTMRQGLQQIVSDITTVATRVAAGADEMQQHNQQVMQQHQAQNAS

SEQ ID NO: 14312 - protein, 103 aa, Zea mays
  Coding DNA Sequence Number=SeqID_1577
  Gene Ontology: Mol. function=ATPase activity, coupled to transmembrane movement of substances; Cellular component=integral to membrane; Biological process=transport
  Homolog annotation: Hit_ID=Q8GU79; Match level="QueryCoverage=98%, HitCoverage=58%, E-value=3e-40, Identity=68%"; Hit description=MDR -like ABC transporter
AGKEVFKVIKRKPSISYAKSGLVLDKIHGEIKFRRVHFAYPSRQDKPILQGFSLSIPAGKVIALVGSSGCGKSTVISLLQRFYDPTSGMLLQSYHHVRRPNTA

SEQ ID NO: 14313 - protein, 80 aa, Zea mays
  misc_feature (54)..(54): Xaa can be any naturally occurring amino acid
  Coding DNA Sequence Number=SeqID_1578
  Gene Ontology: Mol. function=protein binding; Cellular component =clathrin coat of trans-Golgi network vesicle; Biological process =intracellular protein transport
  Homolog annotation: Hit_ID=Q7XZG1; Match level="QueryCoverage=100%, HitCoverage=49%, E-value=2e-22, Identity=67%"; Hit description =Putative clathrin assembly protein
  Pfam annotation: Domain name=Clat_adaptor_s; Domain location=1-79; Score=-49.4; E_value=0.0041; Accession=PF01217.10; Description =Clathrin adaptor complex small chain
MIRSVLRISRQGKVRLTKWHTPYPQKQTPMTSTEISTRVLTRGPKRCNSGDWQXYRVVYKRDASLDFCRGSGPADNELET

SEQ ID NO: 14314 - protein, 106 aa, Zea mays
  misc_feature (55)..(55): Xaa can be any naturally occurring amino acid
  Coding DNA Sequence Number=SeqID_1579
  Gene Ontology: Mol. function=hydrolase activity, acting on carbon -nitrogen (but not peptide) bonds; Cellular component=cytoplasm; Biological process=nucleobase, nucleoside, nucleotide and nucleic acid metabolic process
  Homolog annotation: Hit_ID=Q5VR53; Match level="QueryCoverage=100%, HitCoverage=23%, E-value=9e-38, Identity=70%"; Hit description =Putative dihydropyrimidine amidohydrolase
AGLESYKHKAVKAAMDYGFHMAITKWHDEVAREMEVMVKEHGQNSFKFFMAYKGXLLRKCKSLSALAMVHAEDGDAGQQWMIDLWIAGLEGHALSRPPIFVSSFTA

SEQ ID NO: 14315 - protein, 181 aa, Zea mays
  Coding DNA Sequence Number=SeqID_1580
  Gene Ontology: Mol. function=transcription factor activity; Cellular component=nucleus; Biological process=regulation of transcription, DNA-dependent
  Homolog annotation: Hit_ID=Q3T5P2; Match level="QueryCoverage=36%, HitCoverage=30%, E-value=6e-30, Identity=93%"; Hit description=HvCBF7
  Pfam annotation: Domain name=AP2; Domain location=61-112; Score=75.4; E_value=1.8e-19; Accession=PF00847.10; Description=AP2 domain
  Subcellular localization annotation: CTP_CleavageSite=43; ConfidenceScore=5.55e-01
ASRAPTPRARPPARPDPPRPPAHARRPPPLPPPHRAAARNVVRAQTTAGAAGPGPGPAPPPTYRGVRMRAWGKWVSEIREPRKKSRIWLGTFATAEMAARAHDVAALAIKGRAAHLNFPELANDLPRPATAAPKDVQAAAALAAAADFQAPANAAAATDPDDGPDAGADSASASPPPPPPQ

SEQ ID NO: 14316 - protein, 105 aa, Zea mays
  Coding DNA Sequence Number=SeqID_1581
ARVCGRHSPPVRVWVSCSRHIYQIQNRAGFCPAVLRLVLATARVFRIYLSTYNKVAVPSIFYRTLTDGTSFIKSNKNGGASCERFESNQTKKIMADSHLLGATNL

SEQ ID NO: 14317 - protein, 98 aa, Zea mays
  Coding DNA Sequence Number=SeqID_1582
  Homolog annotation: Hit_ID=A8GG69; Match level="QueryCoverage=78%, HitCoverage=23%, E-value=3e-19, Identity=54%"; Hit description =Putative uncharacterized protein precursor
MKLWLPGVAALLLALNAQAEDYRVVYSPSLSLEVYIDNVASNAPDDWCKETLPLRIVSGKSSDTSILTSFLPRVGTLLANQCGLLDEIPWQMTSKEGS

SEQ ID NO: 14318 - protein, 98 aa, Zea mays
  Coding DNA Sequence Number=SeqID_1583
  Gene Ontology: Mol. function=pyrroloquinoline-quinone synthase activity; Biological process=pyrroloquinoline quinone biosynthetic process
  Homolog annotation: Hit_ID=Q7X5S0; Match level="QueryCoverage=100%, HitCoverage=39%, E-value=3e-37, Identity=78%"; Hit description=PqqC
VIITEALSPEAFEQALRAKGAYYHIHHPYHIAMHNGAATREQIQGWVANRFYYQTNIPLKDAAIMANCPDPATRRKWVQRILDHDGRNGEEGGIEAWL

SEQ ID NO: 14319 - protein, 110 aa, Zea mays
  Coding DNA Sequence Number=SeqID_1584
  Gene Ontology: Mol. function=tetrahydrofolylpolyglutamate synthase activity; Cellular component=cytoplasm; Biological process=folic acid and derivative biosynthetic process
  Homolog annotation: Hit_ID=A6TC01; Match level="QueryCoverage=95%, HitCoverage=24%, E-value=7e-38, Identity=70%"; Hit description =Dihydrofolate:folylpolyglutamate synthetase; dihydrofolate synthetase
MDTLHLPQATSPLDTWLDYVEHLHSHAIDLGLDRIQRVAARLDLLKPTPFEFTVAGTNGKRTICRTLETLLMARRYRVGVYSSPYLVRYTERLHLQGAELDEARHSASFA

SEQ ID NO: 14320 - protein, 185 aa, Zea mays
  Coding DNA Sequence Number=SeqID_1585
  Gene Ontology: Mol. function=glutamate 5-kinase activity; Cellular component=cytoplasm; Biological process=amino acid biosynthetic process
  Homolog annotation: Hit_ID=Q88Q06; Match level="QueryCoverage=72%, HitCoverage=87%, E-value=1e-64, Identity=93%"; Hit description=CreA protein
  Pfam annotation: Domain name=CreA; Domain location=58-185; Score =223.8; E_value=4.1e-64; Accession=PF05981.2; Description=CreA protein
MVVCVGPDGLEVARGLANYSALEAQKIIGQPSDAIEGLLGYSAEPELVHRDNLVLRVIGVAALVLPMLAGAEEIGQVSTVFKFLGPNDRIVVEAFDDPKVEGVTCYLSRAKTGGVKGGLGLAEDRAEASIACRQVGPISFKGELKDGEEVFKERTSLVFKTMQVVRFLDKKRNTLVYLVYSDRMI

SEQ ID NO: 14321 - protein, 176 aa, Zea mays
  Coding DNA Sequence Number=SeqID_1586
  Gene Ontology: Mol. function=catalytic activity; Cellular component =nucleus; Biological process=metabolic process
  Homolog annotation: Hit_ID=A3B712; Match level="QueryCoverage=99%, HitCoverage=26%, E-value=6e-81, Identity=80%"; Hit description =Putative uncharacterized protein
  Pfam annotation: Domain name=PPR; Domain location=8-42; Score=17.3; E_ value=0.059; Accession=PF01535.11; Description=PPR repeat
PLEPSDVGTYVLLSNMYAKANRWDGVVKVRKHMRERGVRKSPGVSWIHVGSDVHVFTSEEKVHPQMDQIAKKLEELIDQIKAIGYVPNFAVVLHDIDDERKEEHLMYHSEKLALAFGLIHTPKGATIHIMKNLRICDDCHVAIKLISVVTSRKIVVRDAVRFHCIEGGICSCNDYW

SEQ ID NO: 14322 - protein, 98 aa, Zea mays
  misc_feature (43)..(43): Xaa can be any naturally occurring amino acid
  Coding DNA Sequence Number=SeqID_1587
  Gene Ontology: Mol. function=hydrolase activity; Biological process =lipid catabolic process
  Homolog annotation: Hit_ID=A2YLX8; Match level="QueryCoverage=97%, HitCoverage=7%, E-value=1e-20, Identity=55%"; Hit description =Putative uncharacterized protein
NLERWVEILIRATMNCYTIFGRCFQLKLTWLQFLEKLYLGHHXLAVLAPEVGALKNMKVRSFNNNMLVSVPVELRQCVMLEELSLEHNKLVRPLLDFR

SEQ ID NO: 14323 - protein, 154 aa, Zea mays
  Coding DNA Sequence Number=SeqID_1588
  Gene Ontology: Mol. function=transferase activity, transferring phosphorus-containing groups; Cellular component=integral to membrane; Biological process=two-component signal transduction system (phosphorelay)
  Homolog annotation: Hit_ID=Q2W0E3; Match level="QueryCoverage=86%, HitCoverage=11%, E-value=2e-37, Identity=60%"; Hit description =Sensor protein
  Pfam annotation: Domain name=HisKA; Domain location=1-61; Score=51.3; E_value=3.5e-12; Accession=PF00512.15; Description=His Kinase A (phosphoacceptor) domain
MSHELRTPLNSLLILSRSLADNRDGNLDDEQVESARIINDAGTSLLRLINDILDLSKIEAGKMELSTVDYPLAQLAQSLRRNFDHVARDKQVAYEVVLQAGLPEQIHTDPGKLEQIANNLLSNAFKFTSHGTVRAVIGRPAAELPVPAALLGQS

SEQ ID NO: 14324 - protein, 92 aa, Zea mays
  misc_feature (26)..(26): Xaa can be any naturally occurring amino acid
  Coding DNA Sequence Number=SeqID_1589
  Gene Ontology: Mol. function=ferredoxin-NADP+ reductase activity; Cellular component=thylakoid membrane; Biological process=electron transport
  Homolog annotation: Hit_ID=Q9SLP5; Match level="QueryCoverage=100%, HitCoverage=24%, E-value=9e-20, Identity=57%"; Hit description =Ferredoxin--NADP reductase
PAKKLVKVSKNMEEEHLTSKANPKRXLTNQRSLCSTRITRDQDPGETRHVVSTPDGSAPYEKGQSIGVIPCGEDKTGKPNKLKLYCFAISAL

SEQ ID NO: 14325 - protein, 173 aa, Zea mays
  misc_feature (1)..(37): Xaa can be any naturally occurring amino acid
  misc_feature (54)..(54): Xaa can be any naturally occurring amino acid
  Coding DNA Sequence Number=SeqID_1590
XXXXXXXXXXXXXXXXXXXXXXXXXXXXXXXXXXXXXPPEPEKKAEAGEPPPEXASGTGTAGSANQRENDEGAGTPSRSARASRSTGRSRRRREARRRPPPFELSIPLSPCSFSTRTSLGHRLHPLGQDDAPVGSKRSPLTKPPRAIRTGPVMRSSGSTAQDHCAVLIFRTTR

SEQ ID NO: 14326 - protein, 128 aa, Zea mays
  Coding DNA Sequence Number=SeqID_1592
  Gene Ontology: Mol. function=transferase activity; Cellular component= cytoplasm; Biological process=metabolic process
  Homolog annotation: Hit_ID=A4U1B7; Match level="QueryCoverage=96%, HitCoverage=48%, E-value=3e-42, Identity=67%"; Hit description=Sugar kinase
EVKLDETVKLPNLVCDGVMVATPAGSTAYNLSAHGPILPLDANVLALTPISPFRPRRWRGAILPHRTRVSLRVLDPGKRPVSATADFHEVRDVREVAVRQAEGQGVRLLFDPEHNLEQRILDEQFAAD

SEQ ID NO: 14327 - protein, 110 aa, Zea mays
  Coding DNA Sequence Number=SeqID_1593
  Homolog annotation: Hit_ID=A5VZ04; Match level="QueryCoverage=100%, HitCoverage=15%, E-value=1e-39, Identity=76%"; Hit description =Diguanylate cyclase/phosphodiesterase precursor
  Pfam annotation: Domain name=FtsL; Domain location=16-110; Score= -26.6; E_value=0.036; Accession=PF04999.4; Description=Cell division protein FtsL
MMPCAWIKETPLKLELRNSLSVKLLRVVLLSALAVGVVLSCAQIVYDTYKTRQAVNNDAQRILDMFRDPSTQAVYSLDREMGMQVMEGLFQDESVRMASIGHPNETMLAE

SEQ ID NO: 14328 - protein, 157 aa, Zea mays
  misc_feature (88)..(88): Xaa can be any naturally occurring amino acid
  misc_feature (133)..(133): Xaa can be any naturally occurring amino acid
  Coding DNA Sequence Number=SeqID_1594
  Gene Ontology: Mol. function=guanosine-5'-triphosphate,3'-diphosphate diphosphatase activity; Cellular component=membrane; Biological process=SRP-dependent cotranslational protein targeting to membrane
  Homolog annotation: Hit_ID=A8G827; Match level="QueryCoverage=84%, HitCoverage=26%, E-value=1e-51, Identity=83%"; Hit description =Guanosine-5'-triphosphate,3'-diphosphate pyrophosphatase
  Pfam annotation: Domain name=Ppx-GppA; Domain location=29-157; Score=- 41.7; E_value=9.3e-05; Accession=PF02541.6; Description=PpxGppA phosphatase family
  Subcellular localization annotation: CTP_CleavageSite=49; ConfidenceScore=5.10e-01
PLGQRSTSRWQQQQPSRRCPAQQQPFHMLVVREVSGSIQTVARIKRKVRLAAGLDAANHLSAEAMQRGWQCLRLFSEQLQDIPPEQIXRVVATATLRIASNAQDFLTQAEQILGCAVNVISGEEEARLIYQGXVAHTTGGSDQRLVVDIGGGSTELV

SEQ ID NO: 14329 - protein, 81 aa, Zea mays
  Coding DNA Sequence Number=SeqID_1595
  Gene Ontology: Mol. function=hedgehog receptor activity; Cellular component=integral to membrane; Biological process=cholesterol transport
  Homolog annotation: Hit_ID=Q9SVF0; Match level="QueryCoverage=80%, HitCoverage=6%, E-value=2e-24, Identity=76%"; Hit description =Putative uncharacterized protein F22I13.120
  Subcellular localization annotation: CTP_CleavageSite=40; ConfidenceScore=5.16e-01
MFIQNLTPWSENVNIFQAVPFLVGCPACLRNFLNLFCEMSCSPNQSLFINVTSVKQINSTMTVDGIDYYVTTNYGEELYNS

SEQ ID NO: 14330 - protein, 149 aa, Zea mays
  misc_feature (9)..(9): Xaa can be any naturally occurring amino acid
  Coding DNA Sequence Number=SeqID_1596
  Gene Ontology: Mol. function=hydrolase activity, acting on acid anhydrides, in phosphorus-containing anhydrides; Cellular component =intracellular; Biological process=nucleobase, nucleoside, nucleotide and nucleic acid metabolic process
  Homolog annotation: Hit_ID=Q8FJN1; Match level="QueryCoverage=100%, HitCoverage=20%, E-value=2e-54, Identity=71%"; Hit description =Probable ATP-dependent helicase dinG
LAGDDGRHXLAIEAPTGVGKTLSYLIPGIAVSRAEEKRLVISTANVALQDQIFSKDLPLLKQIIPDLTFTAAFGRGRYVCPRNLTALAATDDQQGDLLLYLDEQAVTGSKEEQKFCARLEKDLSSYKWDGLRDHSDVAIDDSLWQRLST

SEQ ID NO: 14331 - protein, 185 aa, Zea mays
  Coding DNA Sequence Number=SeqID_1597
  Homolog annotation: Hit_ID=Q9ZWI4; Match level="QueryCoverage=100%, HitCoverage=64%, E-value=7e-51, Identity=61%"; Hit description =ZmGR2c protein
ERGSEEQGNNKDMDAFGAVMDKVKGHPEAMEKVSAVMDKVKSHPEMVEKVKDEVTSLAGALRLRRHGSEDKEAESEEKAEGGEAKQSVDEGASDGKAGEPGVLEQAVQEIQAVAAALQQTAEPEAEIPAETAAAAPAAETSAGGDRPEETNGEVEKDDPKKRLDFAGFFAMLLERFCSPASKKKD

SEQ ID NO: 14332 - protein, 134 aa, Zea mays
  Coding DNA Sequence Number=SeqID_1598
  Gene Ontology: Mol. function=structural molecule activity; Cellular component=flagellin-based flagellum; Biological process=ciliary or flagellar motility
  Homolog annotation: Hit_ID=A8GG31; Match level="QueryCoverage=100%, HitCoverage=97%, E-value=2e-55, Identity=79%"; Hit description =Flagellar basal-body rod protein FlgB
  Pfam annotation: Domain name=Flg_bb_rod; Domain location=9-39; Score =52.4; E_value=1.5e-12; Accession=PF00460.10; Description=Flagella basal body rod protein
MLDKLDAALRFGTEALNLRAQRQEILASNIANADTPGYQARDIDFASQLSKVMQNGRAEGSSLALNVTSSRHIEAQTNSQPALDLLYRIPDQPAADGNTVDMDRERTQFADNSLKYQTDLTLISSQIKGMMSVL

SEQ ID NO: 14333 - protein, 115 aa, Zea mays
  misc_feature (11)..(11): Xaa can be any naturally occurring amino acid
  Coding DNA Sequence Number=SeqID_1599
  Gene Ontology: Mol. function=protein serine/threonine kinase activity; Cellular component=membrane; Biological process =recognition or rejection of self pollen
  Homolog annotation: Hit_ID=Q8W054; Match level="QueryCoverage=99%, HitCoverage=13%, E-value=2e-26, Identity=57%"; Hit description=S -receptor kinase PK3-like
RLATGRGLTYXWHECLPNNASWDSNPENILLTPELDPKVDYFRLAKLCKRDACAGDGDSMRLSRMTGTAGYMAPDWALNVPINAKVDVCSYGIVLLDIVMGCRACDQISAVGECL

SEQ ID NO: 14334 - protein, 209 aa, Zea mays
  Coding DNA Sequence Number=SeqID_1600
  Gene Ontology: Mol. function=signal transducer activity; Cellular component=membrane; Biological process=signal transduction
  Homolog annotation: Hit_ID=Q6DB55; Match level="QueryCoverage=100%, HitCoverage=39%, E-value=2e-44, Identity=43%"; Hit description =Putative signaling membrane protein
MMMQSPPVTGKAWWSLSIHGTSGVPDRPAVIFVRHLPDSSGFWAVIDGHYLMDFMRAIGESNRYQMSLRFNGGSPIASGPDDQPELLYLSSANYKAESSRYPISVSVTVPAAELIKAWRQALLIFLPMAAIFSILLMVLTANWLRRRLSWADEIRRAIRNREFTVHYQPVYSTGIQRCTGAEALMRWQRPNGEMIRPDIFISHAEAEGM

SEQ ID NO: 14335 - protein, 411 aa, Zea mays
  Coding DNA Sequence Number=SeqID_1601
  Gene Ontology: Mol. function=ubiquitin-protein ligase activity; Cellular component=ubiquitin ligase complex; Biological process =protein ubiquitination
  Homolog annotation: Hit_ID=Q2QXD4; Match level="QueryCoverage=70%, HitCoverage=62%, E-value=3e-41, Identity=42%"; Hit description=U-box domain containing protein, expressed
  Pfam annotation: Domain name=U-box; Domain location=5-74; Score=64.0; E_value=5.2e-16; Accession=PF04564.6; Description=U-box domain
MRHHLMCPISLQPMQDPVTAPTGITYDRRAIERWLAAGHATCPVTGQPLALADLTPNHTLRRLIQSWCAPRPSTPPEAAGANKPADGDDDAVEHSQSQTDDDVVKKLLRAATSPPIDVLREAAAAAFESDAARRRMVDAGVLQRVLRGVAAIASEVKADDPRHHENESRSSSAIARAIEARLDLARALAVSSCDDDELRPQLVSDSLVHGLLDAATDVLAALERAGGGGGDDGDAARASAVRLLDSVTGAAGAAVLERLRPGLFRAVTAVVRDRVSPAATRSALRVLLHACPLGRNRALAVEAGAAREAIELELDAPPPPPGGGGGRRATELALALLAELCACADGRAAVAAHPAGVAVVARRLLRVSAAADACAVRVLAAVGGRAASPEVLREMARVGAVGKLCCVLQAC

SEQ ID NO: 14336 - protein, 175 aa, Zea mays
  Coding DNA Sequence Number=SeqID_1602
  Gene Ontology: Mol. function=transporter activity; Cellular component= integral to membrane; Biological process=transport
  Homolog annotation: Hit_ID=A7MF30; Match level="QueryCoverage=100%, HitCoverage=42%, E-value=6e-36, Identity=43%"; Hit description =Putative uncharacterized protein
QWLLGPLSDKYGRRPVLLFGILFFAAACVLTTWVSNIEQFVTLRFIQGISLCFIGAVSYAAVQEAFDEALAVRMMALMANVALLAPLAGPLAGAAWLTVGEWRSMFWLFAVCSLLAFVVLWRIMPETAGDRSHSIALPNLARCYGRLARDKQVMYGSFAIGLVFIPILTWVALSP

SEQ ID NO: 14337 - protein, 50 aa, Zea mays
  Coding DNA Sequence Number=SeqID_1603
QVKLVDVCFFLLVFSVSSGCSCSYYALSKREKNHLCKKKKKKVPARAAAR

SEQ ID NO: 14338 - protein, 194 aa, Zea mays
  Coding DNA Sequence Number=SeqID_1605
  Subcellular localization annotation: CTP_CleavageSite=68; ConfidenceScore=5.06e-01
MDEAPASPPSYRHEDLAPSPYMPSTPAPRHRRRTGGAWPGRRHGRVGWSSTNGPDRSSVGWAAELRPRVGGAGKSFVWPPRSLGCGVGRIFVLGRGAGKGSADESAVGQSLEQLSFVLGGATDQRTPAGRWGVLRRRRPGVSGAELSTLAVFVTLSLASAARSSARLEDQNYLNAESLRHEQPGSQKTDLELVS

SEQ ID NO: 14339 - protein, 218 aa, Zea mays
  Coding DNA Sequence Number=SeqID_1607
  Gene Ontology: Mol. function=transcription factor activity; Cellular component=intracellular; Biological process=regulation of transcription, DNA-dependent
  Homolog annotation: Hit_ID=A8GE59; Match level="QueryCoverage=94%, HitCoverage=61%, E-value=6e-69, Identity=59%"; Hit description=ROK family protein
  Pfam annotation: Domain name=Crp; Domain location=27-58; Score=15.4; E_value=0.078; Accession=PF00325.11; Description=Bacterial regulatory proteins, crp fa
  Pfam annotation: Domain name=ROK; Domain location=86-217; Score= -10.4; E_value=4.8e-06; Accession=PF00480.10; Description=ROK family
  Pfam module annotation: Pfam domain module=Crp::ROK; Domain location =27-58::86-217
MKTSGTNLEHARAHNRQVIIEAIRLHCELTRAELARLTALTPQTVSNIVAELEQAELLTSRHPRKQGRGQPAIPVTLNPASAFSIGIHLDHQTLLIVLVDLTGEIHFRRLIMVQKPQPDATLARIAGVLAEIKQQTGPRWQKVLGIGVMSGLPVTLENDATVAAIGERFRGVARHLNSFIYLYIGTGLGAGIIMDGHVYSGHAHNAGEVGHVVVEPGG

SEQ ID NO: 14340 - protein, 153 aa, Zea mays
  Coding DNA Sequence Number=SeqID_1608
  Gene Ontology: Mol. function=hydroxymethyl-, formyl- and related transferase activity; Cellular component=plasma membrane; Biological process=purine nucleotide biosynthetic process
  Homolog annotation: Hit_ID=A4WBK7; Match level="QueryCoverage=96%, HitCoverage=37%, E-value=1e-54, Identity=72%"; Hit description =Phosphoribosylglycinamide formyltransferase 2
  Pfam annotation: Domain name=ATP-grasp; Domain location=44-152; Score= 42.0; E_value=3.1e-10; Accession=PF02222.12; Description=ATP-grasp domain
LIAQEQPHFVVPEIEAIATEKLLELEAQGQKVVPTARAARLTMNREGIRRLAAEELALPTSTYQFADSKARFVAAAHEIGFPCIVKPVMSSSGKGQSFIREASQLDHAWDYAQQGGRAGAGRVIVEGVVKFDFEITLLTISAVDGTHFARHCP

SEQ ID NO: 14341 - protein, 103 aa, Zea mays
  Coding DNA Sequence Number=SeqID_1609
  Gene Ontology: Mol. function=nicotinate-nucleotide diphosphorylase (carboxylating) activity; Cellular component=chloroplast; Biological process=pyridine nucleotide biosynthetic process
  Homolog annotation: Hit_ID=A3C1B7; Match level="QueryCoverage=80%, HitCoverage=21%, E-value=4e-27, Identity=77%"; Hit description =Putative uncharacterized protein
  Pfam annotation: Domain name=QRPTase_C; Domain location=32-103; Score= -77.5; E_value=0.032; Accession=PF01729.9; Description=Quinolinate phosphoribosyl transferase, C-t
NHFPPIYVLRVCRSIIIDERVVLNFMQRMCGIATLTKAMSDAARPACILETRKTAPGLRLIDKWPVSIHFFIPRIAILFDMVMIKDNHISVAGGIAAMRSIPA

SEQ ID NO: 14342 - protein, 201 aa, Zea mays
  misc_feature (1)..(73): Xaa can be any naturally occurring amino acid
  Coding DNA Sequence Number=SeqID_1610
  Gene Ontology: Mol. function=metal ion binding; Cellular component =nucleus; Biological process=regulation of transcription, DNA -dependent
  Homolog annotation: Hit_ID=Q0JGI1; Match level="QueryCoverage=58%, HitCoverage=31%, E-value=2e-16, Identity=47%"; Hit description =Squamosa promoter-binding-like protein 2
XXXXXXXXXXXXXXXXXXXXXXXXXXXXXXXXXXXXXXXXXXXXXXXXXXXXXXXXXXXXXXXXXXXXXXXXXSVVKTEADVFQDQYYPAVHLNGAGGGAIGSHFHGKERKHFPFLTSHSNGGGGGDVATAAALGCQPFTITTTAASESDSKQSNGNCALSLLSDNPTSAQTVMIPTTAQSLAAVMQHGGRLPGTIGPSRR

SEQ ID NO: 14343 - protein, 130 aa, Zea mays
  Coding DNA Sequence Number=SeqID_1611
  Gene Ontology: Mol. function=nucleoside-triphosphatase activity; Cellular component=intracellular; Biological process=regulation of transcription, DNA-dependent
  Homolog annotation: Hit_ID=A7FHW0; Match level="QueryCoverage=100%, HitCoverage=23%, E-value=2e-51, Identity=75%"; Hit description=Sigma- 54 dependent transcriptional regulator
  Pfam annotation: Domain name=Sigma54_activat; Domain location=28-130; Score=29.3; E_value=4.3e-18; Accession=PF00158.16; Description=Sigma -54 interaction domain
RYWFRLRAPQRSHVSVPDSRTHDLPRVLGADGAKMLRLLDAGVSLCIYGETGSGKEYVSRALHQQSRWRTGKFVAINCAAIPEALIESELFGYQPGAFTGASKNGYIGKIREADGGVLFLDEIGDMPLTL

SEQ ID NO: 14344 - protein, 79 aa, Zea mays
  Coding DNA Sequence Number=SeqID_1612
MVIVTETKQQRPFSTGRNLAKLALHRPCRSGLHCRLPQAPVPPPPLARDWICGHRPDIMEISERPSGGPAWVVAYPQTA

SEQ ID NO: 14345 - protein, 144 aa, Zea mays
  Coding DNA Sequence Number=SeqID_1614
  Gene Ontology: Mol. function=cobalamin transporter activity; Cellular component=integral to membrane; Biological process=cobalamin transport
  Homolog annotation: Hit_ID=A8GDR2; Match level="QueryCoverage=84%, HitCoverage=36%, E-value=3e-15, Identity=40%"; Hit description =Vitamin B12 import system permease protein btuC
  Pfam annotation: Domain name=FecCD; Domain location=1-124; Score= -186.8; E_value=0.0065; Accession=PF01032.9; Description=FecCD transport family
VTLALLASARTLNLLAFGEVLARQLGLPLLLWRHLLVLAIGWLVGVSVAMAGSIGFVGLGIPHLVGLNGLNDYWYLLPAPALAGPAVLLAADHLARLVLTLAQLPNGVGPATVGGPLVILVIGKFLGQLRVAPVQPPPGMANNL

SEQ ID NO: 14346 - protein, 186 aa, Zea mays
  misc_feature (180)..(180): Xaa can be any naturally occurring amino acid
  Coding DNA Sequence Number=SeqID_1615
QRRLRRRGEVASRPIPPPPSPVCSPPSLDSHECWAKNPCAIPVLFSRPESTLCCSRPAMASAVERRREEHARRSRSPARGRERRGTPPRRRSSPERRKGSPARARSPAAKSSASHRDRERSPPREKVKEPVRSPESPAKVSLLDKKREIRLREKQAKKARQSAQTEARILHLEFHVNFLXCIGLLL

SEQ ID NO: 14347 - protein, 169 aa, Zea mays
  misc_feature (3)..(3): Xaa can be any naturally occurring amino acid
  misc_feature (9)..(9): Xaa can be any naturally occurring amino acid
  Coding DNA Sequence Number=SeqID_1616
  Gene Ontology: Mol. function=1-acylglycerol-3-phosphate O -acyltransferase activity; Cellular component=membrane; Biological process=phospholipid biosynthetic process
  Homolog annotation: Hit_ID=A6TE11; Match level="QueryCoverage=42%, HitCoverage=32%, E-value=2e-20, Identity=71%"; Hit description=1 -acyl-sn-glycerol-3-phosphate acyltransferase
FKXGAFHAXVAAGVPIIRWWFSNTHGKIKLNRWDNGLVIVEMLPPVDTTQFETTSVRKLATHCRELMSAKLEELNAEVAEREKNGCAFMRTGSRMRIDLTRTHSRAFRALHNTIKNNNMDTASSRHAQKLSAGMALASSVMPYAARAAAPLGDVPLPVPPLIESRRGQP

SEQ ID NO: 14348 - protein, 133 aa, Zea mays
  Coding DNA Sequence Number=SeqID_1617
  Homolog annotation: Hit_ID=Q53KW8; Match level="QueryCoverage=100%, HitCoverage=18%, E-value=5e-25, Identity=52%"; Hit description =Expressed protein
MRRRVRYIGRHRDEAPKEASVDGYDTESSVREVQQPPATQEVKRSERNCKRKREAEASSKDNNGDEGKKNNKVQGASKKISKKAKKRTVESKDGDPRHGKDRWSAERYAAAEKSLLNIMRSRDARFGAPVMRQ

SEQ ID NO: 14349 - protein, 75 aa, Zea mays
  misc_feature (22)..(22): Xaa can be any naturally occurring amino acid
  Coding DNA Sequence Number=SeqID_1618
  Gene Ontology: Mol. function=transferase activity, transferring glycosyl groups; Cellular component=cytoplasm; Biological process =nucleoside metabolic process
  Homolog annotation: Hit_ID=Q6K5Y7; Match level="QueryCoverage=76%, HitCoverage=23%, E-value=4e-13, Identity=71%"; Hit description =Putative adenine phosphoribosyltransferase form 2
DCLEMQSEPIDRLGERVLITDXLVATGGRFCAAIRLPERAEAPVVECACLIGQPKFKVPLLNSQLICPAHGAHRC

SEQ ID NO: 14350 - protein, 181 aa, Zea mays
  Coding DNA Sequence Number=SeqID_1619
  Gene Ontology: Mol. function=protein histidine kinase activity; Cellular component=integral to membrane; Biological process=two -component signal transduction system (phosphorelay)
  Homolog annotation: Hit_ID=A7MPB3; Match level="QueryCoverage=98%, HitCoverage=20%, E-value=1e-39, Identity=43%"; Hit description =Putative uncharacterized protein
  Pfam annotation: Domain name=HATPase_c; Domain location=39-151; Score= 40.6; E_value=5.7e-09; Accession=PF02518.16; Description=Histidine kinase-, DNA gyrase B-, and HSP90-like ATPase
ACLQDLFDEIALESLPLLRRKGLTLVVNNQLANDEMRFGDRRALRKVLTTLMHYALTTTQWGKISLDIKASDSKANSVLFHLVDTGSGLTGDELANVDFPYLGETTQDRYGQASGMAFFLCKQLCKQMGGQLEIIAKPDIGTRYNIHLPLALEQQSEQEEKLLECVTALVDIAVEDVHKIV

SEQ ID NO: 14351 - protein, 73 aa, Zea mays
  misc_feature (45)..(45): Xaa can be any naturally occurring amino acid
  misc_feature (58)..(58): Xaa can be any naturally occurring amino acid
  Coding DNA Sequence Number=SeqID_1620
  Gene Ontology: Mol. function=NADH dehydrogenase (ubiquinone) activity; Cellular component=mitochondrial respiratory chain; Biological process=ATP synthesis coupled electron transport
  Homolog annotation: Hit_ID=Q3EC49; Match level="QueryCoverage=98%, HitCoverage=33%, E-value=3e-13, Identity=52%"; Hit description =Uncharacterized protein At2g07689.1
TRDAFAILPGLQRTHVKYRPELNALDKTNPILGMTLTITIGLVHXIPPVARECNKIYXIYAALGCGAYLPTPE

SEQ ID NO: 14352 - protein, 138 aa, Zea mays
  Coding DNA Sequence Number=SeqID_1621
  Homolog annotation: Hit_ID=A2W305; Match level="QueryCoverage=100%, HitCoverage=23%, E-value=8e-66, Identity=89%"; Hit description =Phosphatidylserine/phosphatidylglycerophosphate/ cardiolipin synthase
QVLDTEAGTCDVVLPAHIVDGIGTWFNRAVVSSQAFAKQVAALGLAPDAAPNADQALKLRTWLANDMEQVFAEMLDPASRAVSAVYHLTDTLWALPAFDAFGRKHGAASLAIVYDAHATARKGKPPLPSPNQPAVDAL

SEQ ID NO: 14353 - protein, 67 aa, Zea mays
  Coding DNA Sequence Number=SeqID_1622
  Gene Ontology: Mol. function=rhamnulokinase activity; Biological process=carbohydrate metabolic process
  Homolog annotation: Hit_ID=A6TGA8; Match level="QueryCoverage=97%, HitCoverage=13%, E-value=4e-14, Identity=58%"; Hit description =Rhamnulokinase
MSLRNIVAIDLGASSGRVMLASWQADRKQLSLREVRRFANPRVQRGDYDCWDLDRLEQEIRAGLQAC

SEQ ID NO: 14354 - protein, 118 aa, Zea mays
  Coding DNA Sequence Number=SeqID_1623
  Gene Ontology: Mol. function=structural constituent of ribosome; Cellular component=intracellular; Biological process=translation
  Homolog annotation: Hit_ID=Q2GPX8; Match level="QueryCoverage=85%, HitCoverage=84%, E-value=3e-43, Identity=84%"; Hit description=40S ribosomal protein S26
  Pfam annotation: Domain name=Ribosomal_S26e; Domain location=1-114; Score=251.2; E_value=2.2e-72; Accession=PF01283.9; Description =Ribosomal protein S26e
MVKKRKNNGRNKKGRGHTKPIRCSNCSRCTPKDKAIKRFTIRNMVESAAIRDISDASVFAEYTVPKMYLKLQYCVSCAIHGKIVRVRSREGRRNRAPPPRVRYNKDGKKITPTVAPKV

SEQ ID NO: 14355 - protein, 227 aa, Zea mays
  Coding DNA Sequence Number=SeqID_1624
  Gene Ontology: Mol. function=phospholipase D activity; Cellular component=membrane; Biological process=phosphatidylcholine metabolic process
  Homolog annotation: Hit_ID=Q43270; Match level="QueryCoverage=90%, HitCoverage=25%, E-value=1e-96, Identity=84%"; Hit description =Phospholipase D alpha 1
  Pfam annotation: Domain name=C2; Domain location=10-114; Score=39.5; E_value=1.2e-08; Accession=PF00168.20; Description=C2 domain
MAQILLHGTLHATIFEAESLSNPHRATGGAPKFIRKLVEGIEDTVGIGKGTTKIYATVDLEKARVGRTRMVSNEPVNPRWYESFHIYCAHMAADVVFTVKIDNPIGASLIGRAYLPVEDILGGDEIDKWLEICDEKREPIGDSKIHVKLQYFDVGKDRNWARGVRSTTYPGDPYTFFSQVPPPKCTLHCVHPVPIEFGPRLLFFDVLTMHGAPFFLKKKKKVQKKKN

SEQ ID NO: 14356 - protein, 188 aa, Zea mays
  Coding DNA Sequence Number=SeqID_1625
  Pfam annotation: Domain name=FAR1; Domain location=71-186; Score= -28.3; E_value=0.062; Accession=PF03101.5; Description=FAR1 family
  Subcellular localization annotation: CTP_CleavageSite=48; ConfidenceScore=5.58e-01
AESAQTRPQSDPHGASPSAGPPPHPTLAGRRSQGKRTPPHTRSPLPPPIATKSPRPPRPSGPPLRTPRLPRYFKSRSNPSNYLPRMVDRAAARAQAVSSDPPPPALLEPDPRLSQPGAADGQEVASAGATAGPPSLPQASDAEEDALASPAGQPGERCRAMMEVVAKDGAWKVTKLVVEHCHELQVLL

SEQ ID NO: 14357 - protein, 110 aa, Zea mays
  Coding DNA Sequence Number=SeqID_1627
  Gene Ontology: Mol. function=transporter activity; Biological process= transport
  Homolog annotation: Hit_ID=A8GFX7; Match level="QueryCoverage=100%, HitCoverage=21%, E-value=3e-37, Identity=67%"; Hit description=4 -phytase precursor
QGSFAKGGVKVEVQPGLSSEVSTRVKAHQYEATLNAWGADYFDPNTNAASFAYNPEDGSKTIAYRSDWHIPELSKQTLAATAEADSNKRVALYQAMQREVLKNSPYVIGL

SEQ ID NO: 14358 - protein, 112 aa, Zea mays
  Coding DNA Sequence Number=SeqID_1628
GQGQGDAGGRQQDGDTDHPLPEPTQTRGPGGGRGRAPRPRHTSPGANGQAPATPQNQGQRDHRNAHPQRARGRHDHRTDKRGAGGGTARSKPPQDAPTPTAGAEGTTSTGHT

SEQ ID NO: 14359 - protein, 41 aa, Zea mays
  Coding DNA Sequence Number=SeqID_1630
VGHAIIGLPYLFNLCFAAWIQRGPPLNALEVAGAIRIFLHT

SEQ ID NO: 14360 - protein, 65 aa, Zea mays
  misc_feature (59)..(59): Xaa can be any naturally occurring amino acid
  Coding DNA Sequence Number=SeqID_1632
  Gene Ontology: Mol. function=nucleic acid binding; Biological process= DNA integration
  Homolog annotation: Hit_ID=Q8W0X6; Match level="QueryCoverage=96%, HitCoverage=23%, E-value=3e-18, Identity=69%"; Hit description =Putative prpol
PHDTDYFVAKDVIEGIRLQAMENINKYYVKTIKWRDKPGHLVLRRVANPDIVCKLQLKXEGPFLV

SEQ ID NO: 14361 - protein, 188 aa, Zea mays
  Coding DNA Sequence Number=SeqID_1633
  Gene Ontology: Mol. function=serine-type endopeptidase activity; Cellular component=intracellular; Biological process=protein modification process
  Homolog annotation: Hit_ID=P93501; Match level="QueryCoverage=96%, HitCoverage=87%, E-value=5e-36, Identity=48%"; Hit description =Ubiquitin-like protein
  Pfam annotation: Domain name=ubiquitin; Domain location=118-186; Score=28.2; E_value=3e-05; Accession=PF00240.13; Description =Ubiquitin family
  Pfam annotation: Domain name=ubiquitin; Domain location=39-107; Score= 84.5; E_value=3.4e-22; Accession=PF00240.13; Description=Ubiquitin family
  Pfam module annotation: Pfam domain module=ubiquitin::ubiquitin; Domain location=118-186::39-107
QYLVYDGVQLEDDRTLIDYGMEHKSVLDLKEKMQIFIVETLAGTTITLEVESSETIDNIKERIKESEGFPKGQQCLIFDNKQLEDNSTLADNNISEGSTLLLVLHRLLGGTMRISIIISPGERITLEVKRSDTIDNVKLKIYEKTHIQPIQQRILCEWSMNMEGCKTLADYDIEDGDTLDMIPCMCGC

SEQ ID NO: 14362 - protein, 58 aa, Zea mays
  Coding DNA Sequence Number=SeqID_1634
  Homolog annotation: Hit_ID=Q6YZD9; Match level="QueryCoverage=100%, HitCoverage=9%, E-value=2e-18, Identity=70%"; Hit description =Nodulin-related protein-like
FAVLLIREHAYPRHIALVIAQILMAVGHFLFAMAWPRTMYIGTFLVGLGYGAHWAIVP

SEQ ID NO: 14363 - protein, 87 aa, Zea mays
  misc_feature (56)..(56): Xaa can be any naturally occurring amino acid
  Coding DNA Sequence Number=SeqID_1635
  Gene Ontology: Mol. function=nucleoside-triphosphatase activity; Cellular component=intracellular; Biological process=regulation of transcription, DNA-dependent
  Homolog annotation: Hit_ID=A0TCV3; Match level="QueryCoverage=95%, HitCoverage=14%, E-value=7e-25, Identity=67%"; Hit description =Sigma54 specific transcriptional regulator, Fis family
  Pfam annotation: Domain name=Sigma54_activat; Domain location=2-87; Score=-139.8; E_value=2.4e-05; Accession=PF00158.16; Description =Sigma-54 interaction domain
VIPTERIAQLLHEKHSRYRQVQLEPANCAAIPDGLIESLLLGHTKGTITGTDCAHXGYAQQAAVGTLGLDKVGELTLYQQVKLVRAL

SEQ ID NO: 14364 - protein, 95 aa, Zea mays
  misc_feature (22)..(22): Xaa can be any naturally occurring amino acid
  misc_feature (37)..(37): Xaa can be any naturally occurring amino acid
  Coding DNA Sequence Number=SeqID_1636
  Gene Ontology: Cellular component=integral to membrane; Biological process=vesicle-mediated transport
  Homolog annotation: Hit_ID=A2XAP9; Match level="QueryCoverage=81%, HitCoverage=28%, E-value=1e-11, Identity=52%"; Hit description =Putative uncharacterized protein
VNIKYGMVALGAVVLPQHNGTXAAAAKAGTVARQVLXRILAGDDHDCYVLYTQDLHVFLVKCTDGLVALCMADYAAGRKHQCTFWSSSIVATNLQ

SEQ ID NO: 14365 - protein, 92 aa, Zea mays
  Coding DNA Sequence Number=SeqID_1637
  Subcellular localization annotation: CTP_CleavageSite=81; ConfidenceScore=5.12e-01
KANCARYAVAKARLGRGVCQNARRRRLLRTPGAGDRSQQSAGGHRRLRDNLLMVNGTSRGKLTRLQSYEQLAPTAAVTPVRARLRVEGAALT

SEQ ID NO: 14366 - protein, 217 aa, Zea mays
  Coding DNA Sequence Number=SeqID_1639
  Gene Ontology: Mol. function=oxidoreductase activity; Cellular component=cytoplasm; Biological process=metabolic process
  Homolog annotation: Hit_ID=Q1LI34; Match level="QueryCoverage=100%, HitCoverage=82%, E-value=1e-101, Identity=83%"; Hit description =Short-chain dehydrogenase/reductase SDR precursor
  Pfam annotation: Domain name=adh_short; Domain location=1-126; Score=- 3.4; E_value=2.1e-05; Accession=PF00106.15; Description=short chain dehydrogenase
RVAAELGEKAIFIATDITKDDQVSAAVAKVVSRFGGVDFLVNLACTYLDDGFKSPRADWQTALDVNVVSGIMLAQKVHPEMKARGGGAIVNFTSISAKVAQTGRWLYPVSKAAILQLTRSMAMDLAPDRIRVNAVSPGWIWCRLMDEMSGGNRAGIDELATPFHLLGRVGDPDEVAQVVLFLCSDNASFVTGADYAVDGGYSAMGPEQNVPPYGKQA

SEQ ID NO: 14367 - protein, 72 aa, Zea mays
  Coding DNA Sequence Number=SeqID_1640
  Gene Ontology: Mol. function=nucleoside-triphosphatase activity
  Homolog annotation: Hit_ID=A7PTW8; Match level="QueryCoverage=100%, HitCoverage=8%, E-value=5e-10, Identity=49%"; Hit description =Chromosome chr7 scaffold_31, whole genome shotgun sequence
DVKRILLDTILLPLTYNRLISSKLRKQHGIAKMNVRWTSRLYSRKPEYSLNFCSVKGPEPINIYVAETEKNV

SEQ ID NO: 14368 - protein, 96 aa, Zea mays
  Coding DNA Sequence Number=SeqID_1641
  Gene Ontology: Mol. function=zinc ion binding; Cellular component =intracellular
  Homolog annotation: Hit_ID=O82114; Match level="QueryCoverage=94%, HitCoverage=29%, E-value=2e-16, Identity=53%"; Hit description=Zinc finger protein
  Pfam annotation: Domain name=zf-B_box; Domain location=2-40; Score =15.7; E_value=0.0029; Accession=PF00643.14; Description=B-box zinc finger
LQEWWGLVFCMEDRAILCPDCDDPIHSAYDLTAKHTRFLLVGAKLSATLVDQAPPSPDDDDDDDGLTTGLNEELASALVTRVGWVVAVPSGNAEGA

SEQ ID NO: 14369 - protein, 143 aa, Zea mays
  Coding DNA Sequence Number=SeqID_1642
  Subcellular localization annotation: CTP_CleavageSite=65; ConfidenceScore=5.83e-01
AINAPSRPPLPLLRDPPPQSVPLSSLPPNAYPSRQFSPPPRPSSSSSCTAPPPLNQRRGRWPRARARHLGARFTTHPRLPCLLLLHQLTLLQMWIPSSSPRSRPWCYCSAPSQISLYEHRRRIRRLLLHPCSEASSSSPLAAP

SEQ ID NO: 14370 - protein, 86 aa, Zea mays
  misc_feature (19)..(19): Xaa can be any naturally occurring amino acid
  Coding DNA Sequence Number=SeqID_1643
  Gene Ontology: Mol. function=structural constituent of ribosome; Cellular component=ribonucleoprotein complex; Biological process =translation
  Homolog annotation: Hit_ID=A2YY30; Match level="QueryCoverage=89%, HitCoverage=53%, E-value=2e-25, Identity=72%"; Hit description =Putative uncharacterized protein
CSKLQSAVLKDAISQIVGXTKKKNKKLTETVELQISLKNYDPQKDKRFSGSVKLPHIPRTKMNVCMLGDAHHIEEVSKELMMCFKM

SEQ ID NO: 14371 - protein, 80 aa, Zea mays
  Coding DNA Sequence Number=SeqID_1644
  Homolog annotation: Hit_ID=O21999; Match level="QueryCoverage=76%, HitCoverage=44%, E-value=8e-07, Identity=47%"; Hit description=LacZ -alpha
EFFMCHAWENLDACQIIRLAAHTPFATWRLSDEACTERSSQHKHILSGEGRLMHIHLLTHLGGMSHRFVGTLDTLCYYAG

SEQ ID NO: 14372 - protein, 108 aa, Zea mays
  misc_feature (13)..(13): Xaa can be any naturally occurring amino acid
  misc_feature (24)..(24): Xaa can be any naturally occurring amino acid
  misc_feature (41)..(41): Xaa can be any naturally occurring amino acid
  misc_feature (56)..(56): Xaa can be any naturally occurring amino acid
  misc_feature (70)..(70): Xaa can be any naturally occurring amino acid
  misc_feature (80)..(80): Xaa can be any naturally occurring amino acid
  Coding DNA Sequence Number=SeqID_1645
  Gene Ontology: Mol. function=electron transporter, transferring electrons within the cyclic electron transport pathway of photosynthesis activity; Cellular component=plasma membrane light -harvesting complex; Biological ...
  Gene Ontology: Cellular component=process=photosynthesis, light reaction
  Homolog annotation: Hit_ID=Q09WH2; Match level="QueryCoverage=85%, HitCoverage=25%, E-value=4e-22, Identity=64%"; Hit description =Photosystem Q(B) protein
FIADLPVDIDGIXEPVYGSPLYGXNNMISGVSIHTSASIEXQFYSLWRAASVHEGXYKGGAYEHNVYHFXLRVACHMGQXRWELSNRLGMLPSPADAIKLGSGDLQRD

SEQ ID NO: 14373 - protein, 74 aa, Zea mays
  Coding DNA Sequence Number=SeqID_1646
LFDMSFKFHVDNCLILPGIPKLPPVTTQDPLWSVEYELLTVSTLALPLLMLFDELVLFAKLVGDTMHSTCALAN

SEQ ID NO: 14374 - protein, 123 aa, Zea mays
  Coding DNA Sequence Number=SeqID_1648
  Gene Ontology: Mol. function=peptidase activity; Biological process =proteolysis
  Homolog annotation: Hit_ID=P45527; Match level="QueryCoverage=99%, HitCoverage=36%, E-value=3e-48, Identity=74%"; Hit description =Uncharacterized protease yhbU precursor
MELLCPAGNLPALKSAVEHGADAVYVGLKDDTNARHFAGLNFTDKKLAEAARFLHQHRRKLHVAINTFAHPDGLNRWQSAIDVAAQNGADALILADIATLEYAASRYPQVERHLSVQASATNL

SEQ ID NO: 14375 - protein, 106 aa, Zea mays
  Coding DNA Sequence Number=SeqID_1649
  Gene Ontology: Mol. function=2 iron, 2 sulfur cluster binding; Cellular component=chloroplast; Biological process=electron transport
  Homolog annotation: Hit_ID=P27788; Match level="QueryCoverage=92%, HitCoverage=64%, E-value=3e-25, Identity=63%"; Hit description =Ferredoxin-3, chloroplast precursor
  Subcellular localization annotation: CTP_CleavageSite=49; ConfidenceScore=5.46e-01
TSLTCCTLPGHVRTPQACHSAANSPFALSFFSHVTKVARLNTCKTLDVSAVAVHKVNLVLPDCEEHNANAPNYAYLLDASETVGVELPYSKPAGACFTDTDTRTYA

SEQ ID NO: 14376 - protein, 130 aa, Zea mays
  Coding DNA Sequence Number=SeqID_1650
MPVESEREVAELRAGALRGVAPSRNTEGERTRTTSTGEQTATPRPEEVDRPRMRREATKAPPAPKEHRTTGRARERKHNPEEKDHPGRCRRRHPKTARGRTPPQTGALRATGPTLSATIWAPTHGRNRKK

SEQ ID NO: 14377 - protein, 74 aa, Zea mays
  Coding DNA Sequence Number=SeqID_1652
  Homolog annotation: Hit_ID=A7BPF2; Match level="QueryCoverage=71%, HitCoverage=72%, E-value=1e-08, Identity=56%"; Hit description=LacZ alpha peptide
  Subcellular localization annotation: CTP_CleavageSite=57; ConfidenceScore=5.26e-01
WTAPCYPNNITLLVWRLHPCVTSTLARALPPPTVRFMPSFVGTYAGCPSKALDRGLPCRERFNALLYLNPKRLY

SEQ ID NO: 14378 - protein, 77 aa, Zea mays
  Coding DNA Sequence Number=SeqID_1653
PPGSAAGRRACPRATGRAATGETGQPGCRRVGVDTAPGGLPLANARRFPGVVPCGSDRCQPKDAGSRPDMPECPVHL

SEQ ID NO: 14379 - protein, 265 aa, Zea mays
  misc_feature (259)..(259): Xaa can be any naturally occurring amino acid
  Coding DNA Sequence Number=SeqID_1655
  Gene Ontology: Mol. function=metal ion transmembrane transporter activity; Cellular component=membrane; Biological process=metal ion transport
  Homolog annotation: Hit_ID=A8GEW9; Match level="QueryCoverage=95%, HitCoverage=73%, E-value=1e-67, Identity=51%"; Hit description=Mg2 transporter protein CorA family protein
MLQPVLPLASLPDFNNEVAGLIHGYLFNPDAPPQRLNAREAAQLARHTLPDGCFLWLHINLNHARAERWVQDHFRVDDDFFDEIHSASPRTRLAQQNDALLAVLNDVTFSKEERSTQNATLWIWCRPQVMVSARYRPVGMIERMHQQIDRLCFSAPDAMLLWLLGEQEAQLEQVVRRSSQAVDAIEERLLSAAIKANRSELGHLRRMLLRVQRLLAPEPAALFRLLNRPPNWLNREPLNELRIFTEEFSVALNDLASLXERIRLL

SEQ ID NO: 14380 - protein, 184 aa, Zea mays
  Coding DNA Sequence Number=SeqID_1656
  Gene Ontology: Mol. function=transcription elongation regulator activity; Cellular component=nucleus; Biological process=nucleobase, nucleoside, nucleotide and nucleic acid metabolic process
  Homolog annotation: Hit_ID=A7PTE3; Match level="QueryCoverage=98%, HitCoverage=11%, E-value=1e-73, Identity=72%"; Hit description =Chromosome chr8 scaffold_29, whole genome shotgun sequence
KVIFKIVEDHPRDVNAQMENFSIVYGDESVPRLYENSRISSDQLPGQSGIVKRAVALGRYLQNPLAMIATLCGPGKEILSWKLHALEQFLTPDEKYEIVEQVMVDATNQIGFDVNLAASHEWHFSTLQFIAGLGPRKASALQKDLVREGSIFSRKELVKPLGRKVFMNASGFLRVRRSGAAAGM

SEQ ID NO: 14381 - protein, 186 aa, Zea mays
  Coding DNA Sequence Number=SeqID_1657
  Gene Ontology: Mol. function=ATP-dependent helicase activity; Biological process=DNA recombination
  Homolog annotation: Hit_ID=Q2H2C3; Match level="QueryCoverage=54%, HitCoverage=17%, E-value=2e-10, Identity=37%"; Hit description =Putative uncharacterized protein
LIARIHPVVSVYKLKGNQLGYSGNVINFPQEVNELATTLPHRVADLDCLIAVRSQGAGGYIDFQVRAGRVRAALLYLKTHHRYYSDVNISEENLAELPEDGCVFNQVPGFQDPHPVADTVPDVDDPTALHLPHLASPGGVGADAVRPAPPPEGPAADPEVHEDVPDIHVTGVPMLQPQPHGDQVRA

SEQ ID NO: 14382 - protein, 358 aa, Zea mays
  Coding DNA Sequence Number=SeqID_1658
  Homolog annotation: Hit_ID=A3C6X2; Match level="QueryCoverage=50%, HitCoverage=23%, E-value=6e-67, Identity=74%"; Hit description =Putative uncharacterized protein
MAVDALAVQAEMADEDAPFEVSAAAGDTGVFDSLVPSDEWSESGASDGRVTLVAAIQVRDPSRRYEAVGAPMVAVVQSARLLGAAGYSAGRFKVRSLHVGGVQMRCTPSGGGGSARWGAERQKLTAMQWMLAHGPARAGKRAATTTAQAGARVQRPDVVWSLSSRVLAGMWLKTVRNPDVRIGGGGGGTSCCAPVSPPPPVHALRALLQDLSDLHEYAEEIARLPNNWDALRLPRHRRLVEGELEGSVALLDLCGAARDGLADARDQVRDLRLLLRRHRAASHGGPRRGGGAAAAAASARAEACAAGSLKKVARAIRRESCYRRSAVGNTRDDDLSRSGAPRPLAMLAEVRELTVCAL

SEQ ID NO: 14383 - protein, 78 aa, Zea mays
  misc_feature (2)..(6): Xaa can be any naturally occurring amino acid
  misc_feature (30)..(30): Xaa can be any naturally occurring amino acid
  Coding DNA Sequence Number=SeqID_1659
  Gene Ontology: Mol. function=tetracycline:hydrogen antiporter activity; Cellular component=integral to membrane; Biological process=response to antibiotic
  Homolog annotation: Hit_ID=O21999; Match level="QueryCoverage=83%, HitCoverage=43%, E-value=5e-09, Identity=47%"; Hit description=LacZ -alpha
LXXXXXENRGVSQITRLGAQTPFASWRDTXEDRTYRPYYQLRTMNGQWRQRRGFLLTHLCGIYYRGLSALFTIGKKCP

SEQ ID NO: 14384 - protein, 121 aa, Zea mays
  Coding DNA Sequence Number=SeqID_1660
  Subcellular localization annotation: CTP_CleavageSite=73; ConfidenceScore=5.23e-01
MRSGSRKTTRDPSNRRQAKARGTSAPLGLPWVPSARPLATAVEYALSSPVESAALLYASPLPPPPQRLVPGGRAGSRGGSTLYQYHPACRPAGLWCVAWHVLLARTSRFAVESCEGTPDAR

SEQ ID NO: 14385 - protein, 61 aa, Zea mays
  Coding DNA Sequence Number=SeqID_1662
  Gene Ontology: Mol. function=nucleotide binding; Cellular component =cytoskeleton; Biological process=cell division
  Homolog annotation: Hit_ID=Q8W315; Match level="QueryCoverage=68%, HitCoverage=6%, E-value=5e-15, Identity=95%"; Hit description =Putative GTP-binding protein
  Pfam annotation: Domain name=GED; Domain location=1-58; Score=-17.2; E_value=0.084; Accession=PF02212.8; Description=Dynamin GTPase effector domain
IAWTLIYGYISLFCFAFIIQKKQLSAMLDEDPALMEKRDALVKRLELYKSARNEIDSVAWK

SEQ ID NO: 14386 - protein, 84 aa, Zea mays
  misc_feature (49)..(49): Xaa can be any naturally occurring amino acid
  Coding DNA Sequence Number=SeqID_1663
  Gene Ontology: Mol. function=RNA binding
  Homolog annotation: Hit_ID=Q42361; Match level="QueryCoverage=92%, HitCoverage=34%, E-value=4e-15, Identity=58%"; Hit description =Transcribed sequence 1087 protein
MFSNLYRSYIIASHAGIAISTQRTIYVDWHDRLVTVTASYHKHMNARIXIYKKLYEDDLSRVNLSSPFRYAGLTFPSEPGVADG

SEQ ID NO: 14387 - protein, 103 aa, Zea mays
  Coding DNA Sequence Number=SeqID_1664
  Gene Ontology: Mol. function=transporter activity; Cellular component= membrane; Biological process=sodium ion transport
  Homolog annotation: Hit_ID=A7FEL7; Match level="QueryCoverage=68%, HitCoverage=15%, E-value=2e-14, Identity=52%"; Hit description =Transporter, divalent anion:Na+ symporter (DASS) family
TPAVGPMPSNKRGCIILALDIILLIALLKFLAYSEKANAGLALMAFVGVVWLTETIHVTITALGIPILAVGMGLMNTGDALKSFANPNIFLFFGGFALATALH

SEQ ID NO: 14388 - protein, 108 aa, Zea mays
  Coding DNA Sequence Number=SeqID_1665
YSVKCGLVHSALVSTLQHAYPLQVALSFPPLKQGLYLLIPSMPPCSGYSRSKRHRSQFYQAAGIIGAFSSHIYPQTWNSKKRIQRCPWFGHSRFARPDCAAGSGRQVS

SEQ ID NO: 14389 - protein, 118 aa, Zea mays
  Coding DNA Sequence Number=SeqID_1666
  Gene Ontology: Mol. function=isoleucine-tRNA ligase activity; Cellular component=cytoplasm; Biological process=tRNA aminoacylation for protein translation
  Homolog annotation: Hit_ID=Q62HL4; Match level="QueryCoverage=100%, HitCoverage=12%, E-value=9e-54, Identity=87%"; Hit description =Isoleucyl-tRNA synthetase 1
  Pfam annotation: Domain name=Anticodon_1; Domain location=1-118; Score=60.9; E_value=4.3e-15; Accession=PF08264.3; Description =Anticodon-binding domain
QTYCSEDLGGFYLDVLKDRLYTSAPDSRARRSAQTALYHLTHGLLRVLAPFLSFTAEEAWKVFQPASDTVFTETYYAYPEVAGSAALIDKWALLREVRGNVTKALEEARTANRIGSSL

SEQ ID NO: 14390 - protein, 230 aa, Zea mays
  Coding DNA Sequence Number=SeqID_1667
  Gene Ontology: Mol. function=transcription factor activity; Biological process=regulation of transcription, DNA-dependent
  Homolog annotation: Hit_ID=A6TCQ1; Match level="QueryCoverage=99%, HitCoverage=79%, E-value=1e-104, Identity=78%"; Hit description =Putative transcriptional regulator
  Pfam annotation: Domain name=LysR_substrate; Domain location=22-230; Score=168.5; E_value=1.8e-47; Accession=PF03466.10; Description=LysR substrate binding domain
VAQCREILALVEHTEASLVDLNRRPRGRLRVDMPGGIAHFIVMPNLKEFYSRYPDIYLMTGVSDRQVDLVQEGVDCVIRTGELLNSTLVARPLGEFRWITCASPDYLREYGIPQSPEDLSHHRAIHYFSGQSRRTDELRFVKGTETLSVSVSGQAAVNETGLYIKMCLEGFGLAQLAENVVAEHLEKGTLVEVLADWQPPSVPVTLLYPHQRFLSPAVRAFADWIGEIFS

SEQ ID NO: 14391 - protein, 219 aa, Zea mays
  Coding DNA Sequence Number=SeqID_1668
  Gene Ontology: Mol. function=oxidoreductase activity; Cellular component=periplasmic space; Biological process=electron transport
  Homolog annotation: Hit_ID=Q7W8I6; Match level="QueryCoverage=97%, HitCoverage=27%, E-value=4e-80, Identity=64%"; Hit description =Putative biotin sulfoxide reductase
  Pfam annotation: Domain name=Molydop_binding; Domain location=69-190; Score=119.8; E_value=8.1e-33; Accession=PF01568.11; Description =Molydopterin dinucleotide binding domain
QGVIELPQLKDGGRMINAFRADPAAAPLPTPSGKIEIFSATIASFGYENCPGHPVWRAPQQQPDAEHPLWLIANQPATRLHSQLDFGDYSLSGKREGREVCSLHPHDAAARGITDGDIIELYNQRGHVLACARVTESIMPGVVQLPTGAWYDPVDPTALRPLCRHGNPNVLTLDIGTSSLAQGCSGQITVVQLRKYRGELTPVQAFIPPQPVSYSTEII

SEQ ID NO: 14392 - protein, 110 aa, Zea mays
  Coding DNA Sequence Number=SeqID_1669
  Gene Ontology: Mol. function=monooxygenase activity
  Homolog annotation: Hit_ID=Q98CB7; Match level="QueryCoverage=92%, HitCoverage=27%, E-value=4e-31, Identity=65%"; Hit description =Sulfonate monooxygenase
QEIIAKANPDAVKGFQHEVKNAGSASPEGEGNWAKSSFEDLVQYNDGFKTNLIGTPQQIAERIMEQKRAGVDLLLLAFLHFHEEVEFFGREVIPRVRELERQEALNAVTV

SEQ ID NO: 14393 - protein, 127 aa, Zea mays
  Coding DNA Sequence Number=SeqID_1670
  Gene Ontology: Mol. function=phosphoenolpyruvate carboxylase activity; Cellular component=cytoplasm; Biological process=carbon utilization by fixation of carbon dioxide
  Homolog annotation: Hit_ID=Q1IDV2; Match level="QueryCoverage=100%, HitCoverage=14%, E-value=3e-64, Identity=93%"; Hit description =Phosphoenolpyruvate carboxylase
WIFGWTQTRLMLPAWLGWETALNNALARGQGELLAQMREQWPFFRTRIDMLEMVLAKADAQIAEAYDERLVQPHLLPLGAHLRDLLSQSCKVVLGLTGQPVLLAHSPETLEFISLRNTYLDPLHRLQ

SEQ ID NO: 14394 - protein, 67 aa, Zea mays
  Coding DNA Sequence Number=SeqID_1671
WSDLDLTEPRLVAGHDPPHPRMDAVPCTQPLWRARSVPLPAPSLGCLSTARCCLDEVPLHNMNTTFS

SEQ ID NO: 14395 - protein, 150 aa, Zea mays
  Coding DNA Sequence Number=SeqID_1673
  Homolog annotation: Hit_ID=Q6AU53; Match level="QueryCoverage=42%, HitCoverage=10%, E-value=4e-14, Identity=60%"; Hit description =Probable xyloglucan glycosyltransferase 9
  Subcellular localization annotation: CTP_CleavageSite=80; ConfidenceScore=5.53e-01
MGSSAQFSGNRAGAITIRSPRPQQSRAPGLPKNTNKDRVAAAPQGAHRTVGCLASLASVAITLAGAARHWVGVGRTGVVVAAGKSPVVRSRFYTSFINAFLIISLLLWAIEVAMYFNGWDLAASTLALPALCIESLYVSWLRFHARFRTT

SEQ ID NO: 14396 - protein, 218 aa, Zea mays
  Coding DNA Sequence Number=SeqID_1674
  Gene Ontology: Mol. function=transcription factor activity; Cellular component=intracellular; Biological process=regulation of transcription, DNA-dependent
  Homolog annotation: Hit_ID=Q4EUQ8; Match level="QueryCoverage=97%, HitCoverage=61%, E-value=2e-36, Identity=38%"; Hit description =Transcriptional regulator, LacI family
  Pfam annotation: Domain name=LacI; Domain location=5-30; Score=44.5; E_value=3.6e-10; Accession=PF00356.11; Description=Bacterial regulatory proteins, lacI family
MSKNLTIKDIAVLAGVSITTVSRVLNKHAWVSEKTRTRVEQVIAEHQFSPNLMARGMISRQSYTLAVIVSDITNPYFVTLVAQIQQACLAIGYKITLYDTQSANRSPQHDDDESAIFQSIIDSQIDGVIVLGGHSDYAPIPAGYLTLLESLMDKMAVVVVGQPHPAGRWPCVMRDQQHCVGLAVNHLLARGLRDIAFIGGSRKVWVTRERVSHFHATL

SEQ ID NO: 14397 - protein, 190 aa, Zea mays
  Coding DNA Sequence Number=SeqID_1675
  Gene Ontology: Mol. function=transferase activity, transferring glycosyl groups; Cellular component=membrane; Biological process=UDP- glucose metabolic process
  Homolog annotation: Hit_ID=A4WFW4; Match level="QueryCoverage=100%, HitCoverage=25%, E-value=1e-74, Identity=68%"; Hit description =Cellulose synthase, subunit B precursor
PVNLHYRFPSESWIDENNSFLNVTLNGTFLRNLTVNKVGLLESAWHRLGGDARQEQYTLKLEPYLIYGDNQLALYFNIKPKADAPCGVLLNNNIKSRIEEDSWIDLSHTRHFTMLPNLSYFVGASFPFSRLADFSQTTLLLPEAPGDAEIATLLDMAARAGNATGVPLVQNQVLFGLPNGGTNKTRLQAR

SEQ ID NO: 14398 - protein, 160 aa, Zea mays
  Coding DNA Sequence Number=SeqID_1676
  Gene Ontology: Mol. function=RNA binding; Cellular component =ribonucleoprotein complex; Biological process=regulation of translation
  Homolog annotation: Hit_ID=A7XN92; Match level="QueryCoverage=96%, HitCoverage=18%, E-value=1e-78, Identity=95%"; Hit description=CRM family member 3
  Pfam annotation: Domain name=CRS1_YhbY; Domain location=87-158; Score= -6.3; E_value=0.033; Accession=PF01985.11; Description=CRS1  YhbY domain
GTPETANSVRDSNVPLVSNAANEELVVQAPKIKYEDEIDKLLDELGPRYTDWPGSDPLPVDADLLPANMPGYKPPFRVLPYGVRPSLSRRDTTNLRRLARGLPPHFALGRSRQLQGLANAMVKLWEKSSIAKIALKRGVQLTTSERMAEDIKVSTESVSC

SEQ ID NO: 14399 - protein, 124 aa, Zea mays
  misc_feature (53)..(53): Xaa can be any naturally occurring amino acid
  Coding DNA Sequence Number=SeqID_1677
  Gene Ontology: Mol. function=glutathione gamma-glutamylcysteinyltransf erase activity; Biological process=phytochelatin biosynthetic process
  Homolog annotation: Hit_ID=Q8GZS7; Match level="QueryCoverage=82%, HitCoverage=20%, E-value=3e-28, Identity=60%"; Hit description =Phytochelatins synthase
  Pfam annotation: Domain name=DUF1984; Domain location=37-114; Score =104.9; E_value=2.4e-28; Accession=PF09328.1; Description=Domain of unknown function (DUF1984)
YYRLLPHRWPFGQTGSSHCSPMGGYHAGQDMVLIWYVARFKYPPHRVPLQLLXEAMNTTDGLTGLLKGLMLISRKVATPSLLHTVSGRDENWKNMSSFCVEDLPSLLKVSFQCCKSRRISDGGL

SEQ ID NO: 14400 - protein, 197 aa, Zea mays
  Coding DNA Sequence Number=SeqID_1678
EELNSPLEDLLFVSDDNERKNYLRRFEHYLKNQQAFLYFRRNDEARKSGRWKVIGETRVYAMLDPRSAEAQNLLNSRGFKLVLMRQTEEDEYWQLFDPQAHPCFPLSRKIQFLVVLSTPQQKMPSAVMPGTEVGRRVKAKVFQRASQAEFSAAVKARYGACIITGTRLTERHSWPWVEACHIDTQENEEGFLADGSV

SEQ ID NO: 14401 - protein, 74 aa, Zea mays
  misc_feature (28)..(28): Xaa can be any naturally occurring amino acid
  misc_feature (56)..(56): Xaa can be any naturally occurring amino acid
  Coding DNA Sequence Number=SeqID_1680
  Gene Ontology: Mol. function=transferase activity, transferring glycosyl groups; Biological process=sucrose metabolic process
  Homolog annotation: Hit_ID=A2X1Q3; Match level="QueryCoverage=89%, HitCoverage=7%, E-value=7e-14, Identity=60%"; Hit description =Putative uncharacterized protein
DLSEGENREDAGDPSVAYGDCTFFSSLXASAIDTLWILSSTIHGLVRGENIALAHXYETGGQDEYVTAQIRLDQ

SEQ ID NO: 14402 - protein, 158 aa, Zea mays
  misc_feature (45)..(45): Xaa can be any naturally occurring amino acid
  Coding DNA Sequence Number=SeqID_1681
  Gene Ontology: Mol. function=transcription elongation regulator activity; Biological process=regulation of transcription, DNA -dependent
  Homolog annotation: Hit_ID=Q8PLD9; Match level="QueryCoverage=98%, HitCoverage=98%, E-value=5e-48, Identity=63%"; Hit description =Transcription elongation factor greA
  Pfam annotation: Domain name=GreA_GreB; Domain location=80-157; Score= 89.8; E_value=8.7e-24; Accession=PF01272.10; Description=Prokaryotic transcription elongation factor, GreAGreB, C-terminal domain
  Pfam annotation: Domain name=GreA_GreB_N; Domain location=1-74; Score= 96.1; E_value=1.1e-25; Accession=PF03449.6; Description=Prokaryotic transcription elongation factor, GreAGreB, N-terminal domain
  Pfam module annotation: Pfam domain module=GreA_GreB::GreA_GreB_N; Domain location=80-157::1-74
SRAPITKAGSERLRIQLERLKSVERPRIIAAVAEARAHGDLKDNXAEYHAAREQHGFNEGRIAELEAGLSTAEVIDVTRLNAGTKVVFGATVDLEDEDTDAAVTYQIVGDLEAYIKQRLIEVSTPIVRALIGKSEGDSFKFTAPNGVKHYEITGVRYE

SEQ ID NO: 14403 - protein, 106 aa, Zea mays
  Coding DNA Sequence Number=SeqID_1682
RCVVTARAVPASLPCSHHRCEEYTVVGLHGVLFNRLLRLFLNHQSAGFRRLGCVVSSLLFVGHGPRALIFRLAVFFQSKCSRVCSLARDALLLPKLTMPCLLWSLF

SEQ ID NO: 14404 - DNA, 159 bp, Zea mays
  Coding DNA Sequence Number=SeqID_1
acaggacagtgggatctcgttatccattcatgcggtcactaataagatgacgaggcatttggctaccttaagagagtcatgttactcccgcgtttacccgcgcttggttgaatttcttcactttgacattcagagcactaaaagaatcacattgcgtca

SEQ ID NO: 14405 - DNA, 499 bp, Zea mays
  Coding DNA Sequence Number=SeqID_2
ccgcgtcgtcgtgggagagttcatcgagcgcctgcgcaacgttctgcccgggggcagttggtggcgcctcgaggacggcgatgaggccggggacggggccggccgcgcagaggggagcggtaccaccgccgtgtccgcgctcaggcggatgtgggccctcgttgccggcgacagattggtcatctatgtcggcttcgcgtccctcgtcggcgctgcggtaacgctttcccagccatagcagtgtgctatggactatggtcagggccggtaaaatttgaggccctgtacaaattctgaaatgaggcctcttttattagtcaaggttattgatcgttggtgaacgaaacgtcatactgcacgtatataggaggacatatcctgtgcaatcactcattttggtgcaagcgtgcaatcaaactatccagagcatccagtctagatccaacggtttcatatggaagtggttaaatgtaaaatagacactaggtttcaggtggaa

SEQ ID NO: 14406 - DNA, 560 bp, Zea mays
  Coding DNA Sequence Number=SeqID_3
gaagttaatctcacaacaccgataacattcagaaaaaacttatcggtaaaacatgcccaaagatctcaagaatttgaagtaatatgtgtcgtagccagtatctgtaagtgtgacactgatttgtaaatctgagatatcataatatactgtctgcaatcccctcgtccttaacagcaaatgtcaaaactctgtgtcttaatcaggcctatattccaacatttgtacagaagcaccctgatctttcacaatacaagaaattatttcatccgcaatgaaaacagtggatgatctcaccaaaaatcaaagcatccacccagctgagtctggcaatgtgaactctaagctaatggaagtgtcttaactcggtccagatgtatcccacctatgaggttgggtttgagtgtatgtgtgtgtatttggtacggctgtgttggtgtggtggtctttttgtttttgtacttaggtgttcttctcaatccaatggtacgcagctcccctgtgtatttgagaaaaaggtttccagtgtatgaactcagcctgttgaccaccaaatctatatc

SEQ ID NO: 14407 - DNA, 191 bp, Zea mays
  Coding DNA Sequence Number=SeqID_4
catcccctcctgcaatttagagaaggcggagtctctgtgcgttgctcaccaagtgcttgacggacaacctgaacctgagacccatcgtcgtttttgtggtcttcgaatcggattcagttttgccctccatcgatgtctcgtctctccttcgctgcaccatcctcgtccttatctattggtacgctagctga

SEQ ID NO: 14408 - DNA, 511 bp, Zea mays
  Coding DNA Sequence Number=SeqID_5
tcttttcacatcataatcatcccggccatgggtatccaccgggagcttatcctcctcctccgccgggagcttatccaccaccgcatggttaccctcagcaagggtaccctccacagggttaccctccgcagggctatccacctgcagcttatccacctcctcctggtgcttatcctcccgccggttaccctggtcctcaccgtccaggtcttggaggaggagtcgggggattgatagctggagcggcaacagctgcggcggctgcaatgggaagtcaccacgcgggccatcatggtggttatggccaccatcacggtggtaagtacaagaaagggtttttcggtggaggaaagtacaagcgaggaaagcacagcatgtttggagggaagcataagcgtggcaagcacggcatgtttggaggcaaacgaggcaagcatggcatgttcggacgaagaaagtggaaatgatcatatgaatatgatatttcgcgatctctatgatttctctatat

SEQ ID NO: 14409 - DNA, 158 bp, Zea mays
  Coding DNA Sequence Number=SeqID_6
cggccagtagccatcttatatcactacaataatacatacaccattatatatggcgcatatatatactattaattaatctcttgtgttactaccttatatatatgttatgtgtgtacttgctaatcctgatgatgatggagaacgtaacctctagtttt

SEQ ID NO: 14410 - DNA, 500 bp, Zea mays
  Coding DNA Sequence Number=SeqID_7
gcgtctgacgtagcaaccattcatatgattcatatgtttgtgcatccatcacatccatcaccctctccatgtccctctccttcttcacgataaacatgttactcagatgctatatcaccatatccttcacttgaatgatctcgttagcaataccagcccaccatatttaccatcatgtatgtcatgaaaaatgtggctttcattggtatagctaccccaatggtctttggtattctgcaaaaagaatgtcatgaaatagcaacatactatcggttgcgcctggatcgaaggggatcttcaatccagacataaccgaacaagcctgacaggggaagataccccagccaactttctagacatatgaagatcagtcaggtcgtcatcatccaataattggttaagctcatctctcacctggtaaatagttggtaaatagtgaatagtttttgatccccaaaccacggagagaaatagtgctagtaatctatctctctctattc

SEQ ID NO: 14411 - DNA, 349 bp, Zea mays
  Coding DNA Sequence Number=SeqID_8
ggaatagagatctgcattgctgagtgtgacattgtggctggtaactgcaaatcaaaatgatatgcgatcagtatgggaatgaccacaatggtgatctgcgggcaagaaaatataaagatacccaaccaagtgcaatttatcttttcaaggagatgcattatagcaagaagaaaagatttagtgaaactattcagaaagctattgatgatatggtagcaacggttgcaacaccggatgaagatggacagtttgtgatgtcttctacacaatttgtttcccatgtcttgccgagctcaagttaacttatttacaatgttgtcctttagaactccttcaagacaagctctat

SEQ ID NO: 14412 - DNA, 578 bp, Zea mays
  Coding DNA Sequence Number=SeqID_9
agcttccacctctgtggcagtgtctccaccgtcccttaccttcctccgctacctcctcgctcttttgagattcagcgatgcggtttagttgttaaaacctaaacttcaattcgattttcccggtttaacatctggtatagagagtgtaagctaatccaaaaccggaaatggaggtgtttatagtttaatttcaattcggtttacccggtttagaatctggtatagatagtgtgtaatggatatttgacttgaatgatgtttgtttgttatgagtgtgttcctaaagttatggagtgcaatgcatattctctgttgtagcttcctaaagttatgaagcttctcagatactctcttgctgtgctgatatggtctacagtacagcacgtacaagaaagcgagaacgagaaactaatctcttagcttctgaaactaatctctaagctccctcctccagccggataccctcccggttatccccaacattgagaaactttaaaccgatatcttcatattgtgtgtcaaagtgttgttgttaggttgttatattgttgtcagctatcttcttcctcagttatggg

SEQ ID NO: 14413 - DNA, 563 bp, Zea mays
  Coding DNA Sequence Number=SeqID_10
aggaggcagggaacttccaatggaagatgtttgttattacaagtggccgcttcctggggctgataagtttgggctgttttgtgtttgtgatggacatgggggagcaggggctgcaaacagaagcttggatgatcaccaatatgagcactacatcaaactgagcgagatggagaagaactgcaagttgaatgaccttcttgacgcattggacttcattcaagttgtcatatttgtgaagagcgttaacagagctggggagctgaacaagttgcttattgaatgcaatttcccctcaatatgttttcactctggcatgtctcatgaaaagaggctgactcactacaaaagtttcaaggaagggcacaagaggatccttgtggcgacagacttggtaggaagaggcattgacattgagcgtgtcaacattgttatcaactatgacataccagattctgctgatacatatcttcacagggtcgggagagctggtaggtttggaacaaagggtcttgcgatcacatttgtggcatcaggttcagattctgaattcatgtgtatgtctc

SEQ ID NO: 14414 - DNA, 582 bp, Zea mays
  Coding DNA Sequence Number=SeqID_11
gctactggactgtgcctgcgctcgcagccaggggccgagcgcccgagcctgcgccgaggccggggcctgcgccggcgtgcccgcgcgccgaggctgggccacgcctggcgtaggggggctgcgcccgcctgccgtcaggggccgcaccggccgcgcccgtgcgacgcctgggacgccgcatgcctcgcccgcaccgccgggaggctgcgtgccgcgccgtcatccctagccgccagcaattgaccgcgccgccagggcccgctcgcgcgccgagagaccacgcgtcgtgccccacaccgccgtggccggatccccgcgccgaggcatgagcagatccacccgaaccgggtcgatcccgggcctgcgcgccgcgggggccgcgcccgctgccgtcagggccgggggaccttcccacccgcagggccggttgctcgctcgaccgcgccgccatggccttgggcggccgccagcaggaaggagtgacgaatggttagggttcaaaccctaactgtttgggtctcatgggccacttgtctggactgtacaaattgagtctgtcattttatcattttagcatttttt

SEQ ID NO: 14415 - DNA, 348 bp, Zea mays
  Coding DNA Sequence Number=SeqID_12
cgaggctaccgtccgtctcgtctagccggccgcggggatgaggcgatcatcgagcggggcgcgcgtgtcggacagcggcggcggcggcgtgagcgggagcgaggcggcgctgccgacgtacgaccctctgtcggcggcggggcggcgggaggcggcgcggacgcaggcgctgggacgcgccgtgcactgcatccctgtcgtgcttgtcgtctgcggcctcctcctctggctctcctcctcctcccacacccacctcgattgagtaccagcggggatcttaagtgaacctggcgggtagagtctggttctgttacacttgtacgataccactgaagagttccgagttcc

SEQ ID NO: 14416 - DNA, 573 bp, Zea mays
  Coding DNA Sequence Number=SeqID_13
aactcttgcagacaatctcagcttccttcttctctttactttcttgttcaataaagctttaataagctatctccatttctgtttaaataaagctctttgagcattttgtacatttgttctcatggtatcagagcatcagggagtagatcttggtgttatatcttctacttgagcttcagactatctacaagacctctatggagccattaagtcttccaagactttcgtttgcttcctacgagatgtctgtatgaagaagaaagggtattgggccagatgggccagagatacaacgtgagaaagaaacagtcatgtcttcaaacccaacccgcttatgtcggactccatggacaaaactcagcggctacgaaagcgttcctctgtacgaaccgtgatgaaaccgtaatcaacgacgaaatcacacgtgaactgaaggaggaagtcatcacacaaatatgtttatcaatggtatgtatctgtccttcttcctgagacagaacaagtgaatggtcgtttggtagattaaggagaagtgatgcatgtgtggtcgtttggtgatttatgctggctggt

SEQ ID NO: 14417 - DNA, 522 bp, Zea mays
  Coding DNA Sequence Number=SeqID_14
atgaacagttgtggaactcatcccggccaacggcgtagaagcaatgacggcgacacgatttggaggaagtgacggcggcgacacaaggccccttccactgatgtatgccctcttcgttggcgatcttctctcgtttttcttgtgcagaactgcatcggtgcaattgatggcactcatgtgcccattacaatttcacctgacaaagctgctccttttagaaacaggaagggaactctcaatcaagaagtgcatatccattattggtacaatggaagttacaaaggaggaaaaagcgaaagcctacaatgtcttcaaggaccttgacaataggcaaattttcttgagtgcatgcgatgatgatgccgagtctgcactaatttggctgagaaacgagatggcttagctggtggagtcgtctgaattgcttgttggatatccaatatgttatgttgttcaaatgaaaaattactcatctccctttggtttgtttttaatctaaatgcacacactctattgtaatgt

SEQ ID NO: 14418 - DNA, 495 bp, Zea mays
  Coding DNA Sequence Number=SeqID_15
cgtggtcggatctgtccccctgcttcctattcccagctccctacccctctccatggcgtcgcccagctccagctcgcccccctctgatctacacgcaggggtttcttccatggcgagctcccccaggccagccgccatatgtgcagtgggggatagcttctcggtcctccgtcgaaagatcaagtgttgctgatcaatttttaagcaagaaatctggtatgacgcatgacaaggttgtctgctatggcatacaactatgtctctatttcatcctataatgagttgaagtaaagaagacagacagccgtacacaaactctgcatcttgaaactaccatggttggcaaagaagctggatgcatcctttacattggtgtcttcttatcactaagcagtaatgtgaagcaagttcatttgttgactaagaacggatgaacacaaatcagtgaagatttagttgtgctagagatggaggatggagaggtagtaaatttca

SEQ ID NO: 14419 - DNA, 542 bp, Zea mays
  Coding DNA Sequence Number=SeqID_16
agctagtacacctctgctgtgagtccgcaatgtcgactagctgccgcgctccggccaaccgctgcatctgcaagacgccgtcggggaacccgctgccgcggcggggccaggtcaaggagagcatcgccaagcagatcgtggcggccgccgtggccacggcgtcgatggtcgtctgcgacgccggcgcgggcggcaagaaaggcggggccaagccgcccgccccgcccgccggtgccaagaagaaatgagaagccgaattgcttgtccgggtgtccaataatttatggtatgcttgcacaccacctagctagcgcgccagttcatgtgccagctgtactatttttgttaaggtttgttcgtgttcgtgtagtgatcaccaccttgacgtgacgtctatcgttgtctcgtgcgtgcatgccaggataagtttcacttcctcgccgcacttgtctttgttctgctatgttttgttcttgttattccgtcgtcagggatgtactcctactggggggaggtcggcaagtattatggcctgatctttc

SEQ ID NO: 14420 - DNA, 572 bp, Zea mays
  Coding DNA Sequence Number=SeqID_17
acatttcagctcacagcgcaggcagaggaagcgagaagcgagccaccaagaaaccacccaaaggtttgcacaatggccgcttctcagctcaccatcctctccgtcctcgcgctcctggccgtggccgccaccgctcaggcgcccggagcggcccccgcggcagcgccccaggccccgcctccaccgccggcgaccccgcccccggcaatggcgccccctaccccggcgccggtgtccccgccccctaccgcggccccggcgcccgcgcccaccgtcgcccccacgccctccgccaccgcgccggcgcccgccgactccccgatgtcctcccctccggcgcccaccccggacatgtcgccctcgcccaccgccgagcccgccaccccgggcagcggcgccgctggtctccgccccgccttcgtgctggctgccgccgccgccgccatctacgtcttctagatgacccgacgatgtatcatttcattgtttctttgcagcttttgttccatttctccccctctttgcccccttccgtccgcacattggtgtaccctcatcttctgctgtaatta

SEQ ID NO: 14421 - DNA, 537 bp, Zea mays
  Coding DNA Sequence Number=SeqID_18
acgggatacggcctcagcagaccgcggcacatgctcaccgaggcggagaaggaggcgaagcggctgcggcgcgtgctcgcgaaccgggagtccgcccggcaaaccatcctccgccgccaggcgatccgggacgaactggcgaggaaagtcgcggatttagcgtcgcagaacgagaacatgaagaaggagaaggacaaggtgctggaacagtacctcacgctcaaggagacgaacaagcagctgaaacaacaggcacatcatctatcgctttcattcctttaatttccttcccttttccccgtcatccattattagtactccccctgctaccaccattgttaggcaacggaaaagaaaagaaaagaaatcccagaagggaacctagtatgttccaatccagctccagttgtgcccccacgagaggactacagtcacgctgcagtacacctatgctagtacgagtactaattatggtgaaaccgggggcctgtcaatcgctcatgtctgtatattatttacattttgctctgacagtga

SEQ ID NO: 14422 - DNA, 449 bp, Zea mays
  Coding DNA Sequence Number=SeqID_19
ggcgggctgggcatgttcctcaacagctcggcggcggcggacgaccggtcgctgcgttgcctgtgcccggtgatcctcggcgacgtgaaccgcatgctccccaagcccatcgaccccgtccgcatgatgtacctccccatcgcctgcggcgtcgtcctcccgcctcaagtcctcttcatctgcttcactgggcagccgacgccgccggtggtgaaccggattcctgactcctggaagacctcgtcttcttcagcattgtcgccttgagctggtgccgacgatcggatttggttactgctcatcacgcaggcacagtctatcccgggacgtatctatcaagtttaattattaagattacaaaaaaacgtgagaaactagctggttactaccaactttgcagccatgagagtggtcaacgcatcatgggccaattgtggtgtagtattact

SEQ ID NO: 14423 - DNA, 565 bp, Zea mays
  Coding DNA Sequence Number=SeqID_20
aagctcactcaaacacaggcacagccacccaacactatcacaaagccgcacaagctagacaatctcctcataagtgctagcggagcctcccagctagcaatatggcaaagtgcctcgccgtcgccctcctgctgctgctggtgctcgcgtactgcgacgggagggagctaaaccagaaggaccaggcactcgcaacggcacgcggtgccggggccgccggtggtggcgtcggcgaggagaagattttggggttgcctgacctgccgcctgtgggaaccgttaccggtaccagcaccactaacggcccgctggtggcgcttcctgcccttcccgggatccctgctcacccatgatcacctctagttcatgtgctggcttacaagatgaagctcacctcgtgactttacacttctaggctctagcttaacatcgcccggaaggccaacaccggcgtttcgctcatgtccatgttccttccttaatgggcgtctgtatcatctatccccgtctgtatttcttttcagttcatgttctagtatttttcgtttccttgatgtgctacatg

SEQ ID NO: 14424 - DNA, 527 bp, Zea mays
  Coding DNA Sequence Number=SeqID_21
accaccgtctagctagctcttgttaggtcgatcggcaatggcgtccaccaaggctctcttcgtgctcgccgttctcctcgcgtcggccgtcctcctcgccgccgcggcctccgagcaaactcatgacaaggaggggaaggtggccaccaacggtgccggcgtccaggacggctggggtggcggcggccgcggcggagggtacccgggccgcgggggcggcggctacgggccctgcggccggtggggctgctgccgccgtgggtaccacggcgactgcatccgatgctgcagggccgccaacgacgtcccggaggccatggaccgcactgaggtgcacaactagctagctggcagctggctatggcttggctagcaagcaggacccatgatcaatctggaagctagcttcttccagggtactgagtaaaataaatctccggtttagttcatgtgatctatgtatgtgcgcggatgaacgtatgtatctacgtacatacgttcgtagtcctcttcctttgtttggttgg

SEQ ID NO: 14425 - DNA, 530 bp, Zea mays
  Coding DNA Sequence Number=SeqID_22
cgccgttatagccttcatcataatagttctaatcaccatctttctagtatgggtcatactaaggccaactaagccaagattcatcctgcaagaagccaccgtcttcgccttcaacctctcgcaaccaaacctcctcaccacaaactttcagatcacattcgcatctcgtaaccctaactccaagatcggtatctactacgaccgtctccacgtttacgctacgtaccgtaaccagcagataactctcaggacagcaatccctccgacgtatcaaggccacaaagaagacaacgtctggtctccgtttgtttacgggaccgctgttccgatcgcaccgtacaactccgtcgctttgggagacgagcaaggtcatggactcgttcagttgatgatacgcgccgatgggcgcgtgaggtggaaagtagggacgttgatcaccggaaaatatcatatccatgttcggtgtccggctctcatcaatcttgggaacaaagctgctggtgttattgtcggtgacaacgccgttaagt

SEQ ID NO: 14426 - DNA, 496 bp, Zea mays
  Coding DNA Sequence Number=SeqID_23
aaaatggcacgtcaatttgtcacattggccctattggctttaaccgtggccaccgttttcgctgctgacgctccctcagcctctccccaaaaatctccatcacccaccactgccccaaccaaggctcccaccaccccaaccaaagctccggccgccgcacctaagtcaacctcagcttcttcacccaaagcatcttcccctgctgcagaaggacccgctgctgaggatgactactccgcggctagtcccagtgattctggcgaggcacccaccgactctgctgcctctcctccggctcccacacccgatagcacatccgccgatggaccaagtgaggcagaggcaccaagtagcagcgccgtgaccaccgtcaagctctctgttgccggcactatcatcaccgccgttagcttccttttcttttctctctaagttaaaaggagttcaagttttgtttcaagggattaccatacaattttttgagatgaggccgtaa

SEQ ID NO: 14427 - DNA, 594 bp, Zea mays
  Coding DNA Sequence Number=SeqID_24
cggctatcaatcagcaggaggaagaaaccgctgctcgaccggggaagaaccaagaggctcggcgaagatgcaggcggcgaaggagaaggtgaaggacggcgtgagcgcggtgaaggccaaggccaagatcacgcaggccaaggcgtcggagaaggcggaggcggccacggcgaggtcgcacgcggagcgggagctggcgcacgagcgcggcaaggccaaggtggccgcggccaagatggagctgcaccaggacaaggcgctccaccgggaggaggccatggagcaccgcatccacaagcacggcggcggccacggccgccaccaccacaagcacggcgtcggcatcgtggccgcgcccccgccggcgaccggtgccggggcttaccaccctcctcctgccgccggtggccactactactgatcagctacgcagctggatcgccagctagatgggcacatgcgtcgcgtttgtgtgatgtgttctcgatagctaataagtctgtactttgtgatgtttatgtttgacttacccacgcgtggtttttcattttgcacttggcttggatatgagagctgtacttgatatttatgcac

SEQ ID NO: 14428 - DNA, 452 bp, Zea mays
  Coding DNA Sequence Number=SeqID_25
tcgggacgatatatataggacgcagaagagttcaaccataggagtacccatcaccccgggtgcggttccaaaaaaaacagtgtgtgacggatgcggatgcgacgaggagtggcagctgaaccaaaccctatgttgtcactacacatgcaaggtttgtatgggcgggagcaaaagaaagagaggaaggctgctagaaaagaggcttcgggagaggcagcagcggaatgacaagctcaagcttgttcctttctcctttctcatttctcatttctcatttctctgcacaataaagctctttgagctatttcatcttgtttcgataagctctatgagcatcagtttgtctctgttttaacgttttatcaaacttattcaagtttgtgtctctatccttgtattcccttgaactttatgtcggggctttagtttggttcgcacatcgtagtttgtac

SEQ ID NO: 14429 - DNA, 504 bp, Zea mays
  Coding DNA Sequence Number=SeqID_26
ttaaaccccatattctagagtctataaataccaatcacttttcaagtcctgtaagataaaaataagagagagaaatggctaagatgccaagttcatcgaagatctatgtggttatgcttctctcattcttggcgcttttcataatggcccatgctcaaacctcttctccagatgggaagttctttcaagattccccggcccaagcctacaccggtccttcgtacgctcctgttcctccgagatgcttcaatccacctggctgcggtccaacggataaaaggaaaagaagatttcgccatcaaagttccaatttggccacatgaatcttgagagttaaaagcttgctcgctgatgtttgtggtgccttctcatttggtttaggttatctatgtataaatacatatatggaacgtttatgagatctatgttataatatggtgcgattttaccctgaggttgagggaaataagattcgaattgtgcgatttcaattactggtaagtt

SEQ ID NO: 14430 - DNA, 539 bp, Zea mays
  Coding DNA Sequence Number=SeqID_27
gaagccatcttctggtctgttggtagctatggcgctgcgcaccgttgccgcgaagctgaaggcccccgtcgcctctctcaagcaggcctgggcggtctgccgtcctcaggctaagcaccctttggagggcctgaatgttgatccgctcaccctccaggagatgaaggccctcgagagggccgttagggcaggcgaaatgaagcagactttggttaccattggcttcatgggtggtttgactggtgcggttgcccatttgctccattcagacttagctgcccgtgaggcgacggcggaggcggaggcggaggcggcggtacgtgaggtgcttgattcgcttgattcagatgtcaatgcggttggtacaaacaaagactaaggcgcccaaggaaatggcgtttggttagcctcgctgttatgtgcgttaattttaagctggtgcggatgtcttatatgtttaactactcggtatttggcttgtggcaagagtactatttatgactgggtagtctgtggattcatccgagtaatctctgata

SEQ ID NO: 14431 - DNA, 512 bp, Zea mays
  Coding DNA Sequence Number=SeqID_28
gacacgtcgcttaaacctaatccaggcagcgacgacgccgccgccgcccccgaaaccacgtagcgctgctctgcccctatcttgcagtcaccagcagggaggctctgcggcctgcgccctgatgcgctcggtgtattcggccatcttctgcctgtcccagaaaaactagatcggatggggaaaaagggcaagcggcggggcgaggccgccgctacgggtgcgccggaggaggctgccgagcaggaggctcccgcggcatccgctgccgcttctgattcagccacgccgagaaggagcaggcgacggggcggcgacgccagggccgcgcaggaggcctccgccaccgtacacgcactggatcccgccgatgcagggaaggggacaacggacagggaaaagaagcctaagctcaacgaacgaaagaagaataagagggagcaatctccttgtgctgctgcatcgggtgctgatgctcccgccacgggtaaatcaggcgatgactgcactgatgg

SEQ ID NO: 14432 - DNA, 562 bp, Zea mays
  Coding DNA Sequence Number=SeqID_29
taccttctcatgtcagctgttatgttctggcattcgttgcgctaggaggatactgaccattccgcataagccagcggttgatgtgacgccatatacttgttccaccccataaatgcgagggctcttccacggcgaatcctgagaacttagaagggtcctcgggacatcgaagaagcaggcgggtgcagtaggggtggcctgcagcagtgcctttgatcaggtactcgcgactgacatatccgtactctgggaggaggtcgacatgatagggttccaggatgatactcttggaagaatcggtctcgggaagatgaataattttaggcacattgacctcaaggaactgtggttcttgtggcgttatggagcccattgtagttgtgtatctggagataggagggacggatgcttgagataagatattcgaaatgaagtgatttgtggactgagtaatccttgctctgataacgatttaggacatgcgcaaagatatctatttatcaacgacttacacggcgtgccaggatgcttgtaagttattagtcgtcttagccgtatcgct

SEQ ID NO: 14433 - DNA, 524 bp, Zea mays
  Coding DNA Sequence Number=SeqID_30
aagtgatcccgatgatgccgcaagggcagccagcaatgtgttgcgggccctactacgatggatacggagggccagcattcaatggatatggaatgccgccgcagccttacgagtgctatggacgaccagtctacgagagctggggtgggggctgcccaccaccaccactagtcccccccccccccccaatcatttgattttgatgatatggaagatttctttgacactgatgctgctgagtttgatcaaggattcgatggaagaatgtattaccaagcaccttccgaatttggctttggaaagaatggtgagatggttaagaaatcaagtggaaacaggagcccgagatcgattgtggaaccagctaagtatgcggaaaagccagcgaaatggggaaaccagagggttgctgctgctccgagaaacatccaccagcctcgctgaagagatatgttgttaactagtcagagaagtcagagcagttcggtctgtgtatctttagccaccactgtacctttgtaatt

SEQ ID NO: 14434 - DNA, 590 bp, Zea mays
  Coding DNA Sequence Number=SeqID_31
cttgatacctacaccagatgcttggtgttgttgaaagagctcacccggggctccaaggcaagcgaggaacaggcgaaacttggaggttctattcgctcgtcaagatcacgcgttcggaagtactactcttccaaggtttccgagagcggatcttcctttgagaaaggcgatggtgagccggccccgaaaggcatgatctgcgatccatgtactgattttggaccacagctactgctcgcagctcgctgaggcggcttgtacgtcgcctgagggcatttgtggacagcatcatgaggacgttcggcaagaacagccagactggcatcgattacgaatcattgatgtccctttcacaaggatcagggttggaggctattcgcaccatgacggatctgtcggaacgtgtcagtataagatcagcgagttcacatggcagcgtcgagagtcctggccgccagaggtcttccaggaagaggagaggcgagagcagcagaagcagcagcaccagcagcaaggccagcaaggcatccaagagcaggccgaagctaagcaaagcacctaaagcaacgcaggagccacactcaggaaga

SEQ ID NO: 14435 - DNA, 586 bp, Zea mays
  Coding DNA Sequence Number=SeqID_32
aacagcaccttatttaatactcggtgctgtacccgacaagtgtcaagctgaagatgaggctgaattagctgaccagtgatccgtggccacccggacacgtaggcacagcactgtggcacgcaggtaggcagcccgccatcgtactttgtcagtgcgctgccgcgtggatgcacgtggcggtagcctccagatctgtgttgccggcttgccgcgtggatgtacacgtggcgtggcggaggatacaaaatgaacagcacaggccagggcacagacgcacgcgtcaggtgcaccgtgcacccgctgaattgaacacctcaccaccatggacatggaggcgcaggcggcaaaggcgagaaccgaggacccgcgacgtcctcccagcgacggcggggccgcaggagcgaagtgcgtggagggtggaggcgacggtgccagccggagcacggcgaagcgggaggccgagaaggcggctgcggtggaggcggagggcgccaagccgctgccgctgccacacgaacgggtgccgcagccgcgcgacgtgtacaacgagcagctggagcggatgtgaatgcatgttttctgctcg

SEQ ID NO: 14436 - DNA, 233 bp, Zea mays
  Coding DNA Sequence Number=SeqID_33
gaatgttcttacagtttacctttggctagtcagtcatactaattcaaaaggtattaagtagccttcacttgaaccacaatggaagtgaaacatttcttattccaccctgcaattgtttttggttctagtagcagtatccagtggtaatttaactgccactagaggagttgatattgcagtaaccattttgcgtaatgcgtctcctctctaattgagcaggaagcgtttgttcg

SEQ ID NO: 14437 - DNA, 452 bp, Zea mays
  Coding DNA Sequence Number=SeqID_34
aaatgataagcctctgccagctccagacgctgatgttccccatatgagtccatcattttcttttattaaaggtgttctacctaaatatttccactcggagtggtctgttgctcaattcaggctccatgagggcgagcagtacatcgttgcatttggtcatgagaagaataccgtggcagttgttggcatggatggaagcttctaccggtgccagttcgacccggtcaatggaggagaaatgcagcagctggagtgccacaatttcctaaaaccatcagatcagccgtagtagcaaaataataaagcagcagcaactatttgtctgccttgtgtgccatggctggctgtacagtatctctgtaagctctcggctcggctgagggttaattaagcagaggctaatgttatgtgtaaatatatgcctttggtgacgatgccataatgtgctctgt

SEQ ID NO: 14438 - DNA, 568 bp, Zea mays
  Coding DNA Sequence Number=SeqID_35
cttggtggttcttggaagactaataaacaggcagtggtttctcgttcgagtgtagaggctgagttgcatgatatggctcttgtgactgcagaggtggttgcttgaggattttggtgtctctgtctgtatgtcgactcctcttttgtctgacagtacaggtgctattggtattgctcgtggtccaatgaagcatgagcttaccaagcatattagtgttgatgctcattatacacgagcataggttcaggatggtgttgtttctcttcgatgtgtcctcagagcttcaactggcagatttcttcaccaatgctcagcatcgagctcagcatcggttttatatctccaaactcagtgtttttgtcttcttgatccaccttgagtttgagggggtgttagagatatatgtacttgtttatatttctctaacaccccttcaaactcaagtcggatcagagacattgagtttgagtaaatgtagtcgatgatgctcccgagtttgagctttagtgaagaaatctgccacttgcaaatctgaaggtacatattgtagagtaattgtcttctgacg

SEQ ID NO: 14439 - DNA, 281 bp, Zea mays
  Coding DNA Sequence Number=SeqID_36
gttagacacatgagcaacacaccaagaacgccactgcgcgcgcaacgagagaagtagagagaaggcatggcggccgccacaggaatcgcagatcaccggcatcgtgtctttgtgtggcggtgggtgtggtcaacgttacacgccgcatgtcctgggcttcttgccgcaccagaagagtagtcgatcgatgttgttttcctcaccggagctcagggagcatcgtggatccgccctcgacgtcatcagcaccgccggcgtcttcaccgctgtgaggtcacgag

SEQ ID NO: 14440 - DNA, 252 bp, Zea mays
  Coding DNA Sequence Number=SeqID_37
tcctcgtgacctcacagcggtgaagacgccggcggtgctgatgacgtcgagggcggatccacgatgctccctgagctccggtgaggaaaacaacatcgatcgactactcttctggtgcggcaagaagcccaggacatgcggcgtgtaacgttgaccacacccaccgccacacaaagacacgatgccggtgatctgcgattcctgtggcggccgccatgccttctctctacttctctcgttgcgcgcgcagtg

SEQ ID NO: 14441 - DNA, 576 bp, Zea mays
  Coding DNA Sequence Number=SeqID_38
gcgcatggctcggatagagtccactagcgccaccatcggcttccatgcgagcaaacctccctcctcttttagtcccccgcctgttcagcacgtccgtgcctcctcgtgcttcctctccaccgccgctcacactgatccctcttcttgctgccggtcgcgggcaggcgatggctctgggtgtgcatggctcggatgaagtccaccaggctgccatcggcttacatgcgccagatttcgaggtctgtgtgtcattttggcacaaccctctcctccttcggccaagacggcacctggacgacgatgtcacgcgtacctctgcgtcgcgcgctatgcgctgctgctcctccggccagtgcgaagactagaagacgatgccaccgtgattggcaatgccttgatctacgcacataaactgtttgacggtacatcgcactggaatgtgttgttaataagaaagacaagaatgatgcagtaccttctattgctactcagttgtgcaggtttatttctgctggcaaggattggtatgggagtttcaaagggaggatgtagtaacttctattgctacttcgctgt

SEQ ID NO: 14442 - DNA, 304 bp, Zea mays
  Coding DNA Sequence Number=SeqID_39
tctgcgcgctccacgtggacggcggcgtcgccgcgcggagcgaggccgcggaggaggcgccgcggggcacggtcagaggtctcctcctcttcctcgtgttcttggcaggagtttggggagtctacctgtccatgctcaggggaaggggtgccccggccccgcaaccgcggccctcagcgacggcggcggaagaagatgctaacggcgaggaggccaacgccatgcccatccatgacggatgctcgcgtcgttgttgattcgaaggtttgaaaggtgcatgactttctctttacctacctggcta

SEQ ID NO: 14443 - DNA, 467 bp, Zea mays
  Coding DNA Sequence Number=SeqID_40
catattgctatcatggtatcacgagctcaagttcatatcctcctttcgctgccctaggcgcagtactcaggctgcgccgcctccctccccctgcgcgtcacctctaggctgcgccctcacctcccctctgcgcgccatccaggcagcgccctcccctggccatggctggtctagaaccgccacctatcgtcgacgacgctgcgacccaggccgcagccgagcatgaagcacgcctccaggctgctgccaggcgtgatgctgcactcgcccaagcccttcaggcagagcaggaggcggccaccgcggcccaggagcgcgatgtcgccactgaacgcattcgcgctgctctcgagcgcgcagcacatgcgcgcgccctcgctgctcagactgccaccgatggaatatttttattagaaaatgtaaatactccatgttctagtcagaaatatttgaccttcgattatgca

SEQ ID NO: 14444 - DNA, 497 bp, Zea mays
  Coding DNA Sequence Number=SeqID_41
gtattcatatatcttccggtcttccccacccgaccgcagcgaccgccgtcaagtcgaagaagaatatcctcggtggctcgacctcgggcctcggcacaccttttccccgccgcggccactgaaacacatggcatttgaggttgaggaagatgatgcatatcctagagggcattcaaatgcaattgtgacggatgaacaaggcgattgccatcacaaaggaaaggtgtcattggagcatcatcaagcggttttgctggtatgagcacaatgcctgtaaacacggttgaggtgtcacacaaaatgggaggcatgtgaacttaaaaggaggcattgagatcccatggagccatggtgagccttatggaaatggttttacttgtaattattgcactaatcgtatcaagggtggaggtcagacccgttaagagagcatttgggaagattgcctggaaatgtgactgcatgtattaatgttccatttaatgttaaggcagcaa

SEQ ID NO: 14445 - DNA, 553 bp, Zea mays
  Coding DNA Sequence Number=SeqID_42
accagcgggtgttgccactggtttactggccacgggtttagcagccgccggtagctccggtgcaatggctgtctccctcatcctttgggtcttcaagcgagtaacggggaaggagccgccaaaaatcatgtcaaaagtcttgaaaaaggtgtttcctggtggaggtgctgcagctaaactggcagcaaaaccagaagccgacccagcggccgcaccagcggcagcaccatcagccgcaccagcagctgcaccgagtacatgaaagcggtgggtaataagcaaaggatgatagataaataatccaactttaaaaaataaataataatatttacgtggggatggaagttaaattttcaaatatcactatactaatggatatcgtggaacaaaatagtaacaaatgtaagcatttttattgtataacattttaagaacgaagcgaagtgtcgttgacgttaattttattcaagttcaactaaaatgttattcaagttcttgttcaccaacgttgtcaaacgagacaatctataggcctcaaggaaccattgtaagt

SEQ ID NO: 14446 - DNA, 489 bp, Zea mays
  Coding DNA Sequence Number=SeqID_43
taaggttgtcgctcaggtcctcaatatcccttttgattcccctcaatgcaagatgatggaaactctgcgagaacgctactttggacctacatttgaactcaagtcacatgataagtacccggagatatgggatcttgatgagaaagatccattcatgggaccagaaggaggtgaaagcgctgatgacgttgtatccagacttgccactgccatgttatccatggaagcagaatttcaaaggtgcgcaattctggtggtgagccatggagatccactgcagatgctgcagaacataatgcattcagcaaagcaacaaagcggaggagatggtggtttagctgagagaattcagatgagcagagttgcttctgtcttgtcacagcaccgcaagtttgctttgctcactggtgaactccgacccctcgtctgattgattgcaaaccagaaaaagtattcaactttgggatgttggtcctatctgccaatgac

SEQ ID NO: 14447 - DNA, 545 bp, Zea mays
  Coding DNA Sequence Number=SeqID_44
agagcgggaagccactacactacaaggggagcaagttccatagaatcattcctagttttatgatccagggaggtgacttcacacacgggaacggtatgggtggagaatccatctacggtcagaagtttgctgatgagaacttcaagctcaagcataccggaccaggtttgctttcgatggccaactctggagaggacacaaacggttcgcagtttttcatcacgacggtgacaacaagctggttagatggaaggcatgtggtgtttgggaaagtggtacaaggaatggatgttgtctacaagattgaagctgaggggaagcaaagtggaactcctaagagcaaagttgttattgcagacagtggagagcttcctctctaaaccctaagcacttgttcttcttcatgaagagaattatggggtttttaagttgtcttgtattataaacactcccgaatgctatccatccgaacaaaagcacttcagttttttgagtttttttaataatcattttctaaatagattttgggacttttgcttgtgttt

SEQ ID NO: 14448 - DNA, 532 bp, Zea mays
  Coding DNA Sequence Number=SeqID_45
acatccaccggatcgaagaaagtctccgaccgaatcgtcaagctctccgcgatcgatgccgacggggacaagaaggacatcatcgggctctccgggcagactctcctccgcgcgctcacccacaccggattgatcgatccgctctcgcatcgcttggaggacatcgacgcttgctcggcggagtgcgaggtccagatcgccgaggagtggctcgagaagctcccgccgcgtacctacgacgaggagtacgtgctgaagcgtaactcgagatcacgtgtgctgaacaagcactcgcgtctcgggtgtcaggttgtgttgacgcaggagcttcaaggtatggttgtggctgtccctgaggccaagccttgggacatcccgtaagtgtagtaggtctttatttgttgtttgggaataaatcgctttggaaaaaggattatgataatgaatctgtgatcttccattttgaaactttattgtaatgtggttgaagaacttgcttgttttaacgattcccctgcttcgagtatgggtt

SEQ ID NO: 14449 - DNA, 526 bp, Zea mays
  Coding DNA Sequence Number=SeqID_46
caaccaggttctcgtcgaggcctttcgcgtcgacatcagccgtatgctccaggtgcccccgccgccgccgcctccgctccagctcttcggtgccagcaccattgagttcggtagtagcagcagcagcgccaacgccgggatggagatgcaacagatgcagatggttatggagatgccaccgccgcctgacttccccgcagtgatggggatgcagcagttggttatggagatgccaccacagccaaggttcgaggcagcgatggagatgacgccgctgcaggagttcgtcgccgggatgcagaaggtgcagcggcaggggctcgggccgaacgccgacttcccctactgaggagaagaaagacaccagacagagtccgaccgagtccgagtctcagttactatattctaaataaatcgttcagatccatgtaagatccatctacgtgggtccaagatctatgcattagttggttcaattatcttagtagcaattaaatttatggcattgtaatcttttttgtatcgg

SEQ ID NO: 14450 - DNA, 594 bp, Zea mays
  Coding DNA Sequence Number=SeqID_47
tcagcttctctcatcaatggcgaaatcagtggcgacggcgacttcttccctcgtgcaaaccctcagacgttacgtcaagaagccgtgggagataaccggaccttgcgctcacccggagtacctcgaatccgttccgaaggcgacggagtatcggatccgatgccccgccacgatcgatcaagaggcgatcgtgccgacctcggatcccgagacggtgtacaacatcgtgtaccacggtagagatcagcggcgtaaccgtccgccgatcaggcgatatctgttgaagaaggaggacgtggtgagtgagaagaagatgttcgaggagacggacttccctagggtttacttgacgaccactgtggaggaggatgagaacgcacgtggcggaggctacgagtaacaaaaaaaaaaggttttcttgtagtctctgacttgctgatgggcgaaggactgcgtgcgatatttctctaccgacagaagattttccatggtttgctttactaataaggtttgtagtagcttaatgtactgcaagacacactatttttcttcacaggaattagattgctgttcagacattctccctatgtttac

SEQ ID NO: 14451 - DNA, 526 bp, Zea mays
  Coding DNA Sequence Number=SeqID_48
cggagtgtatcgacgctgaatccaaacgcgccggcgttcgatccggtgggattccgtgaggtagaggatttctctcccaagtggtgggagctggtgacaacatccaagtggttccgtgacttctggctcagtgccaactcggaggagtatgagttcggcgagttctcagatatggaggacgagttcgaggagctagtcatgacgtcatccggtgagaatgagatggatggatcttcggtgagagaatcagatgttgggaggtacttgaaggtgcttctgagcatggcgaagtctacgaaagggaagctttacagatctaatgtgtcttgttctgccaagtataaccagaagaagatgaacccaaacttctactgtcgccggaaccatcacatctatcagcctcggtgaaaaggttgcagcagcgtctgggaaagaaataaaagctcatctctaaatctcttgtgttttcatgaatgagatactctcatctttacttcttgttctgtactacttgttcctctgatta

SEQ ID NO: 14452 - DNA, 521 bp, Zea mays
  Coding DNA Sequence Number=SeqID_49
gaggaggagactctcaaaccctaaaaacaaactctttcaagcttacttcctcgccactgccatcatcggcctactcttcccgatttgctacatcggagatggactataccggggagacatccacggtgttagagctgcagctccacatcttttcctcctctccggtcaagccttcaccgaaccaattggtttctccgaccggtttgcaacacccattggtattctcggaccggttttctacaacgctcgtcgtatcttcgctctgttggattgggttaaagccgagttcgcagatattcagcgtccaggtggtccaataagattgtacggaggaagagctatagcgtcggttaacaccgtcatgtggttttacaatctgtttggtctcttgttgcctgtgtttcttcctcggtcttgtgagatttacttctcagccgacgacaacaaagtagattaagtaacctcccgtctactttctactttagaatctcttatgttgtgtttgtgtcagtgcttggtaa

SEQ ID NO: 14453 - DNA, 491 bp, Zea mays
  Coding DNA Sequence Number=SeqID_50
gaaaagccttgacatgttcatccccaagtctgaatctgattttttggaatatgctgaaatgatttctcataggcttacaccatatgagaaaagttatcactatatcgcattgctgaaagctgtcatgagactttcggtgaccaacatgaaggcagcagatgttaaagatgttgcttcgtccgttacagcaattgcaaatgaaaagcttaaggctgagaaagaagctgctgctggtagaaagaagacgggtggcaagaagaaacagcttattgtagataaggccgatgacgatctagtagctggtccttatgatgccatggacgattttgacttcatgtagattacaagagctttgtgattgtgagggaatacagtttcgattgcctggcgtctgtttcatcattatctctcgggaagaagagcaaaagtttcttagttctgggatatatatagttggaacaaagaagtcttgctttatgggttttggtctg

SEQ ID NO: 14454 - DNA, 508 bp, Zea mays
  Coding DNA Sequence Number=SeqID_51
aggagactatcgaagcggcttttcagatcatttccgccatgaatgatgagctctgcaatccttctctatggtctacatcagccaccgcgagttccacgactggctccaacggatcagctctcgtttccgccgatgcggctgggatcgatggagcaccgcatcattcggaatctggtggtggtggaggcggaggaggaagtggaaacagtgctctggatgaagctagtcttcgctataagaactcagtgacttctcttcgtgctgttattgctgcgattcccaattctcagaaggcaaaagtatctgaagcggaaaatggtttaggaactcctgaagaagaagacgaaatcgaaaagctggaggagaaagccttgagtctcaggaaggagattgcagagaagaatgttcatgtcaaagagcttatcgacaaatttcgacaacttatagcagatatctccacatggcaaagcccttgttctgtttgagttttcgttttgacattgttgtg

SEQ ID NO: 14455 - DNA, 524 bp, Zea mays
  Coding DNA Sequence Number=SeqID_52
atgaagcaggcacccatcatcagtacggtacgtttcaaggcgtttccaattaccctcctccgcggcctcagaactctcctccggtcactgggtttcctcagccttctgctccgcctcgagtctacgattccgcccctcctcattacgcccatggttatcaaaccgttccggtacatggtattgctgaaggaagacctgtgcatgtgcgacaacgccgccttccttgctgtggaattggtcttggatggttcctgttcatagttgggtttttccttggagcaatcccttggtacgtcggaatgttcatcatgatagttggaaggaggattgaccacagggagaagccaggatacattgcttgcaccatcgctgctatacttgcaacaattgctgtgattcttggtgtaactaaaggagcagaagactggtgatcaatcaaaactatctttgtggtcaagtcagaacgtttgtataggtgtcagacaaacatttcgtcttgtattttattatattcgtgctgcttg

SEQ ID NO: 14456 - DNA, 591 bp, Zea mays
  Coding DNA Sequence Number=SeqID_53
gtcgcttcccatctagctaaaagcttccctggaaaagccgttggagttagtatcggtggctctgctgctgctgctcctgctcaagctgaggcacctgcagcagctgcagctgatgatgatgatgacatggatctgtttggtgacgagaccgaggaggaaaagaaagcagctgaggagagggaggctgccaagaaggacaccaaaaagcccaaagagagtggaaagtcctctgtgctcatggaagttaagccatgggatgacgagactgacatgaagaaacttgaggagtgtgttcgcgctgttgagatgcctggtcttctttggggagcttcaaaactggttccagttggttacggcatcaagaagctcacgatcatgctcacaatcgttgatgacctcgtgtccccagacaacctcattgaagactacctcacctgtgaacctaacaacgagtacatccagagtgttgacatcgtcgcattcaacaagatctagagactttaaaaacctctccccctaccaaacgatacattttgatttccttccaagttttgttatcttttgttgtttgcttgagatgcttattctcta

SEQ ID NO: 14457 - DNA, 570 bp, Zea mays
  Coding DNA Sequence Number=SeqID_54
tgggctctcgcaacatcagaaacacaaaccaagtcttctccaataggaatcctttggtgggagtcaggtgcatggctcaggacgatcctatcaaggaagaatctcctctgccttcgacctcggccactccaccacagacgccgttgtattctcctccaccacttagcaagcctaaggtgagtacgaagtttggagatcttttagcgtttagcggtccagcgcccgaaagaataaatgggagactcgctatggtagggttcgtagcagcgattgcggtggagcttttgaagggagagaacgtgtttgctcaaatctccgacggtggagtcggatggtttctaggaacaacggcgttgctaacgttggcatcgatgattccattgttcaagggaataagggcagagtcaaagtccaaagggtttatgacgtcagatgccgagctatggaatggtcgattcgccatgctcggcctcgtggccttggctttcactgagtacgtcaaaggcgggactcttgtctaagtctcttttttttttcttcttttttgcatttcttgtgttaccctttagc

SEQ ID NO: 14458 - DNA, 577 bp, Zea mays
  Coding DNA Sequence Number=SeqID_55
atccgttgattgagtcagtgcccaacttgcaagtgatcaagctcatgcagagtttcaagtccaaggagtacgttagggagacattcgcgtggatgcactactattggtttctgaccaacgaagggattgagttcttgagaacttatcttaaccttccgtctgatgttgttcctgcgactttgaagaagtctgctaagcccattggtcgtcccttcggtggcccacctggtgatcgcccaagaggaccacctcgctttgatggagaccgtccaagatatggtgaccgtgatggttaccgtggagggcagcgtggtggtgatgttggaggtgaaaagggtggagctcctgctgattaccagccctcgttccaaggaggtggtggtaggcctggatttggccgtggcgcaggaggtttcagcgcagcagcaccctctggttctggtttaccttgaaagaaatttatgtaatcgttaagctatggaaagactgtttttttttttttttttttggcttcagttttgtttctgtaatacacatcgggaatctataatctatctatttctatgacttttggtct

SEQ ID NO: 14459 - DNA, 599 bp, Zea mays
  Coding DNA Sequence Number=SeqID_56
ttccagttcccacaaaatcatcagaatctaacttctttggtctcagactctctccctccacctctcgctctccgctctctccctgttctttcaaaagctcaatctttgctaaggttaacaaggggcagagtgcaccagacttcacactaaaggatcaaaatggaaagccggtgagcttgaagaagtataaagggaagcctgttgttgtatatttctaccctgccgatgaaacccctggctgcaccaagcaggcttgtgcgttcagagactcttatgagaaattcaagaaagccggcgcagaggtcattggcataagtggtgatgattctgcttctcacaaggcctttgcaagcaaatacaagcttccttacacattgttgagtgacgaagggaatagggtgaggaaagattggggagtgccaggagatttatttggggcattgccagggagacagacttatgttctcgacaaaaacggtgtcgttcagctcatctacaacaaccagttccagcctgagaaacacattgatgagaccttaaagttcctcaaagctgcttgatcttgtattcttctcttcttcctcatctggatgactgga

SEQ ID NO: 14460 - DNA, 558 bp, Zea mays
  Coding DNA Sequence Number=SeqID_57
atcgctcagcgagtcaagtttgattttctccgggagagagagagatcgtttgattcttccgatggaggaggagatcggagggagggaggatagatggaagggatcgttagagaacataacggagatggcttcgaatctcgattctctacagaagcttctcctcaagaaagctgtcttcgttgaagaagacactttcgctagagcttctctagtctccgaacaaggtcgagcaatcaaggtacttgagcaaagggtacaaacactagaaagagaactagatgctgccattacagctgctgctcatgctcggtctgagaaacgccacgctgagtcttctcaaaaagctgctgagtcacgtgcgcaagaggttacaaaagagcttgaaaacaccacaaaggttttcaagctgcatatggaagagctccgaggtatgcaagaacagatatccaaacgcgataacgagattaagctcttggaatctataatccaaacgctcggcgggaaagagcggttgggaaaaagcggtgtgagtggatgatgcgttttttcacttgtaga

SEQ ID NO: 14461 - DNA, 554 bp, Zea mays
  Coding DNA Sequence Number=SeqID_58
ggcaagggagttgcagtcttgaacagcagtgagggtgttaaggggactatcttcttcacccaggaaggagacggtgtgaccactgtgactggaacagtttctggacttaaacctggtctacatggtttccatgtccatgctcttggtgacaccactaacggttgcatgtccaccggtccacatttcaaccctgatggtaaacaacacggtgccccagaggatgctaatcgtcatgctggagatctaggaaacatcattgttggagatgatggaactgccaccttcacaatcactgactgccagattcctcttagtggaccaaactctattgtcggaagggctgttgttgtccacgcagaccctgatgacctcggaaagggaggccatgaactcagcttggctaccggaaacgcaggcgggcgtgttgcttgtggtattattggtcttcagggctaagtaagctgttacttatcgaggaagggagtgatgcaataaggaggtcatatacctctagacctggctagtttgtgtgtgtatctgtgtgtactgtgtgt

SEQ ID NO: 14462 - DNA, 535 bp, Zea mays
  Coding DNA Sequence Number=SeqID_59
ctgaaaggcttctcaattttggttcatcttatattgtagccatgtctcagactgtggtcctcaaagtaggtatgtcatgccaaggctgcgttggtgccgtcaatagagtcttgggcaaaatggaaggggttgagtcatttgacattgatataaaggagcaaaaggtgacagtgaaaggtaatgtggagcctgaagcagtttttcaaacagtttcaaagactggcaagaagacttcttactggcctgtggaggctgaggctgagcctaaagctgaggccgagcctaaggctgaggccgtgactgagactaaaaccgaggctgagactaaaaccgaggctgagactaagattgaggctaaggttgatgcaaaggctgatgttgaaccaaaactcgcagaagctgagactaagccatcagaagtttaagtactaaagatgaaaatggggctttttatctgtatttgaattgtttcttattgtctttgaatcgtgtgttgttgtaagactaaaaaatttatgctttatcgacgtaccta

SEQ ID NO: 14463 - DNA, 577 bp, Zea mays
  Coding DNA Sequence Number=SeqID_60
gtggatcctcaacaactatggctgaacaaccacagcagcagcgagaatccgattcttcccctcctcagctgaagttaccttctttcgtcgttaacttgttcccctttctccaacccaagtctccttctcccgctaacggcgccgatggtgctcctaaacccgcgggaggagtctccaaggacaaggagactcagaactcgacggtctctttcccttacaatcctcccaagagcacagagccactcaagcttgaagccgaacctagctccggaagcacttccaactccctcgtcatttggcaggtatatgcacttggagggtttctggtcctgaagtgggcttgggcgagatggaatgagaggaaccagacaagtgacaaaaaggaggatgatgatgctgatggtgatgatcaagctcctcatccggaagatgattgatgatgaaggctgctagtcatatttgcacgaagacgatgaatctgttgcccccattttggttctgtatagcaaaaactccctttcagattttcttatattcccattgtatctactcaagactgtcttgagttccttctact

SEQ ID NO: 14464 - DNA, 547 bp, Zea mays
  Coding DNA Sequence Number=SeqID_61
aagttcagtactcgcatagccttcttcccaccgagcagcccctcacgaaccctagcttgctaaaccctactccttcccttccccgatggatccgcagcaaccggagcctgtcagctatctgtgcggagattgcggagctgagaacacactcaagacaggggatgtgatccagtgccgtgaatgtggttaccgcatcctgtacaagaagcgcacccgtcggattgttcaatatgaagctcgctgaagacaagaaacaaatatcattcactgttaagtgtgtgccctgagacaaagctactacaatggagaaatgtattaggcagtactcgctcctaggtagtaatctttccattggactttggcttgaagtggtaaaaacttgtcaaacgtgtattgagattttagacatttgaggattgagattatgcatcttttagctggattttaaaacatggttattattgctgtcgccaggaatgaagtgccctgttggttgcacgcaggctctggctgttatttgctgcctttgtcgttattactacctgtg

SEQ ID NO: 14465 - DNA, 578 bp, Zea mays
  Coding DNA Sequence Number=SeqID_62
ttatacttcgctctgatggtgttcatcgcgccgctcttcgacgcccaaacggtgcttcctaaagaaatctacccggcgattctcaccgatctgaaccgcaactacatcgccgactttggagattacttgctcgcggaggagccgcatttcctcgtcggactcatctggcacgagctcgtactcctgtggccgctctcgatcgccaacgtctacgcgattctcgccggaaagtcgtggttcgccaccacgtgcttgctctacggagcttccgtcgtcacttccatgtctgctgtcctgggagagatgctaggttcggggaaggcatctcagaaattgctaatgatgtatgtgcctttcatgggtattgggatactggctactcttcgtggtttagtctctcgttcaaccaagagcactggatctgtcgacaagagatccgctgttaagcctaggaggaagctggcctagaagaggtggtttctcgtttgtgatagttggttctaatttatccttttctttctttatgtacctttggttgaaagcgtttcctctgaactctcttgtttgttctcagcaac

SEQ ID NO: 14466 - DNA, 553 bp, Zea mays
  Coding DNA Sequence Number=SeqID_63
gtgctcttcctgacttacgaggagctcagcgccgacccgctcggccaactgaggcgcctagccgagttcattgggcgccccttcacgccgggggagcaggaggcgggagtggacagggagattgcggaggcatgtgccatgaaaagcatggtcaaccaggaggtgaaccagtccaggacgaccgaaatcgttgagatgccgattcccaacgggatcttcttccggcgaggcgtggtcggagactggaccaactacctcacgccggagatggcaggaaggatcgatgagattaccaagagcaagtttgaaggatccggcctcatgctgccgaaaacaatctcggaaatctcaaagatctagcatccctccgtcgtgtttgatgtttgaaatcgttcaccttttttttctcttgttgtaaactgcaccctgctggcactggcttggctgaataaaaaaagcttgcattgttcttgttgatcaaacgaaataccagctggcgagttgttgatgttacggaaaaggcctgcttagtcttaggtatttttcttatcgg

SEQ ID NO: 14467 - DNA, 488 bp, Zea mays
  Coding DNA Sequence Number=SeqID_64
ggcctcaagtcaggaaccgcacgtggtggacgcgtcacagccatggctacatacaaggtcaagttcatcactcccgaaggagagcaagaggttgagtgcgacgacgacgtttacgtcctcgacgctgctgaggaagccgggatcgacttgccttactcttgccgtgccggttcttgctcgagctgtgcaggtaaagttgtgtctggttttgttgaccagtctgaccagagtttcctcgatgatgaccagattgctgcagggtttgttctcacctgtgcggcttatcctacttctgatgttaccattgagacccacagagaagatgacattgtttaagacaaaagctccattaacatgctgcttttgatggtttcataatcattcatgtctttacattttgggttgagtttgttgttactttagtataatctatattgttgtctgttgtaattgttcttggtttggaccatcttttggttagatcaatg

SEQ ID NO: 14468 - DNA, 557 bp, Zea mays
  Coding DNA Sequence Number=SeqID_65
aagtgagagccgtcgtctcgaagtcgtctctccacttcctcgacaagctctctctcccaccggaagtgactctctacacagacgaagaagagtggtcgagctggaacaagatcggcgatcccgtgcttcacatcgagctcagacgctgggctgacgtcatggtcatcgctcctttgtctgctaacactttagccaagatagctggtgggatgtgtgataatcttctgacttgtatcataagagcttgggattatagcaaaccgctttttgttgcgccggctatgaatactttgatgtggaacaatccttttacggagaggcatcttttgtcgcttgatgagcttgggatcacactcattcctccgatcaagaagaggttggcttgtggtgactatggtaatggcgcgatggctgagccgtctcttatctattctactgttagactcttttgggagtctcagggtcatcagcaaagtggtggtggaactagttaaaaaccatggtctaatggttggttctgttttcagtgtcatagattgttctgtctgtactgcttt

SEQ ID NO: 14469 - DNA, 529 bp, Zea mays
  Coding DNA Sequence Number=SeqID_66
gaagcaagtcatcagacccggcactggtgccaaacccgctccgggccaaaccgtcaccgtccactgcaccggattcgggaaaggtggtgatctatcccagcagttttggagtacaaaggacgctgggcaaaaacctttctccttccagatcggtaaaggtgctgtgatcaaaggatgggatgaaggcgttatgggaatgcaaattggagaggtcgctcgcttgcggtgctcaccggattatgcatatggtcctggtggatttccggcgtggggaatccagccaaactcggttctcgactttgaaatcgaagtactcagcgttcagtaatgacaaattcacctcaaaactttatgttaaattattaagtggttgttaccctttatgcttatcgcttatgggatctttgttgaaacaaaactttgtgatgtcacttgtcagtacttctctaaactcggtgggcgacgttttatcttaaataaaagacccccgttactcttgtttcagtcctaatgctgcatgttttcttgc

SEQ ID NO: 14470 - DNA, 491 bp, Zea mays
  Coding DNA Sequence Number=SeqID_67
gaagattggaatcgccatggacttctcggagagcagcaagaacgcactgagatgggctatcgacaacttagctgataaaggagacacgttttacatcatccatgcgttaccaacatctgaagctggaccacgtaactccctctggctcaaatccggttctcctctcataccattggtggagtttagggaaccagagactatggagaaatacggtgtccaaatcgatataccagttcttgatatgctcgacactggttcgaggcagaaagagattcatgtagtgacgaaactatactggggagatgcaagagagaagttggttgatgctgttaaatctctcaaacttgattctattgtcatgggaagcagaggactcagtgcccttcaaaggataataatgggaagcgtgagcagctttgtgattcaacacgccccttgcccggtcaccgttgtcaaggactaaataaaaggctgttatctcatgtgttcga

SEQ ID NO: 14471 - DNA, 489 bp, Zea mays
  Coding DNA Sequence Number=SeqID_68
agagagacgctcttcgatttggtctcaacggcgttaagagcgacatcgtcggatctcacccgctcgaatcctcttacgaatctgagaagagatctcatgaggcgatgaagaggacgatcattgggcatacctacgggactgcacttcctttgaagatggatatggacaggcagattctctctcggtttcaaagaccggctggaccaattccgtcatctatgctcggtttagaagtctacacaggagccattgatgactttggttttgaggattacttgaatgaccctcgtgactcggagactgtcaggccagtagacttccaccacgagatggaagttcgtcttggcatgtcaaagggcccggttgccccaagtttcatttaaggccctcatcatggtcgtggtttattacatgttatgtcttctttagcttttgaatgatgaatcaagtggaatcgtgtatgaacgtcttttgacatgtactctcttc

SEQ ID NO: 14472 - DNA, 531 bp, Zea mays
  Coding DNA Sequence Number=SeqID_69
agagaaccacgagcctgtcggagataaaattcgatttgaacctaccttgcgaaccagaggagccgtccgatcatcaacatgttcagacgttgagtccaaggaaaagtaagctcgtgaccgttgatgaacatcgccaggttcatcatggactgttagatcaacggctcttagcgatggtctcgccgagaggtacacaaaggagacactcagaagattactccactcacgccggggattttctgaggtgttgctctctctgtaaacgtaatcttgttcccggccgagacatctatatgtatagaggagatagggcgttttgtagcttagagtgcaggcaacagcagattacggtggacgagaggaaagagaagggcttggttaggtccaccgtcgccgccggatccggcaaaggagagagagtttccgccgccgtgtaggtcacctttacaactatatatatttatatccgtatgttgtatatggttattattattatgtctaaacgcacattgaccgtgattaacctttgtt

SEQ ID NO: 14473 - DNA, 554 bp, Zea mays
  Coding DNA Sequence Number=SeqID_70
attcgcctggacacgtgtacgatgagtattacgacgctgggttcgatgtagactcgcttgatctccaagtcttaaacggtcctgcgttgttggttgatgttccaaggaacaagaacataactgccgaagtgatgaagtctcttaacataccaagaggagtccgtcgtgtgcttttcagaacattgaatactgacaggcgtctgatgttcaagaaggagtttgatacaagctatgtcggattcatgaaggacggcgcacaatggttggtagacaacactgacatcaaacttgttggggttgattatctatcagtagctgcatatgatgatctgattccgtcccacctagtattcctaaaaggccgagagactatactggtggagggattgaagctggatgatgtgaaggcaggagtctactctgttcattgcttacctctaagacttgttggagcagaagggtctccaattcgctgcatcctcatcagttgatttcttcctccaaaacttggagttgtctgtatgcaagttaacctttcgtatctttacttcaag

SEQ ID NO: 14474 - DNA, 588 bp, Zea mays
  Coding DNA Sequence Number=SeqID_71
tatcgccgacgagtgaactgctacaaaagatctcacaatggaacaaactttcatcatgatcaagccagacggcgtccagaggggtctggtcggtgaaatcatctgcaagttcgaaaagaagggtttcactttgaaaggtctaaagctgatcactgtggaccgtccttttgctgagaaacactaccaagacttgtctgccaagcccttcttcaacagccttgtcgattacataatctctggaccagtcgttgctatgatctgggaggggaagaacgttgttttgacaggaaggaagatcattggagcaactaaccctgcggcttctgagccaggaaccatccgtggcgattttgctattgacattggcaggaacgtgatccatgggagcgactcagtggagagtgctaacaaggaagctgcgttgtggttccctgacggacctgtgaactggcagagcagccttcattcttggatctacgaatgattctaacgcgtgtggttgtttgttaccctttttatcctttggttatgaatcgaaacatgtctctccgttgttctttttgttagctttgttgcttgtcttcttcc

SEQ ID NO: 14475 - DNA, 583 bp, Zea mays
  Coding DNA Sequence Number=SeqID_72
aaaatctctgtctcagtcttcgtgactgctttcatgcccgataccaaacactcaccatcgttcgtcgtggataagtttaaacgggatacgccaccagaagcatggttgggctcggagttcaaatcatatggctcagacaattccggtgtgtcaatgtctttcagcactgagttcatgaagcacgctctctatcaactttctcctgttgaggatattgagcttggattgcttttaaagaggcccggatcattgttcatcaacgatttatccaaggtggagaacttttcggacaaagggtatggatctgttcctcgagcttacattgtgtgcaaagaggacaaaacaattacaaaagaaattcagtggtggatgatcgataattatccgacgaaagtagtgaaggagatggaggacacagatcatatgccaatgttctgcaagcctcagttactaagtgactatctcttggaaatcgcggaaaaattagcttaaattatcttgttatgaaaatgtatttggatacaaataagtgttgtcctgcaaatgggtctttctaaagatcaagacttttatcgcgttcaaa

SEQ ID NO: 14476 - DNA, 587 bp, Zea mays
  Coding DNA Sequence Number=SeqID_73
cgcttggacttggagaggttccagagaatcttgagagatacaaagaatcagagctcatccattgcagatgggctatgctcgctgttccagggattttggtaccagaggctttgggatacggaaactgggtcaaggcccaagaatgggcagcagtgcctggaggacaagccacttacttgggcaacccagtcccatggggtactttgcccacaatcttggctatagagttcttagctattgcctttgtggagcaccagaggagcatggagaaagaccctgagaaaaagaagtaccctggaggtgcatttgaccctcttggatactccaaggacccgaagaagtttgaggagttgaaagtcaaggagatcaagaacgggcgtcttgcgttgttggcgtttgtaggattctgtgtgcagcaatcggcctacccaggcacaggaccattggagaacctggctactcacttggcggatccatggcacaaaaacattggcgatattgttatccctttgaactagtgactttgtaaagaaaagatagtaatgtgtcctatgagctttatgtgtatcaaaactctctgtaatgaa

SEQ ID NO: 14477 - DNA, 512 bp, Zea mays
  Coding DNA Sequence Number=SeqID_74
gacctcaaaacgcaccgaggagcaggccagatccctagggatccccctcgtggccctggacacgcatcctcggatcgacctggccatcgacggagcggacgaggtggatccgaatctggacctggtcaaggggcgaggaggcgcgctcctgagggagaagatggtggaggccgtggccgagagatttatcgtcgttgcggatgatacgaagctagtgaaggggctgggagggagtggtttagcgatgcctgtggaggttgttcagttctgctggaagtttaatttggtgaggctgagggatttgtttaaggagtttgggtgcgatgcgaagctgagggttggtgagggtggggaggcgtatgtgacggataatagtaattatattattgatttgtattttaaggagccgttgaaggatgggttcgctgcggggagggagattgggaagttggagggggttgtggagcatggtttgtttttggggatggctacttcggtgattattgctggga

SEQ ID NO: 14478 - DNA, 518 bp, Zea mays
  Coding DNA Sequence Number=SeqID_75
atgggctgcataggtcttatcaatttaacaggtaccaatatttatcggcctgtgcttacaagaacatcaaacaaaccctacagcacaagaggaccatcgatggctgctattcgagctgagtcagttgctactgagatattaggaatctttgtcgagaagaatcctcccgagtccaaactcacccaactcggtgttcgtagttggcccaagtggggttgtcctccaagcaagtttccatggacttacgatgcaaaggagacttgttttctgctagaggggaaagtgaaagtgtaccctgatgggtccgatgaaggcgtagagattgaagcaggcgactttgttgttttccctaaagggatgagttgcacttgggatgtatccgttgctgttgataagcactaccaattcgagtgaatggctatcagtttctgctccgcatatttggtgatatgttcgatataacttcactgtctttgtatgttgacttaattttgtgtgtcatgtatcagtctatgcat

SEQ ID NO: 14479 - DNA, 543 bp, Zea mays
  Coding DNA Sequence Number=SeqID_76
tttgcactaagctccgttccatttcagtccgttcaaacgggaacctatctttaatcggtgctcctcaccgtctcatccaccattccccgacttctcagttaaccctaggtttcgccacgccgcccagcaaatggagcttcctccccgccggagcttctcccttcgttcctcatcattttgttcaagtacggagcatcacttccaaggacaaaatggccaaatggaagaagaagtggaggcctaggactccaatcacctctaaagtcaagaaagtcaagatcaagttctattcgtcatacaaagacaggtttaagccactgaatgatggtaccatccgtcgctggaaagaaggcaagcgccacaacgcacacctgaagtcaaagaaatcaaagcgtagattaagacagcctggactagtaccaccagcatatgccaaagtcatgaagaaactcaatttctgcaattgagggataaggagcaagaaacagttcagtctctcttccagatttttcctgatattgctcactggcacccaaagatttg

SEQ ID NO: 14480 - DNA, 559 bp, Zea mays
  Coding DNA Sequence Number=SeqID_77
ccatggccggcgttaggagcctcgtgctgctcctcctggtgctcgccgtcgcgctgtccgcctccgcctcgtccatcgccggcggggaccacctgcagctcggcctcctctccggcggcgctggccgcggggagtgcaggggcaccgtggccgagtgcggcggggaggacgcggagggggagctcgggtccgcgtcggccgaggcgcaccgccgcgtgctgcagggccgcggctacatcagctacggcgcgctgcgcaggggcaccgtcccctgcaaccgccgcggcgccagctactacaactgccgccccggcgcccaggccaacccctaccaccgcggatgctcccgcatcacccgctgccgcggctaagcctcggatccgcgcccagagatcacgtcctctcagttcaaaaataagctgcttctcgtgctgttctttaagcggtgccactagtatactgctgctgctactattattagttaaatttctttggttgttgccgctgctgtgttggcctattgggacatttgttgccgtcgttgttgtaaagtataaga

SEQ ID NO: 14481 - DNA, 545 bp, Zea mays
  Coding DNA Sequence Number=SeqID_78
gtcacaaggacctgaccttttgggcaaaaccgtcgaagacagaggtcaagttgagcaatggctcgacgttgaggccaccactttccacccacctctccttaacctcacactccacatcatgttcgcatcagtcatgggattcccttccgatgagaagctgatcaaggagagcgaggagaagctctcagctgtgctcgatgtctacgaggcacatctcgccaagagcaagtacttggctggtgatttcgtcagcttggctgatttggctcacctccctttcactgattacttggttggacccatcggtaaggcttacatgatcaaagacaggaagcacgtgagcgcgtggtgggatgatattagcagccgtcctgcttggaaggagacccttgagaagtactcattccctgcttaaagatgatgatcatgttcttgatctttgtttgtgtttcggagtttctaagcaatgcctgtgtttaatgtgaggtttttaataaagagtggaactgtatgcctcctcttatcttatgtatgccacctctctt

SEQ ID NO: 14482 - DNA, 518 bp, Zea mays
  Coding DNA Sequence Number=SeqID_79
aaaacccatctctcaaaattctcaatttcagttcactctatagctcaaatggcgactcctcaatcctcaaccagaccaacccaccaaaacccacaacccaatttccacgacctcttccccgccatggccggaaaactcggaggagaaggtctaatcgacgagctctgcaaaggcttcgagctcctcatggacggagacaaaggagtcatcactttcgagagcttgcggcgaaacgcatcagcggttcttggactcggagatctgacggacgacgatgtaaggtgtatgatcgacgaaggggatttcgatcgagacggtgcgttgaatcagatggagttttgtgtgctcatgtttaggctaagccctgacttgatggatgcgtcacgctttgtcgtcacggaggcgatcgaggaggagtttggtgaccgaacgcatgggcattgatatccttctttctccatcagagactttgacttaagtttgtttaacccttttatgtttttcttatcctttcgatt

SEQ ID NO: 14483 - DNA, 484 bp, Zea mays
  Coding DNA Sequence Number=SeqID_80
taggtggaacctcgtatgaagatttcataaggagcttgcatttacccttgcaattaagccaagtagatcccattgtggcatcattttctgggggagcggttggtgttatttcaaccttgatgctaattgaagttaacaatgttaaacaacaagagaagaagaggtgcaagtactgccttgggactggatacttgccatgcgctaaatgttctgctagtggtgtgtgcttaagcattgatccaataaaacgaactagagcttcgagcctgcttctgcaagctccgacaacggaaaggtgtctgaactgttccggcgcaggaaaggtgatgtgtccgacatgtctatgcactgggatggtcacagctagtgagcacgacccacgatttgaccctttcgactagaaaacgatctcagtttacttttcgaattaagggtttttgtatgtacatttgttcttcaaaagcctaagccaagactctgtact

SEQ ID NO: 14484 - DNA, 496 bp, Zea mays
  Coding DNA Sequence Number=SeqID_81
gtctatattcggctatggttctggattgtttaagaaaaaagggtttaagggatcatttgcggatgcgggtcagtctgcaaagaattttgcgattttatctggagtgcacagtttggttgtttgccttctgaagaaactgcgagggaaagatgatgccattaacgttggaattgctggatgctgcactggccttgctcttagttacccaggtgcaccacaagcaatgctacaaagctgtgtcacttttggtgccttttctttcatcctcgaaggactcaacaagaggcaaacagctttggctcactctgtctcctcgagacatgatcaaaccagaagtctgaaagatgatttaccactctccttggctctcccaatccatgaagagatcaaaggagctttctcatccttctgcaaatctttaacaaaacccaagaagctcgcgttccctagctcacgttgatcgaagttttttttgtatcctactacttccttttgt

SEQ ID NO: 14485 - DNA, 569 bp, Zea mays
  Coding DNA Sequence Number=SeqID_82
gggcctgtggatctaaccaatgatcttgacaaactccaagggaaatggaggctgctgtatagcagcgccttctcttctcgctctttaggtggtagccgtcctggtctacccactggtcgcttgattcccgtcactcttggccaggtgtttcagaggattgatgtgtttagcaaagatttcgataacattgccgaagtggagttaggagctccttggccgtttcctcctctggaagccactgcaacactggcacacaaattcgaactcttaggtacttgcaagatcaagatcacatttgagaaaacaactgtgaagacatcgggaaacttagcgcagattcctccgtttgagatcccgaggcttcccgatagtttcaggccaccgtctaaccctggaactggagattttgaagtcacctatgttgatgagaacatgcgcataactcgtggggatagaggtgaacttagggtctttgtcattgcttaagtcaaaaggaggtttgacatgtaaagatcaagtactttctgcttgttgcagcagccttatgacccctatgagttttgtacaca

SEQ ID NO: 14486 - DNA, 586 bp, Zea mays
  Coding DNA Sequence Number=SeqID_83
atgcgttcagcggtcttcagggcagagttctacgggccaatgagggacaaaaaaaggcacaacataactgttgaagatatgcagcctgctgctttcagaggactgcttcacttcatctacaaggattcgttgcctccgatggatgacctgaatgatgaagagtatgaagaaatgcttaggcatttgcttgtcgctgcagataggtatgccatggaaaggatgaaattgatgtgcgagagcaagctgtgcgaggttctttgtgccgagactgtggcgaccacgctggctctagccgaccagcaccattgcagccagctcaaagatgcttgcattgagtttatgaactcttctaatataattggtgatgtggtggccagtaaagggtatgagcaactgaaacgggaatgccctagtatcattgcggatatatgggagaaagcagctaagagtcgcagaatttagtatgctgatcgtggattaacatgagcgtagttacttaagttgaaaccttagcaacctgagattagtttgtcttttggagaaacgtaagtttcacaaaatgtttgtgatatgttctgctctgtta

SEQ ID NO: 14487 - DNA, 592 bp, Zea mays
  Coding DNA Sequence Number=SeqID_84
gaataccacagagttccttgcgattacggaaacaagaagatgttgaatgttagagttgaagaatcaagcaaaaaaccatactacttggctataaagctcttgtaccaaggaggccaaaccgaagtcgtagccatcgacattgctcaggctggttcctccaactggagttacatgacacgaagccacggcgccgtatgggtcactgacaatgtacccaccggacctcttcagttcaggttcgtggtgacagctggctacgacggaaaaatgctctggtctaagaaggttcttcctgccaactgggaagccggcaagacctacgacgccggcgttcagatcaccgacattgctcaggaaggttgtgatccatgcgacgatcacatctggaactgatttacttactctccttttttctttctttcttttcttagaagcatatgtataaataatcaagcatattcattattaagtgagtttgtaccagaactattactaaacaagagaactaagaaagatttttaaaagggtgatggacatatgtatgtgcaaaggaggtctacacatgaccaccattctttctaccgataaccaa

SEQ ID NO: 14488 - DNA, 596 bp, Zea mays
  Coding DNA Sequence Number=SeqID_85
aaatgggaagcgcaccggcacagattccgactagcttcggccatgagctaagggcctgtcttcgctgccgcctcgtcaagacctacgaccagttcagggacgcagggtgcgagaactgtcctttcttcaagatggaagaggatcacgagcgtatcgtcgaggtcacgactcctaatttcaatggtataatctctgtgatggatccaagtagaagctgggcggctaggtggttaagaatcgggaagtttgctcctggttgctacactcttgctgtctcagagccactcactgaggaaatgctcgtatgccaagaagagcgtgtacaatacgttccccccaaacgcatgtgaagcaaatccatcaagacaacgaccgcaagtattgctctttcatatgttagcttcatgtaacggtatcaggtgctcatatgtgttgaaaatttccaagaagtcgttgcttctttgagtaccttaggttcatctatgtaaggtcgtcatgtataacttttgaacgtctccaccaaaatgcttctttaagagaatcgtttttgttaggaaaaatgtaaacataagtacaaaggccaacctaagcttctt

SEQ ID NO: 14489 - DNA, 519 bp, Zea mays
  Coding DNA Sequence Number=SeqID_86
gcgctttcgacgaggtcaacactcagctccaaaccaagttcagccaggagcctgaacccattgattgggatttttacagaaagggtattggctctggcattgttgacatgtacaaggaagcttacgacagcgttgagattcccaagtacgtggacaatgttacccctgaatacaagccaaagtttgatgctttgttggtggaactgaaagaagcagaacagaaatctctcaaggagtctgaacggctagagaaagaaattattgatgtccaggagataagcaaaaagctcagcaccatgactgcagatgagtactttgagaagcaccccgaactcaagaagaagtttgatgacgagatccggaacgactactggggatactgattcatcatatttcttgtatctccggtctggaaatgaaactctctcttctctttttcttttgatgtgattttgtgagtgtcaaccataacataataaggaccactccatttacttaagcagtgtgttgagatattca

SEQ ID NO: 14490 - DNA, 586 bp, Zea mays
  Coding DNA Sequence Number=SeqID_87
gattctccttctccggtgtgaagaatcgacaagtttccgtgaatggaagagctcgcgttatctcctgttgttcctcttcttcttcagaagcatctcagcaggggatttctaccacgaagcctcctcctgagatagagctcgagttcttcggtccgaagcctgggagcgacgggacgtatccgagggataaagcgaaagctgtgagcggagagaagcttctgagaagcatcatgcaggatagcaagatcgagctttacgctacttacgggaaagtgatgaactgtggaggtggaggaagctgtggaacttgcattgttgagattcttgatggcagagaacttctgaaccagagaacagatacagaaaacaagtatctgaaaaagaagcctgaatcttggaggctcgcgtgccaaacaatagtagggaacaaagaaaactcaggaaaggttgtggttcagcggattccgcaatggaagaagtgaattcccttgtaagtgtaatgtttctcaattcgtttatgtatgtcccccccatactagttttctgtttgtatatctccaaaaactgttccttgtagatggcaata

SEQ ID NO: 14491 - DNA, 572 bp, Zea mays
  Coding DNA Sequence Number=SeqID_88
ggtctgattcctgcagacactgctcttccctggttccaaaccggtgtgattccacctgcagggacatacagctactgggcagacccttacacactctttgttctcgagatggctttgatgggatttgccgagcacaggaggttgcaggactggtacaacccaggatctatgggtaaacaatacttcttgggtctagagaaaggtttcgcgggttcaggtgacccggcttaccccggtggaccattcttcaaccctcttgggtttggaaaagacgagaagtcgatgaaggagttgaaactcaaggaggtcaagaacggtagactggcaatgctcgccatcctaggctattttgtgcagggactagtgaccggtgtggggccttaccagaaccttcttgatcatttggcggatcccgtcaacaacaatgtcttgaccagcctcaagttccactgagatgatcatatatcgtattcatcacatggtgttttatgttggtttcccattctcttgtatcctacaatcttgtttgtttctcttggtaccatcagtttctctgtgttgtaacaccctgt

SEQ ID NO: 14492 - DNA, 301 bp, Zea mays
  Coding DNA Sequence Number=SeqID_89
caggttccagctcttgctcctacgacgccagacgctccctctacatctccgtcgtctagcccgcctctcccggccactgatggccctggaccgagcgccgaagggccaggaccttccacagattcgaatgaccagaatggagcaagcaagacagtttcaagcttggtacttggatctgttctcgtttggtttatgatctaagcgcgggagcctttcgctcggtgttccttgcatttgttttcatgttgatgtttgtttgttccattgttattactttcggaaccgtattcttttggattat

SEQ ID NO: 14493 - DNA, 456 bp, Zea mays
  Coding DNA Sequence Number=SeqID_90
gaacgagctgctttagctgctgcctcagatccataccgttatgtcgagaaacggaagccaattcctgacccccaggacactagcctaacttacgggaagaagaaggatcctccgaagtctgacaactagttcatctgggaacatcctgtaacaaatgcggcgtccgtttgactggcaacgtcccaatatgggatttctgcaagcctgattgctaccacatgataagcatataccgtcaaaaaggttgcttcctcatgctagcaagccaggtcttgttgtcgcgagtctcttcgttttgagtaatttagtgttcatctttcgagtttcctgcttgtttggacggataccgttttgttagacacgaggaatcatactggaaatgtaaatgtgtaagtgctagatgttcagaaatcggtgtatggagacgctacaatccgtgcattgtgaccgtcactg

SEQ ID NO: 14494 - DNA, 432 bp, Zea mays
  Coding DNA Sequence Number=SeqID_91
atcaaccaacaactagcaatccaataactttaatcttttcatacatctcttcaaaaaaattcaaactttcagaagacaaaataaatcgaaatggctttggttagaagtttattgggtgcaaagaagattcttggccgctccctgacagcagcagcttcttccacgagcaaaacaacagcctcggcggcacctaaagggtttcttgcggtgtacgtaggagagagtcagaaaaagagatatgtggtgccaatctcatacttaagccagccttcatttcaagctctcctcagtaaatctgaagaagagtttgggttcgatcatccaatgggtggcttaacgattccttgtcccgaagatatcttcatcaacttaacgtctaggctccagtgaatgatgattatcctaatcttttcttcttcttgagttagcaat

SEQ ID NO: 14495 - DNA, 473 bp, Zea mays
  Coding DNA Sequence Number=SeqID_92
tgctcttctcgtgcaagacggaggaggagagggcggaggccgtgtcccgggccgtggcggcgctggagacgctggagggcgcgttcgcggagtgctccaaggggaaggcgttcttcggcggcgacgccatcgggttcgtcgacgtcgtgctcggcggctacctcgggtggttcggggcgatcgacaagatcatcgggcgccggctgatcgacccggcgaggacgccgctgctggccaggtgggaggagcagttccgcgcggcggacgcggccaagggcgtcgtgccggacgacgccgacaagatgctcgagttcttgcccaccgtgctcgcttgggtcgccgccaaagcgaagtgaactgtgagcccgtgacatcgccagctcgtgacatgtgtgtttgtgtgtgtgcgtgtctgagtccgtccagtgtgtgctgaataaatgcaccgcatgtcgtgtgttgtaccaagggca

SEQ ID NO: 14496 - DNA, 575 bp, Zea mays
  Coding DNA Sequence Number=SeqID_93
gatcagaatccactcatttaggctaaaggctatctcttcaaacaaatttcaaatcacccaacaacacaaaatagtgatcaaagctcatggcgtctcttgcaactgtcgccgccgtgaaaccatccgtggccgtaaaaggccttggcggaagctcactcgccggagccaagctctccttcaagccttcccgcctaagcatcaaaaccaaatcaatccggtctggtggtgtggtggctaagtatggagacaaaagtgtctactttgacttagaagatttgggaaacacaacaggtcaatgggatctatacggctctgatgctccttctccttacaaccctcttcagagcaagttctttgagacattcgccgcaccattcacaaagagaggactgctcctcaagttcttgatcctcggaggaggatctttgcttacttatgtcagcgcttcctccaccggtgatgttcttcccatcaagagaggtcctcaggagaagcctaagctcggtcctcgcggcaaactttgatttagatttatgcatgttcgttaccttctctccctctttataatcccataa

SEQ ID NO: 14497 - DNA, 551 bp, Zea mays
  Coding DNA Sequence Number=SeqID_94
gaggatccgccgaggctgcaccagatcccgcggcgaacgacgccggcgaacgcttcgctctacgagattctagaggttcctcgcggcgcgacgagccaggatatcaaatcggcttaccggaggttggctaggatctgccaccccgacgtggcggcgggaaccgatcggagtaactcttcggcggatgagttcatgaagatccacgcggcgtactgtacgctctctgatcctgacaaacgctctgtttacgatcggaggatgcttcgtcggagccgtccgttgaccgtcagcacctccgggatgggcagttacgttggacggaactgggaaaccgatcagtgctggtagcgagttgactcggtgaccgagttagctcgagttaattcgaattaataaaacacggttgtaaaaataggaagcgataaaagctggggttagcgatgtaattaacagtagtattagtgtgctaacatacgccaagagctaaacgtacgctccctctccctgcccacggccacgggcgatcagcgccgtttgcatcgtgttacgta

SEQ ID NO: 14498 - DNA, 508 bp, Zea mays
  Coding DNA Sequence Number=SeqID_95
attagatgtggctgctgcaatcctcggaatccaagcagaagtcgctcagaatcaggtgaagcacatgaggctttggctatttgagtgcagagagccaagccaggacgcgtacaggttaggtctaggtgcagccgcggtattggtaatggctcatgtactcatcaatttggtcggaggctgtctctgtatttgctctcaagacgagtttcaaagatcttcttccacaaagcaaatctcaatggcttgtctcgttctcacttggatcgtattcgccgttggatttggggctttagtgattgggacgatgtccaacaacaagtcaagatcctcttgtggattcacacatcaccattttctctccattggagggatcttgtgttttctacatgccctcttttgtgtcgcttattacgtttctgccacagcggctaaagacgcagctgctaagtgacaaagccatgataaggatgggtgaacacaggtgggtggtccttgtacttgactatat

SEQ ID NO: 14499 - DNA, 498 bp, Zea mays
  Coding DNA Sequence Number=SeqID_96
tggatgcatctcaacagggccacatttcaaccctaacaacatgacacacggagctcctgaagacgagatccgtcatgcgggtgacctgggaaacattattgccaacgccgatggcgtggcagaaacaacacttgtggacaatcagattcctctgactggtcctaactctgttgttgaaagagcctttgtggttcacgagcttaaggatgacctcggaaagggtgggcatgagcttagcctgaccactggaaacgcaggcgggagattggcatgcggtgtggttggtttgacgccgctctaagtctgggctaagtaagtactttggtgtctactgtgttggtcgtcttgtctgttgaatcagatgtcaaataaagttggctgaataagctattgatgtttatgttcctagcatcaaactctctttctggagttgtgcctttgtaaacgtgtttgttacttttggtttaaatctgcattcgatcgtttgttttgctatta

SEQ ID NO: 14500 - DNA, 485 bp, Zea mays
  Coding DNA Sequence Number=SeqID_97
aaccaagcgtaagccattgcagacagtggaaatcaaggtcaaaatggactgtgacggctgtgaaagaaaacttagaaacgtggttcgtcgcatgaaaggcgtgaaaacggtggaggtgaaccggaaacagagccggctaacggtgaacggtcacgtggacccaaacaaggtgttgaagagagtgaagagcacagggaagaaggcagagttttggccttacatacctcagcatatggtctattaccctttcgcgcctggcatgtacgacaaacgtgcgcctgcaggccacatccgcaaccctacacaagcgtttccagccgcaaacgcacctggtgaaaactacgtttccctcttcagcgacgacaacgtccacgccgcttgttccatcatgtgaaatatgtaagaagcagaatataatataataatctatattttcttctttgtgtacacatctacttttgcaagttgcaactattctcataata

SEQ ID NO: 14501 - DNA, 592 bp, Zea mays
  Coding DNA Sequence Number=SeqID_98
aacagggcattttaatggcggccatgaactcgagtgttctcacctgcagctacgctatctctggtgctggctcagcagaactgaaccagaaagtgggtttggtcaattcatcagttggttttggtcaaaagaaacaaacgcttccagtgatcaaagcagctcaaagagttggtggtgatgatgttaatggaagaagatccgcaatggtgttcttagctgctacactcttctcctctgctgctgtatctgcttccgctaatgctagcgtcttcgatgaatacctcgagaagagcaaagccaacaaagagctgaatgataagaagagattggcaacaagtggagcaaactttgcgagagcgtttactgtccagttcggaagctgcaagttccctgagaatttcactggctgccaagatcttgccaagcaaaagaaagttccatttatctcagaagatttggcgttggaatgtgaaggcaaagacaagttcaagtgtggttccaatgttttctggaaatggtgatcatcttttgtttctgttttaatccattcttgtataaactcaacaatgtatcaatccatctctctgttcat

SEQ ID NO: 14502 - DNA, 588 bp, Zea mays
  Coding DNA Sequence Number=SeqID_99
gaatcagctgttccacaggttgctcttaaggcttttgcttttctcagtgaaaacaccgccgcgcagtctgttgttacttccattgcgtctgacccaaaggtgtgggatgctgtcatggaaaacaaggatctcatgaaatttcttgagaccaacactgcttcaactaaggatgaagctgacaatgacgacaaatctgaactttctagcgagactgaaagtgaagaagacagtgaagagaagccaatccagctcatggagattctgcgagacatgaagctgaaagctgttcaaatgatggaaaatgtatcttcctactttgggggtttgttcaggacagagactttcacagagggtggacaggagaggaagaggatgttgctcaacgaccctactactctctttggattagctgtttgcgttattttcatggtagttctgaaacgtgcttaacaagttccagtttccttttaaacttgccgatatagcttataactactgtgttctctttctgctacttcattatcgtttagagtttttttttttaaactgttctacttatgtttggaatgatttggaacttgcctttga

SEQ ID NO: 14503 - DNA, 491 bp, Zea mays
  Coding DNA Sequence Number=SeqID_100
aatccatctgaatcgacattgttagcgctcgtcatggcaaccgcattccgacgctcatcatcccaacgacgacggtgacacttcgacactcctcccaacggtggcgacgatggtccggcgcgtgtcctcccagcggcggttacagttctccgacgcttgtccttacaacagcggcgatggcgctccgatgctcctcgtctcgatggggcaacaatgctgatcttgaagaaggcgaggatgctgctgctagttttcgagccgatccgatcctatcttcagcgccgcagatgccttacctgcaggtatgtttggtgttcgacaaaatggccaagtgctcacaagcttgacagaaagaaaaaaaaattcgcggcaactgaggccaaggaacaaagatggcttcatggcttgagcttctatgcgatggaataaacaattatagtatactgaataaacatgaatgttctgagcacttgttatttcgaactgggaac

SEQ ID NO: 14504 - DNA, 543 bp, Zea mays
  Coding DNA Sequence Number=SeqID_101
aatcggatcctctttcgcagaagctggaggacgcggtgcaccggataatggtgcgccgagccgcgcctgattggctccctttccttcccggcgcttcgtattgggtcccgcctcgtaggtcccagtcccatgggatcgctaagctcgttgagaagctggcgaatcccatcggcgatgaagagtcagtctctgtcgcgtcgggtcgtggatggccttgttctgattacttcatcaaaggtgtagagcctgaatcggtggagacggagatggcttcaggtactgctgcatctcactctgaggatgaggaaggctaaaacattaaaactcgttaaaaccattgtctggactcttcaaaagatttgttgattttaggaacgcggatcaaagaagaattgaaccaccaagagcggttttgaagaggtgacatggtttagactttaagagagggtagaggaaacaaaccttttacaacacatgagatcctatcaagttctgaaatgttaaaaaaaaaaacaataagaaaaggcgttgtagctcagcccc

SEQ ID NO: 14505 - DNA, 540 bp, Zea mays
  Coding DNA Sequence Number=SeqID_102
atattctctcattccgatctctatctgcctaatctctatccattttgtttcatttcttcttcccaatcacaaaaatgggtcgccgtagctcaggaggaagatctgcacctcgtcctcgccctgctgctgcacgtgcccccgctcctcaacatgtaaaccgtgcacctcctccagctccagctcaggcgaccagtggtggtggcatgttctcaggcattggttccaccatagctcagggtatggcttttggaaccggaagtgctgttgcacatagggctgttgattccgtcatgggcccacgtaccattcagcatgaaactgttgaggctgcctctgcatctgccgctcctgtcggaagcagcatgttctcgagctcctgtgacattcatgctaaggctttccaagattgcatcagcagctatggaagcgacattagcaagtgtcagttctacatggacatgttgtctgagtgcaagaagaactccggttccactattggtgcctgaatcaagcttgtttcatttcttatctagctttgtc

SEQ ID NO: 14506 - DNA, 58 bp, Zea mays
  Coding DNA Sequence Number=SeqID_103
gggaatcaggtaccagccagccatcatcattgcttgcttcacggcgcgtacgacgtgt

SEQ ID NO: 14507 - DNA, 555 bp, Zea mays
  Coding DNA Sequence Number=SeqID_104
atgaggatgataacgctgctgagactgaggaagagattgactatttaccagatatggctagtaaatctgaagccgaggaggttggatgctcaacaaaaatgacagtggaggaagcaccagataatactaagcaaaccgaagaacagggcaattgtctgagggataatccaacaaggggaacaataattgacaaagctgatataacatggggagaagatggccttaagaactcggataaccaaccttcagtaaaagagccactctctacagtggtaagaaaggtgtttgggctcctgtagaacaggagtttcttccatccttcctgaagactagtttggagggcaatagataagctaattgaaactcttcaggcctagtttgggtactctagtaatgaaatgaattggaatgaattgagatgtattgtgtgagtttttgatctgttagggatttaaacactctttaatccctccaaaccattcaatagggatttaaattctcttcaatctctccaaaccacttcaatccaagagtacgcaaactagggctcagttg

SEQ ID NO: 14508 - DNA, 474 bp, Zea mays
  Coding DNA Sequence Number=SeqID_105
gaagaaggaatcatccctctcacggattcattacccataattcctcagtcatacatcacacactccctcaaagtagaaggcttaagaggcatagtaacagctccagccaagctagagtcaacaacacacgtctttgcctatggagtggatctcttctacacaagacttgctccttcaaagacctacgactcgctgacagacgatttcagctacgcacttcttttgatcacgattgtggctctcgttgcagccatctacatcacttgcgccctgtcggagaagaaggaactaagtgaaaaatggaggtgattggatccttcagaagttttaaaccctctctttggcttttcacggttggagaatgttcatggaaaaaaaaaatattggcttaactaaattcttaatgttaggctttggaaattgagtacttaacatattcttgcttgtgacttctgtcacattagtcttgcgttg

SEQ ID NO: 14509 - DNA, 555 bp, Zea mays
  Coding DNA Sequence Number=SeqID_106
ccacggcgacgggaatcaagtttcaggatgcgaagtgggttaatggaacctgggatctgaaacagttcgagaaagacgggaaaaccgattgggattctattatcgtcgctgaggcaaagaggagaaagtggcttgaagataacccagaaacaactactaacgctgagcctgttcttttcgacacctcgatcattccatggtgggcgtggatgaagagataccatctaccagaagctgaactcctcaatggtcgtgctgcgatgatagggttcttcatggcttactttgttgacagccttaccggagtaggacttgttgatcaaatgggaaacttcttctgcaaaacactcttgtttgtggctgtagctggagttcttttcatccgcaagaacgaagatttagataagctcaagggtctgatcgaagagacgacgctatatgacaagcaatggcaagcggcttggaaagagccggaatcatcatcatcgacgctttcttcaaagaagtgaacaaaatctttctcgctttttgtttcctcttttctcatgtgatgtt

SEQ ID NO: 14510 - DNA, 526 bp, Zea mays
  Coding DNA Sequence Number=SeqID_107
gaccaagcccttgtcgacaaaacattcgaccctgccacgatcgaagacctcatgcgtctcttcgaagtcgattcctacaaggcttgggcagctctcgaagccgagcaacaacaagagctcgaagccgctgaagaatctatccgcgaagccgaagctgaactcgatcgggatatggagtgggggatggaggagtacaggcggacgttggaggagatggagaggatggaggcggcggagcttaaagagcttgaggagaaggcggagactgctcggagaacggggagtttattggagaaagctgctaccatcgccgcgaaaaggcatattgcggcggcgatgggatcagctgctgcgtcgatgagatctgcgtggaagactgcatctgggaacaaagttcatccttcttgatcggagaatatgttcggtgtgtagtgattctgatacatgataattattatcgataatgatcaatgcatgggtccatgtattaggaacgttaggtgatgggttatgtcgatggtgccaa

SEQ ID NO: 14511 - DNA, 451 bp, Zea mays
  Coding DNA Sequence Number=SeqID_108
cggcgccggtgtgcttcaagaagccggcgggcgaggacaccggcatcctggagaccaccaaggactacttcaagcagctcaaggacaccagcgccgacacgcactgggactgcatcaagaaccggttccgcgccgccggcgactacatctccaacaagaccagctcggtgtttggcaggcagaaggtggagcctgaggccaaggaggagaccccgggggcgaagccagaaggggcaccggcggcagctgagactcagtgaaggcttgtcctgagctcgtgatcgtcttccatgaaccaacctgaagcttcattcactgagagttgcgaggtcttatcagcctggagtttttcttttcgctttgtccttgtgttcgactagttggggcatggtttgcctgagcgatttcgcattgtaaaagacccgttctggctgtggatcttaatccggtt

SEQ ID NO: 14512 - DNA, 507 bp, Zea mays
  Coding DNA Sequence Number=SeqID_109
atgatcaatcggacggtggaagcgtgagatcgtacggtgaagaatcaccggaggaggccgtgaaagtgacacgtagcatcatgataataaaaccaccgggataccaaggcggttcagctccggtttcaccggccggttcaactccgccagtgtctcctttctctggaggaaaggaaccctttcggtttaggagaaggtcgacgtcggacgcgttcgataagggagcaggatcagagaatggaccaaggaactctcctcctacttacggcctgtgatctataactcaaatctcaatagggagagagaaaagaagaagagtagcccccaaaacgctttcgatcaagtggtccttgcatgcagagttcgtgttgcttccgttttgtaggccaaagaggttctctcttttgtgtgcgtgtatgagtttgttttgtgtgtttgtggttacgtctatgtttttgtttttgtatgtcatctcgttttgggaatgcttctacgtgtctgtacata

SEQ ID NO: 14513 - DNA, 589 bp, Zea mays
  Coding DNA Sequence Number=SeqID_110
acatgttccacgagagcgctcagggcaaggccgccgtgatcggcgtcttctatgagattggtgcccatgacgccttcctgcacaagctggagccatacctggagatgatagcggatcgcaaggacagagaggagaagatgggcatgatggatcccaggggcgccagaggaaaggccagcgtgtactatcgctacgtgggctccctcaccgccccaccctgcgcggaaggggtcatctggaccatcgtcaagagggtgcgcactgtgtcgaggcaccagctggagcttctcagggaggccgttcacgacgacatggagaagaacgcgaggccccgtcaggaggtgaacagcagagatatcagcatgttccgaccttttgagcaaaatagacattgattactagtgttgatcctctggctaattagtctggtgcttcagctattttttatgtacatggttatatcatttctgtacgcagtagtgattttgcatccactttgataacttgtatacggttactgaataataatggaacgcgtccagttcatgtccatgcatatcttcatgtttccatgttgggatctgccaga

SEQ ID NO: 14514 - DNA, 585 bp, Zea mays
  Coding DNA Sequence Number=SeqID_111
gcctggtcgataggtgcactgctaacttaactgaggccaagcagtattaccgcagacacaaagtctgtgaggttcatgcaaaggcatcttctgcaactgttgctggagtcaagcaacgtttttgtcaacaatgcagcaggttccatgagctagcagagtttgatgaaactaaaagaagttgcaggaggcgcttagctggacacaatgagaggaggcggaagatatctggtgacagttacggagaagggtcaggccggagagcggttagcttgacacagactcaagaaagaaacaggatagacatgaaacttcctatgactaactcaccattcaagcgaccacagatcagataaaacaacatcaacacacccaaccgctctctctcttctgtcatctacttatgttatatatctacgttctctagctatccaaataatgacatctaagtaccatgtcaagaaaagtggatcgtggtattgaatcctacaacaatatataactacaaaactctagtaccctttatgttatcatttaaaggatgcatatccacaaatgtataagacttgtcatactcttgtattgtct

SEQ ID NO: 14515 - DNA, 538 bp, Zea mays
  Coding DNA Sequence Number=SeqID_112
accgaacccgccaaatgtcagaagtgtttaaagcgtaatgttcgtcaagcatatcacaagttatgcactggttgtgccaaagagcagaaagtgtgtgcaaagtgttactcttcttctgagcaaatcatgggaagggatatatatgaagtagaacctgaacagaagctgctcgatgagactatcaagaatgctagggaaagagatcgaaggacacttttgcgtgctatgaacaaagatagcaacccaaagaagtcagatgaagaagcaacgaggagcgatagcagcaaggttggtgatgtgtttccatcaacatcccttgaagaatatgcaaacaagtctggaagagttagcgggattgttggtcatggccatgtcgttgacgatgaagaagatgatgatgatgttgctagtgaacctgaactagatgaggaccacagtggtgatgatgatgacgaactgcaaaagtaatcgtagtttcggttgtagtagttctgtcaattttgataggcttgtgagattttgcaaaactcgttatgct

SEQ ID NO: 14516 - DNA, 559 bp, Zea mays
  Coding DNA Sequence Number=SeqID_113
gaggagaaagattccgatcgccagcgccgcctctcctcccgcgacttcgaatctctcggttccgatggcggtcccggcccgcagcgatccattgaggggtggattgttttggtcactggagttcatgaggaagcacaggaggatgatatctccaatgcttttggtgattttggcgagattaagagtctgcatctcaatctcgatcgccgtactggttttgtcaagggctatgctttgattgaatacgagaagagtgaagaagcgcagagtgctatcaaagcaatgaatggtgctgagcttctgaccaagaatgtcagcgttgactgggcctttagcaatggaccaaacaatgctggatcttacaggagaaggaacatgaggtcggggaggtcacaacggtcacgaagcccgagaagacgtttctgactgtatgatttagagttgtctccacatctctctgtattttggattctctatctgtaactcgagagtgtttcgactcttctttttattggttaagtaggtttggttgttttcaacgttgtgtaatcttatgcat

SEQ ID NO: 14517 - DNA, 600 bp, Zea mays
  Coding DNA Sequence Number=SeqID_114
ctccaagctctctgtggctaagaagcctgctaaagcagcaggtcgtagcaaagcggcggctaaggatcctaacaaacctaagaggccagccagtgccttcttcgttttcatggaggactttcgtcagacttacaagaaggatcaccccaacaacaaatctgttgctgctgttggtaaagctggtggagagaagtggaagtcgttgtctgactctgagaaggctcccttcgtagctaaggctgataagcgcaaggttgagtatgagaagaccatgaaagcctacaacaagaagctggaggaaggtccaaaggaggacgaggaggaatctgacaagtctgtgtccgaggtgaatgatgaggatgatgccgatgatggtagtgatgaggaggaagacgatgactaaaagaagttgaagctggtagcacaatataggaacgctacaacaaggatctctcggatgttttttattttctttctttttactgatgttttcaacttagtaaaagctgccactatctctctgattatgattctacgggtaatggaaaaagtgtgtgtagaatgtttgaatgggagatatgcacctctatgtaacgattt

SEQ ID NO: 14518 - DNA, 568 bp, Zea mays
  Coding DNA Sequence Number=SeqID_115
tcgccgcggattagcttgcaacattccacgatctggattcgtcatctccgtagcatcacaacagcttcctccatgagccaactaaccagcgaaaccgatgcctcccgtactaacgacgagaactcggctgagaaaccagacgacgtaccagacgacgtcgtggttcaatacgtggtgcttagacgagatctgatcgattcgtggccactcgggagcgtcgtaacccagggatgccacgcgtcggttgcggcgatatggtcgttcaaagacgatcccgttacgcttcagtactgtgatccacagcacattgactctatgcacaaggtcactctggaagttaaaggagaaactcagatgttgaatttgtcagagaagttgaagtcaggaggaatctctcataaggtgtggatggagcagccggagaatattccgacttgtattgctacaaagccttatctcaaatctcaagtctctcctttcttcaagaagctcaaactttgcaagtgattcttctccattttatattaaaaaatctcatttataaagggacactcttttgaatgttaag

SEQ ID NO: 14519 - DNA, 397 bp, Zea mays
  Coding DNA Sequence Number=SeqID_116
atctttgtgagaacatggctgcttcagtgatgctttcatcagtgacactgaaacctgcgggtttcacggtggaggaaatgtcggcgagaggattgccatcgctcacaagagcttctccttcttccttcaagatcgtcgctagtggcgtcaagaagatcaaaacagacaagccctttggagttaacggcagcatggacttgagggacggcgtcgacgcttcaggcagaaagggcaagggatatggtgtttacaaattcgtcgacaagtacggtgcgaacgttgatggatacagtcctatctacaacgaggacgagtggtcagcgagtggtgacgtgtacaagggaggagtcaccggtttggcgatttgggcggtgacactcgccggtattcttgccgg

SEQ ID NO: 14520 - DNA, 441 bp, Zea mays
  Coding DNA Sequence Number=SeqID_117
gaagacatccgagcagtattccagcgcttcgacaaaaacggagacgggaaaatctccatcgacgagctcaaagacgtgatcggagctctcagtcccacggcgtcgccggaagaaacgacgttgatgatgaaagagttcgatctcgacggtaacggatacatcgacatggacgagttcgttgctctgttccaaaccgaagacggtggcgatattcgagatctgaaggaagcgtttgatctgtacgatttggatggaaacggacggatctctgtgaacgagcttcactcggtgatgaagaatctcggcgagaagtgttcggttgaggattgcaagaggatcattagcaaagttgatgctgacggtgacggttgtgttaactttgaagagtttaagaagatgatgatgaacggcagagctactgcttgacttaacggcgaggaa

SEQ ID NO: 14521 - DNA, 539 bp, Zea mays
  Coding DNA Sequence Number=SeqID_118
taagggtgttgcaccccgcaagaaccttgatgtgatgaaagctgctattgatggcttgacaaacacagaggatgatgacggcaaagagaatggtgacgcatctgtgaagaaaagcaagaagtccaaagctgaggctaacagtgacgcgatggacgttgagaatgccgcaacagaagctgaaactggaaccgagaagaagaagaaaaagaagcacaagcttgaggagccgcaggatgtggagatgcaagccaatggcgatgatgagacccctaagaagaagaaaaagaagaaccgcgacgccgagtctgttgatcctaagacgggcaccgaggggaaatccaagaaaaagaagaagaaatccaaggctgatgacgacgagtagtagattagtacctaagtacctagcagcgagtgttcaagtcgattgaggatgaaattttttgtaccgactgtttatgtgtgtactgtttgagcctctttgagcccttgacgaggtctgtaatgtagcttcatggactgaagcggcgtatctgtaatac

SEQ ID NO: 14522 - DNA, 505 bp, Zea mays
  Coding DNA Sequence Number=SeqID_119
aaagtgtctctcttttcttagcacacacaaaaagaagagaaaagcaagagacaatggtttcggcactgagattcttcacatgtcttgtcttggcagtgtgcatagttgcctcagtagatgcagcaatctcatgtaacacagtggtaggtagcttgggtacttgttacgtttacctaaggcaaggcgggattgtgccgccttcatgctgtaggggagtaagaaatttgaacggtatggctcaaaccacaccagatcgtcaacaagcatgcaaatgcgtacagtcctttacaaaatctgtccctggtctcaaccaaaatttagcatctgggcttcctggaaagtgcggtgttagccttccctatcccatctccattagcatgaactgcgacaacgtcaagttaagcggaactcatatatcatcgtgaggatgaagagtatggtctacaataagtaaaacgaattaatggtttacatactcgctgattcatcatctccgacttgtctt

SEQ ID NO: 14523 - DNA, 595 bp, Zea mays
  Coding DNA Sequence Number=SeqID_120
ggacgcttgtcgtctttctcatctactccttgagggttttctctattcacggtttctacatcatctcctacgccctcggcatctacctcttgaacctcctcatcggcttcttgtcccctcttgttgatcctgagctcgacctctcctctgatggtggaccttctctccctactcgaggctctgatgagttcaagccttttatccgccgtctccccgagttcaaattctggttttctatttaattatgcacttaacatgtttttttttttttttgtttatttggatggggattgaatctgtttttcaggtactccatgactaaggccttctgcattgcgtttctgatgacgttcttctccgtctttgatgttcctgtcttctggcctattctgctttgctactgggttgttctctttttcctcaccatgagacgccaaatctcccacatgatcaagcacaagtacatccccttcagcatcggtaaacagaaatatagtggccggagatcttctgcgagtagcggtcgtgctgattgattctgattattagttccaatttgtttcatgttgctctctgttagttccctccaaagtac

SEQ ID NO: 14524 - DNA, 520 bp, Zea mays
  Coding DNA Sequence Number=SeqID_121
tcgtccatcgactgcttcctcgattccgacgaagctcaccgtcaatttcgtcctcccttacgcatctgagctttccgggaaagaggtcgacatggtcatcattcccgcgacaacaggacaaatgggtgttttgcctggacacgttccaacaatcgctgagctcaaacccggtatcatgtccgtccacgaaggtactgacatcaagaaatactttgtgagcagtggatttgcatttctccacgcaaattccgttgctgacattatcgcggttgaggccgtgccgcttgagaacatcgacgcaagccaagtccaaaagggtttagctgagtttacacagaaacttgcttctgccacaacagatcttgagaaagcagaagcacagattggtgtcgaagttcacagtgctatgaacgcagctctctcgggctgatgatgagtgaaagtctcttttttactactacaaatgatggaataaattagaaaatgattttatttttccttttcgtaattgtgttggact

SEQ ID NO: 14525 - DNA, 591 bp, Zea mays
  Coding DNA Sequence Number=SeqID_122
ctgcgttggcgttttacattctatccgctctcttcttcaacagctttgtcataatctttgttgtgactgttctccttgctgcacttgacttctgggtggttaagaacgtgagtgggcgtatactggttggtctcaggtggtggaacgagatcaatgacttgggcgaaagtgtctggaaatttgagtctcttgaccaagagtccttggctcggatgaacaagaaagactcgtggcttttctggtggacgctttaccttgcagcagctgcgtggttgatccttggggtgttttcactgataaggtttcaggccgactacctgcttgttgtgggcgtttgcttgtccctcaacgtggctaatatcatcggcttcacaaagtgcaagaaagatgcaaagaaacagtttcagcagtttgcttcacagacaatcgcatcaaggttccaatccacggtacaatctgccttcacccttgtttgaaaaataaaaaaggttttagtgagagcaaagactgtgtacaaagaagattgtcgccataagccacaccatgtcttttttttttttttttctggctgattgttttttccactatata

SEQ ID NO: 14526 - DNA, 577 bp, Zea mays
  Coding DNA Sequence Number=SeqID_123
ttgagagatctcttcagctcctatggcgtcaaacaccagccgtaattccaagcaaagaaacggacctccgccggggagaaagaagaaacataaggtgaatcagcttaaaccaggtacgagcggtcacactttgacctttaaggtcgtggatcagtattcagttacttctttcattagacctggtcggatcgctgagtgcctcgttggagatgagactgcttccatcatcttcaccgctcgcaacgatcaagtggacttgatgaagccaggaactactgtgaatctccggaatacaaagataaatatgttccacggattcatggggcttgctgttaacaaatttggtcgcatcgaggtcgtcactgaaccagctgatgacataactgttaaagaggacaacaatctatcccttgtggagtatgagcccgtctatctctagacccgtgtctaataggttatgtgtcaatgagttttggccaaatgttttatcttatgatgttgcaggtttgctatttatctaataggttatgtgtttttgttgcattatcatttatcttttgtaacctattctctctcc

SEQ ID NO: 14527 - DNA, 463 bp, Zea mays
  Coding DNA Sequence Number=SeqID_124
aagaggcttctgcttctgtgagcaaggatgcagaggtgatgttgaagatgggtagtacacaggacaagcgagagcaacacagattgatgcgagatgctatggagaaacgattcacccgggtcactcgtggctccctcattggagggatgcgtctcgggatgttcaccgcttcatacttcagtctacagaactttttagctgagacgcgaggagtgcatgatgttttcaatttcgtgggagctggttcagctactgctgccgtatttggcttaatcatgccggggtctcttgcttggcgtgcgcggaatgtgatgctcggttcagttcttggagctacagtctgcttccctcttggttggttacaactgaagctcatggagaaggcaaacgaaggcaacaaacaagacacgagccacattggcgaggtcacaagtggtgttggtgctgctattgagagactcga

SEQ ID NO: 14528 - DNA, 560 bp, Zea mays
  Coding DNA Sequence Number=SeqID_125
gaacttgtgcttcaagaagtccttgacgccgccgcctcctcctcctccaccgcttcctccatctccaggatatggatcaagaaagatcgagggagacagcataaccaataaacagatcaagaagttctggaggcagaagcagatcattgaagaggagcatctctttgctgctattaaggctgcagctcgtgtcagagcccgtaatctctctgatgaggactacaaacgctttgaagaaagcttggacatggaggatccagaaaccgaagttgacgagggaattaaagactggtggatgaagagtaagtacgcgtacttgaaccagcctgctcttggatctgcagattcactcaagagaaagaggttttcgtcttatgtaccaaactatttctcattcaagccttgcattcctctctatgcaacttcgcttaatgtcttttaactatgtgcaaattgtcttgcgtatatgtctacatatgtgtgtgtgtgtttgtgtctttgtacattcatgtgtaattgtgttccgtgttaatggatctggactttggtgtgtggttgtt

SEQ ID NO: 14529 - DNA, 531 bp, Zea mays
  Coding DNA Sequence Number=SeqID_126
acagcagaattgatcccagcaggagaagtgatcgcttgccacaccgtcgaggactggaacaacaagctcaaggcagccaaagaatccaacaaactgattgtgatagacttcacagcagtgtggtgcccaccttgccgtttcattgcacccatctttgtcgagctcgctaagaagcaccttgatgttgtcttcttcaaggtcgacgtcgatgaattggccactgttgctaaggagttcgatgttcaggccatgccgacctttgtctacatgaaaggcgaagagaagctcgacaaggttgttggtgctgcgaaggaggaaatcgaagccaagcttttgaagcactctcaagttgctgccgcttaattatccttcgtcttctctacctatttgctaatgtgtttggtgttttaataaaatccttgttgctttattggcactttcacttgagtcatcatcttcctttgtgttgtggtgcctacaagccttgggtgtgtgaataaatgtttgcaaactttataactcgcagctatg

SEQ ID NO: 14530 - DNA, 545 bp, Zea mays
  Coding DNA Sequence Number=SeqID_127
gagacaaccagcttcaaacatcgatagactatgcttgtggaaccttagcagattgtaacccaatccatgacaagggtgcttgttatcaaccaaacaccataaaaaaccactgcgattgggctgttaacagctacttccagaaagcagctcaggcccctggaagctgtaatttctctggaactgccactaccagtcaaaacccaccttcaaatttggttactggatgtatatatccttcaagcgctagctctgcagggtcgcctccttcaactacaccaccaacgggaacaactccaacaacaaacggaaccggaggctttactccatttccgggaactccacctgcgtttggtccaactggaaccggaggctttagcccaagcaaagctgcttcaagtttggtcatttcctctgttttcacgctctgtttctcatcactagcgcttctgatgtaaggttcgtgtagagacaaaagacatccacatgggtccgtcttttgattcccttttgggtagaaaaggaagcttcagtggtcattgtggttt

SEQ ID NO: 14531 - DNA, 437 bp, Zea mays
  Coding DNA Sequence Number=SeqID_128
attgacgacttgctcgaggcagctagatacaatgatatagatgatctcaaaagcttggcctttgatggtgtctctcttaactctcgcgattcccaaggccgaacagcgcttcatatggccgcggcgaatggacatatgagtatagtggagtatctgatcagtcaaggagtggatattaacgctctgaacgaggagaacaatgctcctctgcattgggcttgtttgaatggccatatcgaggttgtgaagaaaatgatcttggcaggagccagtcttagtcttttgaatcggtacgagcggactcccatggacgaagctattggtgcagggaagatggagattatagatgctatcaacacaactgttacacaaatggaacttgaaaacaccactgtagcctgactttaatggcgtcttcctaaatgcttgttgtctct

SEQ ID NO: 14532 - DNA, 570 bp, Zea mays
  Coding DNA Sequence Number=SeqID_129
agagtacaaggttcacgcttacaataggaatggcctttgcgcggtgggattcatggacgatcattatcctgttcgaagtgccttttctcttctcaatcaggtcatagatgagtaccagaagagttttggtgaggcatggaggtctgctaaagaagactcctctcagccctggccttacttagccgaagctcttaccaaattccaggacccggcagaggctgataagctgttgaaaatccagagggagttggatgagaccaagattatcctccataagaccattgatagcgttctagcccgcggtgagaagctggacagcctagtggagaagagctctgatttgagcatggcatcgcagatgttctacaagcaagcaaagaaaacgaattcatgctgcactattctgtgagctgcgactctggatggatgtctttgggtatatatagtcaaccaaacttttgctgtggggcgagactgttttccattttatataatatatatttgattccgttctctcgtttgcatgcactcttgaaattccatataagactcatgtcgtgtggcgtgtta

SEQ ID NO: 14533 - DNA, 540 bp, Zea mays
  Coding DNA Sequence Number=SeqID_130
agagatgggtttcttctcgtttcttggaagagttcttttcgcttctctcttcatcctctccgcttggcaaatgttcaatgactttggagttgatggtggtcctgcagctacagagctggctccaaagcttcatctggctaagtcacatctatcttctagattaggtgtaactttgcctagcgtagaggtaaaacaagtcgttgctgctatagttgcgttgaaaggagttggaggcttactctttgttatcggaaacatcttcggtgcttatcttctggctttctaccttgtggttgtcagtcctattctgtatgatttctacaactacggacctgaggagcgtcatttctctccattgttgactgagttcttgcagagcgttgcactctttggagcattactcttctttattggaatgaagaactcaacacccactaagaggaatctgaagaggactcctaagcccaaagctgcttagtatctcttttttttttataacttttgttcggacaaaatcgtttcttagcactttggttttct

SEQ ID NO: 14534 - DNA, 532 bp, Zea mays
  Coding DNA Sequence Number=SeqID_131
gacgtgtgcgtgttcacggtttacataagaaccggttcggtttggaaagccggttcagactccgtcatgagcctccgtctctacgacagttacgggcaaaatgctgttatatccgatttggtgtcatggggaggtttaatgggtccattccatgattattatgagaggggtaatctcgacattttcaccggcttaggttcttgcttatcaggtccggtttgtgcgatgaatttgacttccgatggctctggcgatcaccatggttggtattgtaactacgttgaagtgacgatgagtgagagtcgtaggagaagttgttctcaggagaaattcacggtggagcaatggctggctcgtgatacttcgccatatgagctgtcggccattaggaatcaatgttcggactctgtcgagaatcgatgagtcgtttccacgatgtgagtgtgttatttatttattctggtggggttgtcaatgaaacatgacgtgatcatatatttaattcgagtgtgattaagatctcctgctttta

SEQ ID NO: 14535 - DNA, 570 bp, Zea mays
  Coding DNA Sequence Number=SeqID_132
taaccgggagctgttgtcaccatgtttctcacgagatttatcgggaggagattcttagcggtggctgcttccacgagatcggagtccactactgcagcagctgcctcgactgttaagattgcgaaaaaccctctcgaggagttctttgagttcgacagaagccaggacgaagacaaacctgttgtctacggtcgaggttggaaagcttcagaactgcgactcaagtcatgggatgatcttcagaagctgtggtacgttcttctcaaagagaaaaacatgttgatgactcagcgtcagatgcttcaagctcagaacatgatgtttcccaaccctgaacgcattccgaaggtgaggagatcaatgtgccgcataaagcatgtgctgacagagagagcgattgaagaaccggatcccagaagatcagccgagatgaagagaatggtcaatgctatgtgatcaatcccttgtgcttcttttcgcaaccgattagagtcggtgtttgggtcttagtccaatgattgtgactgttgtccggttgttaaaatgtttgttcgggtatatgcacgtacg

SEQ ID NO: 14536 - DNA, 469 bp, Zea mays
  Coding DNA Sequence Number=SeqID_133
aaagttctgggttgcactcggtgacggtatcaatctctttcccaaagagttccctaaggactacaaaacaatgcaagttcttgccggagatggcaactctcctggctccattcgcctcattatttatggagaaggatccccactggtgaaagtatcggcggagagaatcgaaacagtggatctggaaaacaaaagcatgacgtacagcatcatcggcggtgaaatgttggaatactataagacattcaaaggaaccatcaccgttactcccaagggcggtggcagcattttgaaatggtctgctgagtttgagaagaccggccatgagattgaagatccacacgtcatcaaggactttgctgtcaagaacttcaaagagatcgatgagtatctccttaaaaaatccagcgtctaaaactctagaagcttctattatatataagggggttcgatcatctctatcagtttt

SEQ ID NO: 14537 - DNA, 419 bp, Zea mays
  Coding DNA Sequence Number=SeqID_134
aatggcgacttcagggtttaagcatttggtggttgtgaagtttaaggaagatgctaaggttgatgagatcttgaagggattagagaatcttgtttctcaaattgattctgtcaaatcctttgaatggggagaagataatgagagtcacgagatgcttagacaaggattcactcatgcattctcgatgacttttgagaacaaagatgcttacgtttctttcacaggccatcctcttcacgttgagttctctgccgctttcaccgccgtcatcgacaagattgtggtcatggacttcaccgtcgccgccgtcaaatctcccgttgttgtagcaccgtgaaaactcatcgtacttgtttcttaattaatctcgttttataatttaatcgaggtttgtgagttgtttcggtttatgtaattct

SEQ ID NO: 14538 - DNA, 463 bp, Zea mays
  Coding DNA Sequence Number=SeqID_135
atcaatcttaaacccacgacgacaacgacttcgtctcactttgcttcagtctcccaatccatccctcgcgcttcaagggttctgtcggcattgggaagcgttgaaacgatgataccacttcatagtgcggttgcttcagctcggctccgttcaagcatccgctgttgattcctcctgctggagctggctttccctggagctgggagttcctcggtgacaccaacattagcattggtcctcaatcttgaagcttccatgggttgatactcgatattgagctgcttaagactactacttggtggtaccagattgccagttatggaattgtttttgtttcccagctcttatgttcttctacttaatcatatcatcttattggagcagggaatggatgccaaaatatctcaaaagtattaatcatcatcttagtctagctaagacactagagttgtttcttcttgca

SEQ ID NO: 14539 - DNA, 525 bp, Zea mays
  Coding DNA Sequence Number=SeqID_136
aggtgtccctcagaggaggctgcttggctgcttcagccactgctatagcggtaatgctgatggcaacagagaagggtgtggctgacatctatggcttgccgctccctctcaactccagctggtctttttctccctcctaccagtatgtggtgggggcatgcacggtgaccattctctactccctgttccacctctgtctaggaatttacaggctcctcactggatcacccatcacaccctcccgttcccaagcttggctttgtttcatcttcgatcagctcttcagctatttgataatgagcgctggatcagccggtattggagttacaaacctcaacaagaccggcatcaaacacactcctctccctgacttctgcaagaccctttcttatttctgcaatcacgtcgccctctccctcctcctagtcttgctctccttcatctttctcgcctcctcttccctctttaatgtccttgtgctctccactctctagtctcatggattctctattgttggtgctctat

SEQ ID NO: 14540 - DNA, 594 bp, Zea mays
  Coding DNA Sequence Number=SeqID_137
aacaatcaccaatggcggaggagcagccgagtcccttctctctcccaccgtatcctcagatgatcatggaagcgatcgaagcatcgaacgacgcgaacggttgcaacaagacggcgatcgcgaagcacatcgagtcaactcaggcctctctaccaccgtctcacatgacgctcctcagctaccacctcaaccagatgaaacagtccggccagatcgcgatggtgaagaacaactacatgaaaccagatccgcatgctccgcccaagcgcggccgtggccgtcctccgaaggcgaaacctcagggagattcaagccacgtggcggtcccggctcctgctcctcccgtttcctcgccgaggcctagaggtcgtcctcccaaggcgaaggaaccttcgtcggaggtggaaacgaaggttgcagaaccgagtggttccgggaggccacgtggacggccaccgtagaagcagaagacggaatccgaggcggttaaagccgatgttgaacctgcggaggctccggctggtactggggagcggagagggcgtggaaggccacccaaagcgaagcctgcgatggtgcctgttggttgctaaa

SEQ ID NO: 14541 - DNA, 599 bp, Zea mays
  Coding DNA Sequence Number=SeqID_138
ccaaagcactagctatattactctagcacgccacacaatcacaatgtcatccaacgctgccctcttcgtcgccctgagccttctcctctctgccgtcgccgcccacggctgcggaagcatctattgccaaccgccggtcgtcgtgccgacaccacccatcgtcgttccgccgccataccatggaggagggcacggccacggccacggcgctgggcagtgctcaatcaacgtgctcaacctgagggtgtgcgctaaagttctcggccggctgctcggcctcaaggtcggcgttccggcgcacgaccagtgctgcccgctgctccaggggttggccgacctcgacgccgccgtctgcctctgcaccgccgtcagggccgacattctcggcctccgcctcaacgtgcctgtggacatcagactcctcctcaaccactgcggcaagaagtgcccgtctggtttcacttgcccagcccattaatggacgtactgttgcttgggcgccgaataagatttgctttccgtgctttgttttttatttcatcaaatgtggatctgctccactcccacatttcgattgtgtaaccagttctgcttttctt

SEQ ID NO: 14542 - DNA, 577 bp, Zea mays
  Coding DNA Sequence Number=SeqID_139
tttgtgtccacgtactcacggataatcttctcgacagttttggttttatttattttctgggaggacaaggcacagttgacagggcgatgcaacttagtggaactgacgttggaggatggaatgtcactgttaagccttatcctttcctggaagatgcagactgggaccctgttgccattgttcaaggatatgacacttgtcttgggaaaactgatatcaagagaatgttgtttgatcacttctcttcatgtggacagatcaaggatatcaagtttcagaggagcagcattggtttagcttctgtgtatctttatggagaaggtgcagaagacaaggtgcttgatcttgatgggtcctacatgggaggatgcaaaatacttgttaagcttattccctcgagtggaatatacactgttcaccctcgtagtcgtcatcttggctggcccaggtaacaaggctaggatgactttggaagaaaagctctcggatctactgggagaagagacaataaagacaagctctatgttattagtatttgtgaattaatgcaacgatctactctagtactttctatgct

SEQ ID NO: 14543 - DNA, 586 bp, Zea mays
  Coding DNA Sequence Number=SeqID_140
aagacggttgagcttctcgaagagctcggcctcccgaaaggcctctttcctatggatgacatcgaggaggtcgggcacaactgtgagagtgggttcgtgtggatacttcagaagaagaagctagagcacacgttcaacaagctcaaccagaccgtctcctacgacactgaggtgaccgcttttgtggaaaagggcaagatgaagaaggtcaccggggtcaagatcgaggacatgtctttggtcgaggtctatgtggatgagtcttctgctgataaggttaccatcaagaccaacaccggtctgtctgacacccatgatgcggccgtgttcgctctcggagaatagggagctactatttacaaaggccagaagaataaagtcagaatggttcggcactgcagttcaaatgttatgcagaagtatatgtttccgttttctttgtaatctaataaaggctgttgcatgaatgttgcttcctttcagcccatgttatgcagaaatttatgtttccgttttctttgtaatgtaataaaggatgttgcacgaatgttgcttcctttcagcccgtaagcgtactccaaatgta

SEQ ID NO: 14544 - DNA, 561 bp, Zea mays
  Coding DNA Sequence Number=SeqID_141
ttttttagtttctctccgacgagatttgagatggcactaagaggagtatggcagctccagaagctggtagtgagctactgtaattggggtggcagcagcagaggcataagagcctttatggaatcagagttacctgctctgatcgagaagaatccgcagctcgaagtggtaacggagctctcaaggggacaacatccttacctcaagggcatttacaggaatagaaatgaaagagtggtgtgtgttaagaacatggatcctgatcaagtgcttttgaatgcaacgaggcttaggaactctcttggaaggaaagtggtgaagctgcggactaggcatgtgaccaaacatcccagtgttcaaggcacttggacaaccgctgtcaagttctgacaacctttgcgggtcttttgttcttcttcttattcgttgctgtaatgttgcaatatcaggattcttcctttgttaccaatatttgcaataccaagttgtttccactacttgttctctctggttcgttcctttttttcttacaacaatgttctgtcttgttttggatccggt

SEQ ID NO: 14545 - DNA, 499 bp, Zea mays
  Coding DNA Sequence Number=SeqID_142
gtgcctgctcccagagttacagaggctgacaagaataacgataaaaagtcattatatagagctctggacaagaagttgtatcttctcatcttcggcaagccatttgagctactagtgacaaacctgtctggcatttccctgagaaagtctatgattctgagcctactcttcgtaagtgtgcggaatctgctttgaagtcagtgttaggagacctaactcacacatactttgttggaaatgctccaatggctcacctggctatacaacctactgaagaaacacctgatttgccatcttacaagaggttcttcttcaaatgcagtgtagtggcagcgtctaagtacaacataagtaactgcgaggattttctgtgggtaaccaaagatgagcttctggagttcttccctgagcaagctgacttcttcaacaagatgatcattagctgaggctactctcttttttcctcttttttcctttgttatttccttccggctctctt

SEQ ID NO: 14546 - DNA, 549 bp, Zea mays
  Coding DNA Sequence Number=SeqID_143
gagagccaagattcactctgtcttggattggcatcactccaatttacgccctggtgcagctggatatgtaatgaatagtgttctagctccatttcttggcggttctctggactcgaaagcagctgctgaagctgagcagatactaaccaagtctctgtccactctagagactttttggcttaagggcaatgctaaattcttgctcggaagcaaccaaccatccatagctgatctcagccttgtatgcgaacttatgcaactccaggttttggatgagaaagatcgtcttagattgttttctccttacaagaaagttgaggaatggattgagaatacgagaaaggccacgcagcctcactttgatgtggttcataaaaccctttacggagctaaagacaaatttgagaaacagcggaagatggggacaacaaccgtatctaaacctggttttcaatctaagatgtgagaacaaatttgtatcggaggctgtttgtgaaaaccccggtttaggggatcactgtaataactcggttcaacatttacactgta

SEQ ID NO: 14547 - DNA, 489 bp, Zea mays
  Coding DNA Sequence Number=SeqID_144
gtgtgcatgttagtgtcagctccaatggcagaggcagcaatctcgtgtggcgccgtcgccagcaacttggggcaatgcattaactacctgaccaggggcggattcgttcctcgaggatgttgttcgggtgttcagaggctccacagcatggctcggaccacacgtgatcggcaacaagcttgtcgctgcattcaaggagcagctagagccttgggttccagacttaacccaggccgtgctgctcgtcttcctggtgcttgccgtgttaggatctcttaccccatcagcgcaagaaccaactgtaacaacatccggtgagcatgagagcatatatacgttgaagtgttttaatttccataaaaataatgtcactagtataattgtgtatcctttcaatgttatgtgttgttttcagaattggtgtgtttcatttctttctttatatacgaccgtccatttaagtggccatctctgttatgtattcctcta

SEQ ID NO: 14548 - DNA, 503 bp, Zea mays
  Coding DNA Sequence Number=SeqID_145
aattcggaagttctccttctccaagcaaaaatcagagggttttagggttctagaacgagcgggtcggcgagaacagccatggacgcctcccccgagctgcaacagttcctggagcaagagaagcagaagatggtgatgagtgagatggtaaccaagttgacaaatgtgtgctgggacaaatgcatcaccagcaccccaggaagcaagttcagctccggtgaaactacctgcctgaccaattgtgctcagaggtatcttgacatgagcatgataattgcgaagaggttccagatgcagtagggcgtctccagctgcagctggttgcgtcatcaaaaaaattccaaactctgaacatgccaacaatggccagttgtaacagtgaaaatatttaatcttctgtcgtaaacgcttggttagtactcagtgtagttgcatctgtggtgaacctttggttagctttcttgtgaagctactgtcattttattctccaatcacttagttgg

SEQ ID NO: 14549 - DNA, 531 bp, Zea mays
  Coding DNA Sequence Number=SeqID_146
atgcggcacaatgcgatacttgtcacaagtggagagtgattgatagccaggaggagtacgaggacatcaggagtagagtgctggaggacccttttacctgcgataagaagaaacaagtctcttgcgaagaccctgctgatcttgactatgattcctctcgaacctgggtcatcgacaagcctggtatccccaaaactcccaaaggtttcaagaggagccttgtcctcagaaaagactactccaagatggatacttactacattactccagctggtaagaagctgaggagtcgcaatgaagtcgcatccttcatcgaaaccaatccagagttcaaggatgcaccgcttcgagacttcactttcactgtcccaaaggtcatggaagacacttgtcctcctgatgctaagcttgcctctcctgctgttactactactgatgatgtttcagagaagagcttcaaacccaagccattcaaaggatagttttttttgtagatttgcttttctttcttgtgaacaagctctctgctct

SEQ ID NO: 14550 - DNA, 582 bp, Zea mays
  Coding DNA Sequence Number=SeqID_147
atgaagcaacctacgtttcccagcgcggcggcggaggaaaccaaatcagagcaaaaccagaccggagcaaagcagaaatcgaagaaattcccaactgcaaccgagctaatctcacactaccagaagcaagggggactcgaagcagctgaagcctcggttaaggtaatcgaagacctgcaaaacgcgctcgtgcgagtcgcttcgtcatcgaagaacgcctccagcaagagcaagcttctagctgacgcgaggaaaatcgacgccattagtggaaggcttgccgtcgtggacgccaagttggagacgaagcctggatacgtcgagactttcgcgttagggttagcttccggtgcagcacttaacggaattagcgccgtttggcctcacgttaccagagggatcagtcaggtttggtccgccgttaagagtgggacagatccgtcagctgcctcttaaactgaatattctctccagtggttcggttacttggtgttgtattagctaacttcagttttttcactgttggaacaaaaaaaattagttttttttttttgttatcgtctatgtttactgttgttcctt

SEQ ID NO: 14551 - DNA, 562 bp, Zea mays
  Coding DNA Sequence Number=SeqID_148
ccgttcgtgaaaaatttgctggcgtaatcaggcaacaagatgttagagaaacagagattgacaaagttgagattcatcagtctttccgtcctggtgacattgttagagctgtggttctgtctcttggtgactcacgggcttactatctgtcaactgctaagaatgagcttggtgtggtctctgctgagagcgctgcaggtgaaacaatggttccgattagttggacagagatgcaatgtcctttgtctggccaaaccgagcagaggaaagttgccaaggtggcctaatttgaatgacactacagataatctggcttctatcatagatgtgtgtctctacaacaagaaaagacatgtttgattattacagttttgagctcttttgacatgctttaacttaaaagaccatgttttgtcaagtgcaaaagcaacttgcctttgttcctaaactcagaagacatttcaatgaaagggttaagagagaatgaatttgaatgtgagcccttttaattcttttacactgcattgataatggcgacgaagattgccttggttagcaccat

SEQ ID NO: 14552 - DNA, 575 bp, Zea mays
  Coding DNA Sequence Number=SeqID_149
tagacacagcttccaaggcttcttgcgggcattcactgttaaggaacatcacagattcagtgaccaattgcataagaaagtcttactgtaatattaattgaccgttgttgataggttcagcgtgacactttttctgaaaggtagcatgactgtgcttctccctattgtctttgcatagagaattgttgtggccagtacaaatgctcttatcttgccacagacgatttttttgccatcctaccaccagtatcctttttcctagaaggaacttgggacccttctttcttagatcttttaatattaggcagattggacttggaggattgcgcatgtcatttttttcctttatccagttcggtgactttagctgcataagaattagattggctgtgaggcctttcagatcgcgacttgtgcttttccttgtgcaattttttcttgcctttaagagcagtggtcagcaactccagggaaaaccgatgcaagatacctcaaaatcgcatgaccggatctggtccgcccacaaagcagtgcggcatggcggtggagagattactccgacgagcaattcacgt

SEQ ID NO: 14553 - DNA, 379 bp, Zea mays
  Coding DNA Sequence Number=SeqID_150
ttcatccaccatgctgagggtcgcgggcaggcgcctctcgtccgctctcgcctggcgccccgccgccgccgcctcaggctcccggggccctctcgccggtacactacccggccgcgacgacgacgacacacgcgactgcagggcgcgtttcgccatcgaatctcccttcttcgccgctgccaggtagtgtaccggcgagagggcgccgggagcaccttggatggcagcgtacgtggccatcagcagcatgcagtcgtcgtcgtagcagagatgtcctagctacgtgtgtgtcatgcatcagactggcacataataaagaagtagatcatgcacccactagtgatcacttcgtctagtgtccctccgttcgctgttgtcg

SEQ ID NO: 14554 - DNA, 590 bp, Zea mays
  Coding DNA Sequence Number=SeqID_151
gaacgttagccccactaaggaatctgatgaggttgaagacaatggggaggtaccactgaagttcaggaactaccttcctcatgatgagcggctccgaggtggcaaggtggctccgctgtctcttcccaagtttgaagatccgatagctgctgatgctgctgaaccaaagcagctggagaacccctttgggaacatcgccccaaagaacccgaactgggacctgaaacgagatgtgcagaagaggattgacaagctggagaagcgcactcagaaagctctggcggagattgcattggagcagcaaaaggagaaagaggcgctggaggagggaggcgatgcagctcaagagtgacgtggtactggtgctggtccaaatgtttgtgtagaactgaggaagcagctatacgaggtcaaacagtgatgtgtttgtaatgcacggtgtggactgaagactaatgtaaggaaattgtagtcgtgtgtttgtaatgcacggtgtggatgatgctttcagttcagtatccagaattttttagttctactgatggttagtgtcttggtgattactgaattaactatgattcatctcgcga

SEQ ID NO: 14555 - DNA, 568 bp, Zea mays
  Coding DNA Sequence Number=SeqID_152
atcgtgatggagctttacaaagacacgaccccgaacaccgccgagaacttccgagccctctgcaccggcgagaaaggtgtcggaaagaaggggaagcctctccacttcaagggatcggccttccaccgcgtgatccccgggttcatgtgccagggaggcgatttcaccgccgggaacgggaccggcggggagtcgatctacggcgataagttcaaggacgagaacttcgcgaagaagcacaccggggcggggatcctctccatggcgaactctggtcccaacactaacggatctcagttttttatctgcaccgcggagacgtcgtggctcgatgggaagcacgtggtgtttgggaaggttgttgaaggtatggaggttgtgaaggcgatcgagaaggttggatcgtcttctgggacgacgaagaagaaggttgttgttgctgattgtggtcaggttgcttagatctgagtgatctgatgatgatgaatgttatcttttgcttttttaatgtttttttttctgatcgttcgagtttgtaaaaccctgagggttttttggatttgactgc

SEQ ID NO: 14556 - DNA, 408 bp, Zea mays
  Coding DNA Sequence Number=SeqID_153
gaccgcgagcaacctggtgacgtacctgatggggtccatgggctactcgccgtcgcattcggccacggcggtgaccagcttcatgggcacggcgttcctgctggcgctgctcggcggattcctctccgacgccttcctcaccacctacaccgtctacatcgccagcgccttggtcgagctcacggtacgcgacgcgcgtcgtcatataacataacgtccgtccgtgcatgctatgcgataccgtaccacgcacgcacgcacgctgctgctactactactaccgtacagaacagtagtgtacatacatactccttactctacatcaccactctcgatcgtacgtgcgtgcgtgctgtcatgcaaatgcatggccccctcctttctatatacgtcacgttacgtgccctg

SEQ ID NO: 14557 - DNA, 567 bp, Zea mays
  Coding DNA Sequence Number=SeqID_154
tgctcctttctcacggctataaaacacactctacctccagcctttaaagcactcaccagcctgaggttggtggagtctttccttttgttcctccacatcaaatactccattcttttgatctaaatatcccaatggatgaacaacaagagaaccttaatgattatggggtttatgccgatgttgacattgtgttcgatcaagatgagttgtcggattcagaagacaatgaagaagagcatgaaattcagcctggtagactagatcactactcctcctccttgcagtttaccggtgcgctgctggtgggctgctgctccctccttgttgccgctgccgccgccgtgttgggtcttgctgctggccgtcttcatgaagcagaagcaggagcagcagggacactggaacaagagcttcatcatgcccagagctctggatcgagatcgatcgtctttgttcctctcggccgtctcagctagctagcgctatggtctggactagcctctgtatgtatctctgtaccctctcaactctaatcaaatctcaacctggctggctagctacgttttc

SEQ ID NO: 14558 - DNA, 497 bp, Zea mays
  Coding DNA Sequence Number=SeqID_155
gggcgcaggctaaatccgtgcatttcgtagtgtaatgatcgaagtcctttggtgcctggctctggctggctgcatctgcatgcaggtggtccccaagtcgctggcgccgttcctcccggggacgacggtgccggcgacggtgacgtggcacgggtggtccctgggagatgcggttcacgggggggcggcagatcccagcgcctggagggccgggtggcggggcttcgcgctggacaacggactgaagctcggcgacgggtgcgtcttcgaggtggtggacggcagggcggagcgcgtggtgttcagggtgcaggtgctccgcgccgacatccccgcggagatccgggagcgggccggcgggtacactccgtccagccccatcctcatcgactagctagctcattgctcacctcatctcatcagctgctggtctgtatccccccgtgcggccgtctgccactgttactgcagagggtgagagtgcaatccgatttttt

SEQ ID NO: 14559 - DNA, 579 bp, Zea mays
  Coding DNA Sequence Number=SeqID_156
ttcccactttcctttgagaaaacagagcaaaatggcactgagaatgtgggcttcctctacagcaaacgctcttaagctctcttcttctacctccaaatctcatctccttcctgcgttctccatctccagatgcttctcctcagtgttggaaggactcaagtatgcaacttcacacgagtgggtgaaacatgatggctcggtggctaccattggcatcactgaccatgcccaggaccatctaggagaagttgtgtttgtggagctgccagaagagaaaagctcagtgagcaaagaaaagaactttggagctgtggagagtgtgaaggcaacaagtgagattctatctccaatctctggtgaagtcattgaggttaacacaaagctaaccgattcacctggtttgatcaactcaagcccctatgaagatggttggatgataaaggtgaaaccaagcaaccctgcagagttggaaaccttgatgggttcaaaggaatacaccaagttctgcgaagaggaagatgctgctcactagagggtttcatctgtctatgtttcgtaccctatctctctcagctttgt

SEQ ID NO: 14560 - DNA, 505 bp, Zea mays
  Coding DNA Sequence Number=SeqID_157
tcattctcctcctcaataaaaagcgaatctagggttttcataatttcgaaggaagatggcgatgcagaaggctaaagagatcgtttccggcaacgccgtcgttgttttcagcaagtcgttttgcccatactgtgtgagagtgaaggagcttttgcaacaattgggagctaaattcatcgccgttgagctcgacaaagagagtgatggtagccaagttcaatcagctctggcagaatggacaggacaacgcaccgttcccaatgtgttcataggtgaaaaacacatcggtggctgcgattctgtaacaaacctgcacagagacggcaagttggttcctatgttaactgaagctggagctattgctgcaacagctggaactacttctgcttaaagcgcacaatcaatttgtgatttgcttctttcaggaataaaatatgtttgagcaataaatctgaactttatctgaaatgttttaaagttaattgttgttatgtcgaagtcggta

SEQ ID NO: 14561 - DNA, 566 bp, Zea mays
  Coding DNA Sequence Number=SeqID_158
aacgatagcgttgagctctaggaaaagtgtgtttgatcgcagaaaaggcttcgtcttttgtcttgcaacaggcttataaggaatggcaaagagcacattcaaggaagagcatgacctagagaaaagaagtgcagaggctgctcggattagagagaaatatccagataggattccggtgattgttgagaagggggagaagagtgatataccaaccatcgacaagaaaaaatacctagtcccagctgatctgacagtggggcaattcgtgtatgtcattcgcaaaagaatcaaactgagtgctgaaaaggctatctttatctttgtggacaatgttcttcctccaactggtgcactaatgtctgctgtgtacgaagagaaaaaggatgacgatggctttctctatgtcacttacagcggagagaacacatttggatctccatagagatctcttgctggatatttcgtttctattttacctatttcgcctgagtatttcatatcttattattagttatctatgtactactttctctaagaactttaagatggccgttaatgtgtacaga

SEQ ID NO: 14562 - DNA, 534 bp, Zea mays
  Coding DNA Sequence Number=SeqID_159
ggttaggttgctggcctatcagaacaagagcatgttacaagctgggatgatagttggtggatgggataagtatgagggaggccaaatttactcagtccctcttggtggaacgattctgaggcaaccattcgcaattggaggatctggttccagctatctgtatggattgatggaccatgaatggaaagaggggatgacccaggaagaagctgagaagtttgtggtgaaggtggtttcccttgctattgcacgtgatggtgctagtggaggggttgttcgcaccgttactataaatgaggagggcgttaagaggagcttccatcctggtgacaagctgccactgtggcatgaggagatggagccccagaactcgctcctcgacattctcgcggccgggagctctgatgccatggcccagtgagtttgctgaatgttgacttgtacctgatgatgacttgttctagatttgagccggatgttgttaagaaattgtgccgaattgttccacaccagcttattttcctccttgttatt

SEQ ID NO: 14563 - DNA, 580 bp, Zea mays
  Coding DNA Sequence Number=SeqID_160
gaagtgttctgcctcaaagcctggtcggtcagaagaaagggccaagttggctcttcggcaacattgaccggccgtcaggcactagtacgctgttgttggtggcacgcgcacggatgagttagctcactgaccagaccagttcttgttgttttctatactagagacgaagctgggttggtaggtaggctccgtggcctgcggtcgtgttgctttctgagagtgttaatttccgtgcagagtagaatggaatttatatttagttcgtggacaacaatcagagcagaacggcaccgcacaggcgctgaaatacagtaacagggcgcaagaaatccacgagcgcagctccactttctcccacttccaatcaccagtggcttgctcaacacaacaccaggaacgatcgaatcgatccaaaatcgcgactgaaatggtggaagaaagagagaacaaagaaactcacgtttccagggtaaagctccagaggatttaccgcccatgccttttatggagccgataaggggaggagacaaacggatgagcatcagcgctggaagctttcgccaaaggattcggagccgtt

SEQ ID NO: 14564 - DNA, 512 bp, Zea mays
  Coding DNA Sequence Number=SeqID_161
aaggctcgacaatctgcttggccaacaaggcctgcggggtctggttttctccagattccggaagtggtgggtgacttgcagatagacataggcagtggacagtcctgtagaagtcagattctgtttaagcctcaggggggtgatatgatcaccagcccaagcgattacaaaccgatggttatggaaaccagggttggcggtaccatcgatctgcaaagttggaccactgagccagacgaaagacttggtggagggtacaggtcatacaacattagattttggctacatggcactcattatatacgctactctttccggtctctccggtcgctcaatggcgatactgtgaatgttcccttgtcaaatgaaagtgatgatctcctcgatgctcccgtcgtaggagacacctcatcttcccaatgtcccggatagctgggcggcgggatctcatcagcaggaagttccaccggatccatgttctgtgagggaagttcttgtggtgcactgctgtc

SEQ ID NO: 14565 - DNA, 322 bp, Zea mays
  Coding DNA Sequence Number=SeqID_162
gctcgtggcaagtccggttgcccctcccggagtttggttggcagaatccctgccctgcctgtactttgcaacaacgttcttcccggccatagggtgagttcaccaatctgtcagtcactgctgctacttccccatgcatgttctttgaattttaagcaagcacaaggagagagtcgtgttgtacaaacgttttagataacagccccattccaatcgaagtggttggtcgtcgaatggtttttgccactcctaatctgtgcgtgtttgcaatcttctgttttttttttcctgtgaaactgacagtactatttcagccgagaaa

SEQ ID NO: 14566 - DNA, 416 bp, Zea mays
  Coding DNA Sequence Number=SeqID_163
tcgaagcctttgttcctttgtacttttcaagatgcagtttcttatgtcagtgcttaggaggtgcaaaatgcgaggtcctgaaatgaagttggtttgttcatgaatctccaaggactgttagtgtgaccatgcgtttctactagtaatagagtattaaccaacaagtctatgcattctccagtttcaaacttattaagctccaagcgttgaacatgttattcctgtgctttctgttggatcttgttggttgtgggcacccatgggtatcttaacattgaatcgtcactagtgatatgcattgaacttccagcatgtaccttcatgcttgatatttgtttgttttctattcctctgatgatatcgatgtatctaaaatcaagatagataactattgcggttttgagcgcatgcaaaca

SEQ ID NO: 14567 - DNA, 551 bp, Zea mays
  Coding DNA Sequence Number=SeqID_164
caaatcctatgtcgcttgtcatcatggttgcacttccctaatccggtttgatcccgacggaggtttgcacactagaagcgtcctttttctcgattttgatgagaatcatgttggcaggaaaaagcattagcccttgccttgtttgtgcatgccatcgacatccatgcatgcatatgagagagacttgcaatggacgatcttacaggagactgaagatggggccctcgatgatgccgttgacgcctgagatggcggcgactcgactttgcagatgtggctgttgaaggtcacagcgatgaaggcgatcaggattggtgacgggccctgcgattcgccgccacacacattcttgcactcgccagttcttgcgtccggacggcagaaccggtgatacactccaattctttctcacgatggagcgtctagttgtctctgtttttgcgagcaaacgtgctgataacgtgttgaagtatactcagtggcaaaccagtagagagacagaaagaatgacagttgtttcttttttgcagcaggagttatgtttatatgaa

SEQ ID NO: 14568 - DNA, 454 bp, Zea mays
  Coding DNA Sequence Number=SeqID_165
ctagggttttgctcagcgagtcggagtcggatccagttctgcgggatcgccatgtcatcgcgtccgtcgttcaagttgaagcccagggtcaagggcgggaagaagggcgccgccgccgacgaggacgccaccgcggcatcgaaggcgatgcggatcgtgaaggagtggacctcatggacgatgacgaaggcaaaggtggtggtgcactatggcttcatcccgctcgtcatcatcaccggcatgaactccaatcccaagccctccgccttccaggtcatctcccccgtctgatcgtttctccccgacgaggcccggatgcggtcggttcgtctgcttttatagtagtttgtagctagtatttttagttgatttgctattgtccgagatcgagttgaaggtgtctgatgctttctggcccaaatttgaaggtgttttctgactatgtctactatag

SEQ ID NO: 14569 - DNA, 548 bp, Zea mays
  Coding DNA Sequence Number=SeqID_166
aaatcctctcactgcgaatctgcgatggccgttgcgcagcgtctcaccgcgctggagctccaccattgctgctgcccaacacctcgtcatacgtcgcgcctagacttgagctcgctgcgcgctgggagccccgccgagttcgctgttgagcaccgccgcggaagactcttcctgccgtgcgtcgtcgcaagactgcgatccatttccgagcttcgaggaatcaacagtcaagcttcggcgaccaagagatcgaactcttcgagttctacgaggctgaagatcctgagcatctgtttggtgaaggttacctttggtgcaatctatgcttaggtaaagaagaaggcgtcgaggcggatctccaggagttccggggcttcgatgagttcgaggattaggctagcgactacccccagtcagctgcctgtggtgggtttatttacgttggctacgtttctattctgggtactttgattatattatgtaaatgactctagtcttttatattattacttactcttttattgtattcgaagcatttgtggctatga

SEQ ID NO: 14570 - DNA, 530 bp, Zea mays
  Coding DNA Sequence Number=SeqID_167
tgttctgtggcgcagtctcgtcctttgcactcacaaaaatatctatacatttcttctgtatccctatttgattgaaagggaaaaatgtccagttctcctgtgtttgtagaagacgatttaggccgaaaatgggataaatgtatcacagatgctctgctaaaatttggtggaggagttgtgcttggatcagtattttcgttattgttttttaagaggcgacgatggcccataattatgggcggcggttttggaataggtatggcgtattctaattgcgaacaggacctcaacaacagcctcaagggcccatgctcgccgaattgtgaaatagaaactaatactaagaaataggataatttttgttttcttaatcatctttctttcccaacaagtacattatatagaagtaatactgcctacaaaaatttaaatatattatattaaacaaaaaatttgtaattcttattttctgcctggttttatttaattgaaataaatgaaaaaagatccatcgatttccaattactttt

SEQ ID NO: 14571 - DNA, 562 bp, Zea mays
  Coding DNA Sequence Number=SeqID_168
gcgtgacgccaaaagcaaaatgacaagtccgcgtgaacagtacgggagtactgttcatctatttatagacgcgggacgcagcccacgtaaaattacatccatgtccattacatttgttaacggtttatggaaatctattgaggaccccgaagtctttttatctttaagtcggttcccccttgtgctatcgcgccgaagcttccctgcgtacagcttcggctgccttcgaccttcgcctggctcagccttcgtcctggtcgtgctccatatccataattctgaatccgaaaatacctgttcatataattcacttggaaagcattgtcaaatcatgtttttgaggaccttcggaggacgaaggcccccaacagaagcaaaccctattgggtcaccttctgaaagacctttaggaacaccttcagttggaggaaccttagattgaggagttgactcctcttccacttccacttcaattccttcttctaggtgctcactgaatgggttgaccacggtgaggtgagcagtcgacctaagtggtcaccatgatcttgattcagggagt

SEQ ID NO: 14572 - DNA, 520 bp, Zea mays
  Coding DNA Sequence Number=SeqID_169
ttctatctagtttcattcgaggagctgatcgacgttgactcgcggagtcgcggtcctggcaccgcttcgcgaactggaggagacgagagattggtaggcagctcgtccacgcggccggcgcgcgctcgccgcctgatggtcacgccgctacgagtctgcaacgaccccgagcccgagaacgcggcgggaagagcttgcaaaggtggccacgtcgttcgcaatgcgtgcgtgcatgggcgccggatcggcagctggccgagttaagttgagcggccctcttcgtccggcactgaaccaatcaaatgccactacaccccgacggcattcatcaatctcacaagaacgcgtgatccgcaacgcgccactaggacatgtacccagaaaggaaacgggtcaatcaagtcacttattttctctagataaggatggtgctttcaccagtttatttggataaggccatggtttttagaagttcaacacttaagccaagagacggacacagtcacgtctacgaggtcgt

SEQ ID NO: 14573 - DNA, 526 bp, Zea mays
  Coding DNA Sequence Number=SeqID_170
gttaaatagcttagagacgacctcgtagacgtgactgtgtccgtctcttggcttaagtgttgaacttctaaaaaccatggccttatccaaataaactggtgaaagcaccatccttatctagagaaaataagtgacttgattgacccgtttcctttctgggtacatgtcctagtggcgcgttgcggatcacgcgttcttgtgagattgatgaatgccgtcggggtgtagtggcatttgattggttcagtgccggacgaagagggccgctcaacttaactcggccagctgccgatccggcgcccatgcacgcacgcattgcgaacgacgtggccacctttgcaagctcttcccgccgcgttctcgggctcggggtcgttgcagactcgtagcggcgtgaccatcaggcggcgagcgcgcgccggccgcgtggacgagctgcctaccaatctctcgtctcctccagttcgcgaagcggtgccaggaccgcgactccgcgagtcaacgtcgatcagctcctcgaatgaaa

SEQ ID NO: 14574 - DNA, 548 bp, Zea mays
  Coding DNA Sequence Number=SeqID_171
ccagttgatttgcacttgtgaataagggaaacctcagttttgacaaagttgatagcttgagcttcatattttttatccatacatatgactttataaggaacaagatattgcatattgtttcctgttctttgcaaccattaacttccgctgtacttttaaacaattagatttatttttaatttttttaatggccggaatcccaccaaattaagaggcaacatagggctgtgaaggtaccaacatctgtacatggttagttgtagttatcatttgtttttcttatatcctcacttacccccgaaatctctaatgacagattccgtggtttcttttggaaagctgccaggataggtgagcgattgagcccttgggtatcagtcgggtgcttggctatgggaatatccactattttcttctaaggccgaattgttaatctccacaaatttagtctaggacgcagcaccttgtttcacttgtagagaaaaaaaaaactattgtaatcattttgcttcagtttttaatggaatgggcattgtaagatctgtata

SEQ ID NO: 14575 - DNA, 456 bp, Zea mays
  Coding DNA Sequence Number=SeqID_172
aactaccagcattcgaaattgccaaaatacaaggataaaattacacatgtgttcgttactgtctactgctgaagcagcgacagcgaaatgctccctaatagagcattgatcgctagcatattttaacaacatgtgaaacaacgccaaggaagtacatgtcggttgtttgtgacaatgataaaaaaggaaggaacacatgaactcccggtgccttccgtgcctagctactcctcagtttccaaccagcagacgaccaactcatgttcaccatcagcctgtttggttgcccgtacaaccgtatccagactcccgacgtgctttgaccgcacgcaagtgcgtgtttggttggctgtgcctccatccgcgagcctgcacgcacgcattcaacttaagctgattttcaccgttcagcctgcacgcgtggggatgtggaaaacgagcttcgctcgcgggcca

SEQ ID NO: 14576 - DNA, 372 bp, Zea mays
  Coding DNA Sequence Number=SeqID_173
aaggaagacgaaggtgtgccaccgccgtggccaatcagagcacgcccacgcatggggaatgcgcgggagcagcagcgcaggcaagtctctccccccttggtctcttccctccggctcctcgtccgtcggctcagtgaaggtagtacgcgaagaaggaggccacggcggccccgacgacggtgggtgcgaccgcggaggagccgctggtgggggacggagccggcgcctccgcggccagcgccacggtggccgaggcggcgacgaggacggcgcagacgatcttcttcatctccatccctggatgcggcggcttattagcgaccgtagagacggcggcggcgggatgggatggaggcgaggaagtctctctct

SEQ ID NO: 14577 - DNA, 536 bp, Zea mays
  Coding DNA Sequence Number=SeqID_174
tagcggcggcgaccggttcttcaatcacaggttcggtcctctcgtccttggcggcgcgagcaaacaagatctcaacgaacaccgagaatcatgcacatgggtaaatgtgtctcctcaggtgctaatgcgaaacactgtgtttggagtcccaaatatgcaattgtctcattcaataatttccaaggccaaatcctgcaatccaaaagcatgcggtgaatttggcaacaaaagcagcaggattttacaaatccaaattaattaaaagatcatcatcaagtcaagtcagcagagctgtgcccgcggccaggggaggcgagcccccagccaagccagcagcggccgcagccaggggtccacgcgcccccgcaacatccgcgactggatgcaagaagtcgaccaggtggccacgggagcagccacggtgccagtccgcgactccggccgccaggggaggaagaggtggagaatcgggtagaagaaggggatggagcgccgagggaggagcgtctgtgactccggtcaccaggaagaaccag

SEQ ID NO: 14578 - DNA, 585 bp, Zea mays
  Coding DNA Sequence Number=SeqID_175
ctctctgttccggtccgtggtggaggggcatccgacccagagctccatggttgatggcaagtgtgacggaacctcccaagtaattagacccacctacagttggccttgtctaacagacatcagacaccctgtagatgttcctaagtcacttgacaagttcggtatctttccttaccttaccaggaacgtttcacccgtcttgcagacattacagaacatcggagataaagacatgcggaagcgattacataaattacatttattttaaaagcaagcttaagttgttttattacagaccagaactaaaaaggcgagtgctgagtagtaatattatacaaaccaaaggaggcacaaactcctcccgataagttttaagcaaaagatcctatgtggaggaccaagtcctcccgcacttcagtcttgtttttcttcatttggtaccaccttggagcaaaagcaacaaaaatttgttgcttcctcacctaaaaacaacaaagggataaaccctgagtatggaattactcagcaagtcttacccgactaaggaaaagactctcaagggtatgctggataaataggagtcaa

SEQ ID NO: 14579 - DNA, 598 bp, Zea mays
  Coding DNA Sequence Number=SeqID_176
tttgttgtttttaggtgaggaagcaacaaatttttgttgcttttgctccaaggtggtaccaaatgaagaaaaacaagactgaagtgcgggaggacttggtcctccacataggatcttttgcttaaaacttatcgggaggagtttgtgcctcctttggtttgtataatattactactcagcactcgcctttttagttctggtctgtaataaaacaacttaagcttgcttttaaaataaatgtaatttatgtaatcgcttccgcatgtctttatctccgatgttctgtaatgtctgcaagacgggtgaaacgttcctggtaaggtaaggaaagataccgaacttgtcaagtgacttaggaacatctacagggtgtctgatgtctgttagacaaggccaactgtaggtgggtctaattacttgggaggttccgtcacacttgccatcaaccatggagctctgggtcggatgcccctccaccacggaccggaacagagagagagagaggtttgttggaactcactagcgctcaagaacaatggacgttgggaggaggaagacgaaagaacagcaactcaaagacaaggcaatggcgcacgaa

SEQ ID NO: 14580 - DNA, 294 bp, Zea mays
  Coding DNA Sequence Number=SeqID_177
agcaacccctctcaagcatgccaggccaagctcatccatggcgctcggctatctctccgcgcgctcagccttcggtcgagcctctcccgtccgcagcgccgcactcggcgttgctctcctcgccgtcgacctcagcacccagctccgcagggagtcctttcttcctcgcgacccagctccatcgcagagaagccgacgttcctgcgcacactacatgctgttgttgtgtgctgtgcgtgcaaggaccgagaggtgacgatcgtgcaagcgatttggcgacaaccacaaggtgca

SEQ ID NO: 14581 - DNA, 596 bp, Zea mays
  Coding DNA Sequence Number=SeqID_178
attagattcctcctgagtcaaatcgaggctctcagcttcccttacttgggccatgacaacggggactccatgcaacaacataatactaataacttgctgctaaaccatagcactagcgatgccatggtacaagttcaaggtcctccgatgaccaatcaggagggggaggtctatggcaatggcattgaggagggcagcaggaaggatttgaggagcagggggctgtgcctggtgccagtgtcgtgcacgtcgcacctcgccgacgacaacggcccctcagacttctgggcggtgtccgcggcgccgtccccgcctcctccgcctccgccattcgccggcatcatctggcgatagagtcgtgtccagaccggcgtcgatccacccatcagtcgcatgcattattcatgcatgcatgacgtaaatatatacatatagtatcatgcatcactataccattggtttttttttaaaaaaaaatgtttggttgcttgccagggttgctagctagctatagctttgtttgaccgatgagctgaggtatccatcgagcatggagctacctgcagcctataccaggctgctgtatactgtacgta

SEQ ID NO: 14582 - DNA, 486 bp, Zea mays
  Coding DNA Sequence Number=SeqID_179
agaagaacatcaaaggaacctgctaaggctcctccacgcgctaatgttgttaatagcctgaaaaatggcattgtgctgaatattctcgggatgggcgccgctgttctgggcatgcaagccactgttggtgctttggtagcaaaagctctcacaacctctgcagtaccctattatcaggctgctgctccaggccaaagccctgtgttggccttagatgttttcctagttcaggcttcagcgaacaccatcctgtcgcatttcctcgggctggcgagctccctggagctgctgcgctcggtgtcgctgcctccagcagaagctgccgcccatgcccgggcctgagccattgcgtgggcggcagggtaaagctgccgcccctgcccgggcctgaccttcgttccctcggcggcggcctgtttggttcagcttttttctgaccggcttttctgaaaatctagctgttggtagaatctgagtaccattacg

SEQ ID NO: 14583 - DNA, 362 bp, Zea mays
  Coding DNA Sequence Number=SeqID_180
tcttcgcagtggacagatacgccaggaaggtcttgcaccacctgcaatacttggtagacgtagtagactccacatacgcggacctcacgttgcagaactcccgctacgttagtgcctgggagctgccaccaggagttttcgtcaacggtcatgggccaaacggtgggagctgaagtcagggtactaataacgaaggaacagatggatcagactgggatcgagaggccacttcttattcgtctgaacaagtggagggttatgcaacttcagcgatggtttcagacatgcgccccctggaaaatttaaacccatgttaggaacagagcctgtggccattccgtgctccgcgactgtatgagaaa

SEQ ID NO: 14584 - DNA, 505 bp, Zea mays
  Coding DNA Sequence Number=SeqID_181
aaaaacacacatactccctccggtgcagtaaaagaagtcatcctgcgcgtgagcgagagtgcacaaaagaagtcgtagcgcacgtgggtctgggatttttgacgtcgctgcccctgagtaattgcatcgggaaaaaaaaaagctgcgctcaagggaaatcgagcttgagacctccaatctagaatgcctcgggaggtactgcaacaaccaatcgaacttgattgttttggtgatgttaatgcactcatatccctatttaataagggcaaacatagaaaactccatgataattaatcactccttggtatgcacaatcatgtcctaaacgactacctttactgcaccggagggagtaccctgcgttcctgccccggctgtctggcccccactgccaccgacggcgccgcaccccccgttccaatcatatcgtagacgacgcgcagcattaaattatcaatcaccggctctggctctttcttggccctgtactgtactgatgttcctt

SEQ ID NO: 14585 - DNA, 474 bp, Zea mays
  Coding DNA Sequence Number=SeqID_182
gcttatttggttgccctaccactataagttcaaaaaacatttcaaagtaccctgccaagagtggctggatacaattgaagtaatgtgcaacgaaattcttggaaattattctaagaaagaaggtcaattgatgacagcggctttggcacccgtccgaaacgaaggctaaacagagtgatggatgctataggctttgaatatcctgactatgagcgactggacaagggtgctgaagggcaaaaaagaaaaagagtagctagtgctttgaataaagacaacgaagatcaatcaaagaagaagaaacaagaaaccgaggtgaaagcagttactttgaagaaaagaaaggcctcacactagtacagagaagatttatactggcggtcgtaaacctatttttagtggcgtttatcgtaaccgccagtactaggggccagtaaaaatcatcatttttacaggagggtaactgaagaccgc

SEQ ID NO: 14586 - DNA, 555 bp, Zea mays
  Coding DNA Sequence Number=SeqID_183
agacgctgaacgtgggctcgtaccggaagcaggctcgccgtcgccgtgtcctgcccaccgcttcaagaagcttctggaagatttctttcgtgagggcctctccccctgccattctgctggggcttcggacgatccagagctcgagacgtcgttgctggagactgccaaggcgtggctggatgggcgacgttgcgcgctgatcaggtcggatcaagaggcggaggtggaggaggagatcgagcggctgggacggtggaggtgttttggagaagatgaccgtgagccgatgagctcagacgtggagtgtggtatattctgctgtcttgtggaagaattagttgaggatttgtgctgatggtggggattcgtgttgcgggtcttcgagacatcggttcagaggtaattccgaacatgagcacaattgcttgccgatctgctatcacacgcataaatgtaaccagaagatcaaccacagactcacagtccaggtttgttgggtatggataaaagtatgactcctttccaaacacactgtctgtcctgcgtccgaggaga

SEQ ID NO: 14587 - DNA, 411 bp, Zea mays
  Coding DNA Sequence Number=SeqID_184
gaaccctaccgtgaaacgattctagaaaagacacagggggaggagtgagattcgccaccgccatagttcatcggtgtcgacagagcacgaccacggggtagccgagggtgtaaaccaaggcttgcgggaccgatgggcggggtttcggggcacggtgatcgaccaagacctgtcgaattgctcgccgatgatggaaggccgccgcggttccgtcttggccgtggattgctatgctcgccgcacctaactctgacgagcaagtgattgaggagcccgaagctcagcaggtagaagatactaagcaggagctcattgaaggtgaagagcaggtagcccaggaggaggactactacgaggagtttgatgaagtctaggtagtgtctcccagtcagcttaatggcgccaaagaaa

SEQ ID NO: 14588 - DNA, 429 bp, Zea mays
  Coding DNA Sequence Number=SeqID_185
atcctgtcggcaaggtcgctaacatctggtatcagaggtcgacatcctggatccgctcggtgtcgtgccccgtcggccccgatcctccatcatggagaccgccgatgcaactgcacgcagggtgctcgaagaaatgcaactcatggaagctcgcctcacagagaagattgtcggtcgttgcgagggcatgcaacagcgggtggagcagcggtgcgatgaacttcaccaacacttcacgcaccgctgcgacaccatccaccagcaagtcgatgtcgccgatgtaaggcccaaaatcagtttacaaatcgtcgagaagaacttggagtctcgtcgtcgtcgtcgagaagaatcctagctccgcccgtgaggcgggacaagagcagttcgaggcgacgaggaccgaggaaaccctagcacggcaagagggct

SEQ ID NO: 14589 - DNA, 536 bp, Zea mays
  Coding DNA Sequence Number=SeqID_186
aagggcttaatttgatcatcgtgttgacttttaagaaggccatgagatccattaggcaggctgaagagcttctacgggaggtctcgttcagggccagaactgattgtgtctacttcatcgagaactacacctggagcaacaacggtcccaacctccaccatccccccgtcatcaggaacgacttcgagactcatttcacggtgctgacaatcattcgccagtgtcttgagttcatcaagctaaacaggagccagtccaagagcaagaaaaagacgaacggcaagcaggaaaaagcacccgagcctaaacttaagaataatccacccacagaaactaacaagcagcgccagaaactcaacgagtccattgtaaaacctttcctcagcagttcagaaacttgaatcgcccggctatacgtatgatgtactgatcagactgatgtagacatacttgtatagcactgaggtagtctgacaagctgcataaaatgtaacgatcatccattcgttttgtgaagatacacgtcctctttatgt

SEQ ID NO: 14590 - DNA, 589 bp, Zea mays
  Coding DNA Sequence Number=SeqID_188
aaacgtgaaccctgcagctgaggcgaacatcttcggggatcctgacgcggcagatatcgtgttcacctgcggtgctgatattttggccgtgggactaaatgtaacccaccaagtcgttctaaccgatgctgaccgggagaagcttgagcagtgtgacagcaaatacgcccgctacttgtgcaagctaatgggcgtttattttgattaccacagggacgcctacttcataaaaggagcgtatcttcacgatccaacgacggttattgctgcggtgaacccatcgctgctgacttacacagaaggcgttgtgagggtacagacggtcgggatcaccaagggccttactgttttcgacaacaccaagaaaaggtacggagagatcacggcctggagtggcatgcccaccgtgaaggtcgctgtcaccgtcgatgcccctgccgtggtagagctgatagtgcagaggctgatgaccgatgactagcaacaacgccaccagctgatccggttgggatcatcatgtggttatgtgcgtgcttggtgtttacgtacagtttatatatgcttgacacgtttgctgatgcttctgaga

SEQ ID NO: 14591 - DNA, 589 bp, Zea mays; identical to SEQ ID NO: 14590
  Coding DNA Sequence Number=SeqID_188

SEQ ID NO: 14592 - DNA, 554 bp, Zea mays
  Coding DNA Sequence Number=SeqID_189
gatatgcagtatggtctgctttggctgcaaaagaattgccgcagatatggagggaataggctggcggtttaaccataatagtgattataggctctcttattggagtactaaatattgttgggcctctaaatcatctaaattgagtcctattttaaaatttaggacctcaatttaggactccgtgttggagatgctcttatatgggggcagggcaaagacagaacgggaggttgcaagagtgtggagccatgttcagtaccttgatatacaagaattagaatcctataaatcatgatacctgcatggatggtccctggggcgccaagagtgagacaactcccgacaaagcgccagcattggccccggtactgtcatggtgttcgtgaccccaagatcaggatctacgatgtcgggatgaagaaggttgttgatgtacaatagttcagctctcttagtctgcatttgacaggtcccatggtttcaagtaagtaaatcaagataactgacttatatgttaaaatggaagcttttgctgctgctattatgttgagtgt

SEQ ID NO: 14593 - DNA, 357 bp, Zea mays
  Coding DNA Sequence Number=SeqID_190
tgaggcgttccataaagttgtgcatagctgggcgtccaagaagttcatgaccggatgggtatttctgtgatgtgcgggcgcacatacgccaggcgcgcgcgtgatgtgcgcaggggaacagagcgcgcagccaggacacaggaagggaaggcaagtggctagaaggaaagttagccacctaatcaattgtttcctgtgttagttatttccttattagtcgtttccttgttagttatttccttgtgagttatttccttgtgagttgtttccttgttagttatttccttactagttgtttccttgttagttatttccttatagctgccccctctgtggctatataagcatgtacgagac

SEQ ID NO: 14594 - DNA, 518 bp, Zea mays
  Coding DNA Sequence Number=SeqID_191
gttcgagcagttcctacgcaagcggaagccgctcgatccgagggccgaggttgctgacactgcggacgatgcgggaggcgccgagagtgcggacgccgcttggagcgccggggatgaccgggccttgctgaatgctcttaaggagttcccgaaggacactgcaatgaggtgggagaaggtggcggcctctgtacccgggaagacaaaggccgcgtgcatgaagaggatcaccgagctcaagcgagacttcaggagcaccaagacggcatcggaagcagcaccataggcgaaacctgagaattttggtaggggtgccggactgaatgacatgcgctgcactggtttggctagcgaggaagaactttacatggctagctccagtgaaccatggaaacggcagaggattaactacactacggagagggccggagctatagaacagatcatgtaattttcctattgaactagagacagggtatcccttgatataggagaaactttgacttactactggacac

SEQ ID NO: 14595 - DNA, 592 bp, Zea mays
  Coding DNA Sequence Number=SeqID_192
gctccatacagtaacctttctctgtttttttctttctttctgtcattaaagcgcaccaccggcagcgtctttaaaatgccaccgtgcaagttgttcttggctctcacaagagcctttcgctgcatcaacacctgccgactgctgcaggcaagtaaaggtactcctctcctcccctctgctgcagtcctctgcccgctgcagatcatggaggaggaagcatggcaggagtgtctgcatgggtcctgagagtcgcgtgagcagcgaagcagtttcacggatggttggatggagggcaatgaccagctgctgagctgctgctgctcctcctggtcgaccatcagtttgtatttgtccatgcctcgtgtagccggccgtcttcttgccctggcttgtccagttccggaaggcgggcaagcccggtgaggcgtggacagagaccggcaagtcagagatcggcaatagtgagctccagcaggagcctacttgtactccttatttacccgttttaaggttcccttcttcgtgctgttcctcgtcttccttcgtttcttcttgtctgttccctcctgccccagagctgtaccggtgagag

SEQ ID NO: 14596 - DNA, 98 bp, Zea mays
  Coding DNA Sequence Number=SeqID_193
aatctaaaaagatgtcgtctcgtctgctttaaaaaaccatacaacaacgaacgaaaagcgcacacacacgcgcatcccggcagtcagtagcgcagctg

SEQ ID NO: 14597 - DNA, 534 bp, Zea mays
  Coding DNA Sequence Number=SeqID_194
acatccttacatggcgttcgaggacgaggagctgctgcagctgctctccagagccgaggcggtggaggcgaagcagatcgaggtgatgtcgctgctcatgctggccactgccgagagcctcgcgtcaggggagctcacgcccggggacccggagtggaaggcccttggctcgaggtgctccgcaaggcagcggaatcggtggagccacgtggatggcggccgagtacgccgtacgcggctggcccggcggggagtcggtggcggtggatgcgcatcggaggctggccgtcagcacggtggcgctgggcacacgtgccgacgaggggtgcgtgctggtcgactcgggctcgagctccagctcgcactgcacgctgggagaagctgtcagcgatccactgcactgcatgaaggtggtgggcgggggattcacataccgtgtgtttggtctgtggaccaggagagcctggctactctaatccgtatgtagagaaccaaactcccacgagacagatttaatatatgcgagagactctt

SEQ ID NO: 14598 - DNA, 560 bp, Zea mays
  Coding DNA Sequence Number=SeqID_195
agggtttagggttctctgctcattcgttcgccacctcgctccaagacgtctcgctagggtttcgccacagccgccgccatgcctcgccgcaagcttaggaaggtccgcgtctcacgcctggctccacatgctgctccagtgaggaacccaccacagcctgcgtgctaggctcctccagctcttggtcgtgatggtggcggtggctccattcttggaggaattgggtccaccattgctcaaggtatgtcatttggtacgagtagtgccatggcacacagggctgttgatgctgtaatgggtctccggactgttcggcatgagattgttttttcagaagctgctgctgctgcccctcctgctccagtgatgaatgctaatgcttgcagcattcattctaaggctttccaagattgtctcaacaactatggcagtgagatcagcaagtgccagttctaccttgacatgttgaacgagtgccgccgtggtggtgtctgcctgagcttttcctccaattgggattattcatgatttctcttttcgctcccatggtatctcattaa

SEQ ID NO: 14599 - DNA, 530 bp, Zea mays
  Coding DNA Sequence Number=SeqID_196
ttcttattacatcacttggaggaccattaatctgagacgtcatggcacggcagcagcagcagcagctagctagctagctagctagccagccaagaacatcgtcccgtctggacgcatcctctcaaaacagcagcaagggagaagagaacggggggagagggagagagagagaatgaaaaataatacagctagctaggagatctagattagtagtagccggcactagttaagatacctagagatatttttatatatatctcggaccatgaagcctcaattccccacaacagctcaaaaccatctgcgtcgtcgtctctttcctcctggtgctcagctcagctcatatatggaccgagcaagagcggagagttccagccggcaggcagtgggagccaacgcgcgcgtgtgcacacgcgcccttgcgcttctcctatctgtgcgggtgcggccgcacgttttctctcttgtcggcgcacattattggccagctgcagctactccgtctagagctcgccatgaactgaggtgta

SEQ ID NO: 14600 - DNA, 596 bp, Zea mays
  Coding DNA Sequence Number=SeqID_197
gctgactaaggatgggctggaaacaccctccgttgacattctgatgataataatatgtacttgttggtgtttttctttgatctattgtgccatttattcgcagcaaattcagaacccaactgcaatctcatttggcaagcatagggcgtgctggtgcttttgatgttgctgcaaagaagcatcttattgacaatgtgaagagaaccgtcaaaggacgagcacaacttggggtggaggcgtttgcggaagctcttcttgttatacccaagactttagctgaaaactctggtttagatacccaagatgtgattgtttctctccagaatgagcatgaccgtggattagttgtggggttgaaccatcactctggggagccgattgatccccagatggaaggcatctttgacaattactctgtgaagcgccagatcatcaactctggacccatcatcgcgtcccaattgttgcttgtggatgaagtgatcagggcaggccgcaacatgaggaaaccgtcttaatatttgttaccacctacccgagcctaattcgttttaccttttgtttctgttttgtgcttattagtagtcatctggacg

SEQ ID NO: 14601 - DNA, 574 bp, Zea mays
  Coding DNA Sequence Number=SeqID_198
ggcgcacggttctttcagatgaagaagaagatgagttcgaggctgacgaggaggatccgcggccctcgcggaggaacagggacgatatggacgagcgcgatgacgacgacgacgatgaggacggtcaggatgaatttgagaaggatgacttcatagtggacgacgaggaagaagaagaagtggaaggagaggaagaggaacagaagagtgatgacgagaggcgaagaaagaaaaaggwaaatgaagagggaatcagacgacttcatctcgatgaggatgactatatgttgctccaggataataacatcactggcatcagtcgcccaaagcctggaaacaagtttaagcgcttgaaaaaggctggaagggaatctgaaatggatgagcactctggtttttcagatggtgatggaacaggcaaaaaacgcagttgcctgtacacttcattaaatcgagcacttgcaaaaaagaaagccagagagaggaagacgaacatcactagtcagcactagattgtgtgttttatgttgagttgcaaattcaggtcctgatttttgtcctgccatgaaccgtt

SEQ ID NO: 14602 - DNA, 543 bp, Zea mays
  Coding DNA Sequence Number=SeqID_199
aatgagcttggggactgtctgacgcgacggttccggcggccccggctgtgtgcgcacaggctgacgtgcgggagctgcttgccaggctgcagattaggcacgcagaggcgaagcaccgggctgtggatggcctgctcgatgctctgcgtgaggacgagaagagcgtactgtcggcgctcggccgtggcaacgtggccgccctggtgcagctgctcacggcgacggcggccaaggtcagggagaaggccgccactgttctgtgcttgcttgccgagtctggcagctgcgagggcctactcatgtcagaaggcgcgctgtcgccgctcgtccggctggccgagtccggcagcctcgttgggcgggagaaggctgtcatcacgctgcagcggctgtccatgtcatgcggcggctagggtttggttgggcggagactcggttgggcgtggacggcagcaagagcgagcagtaggcctcacgtatatggtaacggaaatatgacggcgtgagtatgagatcgttgttacctgttaatggagttgtcat

SEQ ID NO: 14603 - DNA, 534 bp, Zea mays
  Coding DNA Sequence Number=SeqID_200
tggacatcacaattcagatggcagtggcactactgtgcacatgactatttgcgcatcaataatctgactgacatgctacacaaattagaaaaaagcaagatcgattacaaggcctactccctgatcacaatcagaattaacaacagtcatgtattaatacatgtaatcagacatcaccgtcgagggatcagcactgcccacaatagatcgatgtacagatgccgatggtgtgctctgtcgactgtcgaaggtgccaggttctactctccctatcgcatctagggcagcaagcaaggaggtacgacgacgctgctgtggttgcggcggcgcagtggaggggggtttggagctgtggcggcgctgtttggggtgtggcgccccttggtcgacgggatccatgcgggcggcggcttcaggcgaggagacggccaggcggtggcttgggggaggtggccaggcggggggattctggagaggcggccaggcggaagggcttcgggtgaggcggcacttcgatggcttcgggagagtcgc

SEQ ID NO: 14604 - DNA, 534 bp, Zea mays
  Coding DNA Sequence Number=SeqID_201
ctcagcaggaagaacgaagacgtgtacagtggcgacctcaaccagctcttcgcgtttgtcgcgacagcgttgcagtctcttgtttcgaagggccttgtggagaaggaaaagctagagtctttcaacctaccgatctacgggctgtcggtgggagaagtggaggatttggtcacgggtctgttcagcatggatctgatcaagcagttcgagatgaactgggacccgttcgacgattcggagcgctcgcagaagcatgaatgtcgccaagtacatcagatccgcgctgaagtctttaattgtctgccattttggagaagccataattgacgcatggtttgccgagttcaggcgccttgtcgctgagcacctcgagaaggagaagaccaagttcaccaccttcgccatgtgcttgaagaaagaatagtatggtcttatatacatagatctatttggacgcgtgcgcgcgcatatggttcgtatatatgtgtattatattgctcacagggtatatgcgtattatattactcatagggt

SEQ ID NO: 14605 - DNA, 414 bp, Zea mays
  Coding DNA Sequence Number=SeqID_202
aaaactgtttcatcgctgatggcagaatctctcggcttccgcagctcgcttccgctttgctgtcctctgtgatatctgctcgaggaatggcatcgctggttcgctgcaggtctctggcgcgggggtcagtgccgcagccttcgctgcgaaggggaaggcctccatcgatgcgcactggcttctctcgacggtgaccgtcggcgaggtccgcccggcgcggcgggcgttccgcggcctcgtcgtcagggccgccaccgtcgttgccccaaaggtgcgtgcccaggcaatgtagctcggtggtggtgttttgaggggaacggggtactgggattggttgttattggcttttgccttattgagcgctgctgcatatgcttgccgaggaagaagaccgacgagacgaagtcattgatt

SEQ ID NO: 14606 - DNA, 568 bp, Zea mays
  Coding DNA Sequence Number=SeqID_203
ggaatagctctgatatctctcccaacaatgttatagagccgactaggctgacgaacagcaatattgtacatccagctcgccatcgaggatgccacggcaacgactggaccgggcaaagtggcggcggtcgtgcttgtcggttgtcgctggcagctgcacggtctccctctcgccggtggctgtgcgcgctcgtgcttgtcgtcgacgatcgcgcactctcctcctcgccggcgactacgcgcgctctactgctccccggcgcacgcgcgtcgtcctccactccggtgcggccgcggcagggcacaacgacggcttcaagcacgcaaatgggatacgttccactgtagctccgatcatgccgacggtgaagctccatggaccgaagctgctgcttccgaggagaggcaagaaagtcagagtggtattatttgccggacgaccgtacgagccggtattttagggtacgaaccttgctgcagcgataaagtagctaagaacgtgctatatttagctgacaggatggtttatagtatattattggagagagtagtcttagctcatctccatc

SEQ ID NO: 14607 - DNA, 434 bp, Zea mays
  Coding DNA Sequence Number=SeqID_204
gaaacactgccactagcgccattgtgtcctgaggaagctcagggcacgacgacatcgccgccgccgcaaggggattccatctcttgtcgtcgggcgcactcggagtgtggtgtagaagctccatcaacacctatgtgacctgcgcgcggcggattgaccaggatcaccaaccaacatcaatcggaacttctcgccgtcgactgaagtctgccgtggatccgcctggcactgtggccaacccccacccgcactccaaacctcgaagagctagtggtcgaggatccgggtgttcaacaggtagaagttgctgagcaggggctcattgaaggtgaagagcagatggtcgaagaggagctgccctacaatgaagcatacgagttgatctaggtggcgtctcctattcagctttgtggcaccagagaataagacattag

SEQ ID NO: 14608 - DNA, 589 bp, Zea mays
  Coding DNA Sequence Number=SeqID_205
agctcatcgataggtgctctcacgccattcaccaagcccggccggcagctcccttggtactttggtagtgcgtctaacggccatggcgaagcttgctgcgcagctcaagatcaagttctttggcctcgtcggccgcatcgccagctgcggccggcgccggcgccgcttacaaggatgccgctggtgcgacggcagagaccacgtcagtggcaactcagcctgttgagatcaggtcaaggggaggtgctccgcgcgtggatggaggggccaagggtcatatcaacagcgaccctatctagaggaggaggaggaggaggagaagaagaagaagctcgtggccaagacggtgcttggacatcatcatccagaggaggagaagcttagttaattacctgtctgaatgaactgaagctgtagtaatataaacggaaaccattcgccgttgcctgtgctattctcccatgcatgttttaccatatccttttcacctttcctagtgtctgttatgcttgctatgtctcctactttcaagctctgatgtgttaatggtttggtaacacacaaatttctgaccagagagcagcctttt

SEQ ID NO: 14609 - DNA, 273 bp, Zea mays
  Coding DNA Sequence Number=SeqID_206
gacgcctccttaagtatggagacaagctccctgctaaggatcaggcacaggacacagcctatgagcaattacaatcatacccctcataaaagtttacaacaacgactcaagctcttatggactaaaaggacattctatctttaagtcagtttgtaattccgaagcttcatgaacggcacccttcggtatcacgtacagacagcttcagccgaagctgtttcttcctgcaggaccttcagcgacgaagcatggtcccaacagtggttaactcca

SEQ ID NO: 14610 - DNA, 553 bp, Zea mays
  Coding DNA Sequence Number=SeqID_207
agagccagggcagggcaaccaaaccctaggccctcgctctcgtggtatccatgggctaaccgcgtcccggtggggagcccagatccagagcaagggttccgtcctcggtggcaacaccatggagtgggatagcgagtccgacggcgctggcagcatcggcgtcgacgagcaggaagaggagcagcaggaggaggaggagcggggaggcgagagaggaggtgtcgacgccggtgggatgttcacgctcgcgactgaaggcatgctgcgcgcgtccggtccgtgcgggctcgtcgtcaccgacgcgctcgagcccgactgtcccatcgtctacgccaaccgcggcttcgaggaggctacgggctaccgcgccgaggagtttcttgacaaataaactgaggactagaacaaatcagcaggtaaggcagaagaaactgataaacgcataaacatcatctttgcccttccttgcatccaaagcaactcaagggaattttcgtgacattcaacattcttcatgtccaacaatgatagatcgacagttttgtggctggga

SEQ ID NO: 14611 - DNA, 227 bp, Zea mays
  Coding DNA Sequence Number=SeqID_208
caaattatcaatctagttacctaggaatgaaacatttctttggtatgtattatttcgagtgtttgctaacactctatattctgcagatcgttgatcctaaaactggagaggagaaggaagttgtgatattagttgatgatgggattaggccatctacttacctgctatattttttctgagcaaagtcggttaaacttgtgattctttgtatgttcaggtgcccggtg

SEQ ID NO: 14612 - DNA, 576 bp, Zea mays
  Coding DNA Sequence Number=SeqID_209
gaagtctgaccagaggctgccggagatgcagcagctggtgcggtcgctcgccgtggacaacgagaggctccgcgaggagatgcgggatctacagggagcttgcgagggcgctgtccaaggaaaacgacgagcttgagacaaggttagggcaatcgagccctcagagcgaggtcgcttcgaaggagcagagaggaaaggatctgcttgatccgcggcagcccgcacgagacagcttcgcgctacctgatctcaacctcccaccacaggactctgccgatgcctcaacagtttcattgatcgctccagatcgtttgcagctttgttaatcgaacaacaagtgtacagagaggaagcagggtagcagtctacgtggtactcactccgttcttttttagttgtcgtagtttagtttaaaaataaactagcggacgacaaatattcgagaacccatttagtatttgataagctgttactagatggcagagttttacttccactatagtcgtaagtgagataagccacatctgtagggattctaattttaactcacccgacattaattgtttcagctccagc

SEQ ID NO: 14613 - DNA, 246 bp, Zea mays
  Coding DNA Sequence Number=SeqID_210
gaaagaccagattaggaacaacgcatggaaccgataaggaacaatagtgtatcagtagcaaccagacggaatcatcactcacgatcacggcgagatagcagagtatctacaaggggatcagaatcagatcacacaaccgacaccacgacgcggtacaaaccctccccacccaccaaggacaccagatccaaccgagtcccggcgtcctcgtccatgaggtcgtcgtcatcgaggtcgaagtcgacc

SEQ ID NO: 14614 - DNA, 490 bp, Zea mays
  Coding DNA Sequence Number=SeqID_211
agccatgcctgttttctccctgtttctgcgcgcagcgcccagctccctgccgcgctcgttccatggccaccgcgccgtggattttcctgcgcgcgcgtgtctccttgcgcacgcaccgccgtcgagttctctggtgtctgcgcgccgtgaagttcctctagcgccgtggcttcccagtctcttccaaccgcgcgtgcaaattttctctgctcggtcttaatccccatggtgtcgtcattcgtcgtcgcgttgtgcgtgcagcaacccggatctgtgccgcccggtcttgttgtcgacatcgctcaccttaactcagcttgctagttcgtcgttgtttcgtcatctcgtcttgatgccagtccctacgtgttgtcttcgacttgtgttcgcgccgacaaaaacatctcaagaagatgtggagaagcaattccctagtcgatgccccaagtactcggcaaaaggccagaacaagaatcatcgcgagttgcgg

SEQ ID NO: 14615 - DNA, 486 bp, Zea mays
  Coding DNA Sequence Number=SeqID_212
gagaagcccgtcagggagctcatcgccgacgagaaatggtttaaggaggagttcgtcagcgtcgtgcagcagcgcggcgaggcggtgatcaaggcgcgcaagcagtccagctcgctgtccgccgccagtgcggcctgtgatcacatgagagactggatccttggcaccccgaagggcacgtgggtgtctatgggtgtgtgctctgacgggagctatggcgttcccaagggcatcttctactcatttccggtgacatgcgagaagggagagtggtctatcgtgcagggtgagttcttatcattataccagattagtagcaacagcagcaccaccgttcttgacatgatttgtttattgttcgaggtcttgaggttgatgacttcgcacgatccaagatggagctttcggcgaatgaactcgatgaagagaggtccatggcgtatgagttcgtcgccagctctgaaagccatcagtagatcacttgtg

SEQ ID NO: 14616 - DNA, 477 bp, Zea mays
  Coding DNA Sequence Number=SeqID_213
cggcccaggccattgctagaggtgcgctgcccctggcagcagggcccaggagctaccgcgcgcgcagagcgcttgcccgcgtgccagctcctctttatcttctccaaactgctaggcccgagccgcacgcgcccacaacagagaaaccgccacgacatccacctcccattccctcgcgctcggatcggcgtagcttcttcgttgtttcggcaaggcttatcggctaccccaagattcgtctgcgtagcgtgttctatcctgccggattcgtcgagcgctgccacgttcgcgtcatttgtgctcgctgctcgcctcaccattcatcatcatctcgagaccaaatcacaatggatatagaggtggaggaaggaaatgtcgatgttggcaatactgctgaaccatcgtatgagggtgtggctagtagtgattgtttagcacaagtgcatgctaatgacactgacgaacatgaactgggta

SEQ ID NO: 14617 - DNA, 437 bp, Zea mays
  Coding DNA Sequence Number=SeqID_214
gtttggacatctatactcacgacgaggtggctacttcggtacttcccagtctatcctcgcagatgctttagtagctgccaggtctgcagccctcattgctcgccagcgggagcaagccgccgctactgcgcgggagcaagagtaggtggaggcagatattgccctcgagcgctagcttgatgaggccgagtgccacctcatgctcttcaacgatttacctgtcttatttcacattttatcttatattttaaatctcactctattaactatataatatataatataaaacaatattttgtatcaccataggtacgatatgctagcgacagctttaggggtatttagtacgatgactctgccagggccgtacctgaagaggtgcggaggatgcggccacacccggcccccaaaaatagtgggcccctagccaccggacg

SEQ ID NO: 14618 - DNA, 473 bp, Zea mays
  Coding DNA Sequence Number=SeqID_215
taaccataatttaaccacgtcatagagtaattcatagctactccagcgccgaacatacacatgcttgcatggatgcgttcttctttaaactggacatggacggatgaatcaacgcccgcggtttccagcaacagcacccgcaccagcgccgccacctgcgcctgcgcctgcccccgcgcccaacccgactccgacgccaacgccaatgccgatgccgaggccgcccccgccccctccaccgagaccaacgccatgtccaaggccgccgccgcctccaccgcccaaaacctgcttctgaataccagacagctttgggcgggaggccatatcggcgctgtaaagcaatcatcaaagccttgaagtagtaccaaagaatgcttgcaaacagatctattgtgctgccaaccgtgcttggaagagacgacgaagagattcggcgcctgcacgaggagatctcccagcggagcaccgat

SEQ ID NO: 14619 - DNA, 542 bp, Zea mays
  Coding DNA Sequence Number=SeqID_216
cagagtatagttagtgatgacacatacgaagaggtctgtacacggaatccatcatgtttctttgcaaggatttagctttagatcatgggcctgtttggttcagcttttttctaaccagcttttctgaaaatctggctgtggggagaatctgagtatcattacgattacatatgaaggaagataaagttgttcatagggctcaggatctagaaagtgacagattcctactattacaacgactgaaccgattatgtgtttatgttgattttggatggtttttgtcctcaacgaattttatagaagttggctgaaaagctgagcgtttggcagtctgcagcagcttttggtggtcagaagctaccagaagccgaaacaaacaggccccatgactgtcctttcctgtatatctgatcatgaatttgtgattttctcctgggtggctgggcaccgttttttttcaggactgtagagtctgtatatggagaatgtatgtatatggaagggaatgtctgtatatggagaaggctggtgtttctgaaaaa

SEQ ID NO: 14620 - DNA, 334 bp, Zea mays
  Coding DNA Sequence Number=SeqID_217
agatgtatagaatccgtctcccttcctataaacaccacagaggaaacacacgagacactggatatagagttgggcctctggcctctttctgatctctatattatgagggggtgtacaggttccttatatagagatgtgagatctctcagggacaaagcaggtatttgcccacataaccctaactaggggtkacctaacaccatcttccacgtgcagcacttagattgcacattaacgaagagtcgtatcgcaaaagtttgaagccttgacatgctttactgttttagcaggttgtctgccttgcaatgtgtcctaaggcctatgaagggtttct

SEQ ID NO: 14621 - DNA, 344 bp, Zea mays
  Coding DNA Sequence Number=SeqID_218
acagaaacccttcataggccttaggacacattgcaaggcagacaacctgctaaaacagtaaagcatgtcaaggcttcaaacttttgcgatacgactcttcgttaatgtgcaatctaagtgctgcacgtggaagatggtgttaggtkacccctagttagggttatgtgggcaaatacctgctttgtccctgagagatctcacatctctatataaggaacctgtacaccccctcataatatagagatcagaaagaggccagaggcccaactctatatccagtgtctcgtgtgtttcctctgtggtgtttataggaagggagacggattctatacatcttcttgtgc

SEQ ID NO: 14622 - DNA, 588 bp, Zea mays
  Coding DNA Sequence Number=SeqID_219
ttgcctttcagctgttctcaacatggcctgggccgggaagcgcgacgaccggatgaccaggcactgtgcatccacgaccgccgccgccatccacaccaacctccagggcaacggaggactgctctcgacgttcgaggcgatgcgggacacggccagggacgggcagatcgtgtccgccagcatctcccaggtgctcttctgattggaccctccaccgtagactggactggaccgatgctgcatcagcattgctgcacccaccaccgtagacgaatggcatgtttggtttcttagctaaggcaccacaatctgactaaccttagtcgctcgaattgaagaactaaggttagacagaaaagttaggcacattatggcgtcttagagagcaaaccaaacagccccttaatgcttccttggctgctgtgatttatgctgcctagacgtagactgtagagagaaagttgagctagtaatgccgtgcaattttcactgcgggaatgctggagcgagagagagcttgtgacgtgacaagtccttgatttcactatgcctgctataggacagactcgcaagttttggcgtcgactt

SEQ ID NO: 14623 - DNA, 553 bp, Zea mays
  Coding DNA Sequence Number=SeqID_220
gatgttataggctagctagcggtacaatggcagaggatagttttacgatattcaatggagttgggaaggggaggagccagtgctttttttggaaagggaggaaaaaggaaagtacttatcagagtgaggaaaagctatagtgtggttgttgggggccctatattgtcgaaagttctcaaaacattatggtacaaatcattttcaagcacgtttcagatgttccgaatctaccatgaaatcatttttgttcgaagcaatgtatgtaaaagaatgaagctaaagagcttcgactttgtgacagcgatgcgaaacaggaaacatgcgaatgcagagaagaaggatgtagaagcttgaccagcacatccgcaaagaagaaagacaatgttatccctacaagattacagtactcatatgtatagaaactgaaagtatgtctgtaattttatatgaagatgtactatgagtcaccactataagtagaggtacagtgacatgcatagatgaatcttcaggaggcgactgaaattattccaccttcaaagttgtgatatct

SEQ ID NO: 14624 - DNA, 528 bp, Zea mays
  Coding DNA Sequence Number=SeqID_221
ggattaatatacaaccatcgagggaaaaagatgggtagtttggaattaatatacgacgacaacaatgaggaggaagcacttatggcggttacatagttgattacgcacgcaaacgacaaggcgtaagcctatttttggaatataggaatttcacaggaatgatacaagaatttcacaggaattagtttaaaaacatataaaaaacaaggctcaagaaattatcttttgatctaaaggagtttgttagatgagaaacgagagagagaaataaacttgtgcacttcttgtgtgacggaggacaatcatctacgtaacgtcgaacgaacatcgaaactgatgctttatacaaatagaaatgttctatttgtgttggggacttgttctcaagtgctaagagttaagaacaaggcaacacagaaaatgttaatcgttatagtccttcgtcctccgaagcattatttcccttaggatataatgatttacggacgaaggttatgaaggacgtaccttcataaaatcattaaacgg

SEQ ID NO: 14625 - DNA, 479 bp, Zea mays
  Coding DNA Sequence Number=SeqID_222
gttaactcctagaacggttcctgcagctacaaatgcagaaatggttaattcagatttgacctccaaggaccaaatatcgtctttaccgcaaacagatgatagattagctgatggcattgagtacaaatcaggagaagatgtttcacatggaagagtgagctcttcagccgaagttggcacaagaaaccagatgtcatcaactaatgtctccaacttaacgatgccatcaaaggtaatgtcaacaccatctgctgcatcagtacaaccttcattgacaaccattgctgacaatgataatcaaagcaacgagtgggttgtacctacacaagtggtgaacatatctgggtgcacaacttggaccaggacaactgaacacaacaacttgaaggtgcttgttgctcatcaagggaagtgggaagtagcagcacatccaccttcactctcataataacgctgcttaggcgcagtcatgatttaat

SEQ ID NO: 14626 - DNA, 402 bp, Zea mays
  Coding DNA Sequence Number=SeqID_223
tttattgttgcatttggcaaggacattatttttttccctgctggcttcctgctctgcgagaagaagcaagtgacacaggtgcatgattttgcttgctgtcgcagatgcccctgatggcaagcttcagcaatcgtcaagtacaaagacatcctcccgtgcgaaattcaatttgccaaatcctaatctcttctatatagcctcacagatcgcagcgatggagccggatccggtcgccgctagggcatcctcctcgccgccgccttcaccagcgccggccacgtccccaccgtggcaaacacgagcaattgcgtataggttcagaaaggacaatctccatgttgtctgcgtaagtgtacaacatttctggtatccaccccatcctcatcacacaaaggccaaaag

SEQ ID NO: 14627 - DNA, 403 bp, Zea mays
  Coding DNA Sequence Number=SeqID_224
gtcgtagcgagcctcgccatctggctgaggttctccatctggctggcctacctgggcagcgacgccgtgcccatctacgccctcgccaccctcttcaactcccaccggtgcgacaccggcagcagcagccgtgccggcgtggagttcctgtgggcgtcaatcatgttggtgcacctgggcggccaggacagcatcacggcctacaacatcgaagacaacgagctatggcgacggcatgtctttacagcggtgtctcagtaaaatatggatgttgggaccatgcttcgtcgccaaaggtcctgcaggaagaaatagcttcggctaaagttgcttatacatgatgaccgaagctaccactcatgaagcttcggtgttatagcatgtccgaagacgaaggatcgaa

SEQ ID NO: 14628 - DNA, 554 bp, Zea mays
  Coding DNA Sequence Number=SeqID_225
gtcgtgttagtgacaacttccctgtacctaggtgcccataggcaagcttaatagacacatgtcatctttcatgttgcaattgttgttccagaatgtgtccatctttaaaaggtaaggaattggttaggcttttacttccatggaattttttacttgctaaaatgggaacaagtggttggtgatgaaatgtagatctgctcctaaaaacttcgaagcaatcctgaggacatacatcagtaagtcattcattttgactgtgttgatatttgtagtatgcctttttggatagatggtgttgcattcctcttataaccatacttgctattttcttatatgattgaataaatatgattgtagtttactgttgttctcccgttatctgaatcttgactctaatcccttggtgagctcatatgggatataatgttgtagcattgagggtttcatcccaagttgtttacttcagtgctcgtgcatgtaccgaataaaactagaacagctattgactcatttcaccttttagatgattgtgtgtgtatgtcgtttcacttttt

SEQ ID NO: 14629 - DNA, 501 bp, Zea mays
  Coding DNA Sequence Number=SeqID_226
gtacggtcccatcggtggaggtggaggtgggatcggtggcggtggcagcgacggcacgagcggctggtacggccattgcccgacgaacgcgctgaagctcggcgtgtgcgccaacgtgctggatctgatcaaggccaaggtcggcgtgccggtgaacgagccgtgctgcccgctgctgaacgggctcgtggagctcgaagccgccgtgtgcctctgcacggccatcaaggccaacgtgctggggctcaacctcaacatccctgtcaacctcagcctcgtcctcaacttctgcggcaagggcgtccccacgggcttcaagtgcctttaaccatgcatgcacattatatgtgtgcgcgcacgtacgtagtatccaaaagaccacgcaatgcgtgagtatgacgaagaatgcgcgcgtgctatggttgccggccggggatacggtgtttttgtgggaatcttgttagtttcgcttcttctagcattaatgtgtcagtgtagtat

SEQ ID NO: 14630 - DNA, 550 bp, Zea mays
  Coding DNA Sequence Number=SeqID_227
atggaaaatcctacgcctgcattggtatgatgttgtccaacaatttcagaaacattgcaacttgctccgatcctctacgaagacatgaaaggtgtcccctaaaggccctctttgcctagggcgagcgcatagagtgtagccagtggcggaggacgccggaaaatttaggtgttgctaacgaagactaaaaatttatgacacggtttagaacttatagttataaaataagtaatagatgttgaaaaataccttatttaatagtaatcttgattgcaatccatttacaaccaaatgacatatagcgaataaaatctttgacttgatcattaacattttcaccattggcatcttcattattattctcttgaactccaacttgtatttcgggttcattgtaaactccactagcgcgagtgcttggtctacttccactagaagcttaactgaaatagctctttaaagttttttggtccatattctttgccttgtttttgtttatatccaagactgctatttagaaattggaaaatcgagtgcgaggctccgagcg

SEQ ID NO: 14631 - DNA, 573 bp, Zea mays
  Coding DNA Sequence Number=SeqID_228
ggagcacgacgccacttgagaacttcggaagatgtttcatcaagccgatgaggctaagaaaatagtggaagaggcaaaaacagtggcagaggacaagatatgagagcttttgcttgtgcatgatggtgtcatcgctgcaaaggccgagtcgacagctgcgctctctgagcggagcaccgagctcaaagagtatctcctgatcattggcatggtgtctgctcaccattcgccctcgcctctaatcaaggtgtccttggtcgaccggcttgggcactacctagccacatggagcacatagtcgtcgagggcgcatttcacgagagtggtctagctctggggcagatggtctctcactttcatgagatcgatgctaccatgatcgccgaaggtttcgtcgcagaccagacagactaggaactggacaccattgaagatcaggtccaccctcaaactcaattgatcaccgaaggggttgacgtgaagaccctgatgactggctcttggagcctggcaccacctgctgatgaccctcctccaggcgcttagacgtcctttttatttatgcgccttctg

SEQ ID NO: 14632 - DNA, 553 bp, Zea mays
  Coding DNA Sequence Number=SeqID_229
agaatgctttacagggtcaccccaattgcagttgttggtggttcatttctacctggcttagccggccataatttttctgaggctgctgccgctggttgtgctgttatgactgagtgaactctggcatgcaggaccccacgttggacacttctaccatatgctggtcgaaatgtggcaaataaatcctttagctgtcaagcaggtgtcaggagaatttgaactgctgcaaacactaaaagaactgcttggtgatgccagcactctgggagcacgtcaaagagctgcaaaagatgcattttcgattatgtcagatggagttgtgaaccgtgtatgggatttagtctgcaggttgggcattgattctcaaacaaatacgttgagcagttgacttagctgaggcttattcttgtaatctctgtgggactgtaggagtggaaatgcacagggagactgaaaccagaaaccggcgattgtggcatgctggcgacctggtgagtggtgacaaaggactaagctcacatgatagaacatatatccacgtcatttgctcgac

SEQ ID NO: 14633 - DNA, 441 bp, Zea mays
  Coding DNA Sequence Number=SeqID_230
gaaggcatcaccaccgaagcgccggcgtgcggaacagaggaaaatcgccgccacaaaacttcatccacaacgttgctcggcatgcgggatcgaaccagggtgctgcaccgagccatacggggacgttcgcgccgtttcctggcgagatcgacgaccttgaggctggtaatcgctcatcgcagtgattccatcgccgtatagctactcgcggtcgtggctgggggtctatagcgcgtcaatcgccgacgagcaagtgaccgaggaacccgaagcaccgcaagttgaagattctgagcaggagctcgcagaaagcaagttatgtactttatcactttcttttacctaataatatcatgttaatcaccgtggcacggttaggttaagctgatgagacctaataggttccctagtttgtttaccctacaccttgcaaaccaatga

SEQ ID NO: 14634 - DNA, 250 bp, Zea mays
  Coding DNA Sequence Number=SeqID_231
gtgagcgcgacaggtgagtccctcagcacggccggccagccagatctcccccacccccgcgcgagaagcttccttacagtcatgtccatccctgmaggcccgtttctcagggaggaagaagaagtggtctcatttgatcccaccaattgtgttttcctgcgtccgtggcccatatggccctgtgtatggcttgtttcggccaataaagacgtgccacgttgctcaaattcagcggaattgtgttttcctg

SEQ ID NO: 14635 - DNA, 463 bp, Zea mays
  Coding DNA Sequence Number=SeqID_232
aatggtgagccatccctctattgtgttcgcttttgtctctgctccctgttgtgtatagtaaccgtcagactagagccctagatcattggtgggccgagcgccgatgacagcaccactgaagtttacatcgtctgctgtgtccaagcgttggatgaagaagaagcacgatcatccattgattatgtagtggacaactccgattagaagtcctcgtaccccttcggtgggagtgaatctgggccttcgatcaagatccagcggctcagggctgagctccttatgcarccaagccaatttcttaaaagaacccatatcctattttgttttgctttgtagtcagggccggtcctggaggggggcaagtggagcggtcgcaccgggcctccggttttggaagggccccaagtaatgtacatgtatatataatcttagatgttgtgtctagtatggctgtttcacttgc

SEQ ID NO: 14636 - DNA, 529 bp, Zea mays
  Coding DNA Sequence Number=SeqID_233
caacctataattctgctgctcaagcattccagcaattccaggtcctgctgcagagattcattgaaaatgagccatttgagcatggtacccgtgttgagatatatgcacggtctcggagcttgttgtcaaagttgcttcaggtccccacttttcaagcattcaaagccatggaattgaaatgtgtccaataccaaaactaggtgggaattgagcttaaatccaatgctagtgtttgggtggcatgagacgctgtttccaacgaatatggagggtcttggctcggaatcgtcgcaacgctgtgctcgttgggctgaataccacacgaaaacggaggaagtttctgaataacaaattcaaccaaacactggatttgggtctgccatttccatttccaaattttggccctgaatactgacatccaatcaaatggggtgtaagtgtagtgcagattacacctatggctattctaatttatgtgctgtactagcctagtactacaataaataggttcaattactgaatgctgcat

SEQ ID NO: 14637 - DNA, 568 bp, Zea mays
  Coding DNA Sequence Number=SeqID_234
ggcaaagtcgggagaaccatatttcgaccaaagcaagcagaggcaggggtgtgaggagcagatggattacgatggctgcagtggggaggaagcmtgaggtacgtggtgggggcagwtcggaggaggccgaccacgggtgcgagtaggtggagcacagtgagaaaaggaagaggcggaggagsccggggcgtgagggagaggttgtggacgcttgacgcgtgtcgcgacgtgaatcgtggcggcaccgtgaagctcggagagcacaacaaaacagtcgtcttttaataattctgatatacgagtcttcaattgcacaagctaactaatgttccacagagatatggggaatgatctgcatggtcgtcactgctcgaatcgtgatgccaagggcaacggtgaggctttcagcaggccgaatatggttctccatgccagatcaagcactctgcttccttggtggggccaactcaatctttgctaacgagaaacttctcacaaccgcgaacaacgactttgacgtggaccaggcgatgtttacattctgttcacctatatatgcctatgctat

SEQ ID NO: 14638 - DNA, 514 bp, Zea mays
  Coding DNA Sequence Number=SeqID_235
acaattagtgtttcgggtcaatcgcaaataggtccattaacctctactgattgctccttttgttggatagatccacacacatatgtgctactccaacttcaacgacatcatccactccattgacatggacgccgatgtgatcaccatccagaactcccagtctgatgagaagatacggagctgaaatacagaactaaaatatggagccaaaataggacgcgagggtgtaaattacggagctggcattagccctggactctacgctatccactctcttaggatcccctccaccgaggagatcgaggaccgcatcgacaagatgcttgtcgtgctcgacaccaacatcctctgggtgaacccctcactgagctagagcggcaatctgatacagctatacacgcaatctaatatagctacacagttgatctgttcgcaccttatgtaccggtagcttacggtgatagcgcaggggactagcatcgttgtagggatccagcagttgcggcgaagtcca

SEQ ID NO: 14639 - DNA, 186 bp, Zea mays
  Coding DNA Sequence Number=SeqID_236
ttgcccggggactcctcgcgtagcgcatgggcgagtagcgaccgtgtgcgctgagcagcacggggggtaaagttgttcctgctgcacggcacaggctgtagactagtactagtactttacgtgtttgtatgttggcaactttggcgcatgtagttgtgtggtgactggtgagtgtgtaaactggat

SEQ ID NO: 14640 - DNA, 574 bp, Zea mays
  Coding DNA Sequence Number=SeqID_237
tagggttcaccatttttatctcaaaccttccaagtgttaaattgctcagcttcagattgagtatctagggcatgtcatttctgtagcaggggtggccactgacccaacctaagctaaggtgatgcagcattggcctactcccacttccatctctgcctaaagacttgttcggttatttttaatccatatggattggaggggattgatacggattgggmgagattatgacttactagggattgaaaccccctcaatccctytcaatccatatggattggggtagaaccgaacaaacccttaaggggattttgggggcttataggatactatcgcatgtttattagagattatggcatcattgcgagaccccttaccttgctgctgtgcaagaatgcattcttatggtctccacaagctgaaacttcttttcttcacattaaaagggctatgcagcagacaccagttttagctcttcctgattttcaatgcccatttgtggtggaaaccaacacgtatgatctcgatgtgggcgctattttgatgcaacatgacaagcctatagactttttgagta

SEQ ID NO: 14641 - DNA, 550 bp, Zea mays
  Coding DNA Sequence Number=SeqID_238
ctgtcatcacatttgttggagcatctgatatggctgaaacagagttatctttgaaagtcgtgtggaatgtgattcatccaaagtctggttcaaatgtgggaaatgttcgaaaacctaggcctcctgtgttagcagctgctgtatctacatggacttttctcctgactactattggttcatggaggataaataaaaatagctggaaagagcgcattgcatttctgtctactcttttggaagcagatgatcgtgctgttcgaatggctgctggtgaagcattggctttgtgctttgagttaaatctgcttgatgtttcttctcgtgaggatgatgatgttaacacaggaggaacaactggttctaagaacaagcttttcttggatatgcaagcattaaaagccaaaatatcaggtcaccatagaatgttctgggctcttcaaaggccaaatcagggagctctctgcttcctgtgtatgcttgcttttccagtattccctgttattctactatgaaatcatccatcgtgccacaaagaactgatggttcctga

SEQ ID NO: 14642 - DNA, 268 bp, Zea mays
  Coding DNA Sequence Number=SeqID_239
aaggcaagcgctgatgatcctgcaagtggtaatgaatagagagcctataaagcgcctttctggcgcacaatctgaagctgcaaagcaaacgcaatgctgccgtcgggagattggaactacaatatctttgcatctctagctagtggatgttcctttggactgatgactttgccgtagaggttagccgtcactcgtcactggacagtgcgtttgctgctatatcaagaggttcttcttttttttaagcttggtttcaatgtatacaaag

SEQ ID NO: 14643 - DNA, 299 bp, Zea mays
  Coding DNA Sequence Number=SeqID_241
ggcctcctatgatagtgcgacgtgcagtccttcgtccaccccggcgagaacgccatggggcaacatggatgcgaggagtagagtgcctcgatggcgaggcaggttcatccagacaagaagaaaccacgatggaatctagatttcccctctatccgatggaatccggatttggtgccagtccattttcctgtgattttgggataccagcccaattccccttcatggaaggtatgcgttggtgttggtcggcacactggaatggaacagatataggtagaaccttcagatcgacgacgcat

SEQ ID NO: 14644 - DNA, 420 bp, Zea mays
  Coding DNA Sequence Number=SeqID_241
ggcctcctatgatagtgcgacgtgcagtccttcgtccaccccggcgagaacgccatggggcaacatggatgcgaggagtagagtgcctcgatggcgaggcaggttcatccagacaagaagaaaccacgatggaatctagatttcccctctatccgatggaatccggatttggtgccagtccattttcctgtgattttgggataccagcccaattccccttcatggaaggtatgcgttggtgttggtcggcacactggaatggaacagatataggtagaaccttcagatcgacgacgcatcgggaaggagccaacgattgacccatcgccagatcccctttcatttttccttcacccaaggcttacgcagacctgttttaacaagagtcgggcagcgatgtttccatttcggaccatgacc

SEQ ID NO: 14645 - DNA, 544 bp, Zea mays
  Coding DNA Sequence Number=SeqID_242
taaagttgacatgacgaccgccgaggaggagatcaacgagtagacactattcatttgagtcggacaatgaagtagcatcgtgtcatcaccatcacaaggcggtggcggtgcgtcactaccggaatccgggactttgccgagtgccggacgctttgccgagtgccttttgtcgggcactcggcaaaggtggctttgccgagagtcgcactcggcgaaatcctgctctcgataacgagctggtttaccgagtgcaagacactcgacacaggcaaactctcggcaaagacatgtttgccgagtgtcaaacactcggcaaaggtggcgcttggcaaagagccgtcagcggccgtcctaaagctgacggccgtcagcctttgccgagggtcggcactcggcaaagaggcttctttgccgagtgccaaatatttagcactcggcaaagaactctttaccgagagtgtcttctctcgacattcggcaaatcatatttttattttttagattttgtccaccaaactttttgtggtatgttcctacactatgt

SEQ ID NO: 14646 - DNA, 384 bp, Zea mays
  Coding DNA Sequence Number=SeqID_243
gtcacctgacccagccgatcgagaatacccggaaggccggaacccacctgctgcgcacctgcaagcctcgagtggagctcttccacggccgcggtggagatggcggcgaatctggaggacgtgccgtcactggatctgatgcacgagctgctccgccgcatgaagtgcagctccaagcccgacaagcgcctcatcctcatcggtccacctgggtgccggtggttggttcgggtcgccttttttgtttcagcagctgctgcgttgcgcgcagtgcgtgagatttggtttggtttcgttcccctgcaatgtaatcatgtcgtgactctcaagggattattccggctctgctcttatggtctctgttttctatttaatgattgttat

SEQ ID NO: 14647 - DNA, 312 bp, Zea mays
  Coding DNA Sequence Number=SeqID_244
tcagcggcggtgacgcgtatcccaagtacttgttcggcgattacatggacgtgtacgtcaagcagaagttccaggccaaggagcctaggttcgaagccgtcaagacgggggcgccaaagtcatctccagcggcataaataaatagggaaaacaattattgaatgcattattaaaagtagtaataagtttgttaaatataaactagctcgaccggattgcaccgtccgatctggacttcctctagttattggaagcttatatatatatatatatatagccagttgccagtgctttgactatggatctaaatat

SEQ ID NO: 14648 - DNA, 555 bp, Zea mays
  Coding DNA Sequence Number=SeqID_245
tgccaccgtatagctaccggagagcagcttgcttccggcgatgcggccacagatgctatcaccatgaccatcatcgtcatcaccaccatcaccaccaccaccatgaagatgaccatgacgatgacgataacgatgaccaccacgatggcccaacgccaagcccacctaaacctgaacccaagccgcaaccaccaaagccagggccgacgcccaagccgccgatgcctagtccaacgccagagccaccgcccccatacaacagaagccaagtacacgccgaaactgccgcaaaagccgtcttcgtctagtacaccacgcaccgatgccgcccaatactctgcagtcaccaccaaaacaggcatcgtccactgaaccgaggaaccaaaactagcactggcacctcaagctacccacaacagttgatggataactcataactcattcatgcatgattagaatacacgaggattatctagctcaactggtagatgtagtctgtagattgggcataaataaatctgatataataagcctagttctatagatccatgtctg

SEQ ID NO: 14649 - DNA, 447 bp, Zea mays
  Coding DNA Sequence Number=SeqID_246
tcaacgccttggaacccgcatagctctgttcgtctcgtcattaccgtgctactgcctccggtgtggagcgatttgcgtgtgtcgatgaagcaagcgaagtcccacaacgtccgctaggtgctcgacgaatggctggaacccggaattcgtcgtcgtttctcatccgcgatctcgtcaacctctgctcgacaagtgttcgatgaagggtctgagccaagtgttgttgctgcttccacgaatttctaatcgaattggtacgttaattaatcgcgtgatgcggaagacgagccaagtcgaccccaagcgcgggctactccgcacggtgatactgatggacgaacatgtctgatcaagtgccaggatgtgagctgctcgccaaaggatcatcgtctaacaacactaacctagtgttacccaggttctaaccttgtgctgcggtaatggtgt

SEQ ID NO: 14650 - DNA, 545 bp, Zea mays
  Coding DNA Sequence Number=SeqID_247
tcaaaggtgtatcttgtcttcaagctggaacgatatccgttcattaacattctgttagtcaagagagattatgatccattatgattctaggttattaccaatttcagagataaactcaaacatatcatagaagcaggacctattgttaaggtcaaaagggggaagaagagattgtacaattaagaaagcgtcttactgattactctacgaaggaatcacaaatactcgatgataaatacaagttaaggattatttttgggctccaagctgcagctaccctccccatccccattctgattccaagaaaagcctgttcatcggtgccaggtgactttttttgcaaaatctgtgagcttcgatgtgccctgatgcacgagcggtcattcgcaaccaccaggtcgcttcaagagtttcctgatgaagaacgaaggatacacaccaccgagtagcactggcactttcagatggaacccgagttaatctgtcatggagacagacacatggagagaggtttgttgtcgatgtccatgtcacctattaggcta

SEQ ID NO: 14651 - DNA, 565 bp, Zea mays
  Coding DNA Sequence Number=SeqID_248
caggtatgtacgttgcttgctaagacagacaaacttcagctctgttccatcagatctcttagcaactacaacacgcgcgcggtgatcttgcaactttctgaaactgacagaccaaccagtgaagtgattggggcggaaaaccgttggatctcacagctggccggcctaacatcgcgcataatcatatgacccttagttcgggtggtgttctggtgacaaatggtagtgtgtgctgcatgacaagcttgtcgaaatggtctcatcagcctatttctgtttttccaaaaaaaaaatcacaatattttccggaaccttttgccttcacaatgtgtggatctgttgtgcagccctgatgctctagctagtctctatggccatacgacgcccacgcacgcacacctgaatcctgatgcaggttcctaaacgcaggatcgatcggcacagcttctaaattaaagcacgattattaggcccagagccagaaaactgcatgatccttggctggtcagcacacagaactcgctgcagaggacactgcccacccaaatctctgctacgaacgaag

SEQ ID NO: 14652 - DNA, 459 bp, Zea mays
  Coding DNA Sequence Number=SeqID_249
tattatgtgcaacccgatccgattttccccatcaaaatgcttgtgtgtacctgttctaggccgaaaacatctatgccaacggacactgaaaatatttggtaccccaacttccaaacagatgcatgttctcctacttgatggacaagtttaatttgtataccaggagtccaggactgtatgtcgtcttgcgatttggttttatggtgaagaacgtgtcaccaatgaccttattcgttctggattaactgtttgcggttttgaagcttttttctttgtaaatatgttaagttggtggctttttttttggagttaaatacatcggtgacccccaaacttgtcaaaggataccatttaggtctacggactttgaaaatgtatttctaggtccttgaacttgttggctatttggcccaatttcttgtacatagcccggctcttccaagccattctgttgtgttt

SEQ ID NO: 14653 - DNA, 577 bp, Zea mays
  Coding DNA Sequence Number=SeqID_250
ttggtcatccgcctgattacatctccacttggtcccaagagcatcggaaacgatcccaaccaggctctagcttccagctctgactctgccttttgctttataggaacatcagaatcgaagctgctttcaagcagctaaagaatgctcctacggccctggattattttcacatctattagacaatttttacggtgtttttttcacatttaatagtgtgccatataggcattttagatgatatgacataacatttaaaatgattgaatttcacgttgttgggaccatgcttcgtcgccgaaggtcctgcagaaagaaacagcttcagctgaagctgtctgcacgtgatgaccgaaggttgctgttcatgaagcttcggaattgcaaaccgacttaaaagtagaatgaccttttagtccacaagtgtttgagtcattgttgtaaacttttatgagggacatgattgtaattcctcacaggctgtgtcttgtgcctataaatagtgaacaatattcctttactgttcacgcattcctgtaattgcaatcgcatcactcgggaattattccttgccaaggca

SEQ ID NO: 14654 - DNA, 560 bp, Zea mays
  Coding DNA Sequence Number=SeqID_251
catttatacctctgccttggcaaggaataattcccgagtgatgcgattgcaattacaggaatgcgtgaacagtaaaggaatattgttcactatttataggcacaagacacagcctgtgaggaattacaatcatgtccctcataaaagtttacaacaatgactcaaacacttgtggactaaaaggtcattctacttttaagtcggtttgcaattccgaagcttcatgaacagcaaccttcggtcatcacgtgcagacagcttcagctgaagctgtttctttctgcaggaccttcggcgacgaagcatggtcccaacaacgtgaaattcaatcattttaaatgttatgtcatatcatctaaaatgcctatatggcacactattaaatgtgaaaaaaacaccgtaaaaattgtctaatagatgtgaaaataatccagggccgtaggagcattctttagctgcttgaaagcagcttcgattctgatgttcctataaagcaaaaggcagagtcagagctggaagctagagcctggttgggatcgtttccgatgctcttgggacca

SEQ ID NO: 14655 - DNA, 448 bp, Zea mays
  Coding DNA Sequence Number=SeqID_252
gctctcaacaacatgtctctcaacaacaacaacaacggcggcgactggtttctcgacacgggtgccacttcgcacatggcgtctcgtcctggaccttcgcaccaagacgatactgctccgatgtgattcgtccggcgagctctatccacttcgtcaatccaccaccacatcagcgcgtccctccgctacgttccttgcctccaccaacagcagtctctggcatgcccgtcttggtcaccctggccatgacacactccagcgacttgctcgttccattggtttttcctgttccaagtctagtcagcacacctgtgatgcctgtcgtcgtggcaaacatgttcggcttccatttagagagtcccataatgtttcccaaattccatttcaacttctacattgtgatgtatggactgcaccagtactgagcaattctggcttcaaattctat

SEQ ID NO: 14656 - DNA, 379 bp, Zea mays
  Coding DNA Sequence Number=SeqID_253
gagagaaaggagacagcgccaccgtcgctctctgcccaccgccgtggtttccctctgcgccaccgtcctgattcgagtggaagtgcaattggggttcgcgggggcgcgctgatcatttgcggcaagcctctgggcgtgtcggtcaccgtggtcaagtaaattcgtcgccgctgcggagccatcagctcgtcgccggcccatctgggtccgtattggaggattgggagtttcgcttgtgcctgctgaaggtgtgggtgccgcaggcgtgtgggttgatcgatcggtgcgagcagaattcgttgtcggccatcttcctcggccgcagtgccgcacgcaaccgtggccagatacgtcgcaactccttctcgcgtgaggacac

SEQ ID NO: 14657 - DNA, 276 bp, Zea mays
  Coding DNA Sequence Number=SeqID_254
ttcccttgcttcgtcgcacaggattaccccgccaccagagaaacccagaaaggttagagcgccgccgcggcaggaatccgttcccgtcgccgttgaagtctcggtgtggggccatgtggcttcgctgcgacaccaggaagacgaccctgacaaagtctggccgtattgttcagaggggtggcgtcaatttctcgccgtagttggacttcgccgcggatccgctgctcgccgtcgactggccgcgtcgcgccctaaatcccagttacgagccacctg

SEQ ID NO: 14658 - DNA, 589 bp, Zea mays
  Coding DNA Sequence Number=SeqID_255
aagctagtttcataacttcacccaagtaggaagcaaataacagcatctaacgtattcgtagccactcaaatatatttcactctagctactcctgttctttaaagaatcataaatgtgtagccacaccacatcagcattgagtcatgttgtaaaacaaaatacaatcatcaccttgatggcagagttatcgccacgacaagccgtctggtctgcatggtggagtccaagtagtgggcgatgacagggcgttggttgccgccgccggtgctgcggtcataggcatggttccactccccaaatgccgggatacgctgccgccgcctcgcccgcgccttcttctgcagggactcacatcacaaatagagagatggatcaaattagccaaaactcacgctatctatccgcagcagaagacgaccaagacggtcggtcgagaaggcattaatgattgggtggtcgtcgaacaggaactgagtagtgatctcagtatgctactgctagcggtaccttcatggcttccgcacacggccgctggccgagctccagacgtagtcgtggaggcagaggcagaggcagtcatctctcgtaa

SEQ ID NO: 14659 - DNA, 517 bp, Zea mays
  Coding DNA Sequence Number=SeqID_256
tgcgtgacgcgctgaatgttgagtagccaccggtggagaaggcgtagagtaggttgagcatgacagcggattgggtgtactccgaaagcatcttgtatgggtccaaacatgactcttctcgtcaaatgtcttgccattgatgttgtcaccctgatagatgggaaggttcacgtcgtccctcaccttgaccatggtctacgagcatttgggtgccgaacgtgagcacgtattacatctgcagaagaacacataagttgccatagatgtcgtctctgttgatctcttttcaacattgagttttcaaagtaaaaaaatagtggatttagaaatggtgatagctagttctcttggttaataatctaaattagtgtgaagagtataaatcaattagtaggttagcgaaaacatataaatcatagagtttgagttttttggagacgatgcaggaacaatatagttgttttgctgtaataatttgacattcattatcatgttacttatcaattctacacgtgga

SEQ ID NO: 14660 - DNA, 473 bp, Zea mays
  Coding DNA Sequence Number=SeqID_257
atgctcaccagaatcctctacgaaggcctgaatgcctgacaacgtgggcttgccgaatcatatcttcagctttctgcatcttgggtcctcacaatgcagataaaaccccgacgcctgcatcggagtgcacgtacatattcaggatagtagaacagcacagaagacaccatgtagaaaaggtgtgtttggttgcgggacagtcaggacagggacatcccctgacgtcctctctcgcccctccaattttgagggataattggcaacaacactgggatagttctgttccaacccttgatcctgaatcaaacaaacttatttgagggatcgtctcatcccgtcccggcttgtcattgtaagcaaacgcattccaaatcactatggaagaatactaagatgcagagaaacgaattgtccgtacagtttcgtagctatatgttggctccgagtcaagctggacctcgactagggttccg

SEQ ID NO: 14661 - DNA, 593 bp, Zea mays
  Coding DNA Sequence Number=SeqID_258
ccagggagaggtaaggatgttccttggcggcgccggcgagcagctgccgcaccgtcctgctgtccgcctcccggagcatggcgcggatccagtccgcctccgcgccggtgccggtgccgtcgcgcagcgcgaggcgcggggcgtcgatcccgatccgcctactgctgccgctgccgctgctgccgctgcctctgacyctttctccgtctccgtacaccaccaccgccctctcgccatcgttgggcgaaggagacggcgccactgccaccgcgtcgcccatcgcaacgtcatcctgccacgccgccgtcacggcctggtcggccccgccgcgagggccgtcgggacacgcgaggcgccgcatcttggtggcgcggcaggagggcgagagcccggaggcgcggtcgccgccggcgtcgacgtcgaagaggcccggttcgtgggcgcccttccgcttcaacgaaaggccgccgtggaactcctccgtgagcaccaccatcgccggtcgtcgccgccgtcaaactcgcacacgcagctgccttcggtcgtcgtcaatcgcagcgccccctcctctgctctccgactcgatcgcttct

SEQ ID NO: 14662 - DNA, 490 bp, Zea mays
  Coding DNA Sequence Number=SeqID_259
ggctatcatggcttaggtacaccgatcctactagaaaaccgaagaggtataggtatgcatgctgttcacatctcataactaccattttatttatgttccgggtaagcctttccgtcctcgaccgccctccattttttttttyctgttcgcttcagtgccttagactatctccagcagtttatttatmctcgtacttgtattcaamctttmctctacaaacagtgtgttmccgtgcttatagataamctttmmgtaaactgctggaccaccgccgcatgcaggaagtccgcacatgtactgttacatgctctcccagaggaagaaggcactgtcaaaggccaaagcagcataattctgctcaagagctgtagaatggtagaatcaagttctcgacatttcaggtagaatctagtggttcacatgaattgcgccataggtgttgtacccggatttgtattggctatcagctgtgttcgatggttaaattgta

SEQ ID NO: 14663 - DNA, 564 bp, Zea mays
  Coding DNA Sequence Number=SeqID_260
agacatgtcgcggagggtcctcttctcctgtccgggggtgcttctctatgccaaatcagtagcgtgccggcctgtaatgcatttgtgagaaaaggaaattaaagagacgccaacaacagcgacacggatgacccgatccaggtacacttttacgttaaaatctttggtaaagtacagtacctactttatcaatgttcagtattatatatatcttgttattgctaattataattttaagtctccaaataaagtgtcgacgtccaaataaacagtgggcaaaacggcatagaaactcccccctccctaatctctaactgcaggtttctgattctcctcctcgactacctggaggaacacaggtgcctgtcctcggctgagcagcaagccaaacatatttgccatgaacgtctggctgtggcgattaaggcaaaggctgctttctggaagcaacggagtaagcatcgtgcaataattgaaggggacgcgaacacagccttccaccatgcgattgcgacacagcagatgcgccgaaaccagattaaatccatcactgttggcagccgt

SEQ ID NO: 14664 - DNA, 512 bp, Zea mays
  Coding DNA Sequence Number=SeqID_261
tcatcatctcataagctctgctagcttggtgcgcgcggttgacgccgcgcacgatagctaagctatctcttgaaccatcgtagtagcaaacaaaagatggttcagcggccggctgcagccggcgatcgggcaggcgcaggatggagccgggtggcggaccagccggccgcagcgggaggcaccagcggggggcggcggcgggatcgtcgccatcatcatcatcagcagcaggagctggtgcttcgtcggctgctgccgatcaacaaggccaaggcgtgccggttcaagcgcagctgcttcagcgaggaggacgacgccgcctcctccgccatgcttctgctcgcctgcgtcgtctgcgccccctccctttgatggtgataaaaatacttttgtttactttggccgcctgcttgtaactaatcaacatgtggatcaccatgccgcatgcatgtcagtctgtcgcatcggaaacgttcgctatgtaatggggtactggtcgttgattcgtctct

SEQ ID NO: 14665 - DNA, 262 bp, Zea mays
  Coding DNA Sequence Number=SeqID_262
tcacagctagctagcgtacagacgaataatctcttcttcacctcactagctaacaccagctagcagctcgatcgctctgtcctgcaataatggccgctcgctcctcctccatgtgaacgcaagatcaccttccaaggtttttgtttgagttgtatcctctggcccgacttttagtctactagcagagctataatcactatatgaattattttttgtgcccttaccatactctgctgttgcttgagaatatgttattagtctg

SEQ ID NO: 14666 - DNA, 292 bp, Zea mays
  Coding DNA Sequence Number=SeqID_263
gtcgttgtacccgttcaatggcgagctggtggcagcgatgtaggagatgatccatgccgaggtgcacaagtacatgttagtggacggcacctgccaaagatacaccgtttctactgacaatccgtcttttttattgcttatggcgttgtgcattatacatgtccaccaattatatacaaataccatttgtgggttacctctggtgtgtttaggtgcgagctgcaatcaaagttaaggcattagtcatcatttgcttcacctcttctggacaggctgcaagggtgttctggac

SEQ ID NO: 14667 - DNA, 582 bp, Zea mays
  Coding DNA Sequence Number=SeqID_264
gctaactcccctgatttgaacatattagacttgggcttttttaatgctattcaatcattacagaacaaatcaacatgtagaaccacaaaagaattggtagccgttgtggataaggcgtttgaggattattcagtgtgtaaggcaaacaaaatatttttgacacttcatgcctgcatgagggaaatcatgagaacaggtggtaataatggctatgaccttccacatatacggaaatcaatgcttgagaggcaaggttccctgcctttgcagctgaaatgtgatgccacattggtcaatgaagttatggctcaaatcagcgtttgagaggtggagtactcaaacagattttgctaatcctaatctactgcttttagatttactcaaacagatcataatatactctcaggatcaacttctgaatttcaacagggatcgaagcagcagatgcatggatgtggttcaagttatgccaggcggttcttggggttcaagttcaacaggagtacttctgtcagacgtttttagtaatgaaatggttcatttttctttgtttcgaatacaagttctgtatgtactcctggg

SEQ ID NO: 14668 - DNA, 283 bp, Zea mays
  Coding DNA Sequence Number=SeqID_265
tcgccggtgccgctaaaggcctaaagtctgaatggaaccggtgtagttttggaagcgacagcagatctcgctgctggaaccgctggatgaaaaggattgcctttacaattccacgtgcgttgctgtgggtgttgtttcgacaggtatccacgtgcgttgccttcgcaggacttgtgccggtcaccagctgtaataatcctgatgattgacgagtcattgtctctttaccccccatcgctgtactgctttcatcaattgtatgtatcagtttcacgccctggtc

SEQ ID NO: 14669 - DNA, 228 bp, Zea mays
  Coding DNA Sequence Number=SeqID_266
ggacaggaagcaccataaccagggaacacaccgagggagaacagagaggaaggaaggacacagagagccatcgtcgctaagaactatgacagccgcgccgggaagattgagcgagggagaccatgccgcgcctgtcctctaggcgggagttcgccgcggccgtcgcgcactccggggcgctgttcgtcgccgacccgtctgcttggtcgtgggatcggtctgggcgac

SEQ ID NO: 14670 - DNA, 369 bp, Zea mays
  Coding DNA Sequence Number=SeqID_267
tcaagtagtgagtcaaggaaatcctacgaaataccttaagggtgtagaagtgaaggcaaagagaggtgcacagcttcttgaaaaacagaagagtgatgaagctaaaatacctggctgcaattcaaaatggagccagcaagaaggtggtgaagtttggtgcgacgcgggctacccaagactggtgaggaggccaggcgacatagctctgaccggacaagttagccaaaggtgcgcttgtttccaggaaaacgagctcgacaaagccgggctagtggtgtacgaagggtgtgattacttgagccagtcttgcaaagtaaactaggctgtatatatctcccttcccttggtccacgaacctgttgctttggg

SEQ ID NO: 14671 - DNA, 558 bp, Zea mays
  Coding DNA Sequence Number=SeqID_268
taaaattccactataccacaacccaaatttagcaactcctttagagtcgttaaaagtggctatagcaaccgaggattagtcggtatagacttatgccgactgcaagtataggtcggtgatactggcgtcggcaaaagtttttgccgaccgacggatctatgctgacggatagtcggacaccataatgagtaataccgaccgacctggttgtggtatagtgttcttagcaaaagatatcaatcaattcaagttataaaccttcaattggtattgtttagcttatatgtgccaaagctaaaattatagataaaaccgcctaaaatcacctatggtaatgctcatgtgacaatacccattatgtggtatattgaccttaaaagttctaagtttgtgtcttctataagtattcaaaacttgtatgtgcacttttatggggatgttactctatagtttgatatctttgagactaatgccctttgtaagcttatcgtgtatgtagtagtctcattgaaggaaaattgaaatccctaaaaaatggcaatacgcatccactgcaaa

SEQ ID NO: 14672 - DNA, 564 bp, Zea mays
  Coding DNA Sequence Number=SeqID_269
cccctggagatgagcgctcgcttagggttaggcgtccaacggttgtaccctccaccacaagcgagaggagatcgctggaagaggggggctgggagacgaacaggaacacggtccacatctgggtgccctcgcctcccactctctcgaatcctgacgcccacacagcgcctccgccctcgtgagaccgcgacgcaaatcccgcccacacagcgcccccacctcccctttaccgccgcagatctcgccccctccccctcccttgctcccatcgccaccatgcgcgcacctccgagcgtcgccccctcacctccctcccacgtgtcgtgatcaccagatcccagtatgtgtttcctcctcccgacctctcctaggtttcttctccatgtccccaccccagatctcagttctcccccaccatgccatcagctcaggtctcccacgaaaacgtctacacaaccccgagctgcgggtggtaggcactccccatggggttgcaaagtattaagcatgggtaatttgagttatgcctagatagttgtatttctcttcgattacactgtcagt

SEQ ID NO: 14673 - DNA, 471 bp, Zea mays
  Coding DNA Sequence Number=SeqID_270
agctctactcgggttcaggcgagattcgaactggggccaaggacacggctagggagggctcggcgagctccatggcaggagaagttggaacggcgagcaagaagcaaagcacccgggcgcgacgcagggtgctccgacaaggtagagcgcgcgtccagggaggaaaccgaactgaatcgagcggagggagacaggtcgcgtggcgcggttggggaaaaggagcggcgctggagcgagcttgaagaaatcgccatggcgcgcaggaagctggggcaggggcagggccgagtgctgtcctgggcgaggagccgagataccgcgacagacgaggacgccatggcggctcgtcagggaacgagaggaacagagaagagagagagcacggcagggtatttgaagagtcctaggggcggcgccgtgaggagataaacaccggcagccaggatttttgtaagccaaagcggcgcagag

SEQ ID NO: 14674 - DNA, 470 bp, Zea mays
  Coding DNA Sequence Number=SeqID_271
tcggagtcgggctacccgtaccagggccgggacgggccctgccgctcgtcggccgccgccgccgccgcgtccatccggggccacgaggacgtgccgcgcaacaacgaggccgcgctcgcggccgccgtggcccaccagcccgtgtccgtggccatcaacggcgaggacatggcgttccgcttctacgacagcggcgtgctgggcggggcctgcggcacggacctcaaccacgccatcacggccgtcgggtacggcacggcggccgacggcacaaggtactggctgatgaagaactcctggggcgcgtcgtggggcgagggcggatacgtccggatccgccgcggcgtccgcggggagggcgtctgcggtctcgccaagttgccgtcttaccccgtctagagccaggcttattcccgtcggttttaggccgacgagaattaagtgttttcctgtagtaataactatgtcca

SEQ ID NO: 14675 - DNA, 461 bp, Zea mays
  Coding DNA Sequence Number=SeqID_272
gttcccactggaagatcccacaactcccgtggccttgcattcccaaacccaggcgcacgccggccagatgcaccggcatgtgctaactacctcttcagagcagcaggctgacacgtgttcactacctctacagactacggaccagcagcaccacttgtgtgtgactcctcgtgcgtccaccgcaagagccattgcaagcacacggaaagaaagccacgtacatcttccgccacgtctcactctatgtgctgctggttcttactattctctgtcagctagtgcgacgttatgaagagtctggtctcgtctttgtcaagactttgtccacgagcgcaagctgtttgacggtatgcctcagcaaaatattctattcggttcgacgatcatacgacaccgccatgctatccaacatatgcactaataacagggacaatttgtaaaccctagtatggagtacccat

SEQ ID NO: 14676 - DNA, 408 bp, Zea mays
  Coding DNA Sequence Number=SeqID_273
catgttgtttcccatttgatcgtagagtacaaggacaatctgggggcgaaggtggttgtggcagggctgtcaacaacctgtagccagaaaattcacaatcaattggtatgcaagtggcattgttctcatcctcattgtatctttcatggtctgaatgctcattttagggtggttgcaatgatgagacaggacgaaatgggatgatcgtcatataaggttgtttggttcagggtcagaggttggaagaagactgtcccagtattgtctccagttgtctcttgaaattagagggatgagagtgttggaatataatataagtgaattgtccaccacttcctatcagcttaagcttttgggttgaactagttggtgcatgcaacttaatatgatatcagaggtcgcgagttc

SEQ ID NO: 14677 - DNA, 582 bp, Zea mays
  Coding DNA Sequence Number=SeqID_274
gataagcaatgctatgcccagccacttggggcaatgtcgagcagtgccctcgagggcactaaggcgaaattcttggtctaccgactcagagtagcacacgaggtcccaccatctacgaccatcctctagcgttcattctggagtgcttcgtgtgcaccttgcgatacaagttgttccatgagaaataacaaccctctcagcagccaacataggtccatgacaagggcattaccaatgagcaagagctgctctagtggcagacaagatatgataatgggttggctctcaacggccagtcctcattttttttggaggatcaaacaccaccgtcgtgcaagaatagctggcagattttataaaggatcactttggcgtcctccccaagtgaaaggcaatctcctacaagccatacccagaagagttttactggatgttgtcgccgcccaagttcaagggtaccgtaaatttctagtaatgatggtatgagcatcatcgagcttgtgagctgatacatgactcaactcagaatttgcagcattgggccgtaaacacatgaaactttggctattcttgttatcacta

SEQ ID NO: 14678 - DNA, 460 bp, Zea mays
  Coding DNA Sequence Number=SeqID_275
tgggttcactgttctcttcgctttcgtctttgccttctccatcaaagtcttcaacttccaaagaagataagggagggcgctatggtgctgcttcagctcgcttcagtttatatgcgtttcagcaatgtaacatgatgaaagagtatatttagccttaatttgtttatttttaggaagtttgacttcatttttttgttttctggccagtttggcctgttctcccaaatttatatgccagtgtgttttatatgatcttatatgccagtatgtttgtgtataatttgcagaaaagtcatatattcacatctggtgcttctggaacaatgcagctgttatgaggggtgtttttagagctgaaaagccagagttgcttattgtaattttaccacaaagtctaaagaagcagcctcctgaagccaagaagaactgttgtgtaaagtgcaatgggttggcttttgat

SEQ ID NO: 14679 - DNA, 478 bp, Zea mays
  Coding DNA Sequence Number=SeqID_276
tgaaaccctaggcaatctcctcgtcgcttctgttcaccggcgaggtggaggactgatccggcgtccattgttgcgctgtcgtcgaactccccgccggcgagcgctttcctgcgagggcgccgccgtcggtgagatcctcggcggtgcttctgcacttgcaaggaggtacggcgtcggcctgagggttgcgaactgtgaactaccgacggcaagaccacggattgattgtggtgagatgtgctgtctggattacgagcaggaaattcggcattcttcagtttcatgttcttctacgaatcaacaccactgagatgatttgcagtactgaaaaacaaaccggatctgaagatgaagcaactgagcggtgtcccgatagggtgcccgtaagggcgccttatgtctgcttgtagaaatgcatcgcgcacttagaggaataatgcccagtttcagtttgaaaaaggtacaacgctcaggaaat

SEQ ID NO: 14680 - DNA, 600 bp, Zea mays
  Coding DNA Sequence Number=SeqID_277
caaggactttttggtcgttctctgtctcaggtgcaagatattgttgttggaaagtatgagagtgctctgctatgcttaggcaacttgcattgttactttggacatcctaagaaagccctagaggcatttgcagaagcagtccgtgtttctcaaatgaataatgatgattcatgccttgcctatgtattaggagccatttctaatctattatcaaagataggcatctcaaacacagttggaataatcagttctccatattcacttgggaccaatattggactaggcacaccattatccattcagcaacagttacttgttcttttaaagcgatcactcaagagagcttatgcattgaaacttccaagtttactatcctttgatcacctttcgcttgcaaaatttgatctgaagcatgtccaaaggccactagtctctttcggccctaatgcatctacaaagcttagaacatgtcctgcagatgtctgtaagaatctaaggttaggttcccgtgtgttgactgactttggagcagatgttctatctacttcaaatgataatggtagttttagcacttcttggcttaggaatctatccgccact

SEQ ID NO: 14681 - DNA, 491 bp, Zea mays
  Coding DNA Sequence Number=SeqID_278
gggcgtctgcgggatgacgacgacaaccatgacgccgacgatcctgaccacgacgatgatcatgacgacgacgacgaccatgatgacgacgacgaccaccatgacaccgacgacctagatcatgacgacgaccacgacgatgacgacgacgatgacgaccacgatcacgaacaccacgacgaggagctccgcgcgtaccgcgactgctgccgatggctcaaggaggtgcagaaggaatgcgtctgcgaggcgctgctgcggctgccccccttcctcgtcaagccgcagcacacttacgttgtcagggtcggcaggacgtgcaatatcacctaccgctgcggcggcgtctagctagctccatctccatgtcgctgatggccgcacatccaccgtacgacgtccatgtagccgccgctcatggccggagttccatgcatgatgtctcgtcattacgattacatgcatgatgtctcatgctgcgcgcgtgcttt

SEQ ID NO: 14682 - DNA, 425 bp, Zea mays
  Coding DNA Sequence Number=SeqID_279
tcgtaagtgtgcagccaggatgttttatgctatcatttatgtccagttcggggctgctgtatatggtgctgttgaaccatatctggaaggtggctagaagcaaagaacactttggggtgtttggttttagagactaatttttagtccctccaatttattccattttagtcactaaattgtcaaatatggaaagtaaaatagagttatagtttccatattttgcaatttatagactaaagtggaataaaatgaagggactaaaaattagtccctagtaaccaaacactaccttagtttcctcgcgaattttggttggcaattaccccagtttcatgtaattctgtagtacctgtaatttctccgagagtactgtagttcaatatcatgtgtaaataaatcatctataaacgagcaagtcctgtatt

SEQ ID NO: 14683 - DNA, 422 bp, Zea mays
  Coding DNA Sequence Number=SeqID_280
gagcaaaacaccctatccagcttaactaatacaggacttgctcgtttatagatgatttatttacacatgatattgaactacagtactctcggagaaattacaggtactacagaattacatgaaactggggtaattgccaaccaaaattcgcgaggaaactaaggtagtgtttggttactagggactaatttttagtcccttcattttattccactttagtctataaattgcaaaatatggaaactataactctattttactttccatatttgacaatttagtgactaaaatggaataaattggagggactaaaaattagtctctaaaaccaaacaccccaaagtgttctttgcttctagccaccttccagatatggttcaacagcaccatatacagcagccccgaactggacataaatgata

SEQ ID NO: 14684 - DNA, 217 bp, Zea mays
  Coding DNA Sequence Number=SeqID_281
gcttgttcggttgctaggggtttggaggggactgaagggattaaacccccttctattcaattttgaataggaggggatttaatccccttcaatccccctcaaaccactagtaactgaatatggcctgagggggcgggcgagtctttatattgaatgaaactacataaaataccatgctgtctctgtcactggtaagggacggtggtacctagcgcaa

SEQ ID NO: 14685 - DNA, 329 bp, Zea mays
  Coding DNA Sequence Number=SeqID_282
agatctgggactgggtttgcgacgcgggaggcggcttcgtgcaagacggcgagggcgaggatgaggaagaagaggtttgatttcgcagaccagcaaatgtgaagaagaaccaaaagttgctcctgctggtgacatgagcagttgcaacttgcaaggcggcgttgtgtgggagtccttttggcctgcgagtgttttgctagttttgacaaggcactcttgtttcttcagtgttcgccgtctcggcgccgaagtgtccaagaaaaaaatgtatttactatttgatctactcctatgaagtactcgagctgtttactgtttactgtttcttc

SEQ ID NO: 14686 - DNA, 355 bp, Zea mays
  Coding DNA Sequence Number=SeqID_283
tacgtaccccggaagcacactgtttcggttaagtctgctctttggcattattgccggacttttgaaagccctttgccactggaatgaattgcagaagcaggttctgattgcctgtcattctacgcagcattgggtggtcactccggctaggcctgcaaatggggtgggtgtaaatgggtattttaggtgggtttaagaaatggttttgttttggtgggttgtgatggattttaattattaacgggttgggttgggtgggtttattttatattgcgggtcaaaatggtggatacccatgggtatagatggatttgtataggtatgggtttccatgggtattcaccaatcagactac

SEQ ID NO: 14687 - DNA, 502 bp, Zea mays
  Coding DNA Sequence Number=SeqID_284
gagtcgtgccggtgaagaaaatagagagaggtaaaacaagggagggccgccgccaggggcaattccttcgtaggtcgccgattttgcctctgtcggtggtcagggagcttcgcctcgatacgtgggtgatgtccgtggcatcgtcgtgcagctaggagctccggctcgggcaatttcgcgccggcgttggtcctacgcggcagatccgccttgtgccgcgagtggtgctcctctgcgcgtcatccgtgtagtgaggtcacgagaatctgaagaatcaccctggtatctggaatctcaagtgccaggagaagaacaggtggttcaagaggagccacacaacgaggagtttgattcgatctaggtggcgtctccgagttgactttctggcgccaaggatggattttagttcaacctgtatttatattttattttgtaagacttccgctatgtaataagtactctaactattgtggtgtgacatctgacagtcttggcttgcttc

SEQ ID NO: 14688 - DNA, 457 bp, Zea mays
  Coding DNA Sequence Number=SeqID_285
taggaagcaagccaagactgtcagatgtcacaccacaatagttagagtacttattacatagcggaagtcttacaaaataaaatataaatacaggttgaactaaaatccatccttggcgccagaaagtcaactcggagacgccacctagatcgaatcaaactcctcgttgtgtggctcctcttgaaccacctgttcttctcctggcacttgagattccagataccagggtgattcttcagattctcgtgacctcactacacggatgacgcgcagaggagcaccactcgcggcacaaggcggatctgccgcgtaggaccaacgccggcgcgaaattgcccgagccggagctcctagctgcacgacgatgccacggacatcacccacgtatcgaggcgaagctccctgaccaccgacagaggcaaaatcggcgacctacgaaggaattgcccctggcggc

SEQ ID NO: 14689 - DNA, 563 bp, Zea mays
  Coding DNA Sequence Number=SeqID_286
tagccacgctcaacgcgttcgacatcgccgccaacggctacaacgtgacggccacgggcgcggccgcctgcccggtgacctcgttcgcgttcgccagcccgcgcgtcggcggcggcggcttcaagaagcggttcgacgccgtcccggggctgcggctcctccgcgtccgcaacgcccgcgacgtggttcccaagtacccggtcgtgttcctaccacgacgtaggcgcggagctcgcgatcgacacgggggagtcgccgtacctgagaagccccgggggcgagcagacctggcacaacctcgaggtgtacctgcacggcgtggcgggcacgcggggcgcgcgcggcgggttcgagctcgccgtggcgcgggacgtggcgctggtgaacaaggcgtacgacgccctgcgggaccaccacggggtgccgccagggtggtgggtgccgctgaacaggggaatggtggagggcgccgacgggcgctggagcttggtggattgcgaggaggacgaggatgatgagtagtagacagcagacggagtaaacacttggcatgctggcggcag

SEQ ID NO: 14690 - DNA, 464 bp, Zea mays
  Coding DNA Sequence Number=SeqID_288
ttggtcgcgaagcagtccgagccatagagttcgcccggccacggtctcgtcaaattgcgaagcttcctcgccgtgcgctctggcatcggctgccaccgattccgccataaagttcacgagcgctccttgctcggcttgtttcaccgtgggcaatttctacacgcttcaaatccgtgctgcttgcccagtgtgctctcgcacttcgtccatcgggtttcgtgcgtgctcgcgtttgtcgtcgagtcatcgaacccatcatcccctgctcgacccccacctcaccagctcgctctggacttcaactgaaggccgtcatctttcaggcaactaccaaatcgagttgtgatgtggtgagtgttgggtctatgcttcgtcgccgaaggtcttctaggaagaagcggctttcggctgaagctgtttgtataggatggccgaaggttcctctttacaaagcttcggcatta

SEQ ID NO: 14691 - DNA, 476 bp, Zea mays
  Coding DNA Sequence Number=SeqID_288
acgacagctgtcttggtcgcgaagcagtccgagccatagagttcgcccggccacggtctcgtcaaattgcgaagcttcctcgccgtgcgctctggcatcggctgccaccgattccgccataaagttcacgagcgctccttgctcggcttgtttcaccgtgggcaatttctacacgcttcaaatccgtgctgcttgcccagtgtgctctcgcacttcgtccatcgggtttcgtgcgtgctcgcgtttgtcgtcgagtcatcgaacccatcatcccctgctcgacccccacctcaccagctcgctctggacttcaactgaaggccgtcatctttcaggcaactaccaaatcgagttgtgatgtggtgagtgttgggtctatgcttcgtcgccgaaggtcttctaggaagaagcggctttcggctgaagctgtttgtataggatggccgaaggttcctctttacaaagcttcggcatta

SEQ ID NO: 14692 - DNA, 271 bp, Zea mays
  Coding DNA Sequence Number=SeqID_289
caaggacggtcgtgctgcaaaggatcatccggcatccaaactgaaaaataaggggaaatgtaagggatccagtgatagcgatgctcatgaaagagtctgtggctgagacgagcaagcaaacaccaccattgcccaaaagcaacaaataatggtcgtggtcttatgtgaagaagaatttttctagttgtccactgtccaagtctctactgtttatagttaaggtcaccggaagagttgttattttctggttacattccattctttatatggg

SEQ ID NO: 14693 - DNA, 567 bp, Zea mays
  Coding DNA Sequence Number=SeqID_290
aagcttggcaagtcattcagtcatcttccgaccaacaatgatgatcctatggacactgattattgccagggtaggagaacagtcacaaaagaaaggtggtgcctaggaggaggatgaagaggacttcaactcctacaccgccatcttttgacattgtcaatcatgaggatactaagagtcatgaggagcaaaggtaggtatggggtggtgatggtggtagcagcgatgaggagagcaacatggaggaggttgatgggggcatgtcccatcaatttgagttcacaaccagcggagaagagggagttggtgtctaggcagttttctagggcagttggagccaagcggtgcacttagatgtctcttcgcgctgatgccacactttcacactaggacacagtatgaactttttttagaaaactttaactagccaccaatgcatgatgttcagttataaatgtttctctctttgtggcatttgacaattagtgatcctactgagaatctgaaatgattttctttatcaaacacgcccttaaagttctactcgggcatgtatctagtcagact

SEQ ID NO: 14694 - DNA, 538 bp, Zea mays
  Coding DNA Sequence Number=SeqID_291
gcaatccttcgacgagttctaccacgccattttcgagctcatcgagatgttctgcgaggaacgtgggcagctgcagtacaggttagcggagaagaaagccctcgaggaggcatacaacaagcaccacaggtcggacggcaaggtgacgaaggaggagttcgaagcgatgagcagggaggtggtgaaggcgggcagcttcagggtggggaaggcgagcctggagcttggcgcgctgctgttcggcgccccggcgtgcgcgctgctggccaagaggatcctgccgggcctgggctggctgtccgacgacgtcgtcgtgcccctcgccacctccggctccgtcgcctacctcatcaagtccaagaggctgtgagcctagctgtgactgtctctgtggaccaagagagggttctgatgtgtattatgagattaatttgcacacgtacgtgcggtgatcagtaagtaattcgaaacatccataggagtatacgacggagagatacgtactatgatgtgcgcacatgtggagtggataggactc

SEQ ID NO: 14695 - DNA, 598 bp, Zea mays
  Coding DNA Sequence Number=SeqID_292
gcggccttctatctcgagagccacaactgggccctcgaatccgccgttcgctcctactacgactccgtggacggtgaagccgacgccgtcgcggccgatccagtgcccccaccaccagctgcaccagccggaggcggggaggataccgaggatgaggattgcgtggtcggcggtggcggtggcggcgacgacgacgaggatgatgaggactacgtcgatggcgacggcagcgatgatgaggacgctgcgctcgcggctgaggccgcggaggaagaggagaggaggaggcctttcaagaggctgaagagaacccacgacgcgcggggtgggagcggtagcagtgccaaggcgcgggggaatgtgaggacgctcgccgatctcgatagtggcaagggaaccgcgggttccgacgagaactccgaagacgatgatgaatggacaccaccgcccgagtacgagacgagagatcgatcaagacgtaaaaacaacacagatgagatcttcaagcaagctctaaacgcgcgcgtgcgtgtcgtagtcagtagtctacaactctacatagtttatacgtaccctgtttggctgtcttccttccata

SEQ ID NO: 14696 - DNA, 561 bp, Zea mays
  Coding DNA Sequence Number=SeqID_293
gcatgtcgtcatcacctgcagcttaccatcctcctctcacgcctctactcattattgttgtgccgagcccacaccgcatatgctgctgctacgccgctttccgttgctctgcatcctcatcggagctccgcgcgccaccgtctgcgctgtatcgatatcctgtgccgcgccacgctggagctcaggccatcatcacgccacgcctcgctgacttcctgcgcccgaccgaccctccaccggtgccttgctgcttgttgaacccctgtgtctgagcctcgccaagcgtcgtcgacatcctccactcgcttgctgcttgcagtgtgttgcaccaccacctgttgtcgtcaatgcatcgtcgactccgtactaattcctcgcgctggagcgtcctttcccttctcacacgttgtaattgcctacacgaagtcaacgtgcactgttgctccctcgcatctatcaaagaagtttgcagatgaagattatgatgatgaacttgatgaatgctagtctagtgatacccccagtcatcttcctgtggaaggatgcccatgttctgttgta

SEQ ID NO: 14697 - DNA, 310 bp, Zea mays
  Coding DNA Sequence Number=SeqID_294
aggaggacgctgctggccaggcggcggcggccgtggcgaggtgcggccttgtcaggggccactccgcgtacagactgctggtcgtccccgcccccgcccgcccgctcctcgtcggccggtcctagtctgtagtcctcggctccggccagcctgggagtgggagtgggaggtgacgacgacggtgcttcacctgatgattgcaccgagcgagatggatgtgttactgaatactgatatgagtcgtgtgcaaaccgtgtagtatgtttgtagatgccagccgccagaggttggtggttcgtgcgtcgtagca

SEQ ID NO: 14698 - DNA, 47 bp, Zea mays
  Coding DNA Sequence Number=SeqID_295
tagtctgcttctgaagttagttgtctgttttgagctacgtacatttt

SEQ ID NO: 14699 - DNA, 321 bp, Zea mays
  Coding DNA Sequence Number=SeqID_296
actctactttacaccgcagcagtgagccagccactgagccaccaagttaactctgagcgacgtcaagcaccaacgcacgacgaccaccaccaccacctcgagctacaagctatggcgaacgttctcctccgctcttcgtcccttcctctggccctggtgccgccgccgctgctgcttctcctggtagcgggatcgctcgcaggggcaaccgcgcttggcagcttccctggggaacgtcgtggtcgaagcctgcagcagctgccaaacccgatgcctcagcctgtcccgcagccgcagccagacccaaacgtacggccgcaa

SEQ ID NO: 14700 - DNA, 584 bp, Zea mays
  Coding DNA Sequence Number=SeqID_297
tgaaacctagtttcctttgccttgttttaggggctaaaactgagcaaggtcctcaaagcacaaagtgatgtggaactctcccaacttcgaaaagaggtcagcgagctaagaaaagacaccgcgaaaaacactaaaacgctaactactttgtccaaagattttcttgaatgcaaaaacatggtcaagggtctaacggagcagaaggatgtaattcagtctgtcttggaggccaagtataaaaggattagtgccgaagccatcaagaaacaggaagaaaacaattcagaaatttttgggcttctacatcagcttgtcgaaggtaacaagaagaatcatgatatctttgacgaacttgctgaagagaagaaaaagaccactcaattgctaatatccatggctgctatgcaatcaacagtggattctctctacgacatatgctcatgctgcaagcaacacatgtatgataccttatctttggttagggcacgaccgaagcagatgatcttcaaggatgcggataccagcaaagctcttagatggatggatggcgaggttaaaggtttttcccctgtcttggattcaag

SEQ ID NO: 14701 - DNA, 557 bp, Zea mays
  Coding DNA Sequence Number=SeqID_298
tagctattagccacttttagtcagaaacatccaaacaatctatctaatagtccaactaactattggctacacctttgactacctattagttattagctgattcaacccactaaaattagatgatagttagccagttaattttactaccaactttttagtcacctaactattagcactagtgcattcaagcggggcctaagacctgtttgaatgcactagagttaacaattagctgctaaaattagctaaatagcctaactaatagtttagttattagctacttttagttggatacatcataacaccctagcaaatagtcgtccaactaactattagctgcaccttcaactactcattagttattagctgattcaatccactaaaactagctaactgtttgtcggctatttattagttagctaatttcattaccaatttttagctagctaaccatttagctatagtgcattcaaaagggccttaaatctgacaaggaaaaaggacatagctagcagaagaactcggccgataagattcaagagctgatgcatatgcat

SEQ ID NO: 14702 - DNA, 514 bp, Zea mays
  Coding DNA Sequence Number=SeqID_299
agtcttcttccttgttggctgtcgatctccctcagctgctcggctctaattccaccgatgcaacgtctccatggctgcggacaacgtcctatgctggcctcgtgcacgtggtccacctccgtgcacgccacgccttgctttagctccgtgaggacgagcagcatgaccgtggtctacgtagtcgaggcccgtcatcattccgatgttttgggcagctccgaccattatcgtcgtccgcgctgctgttgtagacatcgtgactcgtgcacagcttgttcgacgaaatacccaagccaagtggacatcacatacaacttgagttgtcctggtcagtgtatagtttaatcttcatagaattagttcttataaattataaaaaagttgtagtacttttcttaagctttttataaattcttggatcaccatttttgtggtatagaggctaagttatagctgtttgaagtgtgatccctgaatctgtccaaatctagatagcagagtctttctcatgtct

SEQ ID NO: 14703 - DNA, 548 bp, Zea mays
  Coding DNA Sequence Number=SeqID_300
tcctcacggagctaaagcaaggcgtggcgtgcacggaggtggaccacgtgcacgaggccagcataggacgttgtccgcagccatggagacgttgcatcggtggaattagagccgagcagctgagggagatcgacagccaacaaggaagaagactcgacgaggctgcaggtccggatgaggtcgacggtcggagtccacgacgagggaggcagcggcggttgtcgaggggagctcgcgggggatcctcatccgacctgggcgagctcggatggaggccagggcgacgcgacgagctgagagcgagaacgtaccggaggggaagcaagaggccagatccgaccatggccaggagagcacgccggcgaggcttggtggaggagcagtggaggcgcggctcaaggaagaagaggcaggggcgagcagggagatagtagaagggcggcctgatgacgcgacgtccatggccgacaaggggaggtccgagcgcatgggagaggggctcggctggggagctccatggagtcgtgcatcaccacaacgaagaagat

SEQ ID NO: 14704 - DNA, 491 bp, Zea mays
  Coding DNA Sequence Number=SeqID_301
cacaggaatggaggtcggcgattcaggtcgagtaggagcactctacggctctgcattgctactggtggtccaataatcacaccttcacgatttagtggatttccctcatccatatctccactgacgtcagaatattccttatcccgtcgtcatgaggtcttactactttaggtctctaaattgtatatgctttttggagtaatttgctttgttttgatgcctacatgttagcttcgaataaagatactttccctgcagctttgaaaaagagttgctgaaaaaaaatcaggacgggatgggatgagacgatcactcaaataagattgtttggtttaggatcaagggttgggacaggattatcccagtgttgtccccagttgtccctcaaaattggagggacgagagaggacgccgggggacagccctgtcctaggtgtcccgcaaccaaacgcaccaaagtgttcgggctgcttgctttgtactgatgtaag

SEQ ID NO: 14705 - DNA, 497 bp, Zea mays
  misc_feature (444)..(444): n is a, c, g, or t
  Coding DNA Sequence Number=SeqID_302
agaaaacagtcgtctccagtttccatgcagagcagaaaagatcagctagcgagagaagcaatggcgtcggctcctgcgttctgcgtcgcgctgctgctggcttccgtcgctgccgtccaagcggtgccgccccaggccggcacgtcgtccacctgcagcactgacctcctccgcctcctcccctgcytgcbcttcatcgagggcaccgccaccgtgccggcggacacctgttgcgccaacctgggcggtgcctcgatgaaggcagagggagattgacgctggcgagagcaagatggaggaggtcgactaagctgggtttattcttatggaggaaagagagagaacatcgggtctgttctgtgggtcttmccacttatgctattatgcaatctgttgttggtatgctagtgctactattgtytmtgctgtcttcyagtwamyyynkgytgttgttttgcgtggtcagtttctcatcgcatcagtggtagaaaacattc

SEQ ID NO: 14706 - DNA, 589 bp, Zea mays
  Coding DNA Sequence Number=SeqID_303
gtttcgcttgagcaccagtaagtttctgtccaatgtaaagatgtaattctttctgtgttgatcttgttagttaacacaatctaactgcaatgaactgttgggtgcaatgcagcaatctcagccccaattcgctatttcagcaaattgttgtactatttggaagcctcaattcactttcagagttatgcacatgaacactttttttaacaaaagacatatggtcctcgtcgatgaggaggtacacaaccatcttactgcatgaagcttcctgcgcatcgagagatagcctccacaaatctgagtttgaacacataacagatgatattcttaagctggatggatattttgcttagcttttgtggattgaagtggacctgacttgtagtttgctgaagtctatgtacataactgtgtggattgcatcagccaagctatgtttaccaataccatgtatatacatcccactgtgatgtgtccctacgtgcgacgcatgacgtagacttagatcatgtcaccttattttggatcagcttgctactgtgatgggactgatcgttatactatgtcgcacctctatgtatggtaactt

SEQ ID NO: 14707 - DNA, 175 bp, Zea mays
  Coding DNA Sequence Number=SeqID_304
agaagaaaaaccacccactcccatgttcgaccagtccccactctcctctcccctctgcgcatggatagccatgcctagcacctcgccagaaccgtcgcagcagccagagcccgtcgtctccacgaatccggcggttccagatcgtgagcagtttccgagctttgagaaatcgaca

SEQ ID NO: 14708 - DNA, 595 bp, Zea mays
  Coding DNA Sequence Number=SeqID_305
gatttggacacagtccggcgagcttccatgggcgacgtccatggatttgaagctgcgatgccatggcgagctgggacgcgcgcgactaaagggagtgtcgcgccatggatggaggagcagagagaaaagcaggggcgagcagggagaggacttggcgaccagcgcgcaggggagttcggcatgggcgcgacgagtagagagggaggctggagtgcgagccggggctgggattgagcacggccaggaactgaggcgtgcacagggaggagcagagggactcgactggcgaagctggccggaaggtgaggtgaggacgacatccatggcgaggtcgcggccaagtcgagcggggctgtggccgggcgagcttagctgggcgcagggagaagcgtcggcgagctgggagcggaagggagctccggccatggaaacgcagggggctggggcggccatggggagcaggcagagggagctccgagctgggcgagctcgtgcgcacagccacggagacgagggaggagcgagttggagctggaggccgagctggagggcgcgcagggaggggagaagcacagggcgcggcttggaaaaaatc

SEQ ID NO: 14709 - DNA, 591 bp, Zea mays
  Coding DNA Sequence Number=SeqID_306
actggtacaggtcggtctcgccatagcagtgcaagaccctctagtgggtgtgctcggtcgcttaactttgaaggcggaaccaatagacagggccttagaaccagtcatgaaggcaccacgccatggataggaggtggtcgtcagtttatcggctctgcagatcaaggactcaagatgaatgttgtagggtgtggcagagaaaggacttgagatgaagtttttgaacccaatgcggatgaggataacgatgacaacacctcaaacatggtaagattgtataggtcatttcatttttttgtccaacaactacatgttatagtaatatgaaatcctggattgtacactctttagtgtgcacatgacaacctatttttgtatttacaagttattacaagttaggcagtttactaccacaaccactttgtagaatcttgtatacatatgtagaatcttgtttataagttatatcttgatatttgtttacatgttaggcagtttactgcctaacatgtagaatcttgtatacatgttatatttatttacaagttaggtagtttattgatagagtgcaaatgacgacagtttacagat

SEQ ID NO: 14710 - DNA, 458 bp, Zea mays
  Coding DNA Sequence Number=SeqID_307
gcctgcactacaattgaacgtgagccaacaatcttcctaagcatagaacaattaaacgtgagccaacaatcttccagcaggcctgcagcggctccagcggcctgcactacaattagcacaagtcctaagcacaattagcacttgatttggtgtgaatccttaggctccagcggcctgcagcggctccagcggcgtggccgtgctggcccccgcgcgcgctacgccacgcaccagccggccgagcgcaggatcggctcaatcgaaggattcacaccaaatcaccctcacgtccaccctaaatcagttcaatcgaatgcccacagcagcgatccagtcgaggattcacaccaaataaccctcccgaccacaacaaatcaaaccgaatctgggagccgcgggctccgctccgggcgccgcctcctcaccgccggcgtcgaggtgtccaagccaggcaagca

SEQ ID NO: 14711 - DNA, 475 bp, Zea mays
  Coding DNA Sequence Number=SeqID_308
atctccctctccgaaatcaaggtagcgtacaccgctgcagtttctagagccctctctgccactcgtgatcccactagtcacaatgcctgccctcgccaagcccgcctcccgcaccgccaagcccgccgcggctccgaagccgaagcctgccgccgccaagccgaaggcggccaccgctggtgcctcccacccgccttacttcgagatgatcaaggaggctatcacggcgctcaaggagaggaccggctccagctcgcaagcgatcgccaagtatgtgggggacaagcacggcgcgtctctgccggccaacttcaagaagatgcttttccatccagctccgtgggtccgcagccaaggggacgagtgaaatgttgggtagttttgattgtgctctgctggtgttgaagatgttactgagattgatgttcttctgtaccatttctatgcttatgatagacttttcatatggacaaaa

SEQ ID NO: 14712 - DNA, 505 bp, Zea mays
  Coding DNA Sequence Number=SeqID_309
gttcgatggtaggtgagacatcacaatgctatgttagatatggggtctattccatctatcttgtgaccaagatttttatcatcagttacactcttctgttcatgtgcatgcctgttgggggccttcgtcctccgaaggtcctcaaaaacatgatttgacaatgttttccgagtggattatgtgaacaggtattttcggatccagaattatgaatatggagcacggccaggacgaagcctgaaccagacgaaggtcgagtgtagccgaagctgtgcgcagggaagcttcggcgcgatggcagaagggggaaccgactcaaagatgaaaagacttcgggggcctcgacagatttccataagccgttaacaaatgtaatggacatggatgtaattttacgtgggctgcgtcccgcgtctataaatagatgaacagtactcccgtactgttcacgctgacttggcatttgcttttggcatcacgctcgtgcttttcaccttctctcagg

SEQ ID NO: 14713 - DNA, 458 bp, Zea mays
  Coding DNA Sequence Number=SeqID_310
gacacgacggctgcgtcgtccgataccatcgtcgccatccccagccctgccgcggtggaccacctgcacgagcacgacacctcgcccgcggccgcgccggccgacggcggggactactacgacgacgaggaggaggacgagggtggcttcgggtcgcagctgctggagaaatactacacggtcttctcgccgccgacgctgctctacgaccaccacccgcacaacaagttcccatatggttaagggcacatccgcacatgtgtgggggaggaggggattggagtgttgctcctacacaataccggtaacgaaacatcaggtaatgggtctgtagcatgcagctgcctgtgaatacgtgatagttctgtatcggtcctgcaattggatgtgttatttgtcccgtggtcgtagcgggagtagtaggcatgcatgatagcatgtacgcaatgaacacgatt

SEQ ID NO: 14714 - DNA, 572 bp, Zea mays
  Coding DNA Sequence Number=SeqID_311
ttaattcttccgttctctcctctcattcctcctcccattacgagcaggaaacggcaactccattgatggtccatgaagaccgccggcgacctctactctccctccctctcctctataaaacgacgccgagcttcatctcgcctctctgctcactcacacaagctttcctccctcgctgctcgccagaccaccgaacgtagcttttgccggaataccattctcccctgccgcaggagctccgaccccggcgcgaccaccattggccgaccctctgctcgacgccccgagcgaccccgtcgctggcaaggaccactcggagcctgccatagcgcctcgacgaccctccctgctcgcccgtcgtgctcccatctatccctgcgtaacaaggtgaacacgatttcatgtgtaaaaattatttagacaaattgttccaactcaaaagaagagaaaataagcccacacacttttatgtgctatcatgatctaatttctataccgttatgtaattttttttgcatatttagttcgttgtaatatgaacacatgtggttccgatttatgtatatgtgtat

SEQ ID NO: 14715 - DNA, 60 bp, Zea mays
  Coding DNA Sequence Number=SeqID_312
gctccgcaagcctacaactgttgcgcattcatgagtaggctgcacgaacgcagcgatgga

SEQ ID NO: 14716 - DNA, 442 bp, Zea mays
  Coding DNA Sequence Number=SeqID_313
tcttcaaatattactcaggctatagaagagttcaagaaagggaaggttgaatacagagttgataaatcaggaattgtccatattccctttggcaaggttgactttccagaggaagatctcattgcaaacttcatgtctgttgttcgttctgttgagaggaacaagccatctggtgctaaggggatatactggaaaacggcgtacttgtgctcatccatgggaccttctatcaagctaaacataaaagaaatgcttgactatggtttggaatcatctgactagatgtgaccacaggcaccagttaagtcagctggcatcgttatcaccttcacagattaactatttgccccttgcgacaaatgagcagaaacatggttggtgtatggcaagcaggtgcttaggtacagttttctcagtttttatggcacatcatcagagcagc

SEQ ID NO: 14717 - DNA, 361 bp, Zea mays
  Coding DNA Sequence Number=SeqID_314
gccgtcggtggcgaggttccctcaggacccggggttcttgccgtccggggcgtgccccgtcggcggcgcggcggcggtggcgtggctgctgccgctgctcgctgtgctctctgctttctggctgctctcgcagtgactctcgcggttgctgcccctggattgatgtgatgtgatgtgtccgtcgtagacgttcagttcgatcggagatcaagatttgctttttttttggaacgaagcaaggaaagaggccttctttcttgttttcatttttttcctttctttcatttcgaaggcatagccacataggtctgtttctttcttctcgagaggagagaagggatatcttcgtgcacaaccgtgt

SEQ ID NO: 14718 - DNA, 515 bp, Zea mays
  Coding DNA Sequence Number=SeqID_315
tcatcacacccgcaacaattagggtatgcaatggttcaaggctccgatcttaattgttcatctctaaatcatcatattcacttaattttctatttaatatttagcaaatttgtcatagatacactcacggtgtgctggtgtgtatgtgtggaggaagagcctgacggaggctgagggagaggaatcagtagagcaaatcagcaagatgagacagatgtgtagctgctggtatttctccactatcgcgacctcactgctcaagcatggcctatatagagtgacgagaacaccatggaacggagttgtgctgttgtggtgcggagtaggagcgtctaagcgaggagagaatcacaggttaacaggtccacttcaaagcctggccatcatcaatagtcgaacgggtgtaaatggatgacgaagccgaagagcaatgatctgaagctttggtggatgatgatgaagctgaagacacttctatgaaaaaactctagagaaattcttcaattacccttgta

SEQ ID NO: 14719 - DNA, 596 bp, Zea mays
  Coding DNA Sequence Number=SeqID_316
gccctctatcgtggcgcgacaagtacctccctttggtgcctctacttcgtcggcgctctccttgttaacagggcacataaattttatgtcgggtcagtggttatccgcctctcctgccattcccccacaaagggtctctcgtcgtgcggcgttggatggtggcaagtgaagcctggatgcgccgtagggtgtttctgtttgctcgaagggagatcgtcgttttttggtatgctgtggtcggcgtgcctcctgtcyccttttgtccccgttctcgtttgcatgktagatggccataaggcagtgggacgtscktagtacgaggggaggtctagatgtgtaacgactttggtgtgcctacgagtatgttgttcttaccgaggttgctagtcgccgtacgacaatcgtcgtttcggctgctttaacctgtgtcatattgtgtttgctttctttgtttcctctatgttgctgaagtacttggtgcattgtactagcagttgtctgtaatttgtggtctgccacaacattatgtaaaggttttgtctcgtttcccctaaaaacgaggtcgttgaggcgtggcttagccatgtcaggatcaa

SEQ ID NO: 14720 - DNA, 367 bp, Zea mays
  Coding DNA Sequence Number=SeqID_317
tcatgcagctacattcttggcgtactatgtaacctgatccctgtcagtctgccctgcttgcgtgaaccgcaccagtatgctttgcatggtggctggagggatatgactatatgagtttacctatatattatggactatccttgttggcgtattgttttattaacgattatatttagccagttataatccgttcggtgagcaggttgtttgcttgggttaccaaatcttggtagccagtgggtgcggttccaggtcttctgttgatgacttatcacaagatgtgcttgtgattcccgtgtttgaagaatcgcgatatcttagcgccttaggctatggttagtagatcgtgcctattgtataaaatact

SEQ ID NO: 14721 - DNA, 467 bp, Zea mays
  Coding DNA Sequence Number=SeqID_318
gggagaccactgttggctgctgctacgctgcgcacgtcatcggagcttattggaaccgctcaagggaacgcgtacctcaggaaatggaggccgaggaaaaacacaacaaagaaatggtttccaacacagccggaagctgatagtaatcagcagcttgttgccactgaggcttctactgttcagctgccaacaatagaagaggcttctactgttcagcaacctgtaaacaacatcccttctacctcgctgcaaacaatagaagaggcctctactgttcagctgtcaacaagcgaatggtcaccaccaaggagacttcggacatgtgttaaaaagaagcttactccgaagaagaagatcggcttctgagtagcagcttaatttctgtttctggcagtagtttaagtttcaattctgtgaacaaagcttaagttgtgtgaacaatttatgtttgtggcagtaccttaagt

SEQ ID NO: 14722 - DNA, 455 bp, Zea mays
  Coding DNA Sequence Number=SeqID_319
agatcgcgcgcgagacgctgaccgtcggccgccgcggtcgaggtggacacgctcaaggtggccgccaccccgtacttctacgtggagttccccacgggcaagctgccgttcgagacggccacggcggtggccggcgaggccgtggtgctgggcgcgttcaagatcagcgccagctcgcaggtggcgtgccaggtcaccgtgcacctgctgcctcccaacgccacgtcggagtgcacctccacggtccatataggccggtagtaacgggccggggggctatatatatctagtggttctgctctctctggacagatgttgtgcgcttgtgtgtacatcgaaatacgctctgatctgaaattgccaacgacgttattagtagcatacttgttatttcaacagttatagtagaggtatagcttctgcctttgcttaaatctataggtcccagatgacaa

SEQ ID NO: 14723 - DNA, 517 bp, Zea mays
  Coding DNA Sequence Number=SeqID_320
ttcgctctaccaagatgtcgctgatcacctggtcctcggagctagcttcccggctgtcggtgacaacaggtccagctcggaggagtcggacggctacctgcagcgcagcctcgcggagggagcgcaggaagaggaggatggtatccaacagggagtccgcccggcggtcgcgcgtgaggaagcagaagcagctgagcgagctctgggcgcaggtcgtccacctccgcggcaccaaccgccagcaccttgaccagctcaaccgtgtcatcagagactgcgaccgtgtcctccttgaaaactcccggctcagagatgaacggaccaggttgcagcagcagctggaggagctccctgtagagaccacggagactggtggcatgagtcgtcctcctgactcttgaagcatccaggattacatgtgttattagatgagattttaactaggaggcttccttccttccttccttatatcctgatgttttcattttttttatcgttgctctatgtttagtatcaa

SEQ ID NO: 14724 - DNA, 578 bp, Zea mays
  Coding DNA Sequence Number=SeqID_321
gagctgcaggacgttagggtttcatttcttagcggcgtcggcggtgacgcccccaccacgatgcacgagcgacgacgcctccatcccgccaatgtgcgcacgacgacggttccctgaaggagcgtgacggtggtggccatccgatgcgggagcggcggcggcaacctctcctaggcacgagcggcggcaacgacctcccctaggcatgagcggtgatgacgaatcctagatgtgcgtgtgacggtgggtggctccccgaggccacgccacggtggcgggccatccaagtcgagtgacgccgcgatggccacccggacgcgtgaacgacgacatatctaggaggccacatgcggcgccggatcttagaggcgcgcgtggtgtcggctctctggagacgcgcgcgacggcgacgacctgctccaatcattgtttatgtatgaggttgttggctggacacatattagaactctttcatcaattatgatatgtagtgtcgatatttatgtaactttctaagtgagctcaggaacctccgggcgggggtcatcgtgctcgttccaatctgctacttgtgatgg

SEQ ID NO: 14725 - DNA, 566 bp, Zea mays
  Coding DNA Sequence Number=SeqID_322
agcctcgccaactgaacgatggacggatgaatatgagatggtgattccattctcgctaccgaccaattacgtggagttggatggatgcatttgagatcacgcgtcgctgtcccatatctgatcgcmcaatgggcggccaaagctcccactcccagcagcaccaaggccaggcacgttcgctgtcgctgtgcatgtgcgtccggcagcgcccaagcaaccacaaagcgtcaaaatgccgttaccgtgcaactttggatcacgagccagcattacacaggatcagataatttcccagagtcaccctctccagtccttgtccgatggatacgacaaaaggtactgcgccaaaggacagatgcctacgacgagctgtcctccaacaaataatgttcgccacacaagtggcagcagtacaaaacaaacacaatggccatggtcaattggtcgtcacaagaacagagcaaacgcataacaaacaactttcccagtcattttctgtcaataattgtatacatctgagcacaatgtaccccaaaaaacaaaaaatccctgtctagctttcctag

SEQ ID NO: 14726 - DNA, 591 bp, Zea mays
  Coding DNA Sequence Number=SeqID_323
gcgcctgctgtattttctgaatcgaaatctccacttacccctttcatcggactctgcctcgccatgggagcggcgctgcacgccgaatcgctcgccgccgccgccgagtaccaaatcggtccggccgtcgtcgtatgcgttgtgctccccgccgtcgtgctcttccacttggcggtcctttccattcataagaccctggcgagccaacgggccgaggacgagcccaagcagctgctgcgctcgcgaggactccctctgctcccgttcgttgccctcgcgctcgccatctccgcggccgatgtcgcgacagatatccctcaggacgcctccgtttgggccgtactggccctcgccatctcattcaatatcgctattggctcgctgtactgcttcatcatcggtggacctccgctgcctactgccgccaccgtggaaccttgatgtcatgtttgaaccgcatgtttgagagcaggagtttgaggtcttcttggtttacacggggatcaaagaggatcaagaaagattaaatctttttctattcaattttgattagaaagcgattcgatctacgattctcttgctctcaaacaa

SEQ ID NO: 14727 - DNA, 384 bp, Zea mays
  Coding DNA Sequence Number=SeqID_324
agcaggctgaaacttctcctgacttcctgactgctgatataatttggtggtaacctgatactgataggacgactgagcaggtgttgatgtagggtattagatttttgtccgaggggtaaagttatatcatagggtttgacatggtcgacggctacagattcttcttccaggtgcctcagccctcagctcagctcagctgctgtgcttgtgctgtgttgtttttctttcctagttgtgctaggtcctacagaagtagtaacaactacgtagaaacccccagggccttgtttgaaccgtgggggggttagcgaatggtacagctgttgtagagctgctgattgagcttcttgacagaaactgcagcgtgttgaaggcacccatatt

SEQ ID NO: 14728 - DNA, 503 bp, Zea mays
  Coding DNA Sequence Number=SeqID_325
agttacttattactgtagtcatcacaaccaggtcacctggatagtgtttatgtttggcttacatagtgaataggccttgttcagacatagtataataaaactgccacgacagtacataaaagatggatcttttacttaaataaaaagaaacaaaaaggccttactcatatgtgatggaacaggaaacttacagaggtttacacaaaaacagcagctagacactaaggaatcatcatatgatgcgaagagaagggaagaaaatactaggaagaaagaagaaaaaaaaagaagcatcagcttcaataagctcattgttgtgatcagctggtaagccagagtttccccctttgtggagctcatcgtgctcaatctgagacgactcttcaagctgatgcttcttttttttcttcttgactccaccttccttcacatccagtgccttacccttcagctttagcctccccccaacgacgttcttgtattctgacatctcacgtgtgaac

SEQ ID NO: 14729 - DNA, 470 bp, Zea mays
  Coding DNA Sequence Number=SeqID_326
ttggaggatcccaaatccgacgacgagctcagtaggcccacgcagacgcggatgtgctatgaacttcaggctgatgtgcatttctgatatattgatctcaagcgtcagattctgtatcgatggcaatgggcgaggttggggaagaggcgggakgctgccgtggtggcgctgtggctgtgctstgcgcgggcggcggggaccggaggatgcgggaggccgtggcttccgcgcccgaggcggtggggaagctgctggtggtgatgcagggggactgcgccccgaccacctcgcggatggccggagagctgctgcgagcggtgcggatggagcatgagaagaagggcatggccgccgcctacgacagccgcaccatccatgtcatgccgtactgatggatccggcggaaacgcatcgccctgcagcttcacagcttgcagctgtaatacaatctatggaaagcggtgtaagta

SEQ ID NO: 14730 - DNA, 305 bp, Zea mays
  Coding DNA Sequence Number=SeqID_327
tatccgtgctcgtgccgaggcgctgtctctactctctactccatctgttctgttcccgcgcctgcgcgtcgtcctctacggatccgtccaccgccgcgccagcaccatgtgaactgagacacgcctccacctatgcatccaagacacacctctgcatctgcgtccgtgcactggctacactggatcgattacggagtggagggtgttctttacaaagaaagcttgtaccttaaaacaggaggatacaagaagttggagtggttgtctgaaggcttttgaactgcttgaagcactagtgtactagt

SEQ ID NO: 14731 - DNA, 588 bp, Zea mays
  Coding DNA Sequence Number=SeqID_328
actgttttgcacttcttggcactatagggaagaggaagaggtacacgactgatgaagatgttgttgtgttcaatgggataaaagaggttgtatctaatgttgctactgttgtccgtgaaagcatccatgttgaagcaacacctgggatctacaatgttgtaatcgattgtcttgggttctctagggaggctctcatgtatgccatgaaccacatgatggagcacaaagtcacctccctggtgttcctggacatgactcctgatgatcgtgatctatggctcaagactttcctagccaagcactactacatccgatctgatctgatctctgtcttttataccgtttaagaacagtaacttgacctgatgcttttggagaacacaagtcagatgttctctatttgttgcttttagaagtcatatggtttctatttacaagtgtttagggtgttctagtctctatttacaactatttataagtgtctgtatttacaagtgaacattcaaagtgctttggtccatgacatggtctctgatgtgtacatagtagcagtttcagaacaaatacgcctatctctatcatttttgc

SEQ ID NO: 14732 - DNA, 590 bp, Zea mays
  Coding DNA Sequence Number=SeqID_329
agggaagagtgtgctcgccatcctcctgccaccctccgacgcgcagagtaaaggagccaccacccgcacgcgcccacacagccagtgggccggagcgcctccaccacctacgcccatgcgggcgcgaacgccccgtccacaagcccctgccccgcatggaacttggtgcccgtgacccaacagggcgcctgggttgttgatccgtcgtgcacagccccccaacggcgcggggaagacgacggcgcggggacggcgcccgccccagcagcctacatggctggaccttgaaccgcccggcacagaacccgctcagatctgagcacggggagaccaagcgaacgagaaacgccccgaagccggcatccttggagtctgcaccggcctccggtagtctcctccagcgacggcgaggggggaatagaggaggaggagagagtggcggcgctagggctggaggcctcccgtgtgaccgtgtcgcccgagcggacaacgacacagggcctcctctctggaaatagtccagagcgatgtctccttgttgggtaccaacattggaagaaggaaggttgtgctgagttgtacgtgattac

SEQ ID NO: 14733 - DNA, 484 bp, Zea mays
  Coding DNA Sequence Number=SeqID_330
aggtagatctctctgagtctcactccctctgtcagtgtgttgttgtcagaatactgttcttgatgaatggctagattggtaattattaattccaaatactaaatattttacctgaatgcattttgcaagggtagtttcttaccaatgttcatgtcgcgcagtatgcacgggtttttgtcttaggtcctgttatagagggcttcacttcaataattgtagcttcggttttctaacttcactataaaagatcttcaacagattagtaaggcgggttcaagagtgtttggtttgcacgtagacttcactttctgtaatataattaatttgtgagtttttttaattacctttgatgattagcgggtggaaaaggagacatgaaacccgtaagtcatgtaaccaaaggtatggtggttagtttttgtgcaacttcatgaaaaggtataaaaatagtgtttttgaagcaccttttcaggagcttcaaaaa

SEQ ID NO: 14734 - DNA, 477 bp, Zea mays
  Coding DNA Sequence Number=SeqID_331
tgccttggttcttttttatcgtatccttgttcttgctgtgagcagcagcagtagtagtatgttactacagtacagtacagtagtgctccgtatgtcactgcagtttactactgccgctgcgacttcttttttttttgttttttttgaaccgagctgatgaggcaggccggccagaggaatttattgttggtggcttggctctagttcttgaatggatctgatgcagcggctatatggaacggagagctgcttggttggttggtttttgtcgggtttctctttaattttctctctcgctctcaccgattgtttcaatagtggtttcaggtacagtcaagtctgggagacgggtcggagattgcagcagcagattagattacagcagccacggcttcctgccaacgcaaacgtcaagtttagcctgccaaaccacctgcaaggacttttgttttttgttttggcagactttccgcaaga

SEQ ID NO: 14735 - DNA, 426 bp, Zea mays
  Coding DNA Sequence Number=SeqID_332
tcgctcttgctaaaattgagtcggagcatgatgtgtttccttcggtctgcaggttcttccctttggtgccaaaaaatctaaatacccatatcacagaggctcgtggagttggtgagcaggaccaccaccctccatcacaacctgataatggtacgttaattaatcacgtgatgtggagggcaagagttggattaatctcaaggtgatggtgacgattgaacctgaagatttgacgatctgatcaagtaccaggaggagagatgctcaccaagtggtcgtcttttaacaacactaacgtagtgattattccaggttataattttgttctgttgtggatgatgctaaatgccggtgggctcggccttcttatataagtgtatcccatctttagcttctttattgagaattatcatttaagctagcatt

SEQ ID NO: 14736 - DNA, 507 bp, Zea mays
  Coding DNA Sequence Number=SeqID_333
taatttgatcagcaccgggagacgagacgagagagagagaacgggggaaacaacaccgccgccaggagtgttcaccggggggaaatgatggcgggagcattgccaaggtctcgccgtgcttctccggctgcaggatgggtccgccgtggagcatggacagcctcgtaagtgccttcatcgccggttagaaattctctttagagttcgtacatgtattagcttcataccacaccgtgtgagggggaaaggcaccatcacgccccgcgtgtgttggtcggcaatggcaccgctacctgcgctgccggctagctatacccgaggaagaagaatagtgccagccaatgatctagaaaaagagggcccggattagagactaggtgaccgctttggctcggtcaagctggaccgttgattttctgttaaacggtcatgtgtgcatacctgtgcgcaatagaatgtgagccattgatctgtgatccgaggatctacagatcataccgtttggtg

SEQ ID NO: 14737 - DNA, 314 bp, Zea mays
  Coding DNA Sequence Number=SeqID_334
ggataattcctttcatgatgccttctgtggtcaaccgcacataatagcaggatatttgctttggggccgtctccagcagcatcagcatactcatccgatcttccatatcatcttctattttaaaccttactatgtaaacagtgcaaaaatagtgtttttatacaatcatatacacgatctgctggagatagcacgagtggtgcgttggttatagattatgctactatagctcccaatctagccaatttgtttggtttgatatcactaaactctcgtaggaatatgtgtttggtgttctcacaaataacaagtta

SEQ ID NO: 14738 - DNA, 503 bp, Zea mays
  Coding DNA Sequence Number=SeqID_335
gtggtggagaccaaccagtactgcaagttcgacagcgtgctgctgacgctcttcacctcctcgctctacctcgcggcgctcgtcgcctccctcttcgccggctacatcaccaagaggtgcggccgcagggtgtccatgctcggcggcggcgccatcttcctcgtcggcgccgtcctcaacggcctcgcccagaacgtggccatgctcatcatcggcaggatctttctcggcattggcgtcggattcagcaatcagccggatgcatggatctgcgtcgcgatttatttttggaaccgtttctctgatcggctggcctttttagcgggcaactgaaacttgctgccaagtgccaacagagaccaaacttccctgcactgtagagtatgctgcatgtgttgtgtgcagccgcacctggaagagcatgcactgccagaagctcctagatttattttcacttacgttttttcagtgctagccagtatttcacatttctacttacggtt

SEQ ID NO: 14739 - DNA, 530 bp, Zea mays
  Coding DNA Sequence Number=SeqID_336
atcataacttgatcaagatccagcggatcccaacgctggcgctggcatcgccgcatcggcggcacagagccgaagaagcggaagcagaagcctagtggcgcgctagcggtgctgaagaagaaraggcggaggccgccgcccttcatccccagccctgacctggcgtagcggttctggacttctggcagatagttgtgcatgctcgttttttcagcttgctgcaacagcaaaagagtattctccgggtttggaagttggaacacgcagcggcaacacagccaaaagtagcggaagcgatcggagcatgctccctcgccttcttttatgtttatgctgtctcacttgaatgattttgaagtgttgcagctgcacaaacatgggtggctttgtagttcatataaaatattagaaattgttggagtagtagcattttttcaggttttaacgttttagggaaatttccgttcccatgtattatgagaaatatttttagaagttatttgagatactcttagatatggtggtgggca

SEQ ID NO: 14740 - DNA, 595 bp, Zea mays
  Coding DNA Sequence Number=SeqID_337
gagttccccggctactaggacatctcttcctccaaccccgacgcgactgcctacgtcaccccgccagaggttgcggtggaatcggccacccacgtcgttcccagcgccaactacatggaggcgcccaccacttgttcgactccgggcctcaccgagcacgctatggctgaggccgcgcgtcgcgctgcgggtgccccatcgagagccgcttccatgcctgcttcgcacgttcccagcgcacgagcggctcaacctctccgcctgcgcctcgctcgacgatgcctccctcgttgcgtctgtcgtcggtggaccagctaccgcggcgacctggtggttatgcgtttcggcttcggcacagggcgacatggagagtggatactcgacagcgacacacgatgtgtactggacctggatgacgtggccaccgtggcgggcggtgtcgaggacacctacggcgaggaccgcgccaccgaggagcagctcgtcacgccctagaccgtctccgtcgccagtggttgacagagagggaacgtgagagacatttacctctgtggacttctgccaccagccattgtagtagccctcatggatctag

SEQ ID NO: 14741 - DNA, 341 bp, Zea mays
  Coding DNA Sequence Number=SeqID_338
gttctctgttgttcaacaccacctcggccaaaagcccaagtagccagcacgacctctctgctgcgacatttcttgagatgcccctactacccccctcaccgacggtgccgctgtcgagttcctactcgcatcgttgctgacgtggtgtctgatctctgtccgtgtgccaagcctctcgtcgttccgtgtgctaatgctgctgatcaacatcttctgtgccctcgccatgatgtccctacgctcatggtctctgcttgctcctcgagcacctggagcatcccttggcgcgacaccaagttcttctcgcactgcacccgccctgctacagttccgaggtagaa

SEQ ID NO: 14742 - DNA, 568 bp, Zea mays
  Coding DNA Sequence Number=SeqID_339
tgtccaacttcgtttacacgtccaattgtccatgataccaccgtacacaggatattaaatggtctaaacttatgtcttcttctttctgtggtagtatattatgttgccctatcgaggtgacaggagagagtcccgtgcatagatgacaagataccttctcccttacatcgactgcatgatctacttagatgcatggaaagggcatccagctgacaaattagatcatacaaaaagggtattgaccatcttgcggtttgataggcatgagaggcatgaaggaagaagctactgtatacaggaaaaggacaagtcatcccagaaatggtgaaagcaattcagtttggactacacccgccaaatcttcaccacaatgttgaataccagaacaacaccttcacgtgcatgaaaattttgtatagacactactgcacagaagctctatcgagaaggttccgaatctatttgcaccggcatttttagaaccttccgtctcagaggttagtagaattttttttttcgggcgggtaactaagaatcgtcaatgtaaatcgattttcaccagtggtcc

SEQ ID NO: 14743 - DNA, 595 bp, Zea mays
  Coding DNA Sequence Number=SeqID_340
cattgacgattcttagttacccgcccgaaaaaaaaaattctactaacctctgagacggaaggttctaaaaatgccggtgcaaatagattcggaaccttctcgatagagcttctgtgcagtagtgtctatacaaaattttcatgcacgtgaaggtgttgttctggtattcaacattgtggtgaagatttggcgggtgtagtccaaactgaattgctttcaccatttctgggatgacttgtccttttcctgtatacagtagcttcttccttcatgcctctcatgcctatcaaaccgcaagatggtcaataccctttttgtatgatctaatttgtcagctggatgccctttccatgcatctaagtagatcatgcagtcgatgtaagggagaaggtatcttgtcatctatgcacgggactctctcctgtcacctcgatagggcaacataatatactaccacagaaagaagaagacataagtttagaccatttaatatcctgtgtacggtggtatcatggacaattggacgtgtaaacgaagttggacatttactatcactagtgtttagcgcgcgcccaacgcgcgtgagcacatatgt

SEQ ID NO: 14744 - DNA, 582 bp, Zea mays
  Coding DNA Sequence Number=SeqID_341
tctctcaactcaactactcaaagcggtagattaaccggctctagcgtagcgagtgttgctacatctctcttggccatgggggcatgcgcgacgaagccggttaatcttcctgcttcggacagttgagagagagagagagggatcgagagcgcggcggaggcgatggcgagcggagggaagggactcaacgcgactggggagttcttccggcggagggacgagtggaggaggcaccctatggcggggaaccagctgcgccacgccacacccgggctcggcatcgccatcgtcgccttcgggatctacctcgtcggcgaggccgcctacaaccgcctctaccgcccctccggcgacaaccaccactagatcgccggcaggatccgtgactcggtcaagaagctggagccaactttaccaagcactggtgctggttgatgtttttacagttttgagctcataaggtcagccatgaccatattgtaatctgtgaccaggtagacttgcccactggtccgtccaactattgtcttgggaccctgtgttaatccttgctatatggatctgacagtgctcatgtaattc

SEQ ID NO: 14745 - DNA, 455 bp, Zea mays
  Coding DNA Sequence Number=SeqID_342
gggaccagcatgtctgcaccgccgtcaacacctgcttccgtgtcgtccaccaggccgcggccaagggcgagctcctgcagcgattctcgcgccacgtgatgcacgaactcatccgatgcatcttcgcacgcctcccgcagataggcggtgctgacggagttgacggtgctgtcaagcccagaggtaaaagagtgcttgctgctgctattaatagtcacacctcatgcgccgagcttacaaatgccagtcaaccctgtatctcattcttgactaacgattttactactggatactataagacattagtggcaacaacacacagtggcatcctatgaactgcattttacaattaattagcaaattcagcactattctgagtaaagcctttgggttcgcttgtgtaggtctaaacttgcgtggtagaaaatgacacgcgtgggatggaaatttccttt

SEQ ID NO: 14746 - DNA, 535 bp, Zea mays
  Coding DNA Sequence Number=SeqID_343
aacaacccgtcagctggttacacagcaccgccaaagggccaaagcggctcccaatcaccggcgcctagtcgttggcggccccatatatagcgccggcggctgccgctcaacacaccactttgctggtcgaagcttgcccgcttccgtctcctccgcatcggccgattttgcggacgcatgtcgctgccttctgctcgtcgaagctcgccaccgccgctccctcctaccgtcctacgccgggggcaggtttgctagccctaccgtgcttcgccggtgctgcagcctgcagccctcgcaacgtggggagcccgcctccgtcgaagccttccaacgccgctcgattgcctcaagcgtcaggcgtcacacacagtgggattgacaattcaatattaacccataaaaccgaaatccgaacaatgcggataccggtgaagattttgatccgtgggtgtaactcgcactcaacatcttaattcgaagtttcgcaagtgtgaatacaggtttatattcaagccacaaatgactcgtatctgat

SEQ ID NO: 14747 - DNA, 400 bp, Zea mays
  misc_feature (361)..(361): n is a, c, g, or t
  Coding DNA Sequence Number=SeqID_344
gagaggcatcccacatttgggagtgagggagacgacatactttggcttgtgaacgtaggtgggggagagcgagaaggagaagttcctgaggatgaccgccatggatgcgaggaagagaaagctccccttgctcggactccagcgcctggatcctctdctccctcagctcggtctcggttccagtcgcgcgctcctccaagccaggayctttctcttcctcgcatccatggcgccgatccgcccatcccctatggcgctcctccctggtgcgcacgtctttgcccagctcgctcggacctcgccgtggagcttcctcgccggcgcgcgcgcatctctctagccaaagctctgctctcctctntcttgccttctccctggtgccgtgcgtctagctcgccgg

SEQ ID NO: 14748 - DNA, 90 bp, Zea mays
  Coding DNA Sequence Number=SeqID_345
atgacacgtgacctcactgcgccaatggaggaggtcggccgatgatggagcgcggatccgtagcgaggcgcagacccagagctcgtgcct

SEQ ID NO: 14749 - DNA, 510 bp, Zea mays
  Coding DNA Sequence Number=SeqID_346
gcgctcttggcaaggttgctgacatttggttgccatgggaccgagtcgagaatggggaggttgatgaggagatgctgaggagttgcacgttttcagagtaccgagaagatcagggaactgagcgggatgggcagttcataggggattgggatgcaggtgactttgatgatgttgttgacgatattgttggaactagaaccagtttgcttggagctacgacaatgtctgcgtttgctgacgaggacattgcagatggcatattcggagttgaattgaccggggataacatgttttggagtagtgacgatgaggaagaggatgattacttgtgaggttcacacctgtattaacaggtgagcaggcttgttcgttctcgatccacgtggatcggatgacattggatcgggtgacattgggtgagtttaaatcctaaacaagtcaaaatacttcatttttttctaatctcattcaatcaacgtgtgatagcaatagcggaacaagaccttggat

SEQ ID NO: 14750 - DNA, 578 bp, Zea mays
  Coding DNA Sequence Number=SeqID_347
gcctgctggcgaactggtgcgctcaggacgcggtgctgcgtcacgaggcggtgggcgtgttcctgacgcactctgggtggaactcgacgctggagagcctctgcgccggggtgccgatgctgtgctggcctttcttcgcggagcagcagaccaactgccggtacacatgcgcggagtggggcgtggagatcggccacgacgtgcgacgggaggccgtggaagagaagatacgggaggccatgggcggggagaaagggaaggagatgcgtcgccgactcgccgcgcggtggagtggcgggagaccgccgtgcgcgcgacgcggcccggcgggcgctcgtacgccaacctggagaagctggtgactgacgtactcctctcgggtggcaagaattattaaacctccttgctatcaggcttcaggcatcagcactgctccatatgcatgcataaaccatcaaatacactttagctcagttttaagatctacgtgtcattgctctctctagtacgtgatgtattatgcacccgcctcttgttggcattattgttgtattatttagatctggtttctggaaacg

SEQ ID NO: 14751 - DNA, 238 bp, Zea mays
  Coding DNA Sequence Number=SeqID_348
ccgctgccgcactcggagaaagagtgaagggaagtctcagatcggttgggggaaggcagtggcgtcatggcctagggtcgagcctttgctcgaggagtcatccatctcgtgccgcaaattttctagcgagaagccgaccggatctgcactaattgctcaccagagcatcacctccgtcgtggcgccgcacctcaccatggttggaccgctcgggcctcgttgcaagagaagatcaggt

SEQ ID NO: 14752 - DNA, 286 bp, Zea mays
  Coding DNA Sequence Number=SeqID_349
gatgccacctagattgaatggaactcctcgttgtgtggctcctcttgaaccacctgatcttctcttgcaacgaggcccgagcggtccaaccatggtgaggtgcggcgccacgacggaggtgatgctctggtgagcaattagtgcagatccggtcggcttctcgctagaaaatttgcggcacgagatggatgactcctcgagcaaaggctcgaccctaggccatgacgccactgccttcccccaaccgatctgagacttcccttcactctttctccgagtgcggcag

SEQ ID NO: 14753 - DNA, 558 bp, Zea mays
  Coding DNA Sequence Number=SeqID_350
atcaccaccagcgattaaccataggaatactagggacttatgtagctagaagaatggaacaaccagctgcaggaggagtagagaacgcttttttccaaaccaaggaagcactcgcccatcttaagcagacggccacgccaggcagttgcgcaggatccggcggagcgacgaatgaatcgctgatctgttcagcgccgccgccaggaagtttctgcgttcgtcctgtccacttctggttttttttcttgccgtcccgctcctcgacgagccctaaccagctgccactcggtgggctgctcggtcagctgggccttgaagcagcccacccggcttgcccccttctctttattttttttaataaagtgaaaactcaaaatggacagcagatgcagcagtccgacgatggtgatcgtcggcgcacggcaatagagaaacagagcatcgttgagattgagtggtagggcaccgggaatccgtcatagggcaggggatgtcgacagcagagcagcatcacgtcactgacgaacgaagacggactccggcgagcgacgcaagaat

SEQ ID NO: 14754 - DNA, 581 bp, Zea mays
  Coding DNA Sequence Number=SeqID_351
aattttccaaaatcgtcccctgatggttatgatacaaactctatgtcctttctccattcaacatttaaacgcctcaagtcttgccattgtatgcacttgtagaagtgattgatcttggattaaattcttgaatgggactgctgcgtttcgttctcccatctcttcctcttcctcacttgattttgggtgcatcatatttgatccaacactgttattcaaatctgaaattggttggtatagtggagctgatggcattttgcttgagcgatgtgcccggagatgactaccgtctctccacattgtgacattccagattccacaccgtcgcggccgcgagcgttcagtgtgcttctgtcttggactcttggtcccggacgacgaggcgagctgccgctagatacggacctcctgcagctgctgcccgaggctgaccacgccggcgacggtcttgagcgccgagcgagcggagcaggcgtaagagttggctctcccggcggagcagtcgcagggcgcggcggtgtgactgtgagcccggtgcgctcgaaggcgtggttgggaaaggctggacaccgttgctgtca

SEQ ID NO: 14755 - DNA, 308 bp, Zea mays
  Coding DNA Sequence Number=SeqID_352
tggccagtgatctaggtctgtgtttgttacatatcttgtgttactcttagatactaaaataaatatatacttgaggggttactataggacgtataccgtcgattggttgcacggatgggtagagactggtccagacccagatgcaggctgacctgaacttgtatacgtggatgcaagtactcggttcgtttgcgtgtttggttgcctgtaccgaattagccaggattgactggacacatgtttggttcactgtttttgtatgcagcaccaactcagctcgtgtttggttgcatggacttgctgttggt

SEQ ID NO: 14756 - DNA, 330 bp, Zea mays
  Coding DNA Sequence Number=SeqID_353
aaggaccgctccacgggcgatgtcgatgccgcgcttccctaagtgacgacagcgatctggtaacggcgttgagctcggttttgctgttagcagacgatgttcaggcaaaacaaaaaagacgagaacattggttagattagatcaacgtcacttcttcacattttttttgtttaaatcaatgatgatagttgattaatggggtgtagcatcggaattacttgcccatgtttggaactttgacaggatgtacagcgttgggttgggtgtggctgtatgcagctgacaatttaacccaccacgaacctgaaaaccgacaggatgtatccaatg

SEQ ID NO: 14757 - DNA, 398 bp, Zea mays
  Coding DNA Sequence Number=SeqID_354
aagacccaacaggatttaccatgagtatgctctacataataaagacacatctgggtttgccttaccgtgtgatgagtagcggcaatccacagatcaaaatcatggtaaatcgtgttagatcgcctccctttgttggagcagtaatcccaatttatatgaatataattctctatacacagaaaataggcaagtggctgctcgattgcaactctcagatcatccgctctgtcagtccttcagttcactgtccacctgaagcccggacagcgcactagggggacgcaggggcggatctacgaggggggctgtcggggctgcagccccggtcgccccccataacacctattaatacatgcttcatctatcttaaaataatagtcatcgttttagggaattag

SEQ ID NO: 14758 - DNA, 354 bp, Zea mays
  Coding DNA Sequence Number=SeqID_355
ggtctatcttagttaacctttatagtctgcatttaagttataatatactcttacgtttcaaaatagttgtccttttagcttttggtttctatgtctatattcaaatgggtgatgaatctagacacatatataaaacatatgtatcaatcaaaaattatataaacctactaattccctaaaacgatgactattattttaagatagatgaagcatgtattaataggtgttatggggggcgaccggggctgcagccccgacagcccccctcgtagatccgcccctgcgtccccctagtgcgctgtccgggcttcaggtggacagtgaactgaaggactgacagagcggatgatctga

SEQ ID NO: 14759 - DNA, 546 bp, Zea mays
  Coding DNA Sequence Number=SeqID_356
tggtttcacccacaggcctcgcaattaaccgccacgcaaacccgaaccggccgccgcggaagcaattcgtgaagaccaggaaatggtgaccggagcgtgatcgagggaccccgcggagacacccttgatcgtgctcttgccgctagaagcagggagacactcccaatcgtcgtgaattggttgccggagttcctccacaaccgcgcaccaaactctcccgtgggcggaaggcgacacgtcgtaatcaccgacaagcaagtgaccgaggaatcgggagctcagctggttgaagaaactgagcaggagctcgctgaaggaacaatcagttggcggagtccgaaggagttgcaggtgaagaccctaagcagcagctggttggtgaaggttgtccacgttgcaaccactgctcaggagaagatgaagtcgtggaggaggacttccaggagttccaagagtacgatgagttctaggcgtgggttagcggcaaaccctcagtcggctgcctgtgaaggtcgtgtttatctacgtttcatttctgcacattga

SEQ ID NO: 14760 - DNA, 589 bp, Zea mays
  Coding DNA Sequence Number=SeqID_357
catttggagagtggcaacccgtgtcgaggcgtcgccgcgtcggtggacgaacttcgcgaggaggtcagcgtgcttcacaagtcggtgatcgagtggtgctcaattcctcacacccagcggcgcatcaccaatgatagcgccgttgggcaccccgatgacaagcattaccgggagtctgcgtttgggtctgtctatacccactcgcataccccggtcacgagtatgacacctgagccacctcctaaagtgcatatctctgatccacatgctaatatgagtgatctgcatgagcgatccgatcaatatcattctaagggtggtcatcgtcgatttcattcggacaatttaatgtccagccaacttcccaaattgagtttccccaattttgatggttctaacccccaaattgtggattaaacgtagtgaagactattttgatttgtaccaagtagctcctagtatatcgattagagttactacaatgcatttttctggtgctctagccctctggttacaatcggtagaggaatgccttagaagtatggcttggcttgaattttgttccatactccttggacgttttggtcat

SEQ ID NO: 14761 - DNA, 543 bp, Zea mays
  Coding DNA Sequence Number=SeqID_358
aggtaacagtttaggcccgtgagatacgcaatcgggctccaggcctacaaacacattccagagcatgggcccgtatttctcttcttgattgacttaatctggcaccagcgtaaacaaatcgtgttcattgcgtacatgctatcatgcatgcctactattcccgctacgaccacggacaaataacacatccaattgcaggaccgatacagaactatcacgtattcacaggcagctgcatactacagacccatcacctgatgtttcgttaccggtattgtgtaggagcaacactccaatcccctcctcccccacacatgtgcgggatgtgcccttaaccatatgggaatctcaagtctcaagcgtcctcttgcaaccatccccaccatgaaatcagagagaacatttttcagagcaaagaaacccagagaaaaggcacagacgatggtttgggaattgggacgacacaagaaaaggacacaaaagcacagctatattaccgcacagtactatacacactcgtctttctatagttctacctctctc

SEQ ID NO: 14762 - DNA, 600 bp, Zea mays
  Coding DNA Sequence Number=SeqID_359
tgatgaaagtgggagagcagtccaaggcaaatttgccatgttggagcagtcacaggagccaaggggctgcagtcacaggtcctgctagccaggatggagcaatcataggacctcctagcagtccaaggaaaatttgcgaggtggagtagttgcaacttttgaaacccacgtgataacatgctcaagcgttcgtatgataaaaaagatggcacataatcaaaagaagatctcatgttctgcgtttgtgaacctgtttgtattttttgaacttgttttgtgaacctctatttgtaaacctgtaaaatctgaggttgtgaatagatttgggtaacttcatacaagtggtggaggcctggtggtaatcctggatgcatataaagcgaggcatgcaatatccatagcactcgtttgacagaaggcaacaccatcaaccttgtcctccaccdttaaactagcatgagcaccatccttcttcacatttatattcatgtcccctatacgttcctcaaatacgtttgaaccatgtgtaccactatgtgaaccaactgagttcgtagactgatcaatgagtcaccttattgtggacgcagctctaaaaaa

SEQ ID NO: 14763 - DNA, 548 bp, Zea mays
  Coding DNA Sequence Number=SeqID_360
gtcgaggtaaccttcagggcaacatattggtgtcgcttctgggcacagctacagcttaagatggaggaccaagagttaataaaatcttcatgtcgcaagatggagatggtgctactaaagttttttcgcaatttcggatggggagctgcttggcgattaacgttgtagtacctttggtcttgtcataggtggtcttgggtgcagtcatgtgttttgtcaaggcagtaagctgccttcagttgtaaacgttggccgtagcctctctagaggtcaaggtcggactatgtttccattatcaaaaaaattattatgtgctctcttcttactttgctatctctgtgcaaagatggacgtgtatatcaatttaggcctacatggacttatagtagtacttttggtaaaaggctatatcgatcatctatatcaattggtattcataagtcaaactcgtatgctcagccacaaagcagggcaacattgtaaaagtggtcctctgctgtggcaagaccatttgcctgggtatgtaacctactagtgtccagcgattt

SEQ ID NO: 14764 - DNA, 555 bp, Zea mays
  Coding DNA Sequence Number=SeqID_361
gctttgcaggtttgagccttccagtggttgcgagtttgtggcacatttggttactccagtgagtctcacccttgggccaacctgcacgaggaaagcatggtctaggcatgtctcaaatatgaaatacaggctagtatttgttttagtgccaacaataacccaagcatgggtagtggtagagcgctgcagaaatgggcactcctgcccacctccaatcaccaagaaccatcatggccaagctactcaagacgaggcatgcagctgccgccaccggcccctgccacagccgccgcctccctcggatccgtcaaaggtaaccgagcagccaccggcgctgcctccgttcgcgcggcggcgaggccagtccggacgtgcgcctggtgtccagcctggtcctgctgccgccggagctggctgcggagatggtggaccaggtgaggagcaacacgtgtggtgctgtcagaggcgccttcagagtggaggcctgcaggttcgggttttgccactactcgtacagtcgtactggatgtacaccgtctgtcagctggagctcag

SEQ ID NO: 14765 - DNA, 496 bp, Zea mays
  Coding DNA Sequence Number=SeqID_362
tgtgacgctgttatagtgttgacgcgatcgaaacgagtcgaaacaagtttgtgacgcataacgtattgaataattagcattttacgaattaacgtcgacgacgtggcacgatgttatagccgaaaaaatagactacaccattgggccacaaagcacagccgcaaacgatccaacctatccgtcgaatgtggagagccgttcacactttgactgcatgcctgcatgcacctgtcgttcacactttgacagattccaaggcgcactggtgcacagcatgcgggcgaggagcgacgcgagcagctcgccgaggtcgaagaagatggccggaacaggctgccgacggctcgccggcaagggggccgggccggataggcacactgggatggcgcgcaggggctctgccctggccgctgcgcctggcaataggccggctgcgccgtcgcgccgaggcctcgccatggcccctgggcgaccttgccgcatggccgagtgggca

SEQ ID NO: 14766 - DNA, 543 bp, Zea mays
  Coding DNA Sequence Number=SeqID_363
ttacccttgctgcaatgggagaaatttctcctgcaatggagtcgaggagaacggcgccttttcctctcgttgacagctacgtggcacccggtgacgtcgtccttgacctctgcgagatgaacaaccagaccattaagttcggtgcgggcctgtttcaggagtgtgataccatccaggcgaccagtgctgggaagctgcggctgttgaaacccaacaagtattggattgagaactcccataagagggtaaggtaatgtgtgcttatgccatcaatgaatgtattttggaaaattgcttggttagatgccacagccgattcctgctaacaggaaaaatggtaagccctatcatctgagcagggcacgccagatgggtcaaggatgtcgcacataaactagatatgacaagaggatgctggtgtttttttccgattttgtagactgaaacgatagaatggatagttttgcaatgcaatttctgacaaatgctgcattgtttgttgcctatcttaaggcgatgggcaatggccagcaaatcatgtat

SEQ ID NO: 14767 - DNA, 429 bp, Zea mays
  Coding DNA Sequence Number=SeqID_364
tgctaggcccgaacaccggaggcaacaacggcttgggcgggagggtccacgcccggagcggcggccaccgccggtcagctgcggcggtgaagcggctgctgttgaggctgaggcgctcttggagaagacgcgcggcgcggccgaggcgaaccgcggtgaggttcgggtacgacccgcatagctactcccagaacttcgacgacggcactgcttcctacgaccaccactgcttgtagctatagttgtagctgtgcttatgtttgcttctaatatgccggtgactattatgtacaggatggcttaggttaggtctcgtttcagactaagagtaattgagaggatcaaaatcacttactattcaaaattgaatagtaataaattttggccactcaatccctttcattacacttacttccaagttgcaaacca

SEQ ID NO: 14768 - DNA, 528 bp, Zea mays
  Coding DNA Sequence Number=SeqID_365
atagcttggaacaagtctggcttacaggttacaacgcatgtggtaatcagttttagtgaatctgaaattctagaaatctggagtctctgagtctttgtcgcataatttgcaggctgagactttgcttggctacctgcgggagcagcgacaaggggttgcctgcagagctggagcagtggcagctactagcttggctaggtaaaaggcaagagctatggtcgaaatctgctccattctctgtgaggtgttgagagcakatcagcgacgccaggggggcgcatctgtaaataacagctggctctggttggtttggctatatgtctatgtgaatacacatgtggtttgcgagtgaggatgcttggttggttactaacgtaacgtcagttaagagtcttaaggtctagtttgggtactctagtaatgaatgcgattggagtggatttatgatgtattgagaaagtatttgatctattgaggatttacatcctctccaatccctccaaaacactctaacctcaaagtatccaa

SEQ ID NO: 14769 - DNA, 310 bp, Zea mays
  Coding DNA Sequence Number=SeqID_366
aaatccgccggtgatttgcataccgcgcgcaggaagactctggaggctgaataccgcaaagacgtccctggctccgtcgagatccgcccagaatcgtaggaagccccatatctgcactgctgccgtaaggacacgtgtcatctgaagagcaagttggtacctggaatctcaagtgacaggtcaagaacaggtaccgcaggatgaggcgcttggaggatgctgtgacgagttcgtgagaggtctaggccgtcgtctcccagtcaactttgggttgctggaccgttgtctccttataatgttctctagagga

SEQ ID NO: 14770 - DNA, 509 bp, Zea mays
  Coding DNA Sequence Number=SeqID_367
ataaaaccatacatgtcacattgttaaattattacatcaccgtcatcatcatcggagttttgcaaaagtaaccatcattgttcgaagtgcagcggaataaaactaacgataattaaacggagagatggggaagcctgtcccatcactctttatgctcctcctcagccgaggcagggtcccactcaacagtccaacccggtggtaaggcggacggccaagtcactccagcaaccatttcctctagagaacattataaggagacaacggtccagcaacccaaagttgactgggagacgacggcctagacctctcacgaactcgtcacagcatcctccaagcgcctcatcctgcggtacctgttcttgacctgtcacttgagattccaggtaccaacttgctcttcagatgacacgtgtccttacggcagcagtgcagatatggggcttcctacgattctgggcggatctcgacggagccagggacgtctttgcggtattcagcctccagag

SEQ ID NO: 14771 - DNA, 572 bp, Zea mays
  Coding DNA Sequence Number=SeqID_368
ttccgcctgcgtaaatgttcgccgctccsatgctrccaarcctgwtaacgaaggcaagccccggtgcatttgccacctrccttgatgtttttaaaatctttctcacttgcttgctgcattaggtgataggagttgattgattaaacaattcctgcattaccttccttgatcttgattaccctccttgaaaccctgttaacgaaggcaagccccggtgcatttgccaccttccttgatgtttttaaaatctttctcacttgcttgctgcattaggtgataggagttgaatgcttaaacaattcctgcattaccttccttgaacttgattaccctccttgaaacccggtgtgatgcgtcggcgagaaatcgtcggttcttcggtcgtggttcacgcccgacgaggccacatatacgcgcggcaagatcctgcgacgctcctaaaccagccgctggggctagagagtcgcccccgggatagatcgccggtggtggcttctgccctctccttgccctcttcatatgagctcgctgcgcggcggaggcttggaacagaaccgatgggtggcgaagat

SEQ ID NO: 14772 - DNA, 571 bp, Zea mays
  Coding DNA Sequence Number=SeqID_369
gtccaacaagtgtaaactcgcggcaagataccagaggaaagaggcgaagatagagggatgggaaagcttgcagaaatgcaagttcgaagccaagctgaggcaggccgaggcacgggctgagcagatgaaagcccgggcgaagcaggacctggcgaagaggctgtcagcgctgagccacaaggtggaggggaagcaggcgagggtggaggcgcgccggggccggcaggcgtcccggctggcgcggcaggtggagcgcatccgcgagaccggccgtgtgccgtgccggctccggcggtgctgcgcctggttcctgtagtgtagtgtagctagcatgctcccaatcgtcggaacaagtgctgatggcagtatgtcatggcatgggctgcttgatttgtaactacatgaaaattcatcgctggttcatgttcgtcccaatgccagggcagtggttggtagctgctcgccgctgtggtttggatgccgccgcctgcctttgtgccggttgtctagcttggcctgcaccctgcagccagctgatctagtgatgtggtgcccaaattcacgcacatgt

SEQ ID NO: 14773 - DNA, 522 bp, Zea mays
  Coding DNA Sequence Number=SeqID_370
atgtaacaactctattaggcttggggcgtctgatcaatcagacactgaagaacagttccaaacaagaaagggtagtaaacagacaagcggcagggaaaaaaaagagagaggaaaaacaaagaaatgtataggaactaccaaaatggatcaacgccacaccctgaacggctataatagttgtgatggcccaaagctagtaattgcaaaaacacaatgccctcctaagttcaaactcacccagctccaactgctggagtacatgatctacaaaactcgacctgtgtgtttgggtgtttggtcagatccggccaaaggagacctcctcacgtcggtagaaccctagggttcctcacagagctggtccggcgcccaccgcggcgcccttcctcatcaccgccatctttgttcctagggctgtgggtttcagtggtgtggtcacgggccgcccggagtgggaacaagcggcacgaatgacagattcggaaggagtagcctcagagtcagagggctcgcttcacatgc

SEQ ID NO: 14774 - DNA, 266 bp, Zea mays
  Coding DNA Sequence Number=SeqID_371
aattttatgaaatttccacgctgaaagcacacacattatgttctcggatgagttcctatgttgttacgaggaaaatatacttttctatacatgcttggggctcctagcttatgttaggatcattttccaaatgcccccaacacaatctctgctgtatgcaggaagtaacaaacaatacacgggacgatctcataagtcccctcatgagggcggtggagagtgatcttgccatggtacccgagacgagatcgacaacgagtaggagt

SEQ ID NO: 14775 - DNA, 133 bp, Zea mays
  Coding DNA Sequence Number=SeqID_372
gtagcaccacctcgatagcaacgtaccgattgtcaaacttcacctcggcgatcttctagcctcatgcatgtggtcgcacgccatgagcctcacgttcgatctgcttgacgcaggcatgccttcgatgacatct

SEQ ID NO: 14776 - DNA, 387 bp, Zea mays
  Coding DNA Sequence Number=SeqID_373
gaaagaatcgtctctggcggcctagtcctctgcagtagatcaacaatattgtagacagtgcagccaaataggtagctgatggctcctgctgcctggcgtgtatagatgtgtgcactgtggttaacagatcagataagccgatgttgtcgttgccgccctctgaatcgaggagccgatgttgtcgtgcctccggatcgaagaactgccaccgtcgtgccgctggactggagagccaccaccgtcgcgccgctggatcagggaaacgccgtcgtcgtgcctccagattagggtgccaccgccgccgcaccaccgaatcggggagccatcgtcgccccgccgccggatcagggagtagccgtcggtcgtgtgtccggaggctatcgtcgc

SEQ ID NO: 14777 - DNA, 491 bp, Zea mays
  Coding DNA Sequence Number=SeqID_374
gatgaagcttctatgttccactgttatctaccatgttacttctagaaccatttacatatgaaagagtgcacttccttcaactaaccaggacattttatttgcatacatacacataaatagaaattaaaaacacatgttatctatgtagcctgttcaataaatggttgacacatgaaaaaaggttgaagattgctcagatatgctgttctactgatggttcatatgtaatgaaacttgaaaaatcaactggtaaaaagatggtgcttagttgctagttgtgtgcgtgttgcctagatgcacttgatgggaaactagaaaatagaaaaagggttgaaagaagttctttttctaactttctaagaaaattaatcagtctgagactctgagtaaccatgctctgatggcctatggcctagtatgtctctgtaattcttcctagacagctgtctttacttccatttgtcaaggttctccttgttgtaacgatcatc

SEQ ID NO: 14778 - DNA, 557 bp, Zea mays
  Coding DNA Sequence Number=SeqID_375
ttgaatttggtcagatattttcgatatttccgatatatcgtgtttatctatgacctccgatttttttgtttttccgatactgaaaaccctgttcccggttgcgagcgtggtgctaagccatggaattgctgtcacccgtgacccgccccttctctgtctccgccgagctgcctggtcacatgcatctggccgcgccgcctcatcttcccggccggcaagcccccaaccgctcgtgccccctcttgtgtgtgtccctaccggcccgcgccactacgagatacgccgccaccgctctgccatggctgcgcgtcaccgcacgtgcctcctggccgcggcagccgcttgctccggcgaggccacgcgcctgcctgctccagcgtggatgagcgccacccccacgctggtcctcgctccctactgcgtgtgcctcccagccgagcggtgcggcatagccatggcgccctgcgtgccgcgcttccccgtgcccttgccccagcctcgccaccggccaagggcggcagccaacgcctccgcatgcctatgctcgacggcgctgc

SEQ ID NO: 14779 - DNA, 456 bp, Zea mays
  Coding DNA Sequence Number=SeqID_376
aacgacgtcagtgcgtcaggtgttcggcgccgtatttgcttgtgtcttgtgaattattggatcatactactctctatgggggcaattgtcataaggctattcccattccaaagtatctgttgggggtctttttctctgccgaaggtcctcaagacggagatattgtctgtaagcaacaagatcgaatgccgaagctacaacgaacatgtgtaaagagccgaaggatcagcttcggcttaaggtggcgacgaaggtcaaacataatgttgagtcgaagaggaaaagactagttaatccctgatattttgtattaggattatgtgtacatgttaaggtcataaatgtatttttactcaggctgcgtcctgtgcctataaatagatgaacagtacccccgtactgttcatgctggacaggaattgcattcacgctttcgccttcaagcaagccgaaggt

SEQ ID NO: 14780 - DNA, 573 bp, Zea mays
  Coding DNA Sequence Number=SeqID_377
cacttattaaaagcagcctctcatgtttttcttaaacaatccaccgtccgtccaatcccagataaaaaataaatggaaccgaaccacggaaccctagcgcgagttcgtcctggcgctgtctgttctacgccgtccacgacagactgtatgtagcgagcggacccgcataccagtctctctcgccttcctctcgctccccacgcacacgcacgaacgctcatcgccaccgccgccaaaaccggaaaaccccatcccgactaggcaatctcaacctcctcggcggtgcgggcgagckaggcggggagagatmgggaagagcaggggcgacacggatgtkaccaccatcgacaaccagacgctgccatggacatggacaacgttgacggccacctgcacaacaacctacctctccccccttgccactccgattctcagttgtcgaccaagcgttccccaaggtgaatgccgggggcggcggggcaggcccgcgggagcggcagtggtgggcgcaacaggagcaggcgggggcgcgccggcgaccagggtgcacgagcttctcgagtaccctgtctg

SEQ ID NO: 14781 - DNA, 357 bp, Zea mays
  Coding DNA Sequence Number=SeqID_378
ttcagttgcgataggacttattctcgcgggggaagtgggggcataagaagacctggcgtcgcttttcctctggtttcgctatctttccgaaatcactcgcactcagaaaaccttgagcatcaccaaagcttgggtccgccgttaccgccgtgagagtactccctcgttgcgattgattttttttgggcgtggcgggtagctagaggtgccggggatccagccgcacgcatcgcgtccctcggctggcgtgattcaccaccggagggccggtgatttcacgacattggtggtcgtcgccgcgggtccgcgcttcaacgtgagcctgtgctctctcacggccatctgatcgcgaggaca

SEQ ID NO: 14782 - DNA, 317 bp, Zea mays
  Coding DNA Sequence Number=SeqID_379
tgtcctcgcgatcagatggccgtgagagagcacaggctcacgttgaagcgcggacccgcggcgacgaccaccaatgtcgtgaaatcaccggccctccggtggtgaatcacgccagccgagggacgcgatgcgtgcggctggatccccggcacctctagctacccgccacgcccaaaaaaaatcaatcgcaacgagggagtactctcacggcggtaacggcggacccaagctttggtgatgctcaaggttttctgagtgcgagtgatttcggaaagatagcgaaaccagaggaaaagcgacgccaggtcttcttatgc

SEQ ID NO: 14783 - DNA, 599 bp, Zea mays
  Coding DNA Sequence Number=SeqID_380
aactcaacccaatatcttgtcatggaaccaaacccaatagatacgcaatcaggatttaacaataggctatccattatatatgcaatcaggacctaccaacaatgtgtggtacacataatagaaggtgttgttgtcttagaatcgttacactaacattttgccaaatattttgtatgccgttgcaacgcacgggcacgtaactagtagtagtacatagtggatatagcaacgtaacgtgagacccgagttgtcagtgggacgagactaactgacgatgctgcccactagcgcacgggccccgcgtgctagccgcagcgttggcaaagcgccaagtgggcacggaactgttggcgcgcatggctctccttgcacttgcaaattgcaatgctgcgcgctttgtgcccacctgctcgctggtactgtagtgtgggcgatgccgtggaggaggacgacaccggcgtagcgtggagatcgacgtgtggacctggacctggacgtcgccgctgcgtggacaccagattccacgacgctgatacgttggcaattggcaccgattgggtggcactggcacctcgactcagtatgttcgcttttcttta

SEQ ID NO: 14784 - DNA, 577 bp, Zea mays
  Coding DNA Sequence Number=SeqID_381
tattgcagtcagtgtttcagctctccagggagagctacaaactaccaaagaagccactcactgaaaagtttgtaaatactcttcatttcaagatccattggggacatggatgtttgggagttcattgtgcctatttcgcatgtaaagcaaatcaagctatcaaacgttggaggaaggctgataatagcaatggaggatgcattatccaatgaagcagctacaaaagcatgcacaagattgcctatagaactggtagagaagcttgtcattaaggtgagctatgtaattgacccaaaaggcacttcaagcgggcaggaaagtctaaggcccttactaattacttccaagtaagtagagcaatcaccatcacacggatttattcaaggtttttttgtgtgttaagccaattgttcgttttcatgtaattgttgtccactaatattttattgaataatttgtgtgctgtcgcaacgcacgctcattgtactagtagtattgaatgctccatttgtagttcttgtgatattacagtagtgtagtctaaaatactgaaacattgtacactgtaataccctga

SEQ ID NO: 14785 - DNA, 596 bp, Zea mays
  Coding DNA Sequence Number=SeqID_382
aggtgagctttggttttgcagccatgtagcttgactttccagcgacccccttgctatatccgctggccccggagctgacggttcttggccatggatgggcacggacagtcagatgaagcggcgtccaaggcgtggcgcggcgcagcgagcggcgtggtgagcgcgcccgtggcccgcgtgtgggagctggtgtcctccacgtctcggctgcgcgagtggatgcccatggtggagtcgtgcaccgcggtggccggtgacgaggacgtgccgggctacgtgcgcctcgtgcgcggcggcctcatgttcccccagcagcagcaggggtcgtcgtgggtgagggagaggctggtggccatggaccacaccgcccgctcctacacctacctcatggaggacggcaacgtcggcctcgccggctcccgcaacaccatcagcctcctggactacggcggaggcgcaacgctggtggtgtggagcttcgagatggagccggtggacgacgccaaccaggatgccctgctcgactacctccgcatcctctacaagtcgtgcatcgacaccatacctctttgtctgctctgacctgatattaaatc

SEQ ID NO: 14786 - DNA, 488 bp, Zea mays
  Coding DNA Sequence Number=SeqID_383
ggtagaaccaaggagctcctgccgccggactttgttgatgaaagcacgatgctggttcttggcagttctccatacatcctccttccagaagcacgagatggcctccggagcgtggccgagaagctgagcactgagcaaggttcgagttaggcggatgaagttgtcctttgggttcgaagcgtccgagctgctcaaagctttggggctccggctgccttttagcccggaagaagcagatctgtcagggctcgtcgctgatccacccgtaatgaggaggggtgctgcgcgtgggaggctgggagccgcagggattgtttcatcgcgggccaccctttcgtcttcttgatcctagaagacacgacaggatgtggtgctgttcgtcggccatctaatcgcttgaacgtggctttgtcttgtctgaaacaaacaaaggttgtgggatgatccatgtagctcatgactgcttcactgcgtactccgtatgatga

SEQ ID NO: 14787 - DNA, 375 bp, Zea mays
  Coding DNA Sequence Number=SeqID_384
actctgtgtcatcctcagcgtcgagcgctggtgcgcagttttctctactcagcgctccttgccgtcggacgccgagttttctcaccgagattcttgttgcaccatcatcgtcctagtgcctcgtcaccatagccccgtgccctgctcgcagcgccgccgcacctcgtcgacaccgtccgtccacctcatcagagccgcactcaaagcacctccgcgacatcgccctgttcttcgcctgctgctgctaatcttcgtcgtccatgttcaacgctggaaaccccaggtcctgaatgtgacttcgcatcgccatgaccaagtggttgatctagtagttaagaatcaagatctatttagatccgtggaagagtctcaagt

SEQ ID NO: 14788 - DNA, 283 bp, Zea mays
  Coding DNA Sequence Number=SeqID_385
ctccagagaaccttccaaagcagtggcagacaggtcctctagtgcaggctcgggtgctggatcgggggctacctcctgagcagctccttgctccggcacgaggatgtactctccatcggcaagattacagtcttcggacggcgccaacgcgggaatccatggcggcggctcgcttctctccctacacgatgaaggtggctcggagttcgccttggatggatgcgacggccgcgggtttgcctatacccccagagggacgtccgacggttggagtttgagccta

SEQ ID NO: 14789 - DNA, 577 bp, Zea mays
  Coding DNA Sequence Number=SeqID_386
gtgcatgccagtaggagcgctgtccctgtctgccaccactgcatagtaacatgcacctggtgcaggccgacggcgacggtggccacggcgatggcgacgctctccgtggtccagcaccgccgtgcctcctccgtcctatcctaggtacggacaagcatgcaaaggaaggagggcactcgcacacgcccgcacacacccaaagctttgagctttcactggcttttggctgcctccaacagtccaactcgatccaagcgcgcgctgcctggaagaagccaggaggaggaagtctgcaaccgaaggatgcttgttcgctgcggcttgctgcggctgcaatccggctgcggctgcggcttctacagtatttttctctctatggattgcggctgcagcaatccaaacagctgcaacagtgtcggcttgtagccagccgaacacgccccgaacgatgtagacacgtcgctctcacgtagtcacgtacgtacgtacgtaaatgcagtgacattctctcttagtgccatgcttgcttgggcttacaatactgtgctgtgtattaggcattcggatctcactgagc

SEQ ID NO: 14790 - DNA, 290 bp, Zea mays
  Coding DNA Sequence Number=SeqID_387
aacagcgggaaggttgggatctggtggcggccgtcccgagcaatcctcgcccgcaccatcggttcatccactaagccagccctggaagttcctcttcaccgtcggggatgcgtctgtgggcgtggcgtggaagaacaaccatgccgacatccccaattgctcgccagacgtctctggatcgccccgtgccatggttgggtctccgcgctgctcaaatcgtcgagcgaagtcacgtgtcatctgaagagcaagttggtacctggaatctcaagtgccagactgtaatcttg

SEQ ID NO: 14791 - DNA, 108 bp, Zea mays
  Coding DNA Sequence Number=SeqID_388
cgggttcacgccattctcctgcctcagctactcagaggctgaggcaggggaatcgcttgagcctgggagacaggctgcagtgagccaagatcgcgccactgcactcaa

SEQ ID NO: 14792 - DNA, 123 bp, Zea mays
  Coding DNA Sequence Number=SeqID_389
gagacggagtcttgctctgtcacccaggcttgagtgcagtggcgcgatcttggctcactgcagcctgtctcccaggctcaagcgattcccctgcctcagcctctgagtagctgaggcaggaga

SEQ ID NO: 14793 - DNA, 187 bp, Zea mays
  Coding DNA Sequence Number=SeqID_390
acgtgctcttccaccggtctgcgtccccgctcgagcagcagcagcagcagcggcgacgccctccactgcgtcgcgctcgccaggacaggccacccgccgtcgatctcgcagtccccgtcgcgatgtcgtgaatccgtgctagctatcggtgtcgcgcttcgtgccttgcctatgtaacgaaatgcta

SEQ ID NO: 14794 - DNA, 478 bp, Zea mays
  Coding DNA Sequence Number=SeqID_391
agattacccacatccgaggtctgcttgtgcaaagcacccatttagtagaacccctcatgaacgctattgtgaccagtgtttctgctatgtctgcgacatcgctgccccatgtgtgtcctggaaggggcctggagggcactgcgacgcttcggacagggacaaacagtggaaggctttgaggcgcatgatgcaagtcaacaaaagcaaagcctagttgattttgcccccgatgctaggtctggcaatcggcattttggagtctcagcttgttctgatgggaagattatcttggagtaacttgtaaatatggttagtgctggtgatagatctcatcccaagatttggtgcgtgcatctgtgtactgcctatcagaaactgaatgatgcgcctatataatataaccacctatgaagtactagtatcagtcctgtgctcttgtgttccacttaattctagcacatgtatgcatctcgcggtt

SEQ ID NO: 14795 - DNA, 546 bp, Zea mays
  Coding DNA Sequence Number=SeqID_392
actgttgttggctgaggaacgtctctggctcgatgttcgagaacatcttcgtccctgcgttggagagattgcagccgtctcctccagatccgttgttccccgtcttggatccgtgcttaagtcatctgctccaggtctggtctcttctattcacaactcgtattcgatctgtgctcgcacctcttctcttcctctccctgtcttccttgcccatctactccatccgcatggtgaggtcggacgccatgagctcggacgctgctcgctccagtgctagtgactcgacaagctcgcaggccgcaggccgtccatcgcagagggagattctgctgctgggtgcacaccgtccattcgaccaggtatcttcacccgccggtgaacaccgctcattcttcaacatctccggcgaccatggggtcggcggcgctggtgtgcgcagccccttcgtggccccagggcgttggtttcatatgtgtatggttaatttatgtgacctgttctgcagcaagctggggtttagtaaagtgcatgtttcagtttcaagtt

SEQ ID NO: 14796 - DNA, 313 bp, Zea mays
  Coding DNA Sequence Number=SeqID_393
gggagatcgccagcctaaaccacgaactcgtcgaagtcctgaaactcctggagatccgcctcgatgccttcttctttacctgagcatagattgcaccaaaggcaacctttaccaaacagatgctcggggttttcaattttgtagaactcgaagaatcagatcacttggtcgccaacgcttgatcgtcgattccttgaagcttggagatggatcgcactctgggaaggaggagatggccggagaaaggcaccatcggcgacgtcgaagtggcaggttgtcgtgacaccgcgcgagcacgcatgaagaggatggc

SEQ ID NO: 14797 - DNA, 155 bp, Zea mays
  Coding DNA Sequence Number=SeqID_394
tgtttttccattctaagcagtgcattcttttttttatagcagtcttttgataacaatagttaagaggccaggcacggtggctcatgcctgtaattccggcactttgggaggctgaggcgggcggatcgcctgaggttgagagttcgagaccggcc

SEQ ID NO: 14798 - DNA, 152 bp, Zea mays
  Coding DNA Sequence Number=SeqID_395
agagacggggtctcaccatgccggcccaggccggtctcgaactctcaacctcaggcgatccgcccgcctcagcctcccaaagtgccggaattacaggcatgagccaccgtgcctggcctcttaactattgttatcaaaagactgctataaaa

SEQ ID NO: 14799 - DNA, 465 bp, Zea mays
  Coding DNA Sequence Number=SeqID_396
ggaggaggcacttctcgccaaggccgacgaggaggcgtcgctgttctaagcggcgtacgatgccgtgtttagggggagtttgttaggaataaacccggcatcgtgtgcgtgcgtgatgccggggttgtgtgtgtcgtgtcttgagttgtgcgtgtgtgcatgcagccgtagatgctcctatgtgagttgcgtggagtcagctaggcggccgggtcgtgtgcgcgtacgtgcgcgtattttgtggccggccaagtcgtatgtgcgacctgcttgttcgctgcttgccgtggaggtaagctgcacatgcacaggttgttagcagggagtggtgatctgttaggaggccttgactggggcgtggtcgcgagtcttgcggatcaccatgcatggcgagatagctgggatagagttagtggctctcgtgtgtactcaggcctataaagcctcctgtaattgctctatgaa

SEQ ID NO: 14800 - DNA, 155 bp, Zea mays
  Coding DNA Sequence Number=SeqID_397
aacctgagagcttggaccacaccaatgttaactgaagagaaggtgaagcagtgtgtagatccgcgtttgatgggtgtgtatccagcaaaaggagtcgcaaagctcgctgctgtagcggctttgtgtgtgcaatctgatgctaagctccgcccaaa

SEQ ID NO: 14801 - DNA, 542 bp, Zea mays
  Coding DNA Sequence Number=SeqID_398
gttattgtatctgtgtttggaccaagggaaagtaagaaagcaatgatgcacactgatgttggtaggctcaattgcaatggagcagacaacaaagagtattcattgatactttataaagctttggaagtcctgttttggcaagaacatcatcatcgatccgacctcggacgaggaagcacggcaagatggaagccttgtggtggctttcatgccagtccgcaaggagataacacaactcgcgctcactggagagtggagtgatggcataataaccaaccaggcggtagagctctgtatggatgcttgcagcaagcacggtgacatactgcgtgaccgcttgaatgatgccggcaccttgacgacgagtgaatggcgtggcagatacaacacttgcaagagcagatatccttggctgtataagttctgtaggcaagggaggctgatgggcctgatgtttgagtgagcgtgcatggttgatgatgattttttctctctttctttttcttgtcatacctaatataccccttgcaactcacttctga

SEQ ID NO: 14802 - DNA, 505 bp, Zea mays
  Coding DNA Sequence Number=SeqID_399
actcccagggccagcttatgtagatgaccatgatgggttccaccttcgttaccgcgagaacactctctgaacaaggaggacagactgcttcgcttttgctggctggttgtgaagcacagagacgcggtatatggactggagttcgtcaatgaggatggcgggaggaacgagctgagcggtttcagccttgctcatagaaaggatgactacgatactgaacttgcctcggacgatgaagattcggatagcgattcagacacgacgagtatgcggtcgaggaggagaagtagaactgcttggctaggtttctgcagtctcatttgtgttggcagatgcattttctgcagtctcatcgagtacgtgaatttattattattataatatagtagtagcataggatgagagtcagaacctatcaacttgattctaacacacttttgcagtgtcgagcatatgcttgtcattagatgtttaaggcgtgttctgcttctttcaatcatggtgt

SEQ ID NO: 14803 - DNA, 512 bp, Zea mays
  Coding DNA Sequence Number=SeqID_400
tggaccaagcctgtgtcggcactggcgctgacccgtcggtgggcagatttgagcgggggacagcacacaacggcatgggtgactcggcggggctccgacgaccccttggcgtggtggagctggccaacgcgcgggctgcgacgaggaagaccactaggtggtgtctacggaggagctctggcggtgcagtcgcagcgctgttgctgcctgctagggctacagagtggtccgacggtgatggcgggctacccggctgtggcgtgtgggtgttgtgctatgtgcttccggcaatggtgagggggaagcttcgggggcgaaagccatggctggcttccccagagttgacaacgacgacacttagtgtcgttgtcttccttggaagcattgtcgttggcgcttcctcctcacagtgggaattctcctagggaaacctcgcctgagctagctcgggtaggcgacggcagcgtgcattgtcattgtcctccgtggaggtgttgccttggagccccaca

SEQ ID NO: 14804 - DNA, 536 bp, Zea mays
  Coding DNA Sequence Number=SeqID_401
ggcaaaatccgcacaggcatcagctgcgctgctcatgcgccgtgttggcgaccctcgccatgatggagagcgcccacgccatctgcggcatggcaaacgaggacttcaagctgtgccagcctgcggcagcggccaacgacccgacggacagcccgtcggcggagtgctgcgccgcgctgggtaaggctgacctcgggtgcatctgccgctacaagggtgtcgccggcatatggatgaggatctaccacatcgaccccagccgcgccatggcgctgccgggcaaatgcggcctcacaatgccaagcaactgctcctgatgcgcgtgatgccgtgattgacgtgctggcccctggccggaaacaagttgtgtgtgtattctcgtacgtatatatgttatgggtagctaaataagtggagctcgagatgatgaaatgccctgtgctccttgatggctgcttcatctagctagttttggtttgagtgtgtgattgtgtgcgtgcgcgtgtgtgctgaaagctcaacgtgtaccttattat

SEQ ID NO: 14805 - DNA, 558 bp, Zea mays
  Coding DNA Sequence Number=SeqID_402
cagctggacccacaattcatatacatagtggtaattataacaagaagacaacattgtaagtggcaaaaatccaattatctcttcagccatctgtgtctctgggtattctggagttaccatcataagactgtctttcgaactgcaaacccgtcagttcatcgcttgcgtcgccgatgcatagacgaagcgcgtctttggagctaccgtctgcatttggttgcaatgataagacaggacgtgataggacgatacttcaaataagattgtttggttcagggtcaaragttgggacagaactatcccagtattatctccaratgttcctcaaaattgggggacgaraaaggacgtcaraaracgtytctgttctagctatcctgcaaccaaatacmctataataggacgcgacgtgatctatcgcmcggaatggtgctcaatgtttgacgtgcattaaggccattgctccagctactcctgccctccacggctccacccctttytytggcttgatgtatytgcagctccctcatytaaacaactccctcattatgtaatcca

SEQ ID NO: 14806 - DNA, 439 bp, Zea mays
  Coding DNA Sequence Number=SeqID_403
gcgctgtttcacctaacgcgttgacccggtggccggtgcatctcgtttcacctaacggccgtgcatcttgccggcaaacgtactgatctcaggagagagagagagaggggaaggtgatcgtgaggttctgaagaagtctccggcaggccgtaggcgtcgcagagcatagctcgcttcgctaatcctgcaggcccgtcaagtctccagcacggataatttgcatggtcgcgctcgcgccgcgcggaaaaagattacctgctccctccagtactgtgtcattgtatcgttctgctccgattgaacccgtggaaccacaagatcacatagggatgacaatagatcggtttggatcgggtgaagaaaaaacccgccgcgttcataccgatgaagtctactctcacgatcatacctgccgatgcaattctaaacccatgtcgtg

SEQ ID NO: 14807 - DNA, 514 bp, Zea mays
  Coding DNA Sequence Number=SeqID_404
tttctctcttctagcctgttctaagctgccgtcgttcgacagaggcatctccccatggctccacctcccagtgctgtccctcacagtcgcgccaccctccacccatctccctcgcgcccagctccattttctccacttcccagccatggccccgggggcaggctccctgctgctgctcgtccgtggtctggaagctctgattggtgggcgccatcgtctcctacctccatctgaaacaccacatcgagctcccatcgtcgcgcccctccttgctcctctgctggccatcgctgctccctggtgctcggactcgccagtcatcgccccagccgagatccctcctcagtatcgctcgcccaatccgaggggcactggacatgtttgggacatgggaggttcaggcagcgatgggtagaactacaacactacaatttccattcaatcaaactgtttctgctttatcatgctatatgcttctgtggaagctttaaattattgtgatgtaggtcattta

SEQ ID NO: 14808 - DNA, 258 bp, Zea mays
  Coding DNA Sequence Number=SeqID_405
gtcgccaaacgccattactgccgaagggagaaaggagagagaaagcatagggtgtcgctgttgggcaacccttctacgtagtcgttcgaagccttggggttgtgccagggagctctgtgagatcatactagaggtgctggttggcgttctgtgtgttgccggtgggccctgaccacgcggttggcgcgccgcgtgggtccttcctcgtcgcgttgggcaagctcgtcgtcggcatctagttcatcgacgagcaagcta

SEQ ID NO: 14809 - DNA, 514 bp, Zea mays
  Coding DNA Sequence Number=SeqID_406
cccatctgtattggcagtgagggatgcggcgacctgtagtgcgacggcgtcagctcgctgcccgcttccccacgaaaaccctaatggtgtcccgcctccttcacctctgtcgcctgattacacctcacttcaccgctgcttccttctccaccgccatcagcccgaccttgcatgtctccgcctcgtcaacatgacctgtgggctcaccctcgtcaaggccttttccctggccaatgctctgcgcgaccacctcgacgtcgaccagatgcccccactagctatccctacaggcgacgccaaacagcttcacggcggtggagtaggtcccgacgcggtcggcgaggatgcaaaggccaaggagaaggaggcgttcgacgtgaagctggagggtttcgacgctgccgcgaagctcaagatcatcaaggagctaaggacgttcacgaatctgggcaaagaatgtccatgtctgtttggtagagctccccttgccccctgataatgtgtctgaaagtga

SEQ ID NO: 14810 - DNA, 474 bp, Zea mays
  Coding DNA Sequence Number=SeqID_407
atttgcccttgcgaaatgcatcagggttgtccttcattgcttcctttgcacgacgtgcacgctcaagcttattctccttctcttccctgcattcagcaacacgcctcattttctgctcgtcttcacgttgttgctcggcagcaagctcctctcttcttttctccatcctctctttgtcctctgcatcccactttttaagattatccaaccacttcttgtctttctctgatatttctgtgtcaatccactgctcaaaatcacatagcggtggaggagtctggagtcctgggcggctacgaagtacttcatgggcggcacaagccagcaactgcctggcttcctgcgcggctgcgccctgggcggacggccggacgcggaccacggaggtgcggcggcgcgctcaggtcgggtggcgcgctcgggtcgagcgatctgctagagcctgaagcgcgcgcacgtggagcattgcagcct

SEQ ID NO: 14811 - DNA, 308 bp, Zea mays
  Coding DNA Sequence Number=SeqID_408
aacttatcgccggaggaccatggcactaggccaacccatcagatgcgcggacagggtgctcgccgcgacacaccgcaactgcgaccggaaccacccctgtccagcggtgcgcccactcctccccttcctctccggccgtgttggtcgtccctgaccccaccttggcgcagcgccgccagctcccatggtggattgaagggtcctatcatgcccctctactcggcttcctgctcccacggatgtttcacccgtcaacagagggcttcggcactccaatccttgcacgaggttacgcgaatctgaagaat

SEQ ID NO: 14812 - DNA, 260 bp, Zea mays
  Coding DNA Sequence Number=SeqID_409
gaccgcactgcggtggttgtgccatgcagtccccaggccgcgacgaagtgtggttccgtggcaattgttggcgctggtgagaaattggggcagcaccaaaggcttcttccacctgcgagcaccacaatgatcgtcgctgtaccccggggaagcccactgacccgagcttgcgcctcaagcaaagacggaacacaatttccatggcggcggcatcacgttcttccccacgcacggcgtcgatgaggattgggcagcgcagc

SEQ ID NO: 14813 - DNA, 487 bp, Zea mays
  Coding DNA Sequence Number=SeqID_410
ttgtttcctctctggccatgccgtggagcattagccaacctcctccacaggtccgcgttccagctccctcctgctcctgctcaacccgtccctctacttgctagcctcggcgaatttccctgcacgctccactgcgccatcgctcctgccagccatggacgtgcgttcctcgagcttgtccagcgagtcgcgcccaggccacgtcaagctcctcctcgggtcgctgtcttcgagcccgacctcaagctgcagcgcgcccagcgactctgacccaacgcgcgctctttgctggagttcgccggtgttctccacagctcggctttccatcgcgccgctcgccctcagccatggcgccctcgcctccatggtgctcaactggggcggatcttgtgcccctgctcttctccgcggttaggccgccatacgcacagtcgcacagtacgtttaggccgccatactcacagtaccggtcataatgatagtcatt

SEQ ID NO: 14814 - DNA, 517 bp, Zea mays
  Coding DNA Sequence Number=SeqID_411
cgcggttcctagctcggtcttcttcctggcgtccaactggaactccgtattttctccctcagctcccatggcgcccagcagagctctctcttcccttctcatggccgccgtgccgacttctctggcgcgccctggcgtctgcgtccagttgagctcctccagctcgcaaccctctccctaggtcctcgcgtgcgccggctctggctcggccactcctcttcctcctcccgttccctactcgcccatggaagatgcgacagctcctctactcggcgctggaatttctgcgagctctctttccatagccgagctccctcgtcgtcgcctctccgtgctggccgaccagcccgccatggtggcacacgcccctgctccttgttcctggctcgctgctctggttttcatctcttcgcgtcggtattgttgttttcaagcgctcgcccaggtcgccgtcgtcaactccctgtgcacgcagccatgtccctctgttcgtcgtggccgcttccctgctaattgg

SEQ ID NO: 14815 - DNA, 514 bp, Zea mays
  Coding DNA Sequence Number=SeqID_412
gaggtgtgtatatatctctctccctccaaaaccgagatctgaacatcaccattaaatttgtacatgcatcacaattcacacgtcatcttccagctagtacctcaaagcagcagcataacataaacacctcctccgacaagcgtgcagacgagccaagaagagtaggcagttgccctggtcgccgcgccacggcggtggtggcttctggcgttgaggttacggggatcgacgacccctgcgccgccctgctccggcgtgccgccgctcgggtgcccgccgctgtggctgctgctgtacccgtgcccgtgcccgtgccctgtcctcaccgtgaccctctcgccgtcgtcgtcacctgctgctatgtccttggcatctgcaggctgagctccatgggcggccgacgccaggagcaggaagagaagcagagcgacgacgccaaggcatggtttcttcgtcctctccatggatggacgctgctctgaagaaaacggagcagcaaatcccggaccacgag

SEQ ID NO: 14816 - DNA, 567 bp, Zea mays
  Coding DNA Sequence Number=SeqID_413
cataatttgtatgtcatctttaacatttatgacaatgttgtttcgccgtacatttttttatatgctactattagaatttatggtcgtttcggcccgggtcttagctaatttctgggtccgccactggacacattattacacgcgcacgcacgcatgcatccatggccatgcacaagcacagcgttgctcctcctccgccaccgaygccgccgccgcctccgaacccgccgaacgggcccgcgccggcgacggccccgccgaacgggccgaacccagcgacgccgccgcccagcgggccgtggacgccgccgccggtccgcccgccgaacacgtcggcggtcttggcctgctcgtcgtcctcgtccacggcgccggcactgccgtcgcccgccgcgaaggcggcagtagtgtcgcagtcgcggggcgttgctcttgccgccgccgatgcgacggcgaggcagagcagcagggaggcgacgagccaccacttggctgccattggcctctctcgcttattaccagctaggaccagctcttgttcttcgaggtaggcctatctggcctggt

SEQ ID NO: 14817 - DNA, 578 bp, Zea mays
  Coding DNA Sequence Number=SeqID_414
ttatatgttgactccgtagcaaagcacgggcatacacctagtaaagaatgagaatgatagacatgggaatgagaacggtggcagaacgggaatggcagaacatgaatgatggcagaacacgagaatgaccgactactcttgcagccttaatagcagtagagatttcactttttctttgttttttcttcctcccagcagtgccgcaattgcagggcccaaacccaagagtccagcaacagtgccacgatccaaagacaggctccgccactgcaggtggccccccagagcgaggccggacatccctttcctttccttcacctcactcgctctctcgcctctctctccgtgcggtgactgactgggcaaccgccaccgccctccccctccgtcgggtcttcgccggcgccaccagcgacgactgggcggtctgtgtccctcttcgccggagacgatcacccaccaggtatgcccgctcccttctctcccttcccttccttcctttccgaagcggagcaccccaaaccctaagctatctgaacccggatctgaccatgattcctactagcttcgagtttttt

SEQ ID NO: 14818 - DNA, 237 bp, Zea mays
  Coding DNA Sequence Number=SeqID_415
gacaaaaacatctgcatgcggacgaaatgggagcggccaccaagatagaggatggcgacgaggtgacggaggagaggttgccggagtcgctgaggcgagcgctggggtggattgtctgctctccaagctgaagatggccactggcctggtgatttcagtgggattacgtacattatgccgttctggattttcgccctgcacatcacaggatccatccgatgttgtcctatcgaaaga

SEQ ID NO: 14819 - DNA, 304 bp, Zea mays
  Coding DNA Sequence Number=SeqID_416
atactcgcatgtgccgtcccaaattcctcaccgattgtcgcctttgcggaagaattccgccgccgcaggagcaactcgctggtgactataaattggcgtggggcgaggtattgtggcgctccggagtggtccactgattgagactctgtcgctaatagcccaggaagtactctagctgggtgtgaattgctcaccggaggcatattccggcgaggattcgcgcttcaccgagtcggaacaatcctaccctgcgatttccgacgagccggctactgaggatcctagggttcagtagtggagacta

SEQ ID NO: 14820 - DNA, 411 bp, Zea mays
  Coding DNA Sequence Number=SeqID_417
aaagcgaactaatgtccgtccttggcgccataaagtcgactgggagacgccacctagatcaactcatatgcttcattgtagggcgactcctcttcaaccacctgctcttcaccttcaatgagctcctgctcagtagtctccactactgaaccctaggatcctcagtagccggctcgtcggaaatcgcagggtaggattgttccgactcggtgaagcgcgaatcctcgccggaatatgcctccggtgagcaattcacacccagctagagtacttcctgggctattagcgacagagtctcaatcagtggaccactccggagcgccacaatacctcgccccacgccaatttatagtcaccagcgagttgctcctgcggcggcggaattcttccgcaaaggcgacaatcggtgag

SEQ ID NO: 14821 - DNA, 562 bp, Zea mays
  Coding DNA Sequence Number=SeqID_418
agggacgcaagggtcgtctgccaatctgccatggagttgggaatggtaatactgatccaatccgcggcaaacagttctggtgtgttattgttatgcaccggtatatgttggcctgcgatgcaacaaggatgctggtggcgaaaaagaaatggtggctgttgcagggaaaataccgactagtcaaatgtatatgcaaagagatttcttttggcgtgtaacaatgtcctgtactcagtttttgtggtctgattagggatccaaagtcagcagggatgggctagaatgcaaatagggtattttgaatcaactgcactgagattgcagttgatcctgatgttaataaactggattgggggttctggctgcacttgactgttgcctctagagtttagatggcgcataggcagtttctggtctaccatgttttcatgttgatgagggtttgcattgttcatattcatcatttggatgcaattctgctccttaatctgggaccagggtgcttctaacctaacacaagtttgtctgatgagtgtagtcttcttgcttactaggtgtttgt

SEQ ID NO: 14822 - DNA, 575 bp, Zea mays
  Coding DNA Sequence Number=SeqID_419
tttttcaagtcagttctccttcggattatctctttatgttgacggagctgttttctagttgtcatgctatgaagactggatttctttgskccttagttgaacaacctactaaatcattgaacattgagggaattacgatggttcgggactatgctaatatcttttgagatgagctttctggaatgtcacgcatcctccgacgagcaagacttacctgtggtttgacccatcctccgatcgcaaatctaaatgtatgtaccatctgacatggagagtcggtggaaatggttgacacaaacttgtattaccagttgtacatcattaatgttctagtttagtgatagacgtttgacacaaatttgtggttgtgttactagggaaccaaaacaaaacattaaaataaacgtaaaatagtaactataagtcttctaaaaataatttaaacaatgtgaaaactcggtgcgattggtcatcatctaatacacgtgtttgccaaagcaaacccatggtagctttatttcaagtctctgacagcaatgaagaggtggtcctcaccccaatcttgtttgccaaaa

SEQ ID NO: 14823 - DNA, 507 bp, Zea mays
  Coding DNA Sequence Number=SeqID_420
gccgcgcgccgcagagcgtacaccgcccccgcccgccctccgcctgcccgccctccaggatcctcgccaccgcaaacagctcagcctaccacggtcgccccctgccagtccttccgcgaatcgggtgtccccaacaatcccgcgcacccgccgcactcgggcagacggagcgcgaccgcggcgccgcacgctccgacttcgtgcggttccgcctggtgtgcaagctgtggatggacggcagcggcatcaggaagccccgtgagctgggcgcactcgtcatcgaccacagcttccaccctcgccggtggatcctactgacggaggagaaggaggaggctgatgaggcgacgcccacgcccacgcccacgcgccgcacgctgctcaacctcaccacccggaagaccatccaggtggatctgccggagctcgccgggcactccgtggtccccggacccgccgcggcgccggagggcatgctggtggtgcgcgatctgagaggccgttggg

SEQ ID NO: 14824 - DNA, 131 bp, Zea mays
  Coding DNA Sequence Number=SeqID_421
attcgattgcagatgtttgttcttcacaattgtatttcaaattctaatgcatgcactattctgttcgactttttttttctctgtgtcttcctgatagtgtaaatttcaatatctatactgtgatgacaaaa

SEQ ID NO: 14825 - DNA, 593 bp, Zea mays
  Coding DNA Sequence Number=SeqID_422
ggcactatttttcaaaccagactgtacaaagagatgcaaactaaaaaacaacaagaatagacaatcttaaaattaactaacatgtaactatccttagatcatttgtaattggagcgttagaaacagggatagtctggttcaagaaaaagtgacaccagtggatttttttgagctttttgccagcctcttttcgttcaagtttatcagtatgaggagcattaaattgtgattcatgagctacaactaacctctaatgatgaatgcatgcaatatattctggataatgcataatgttactactatattattccatagattcaaatataatgacaatatagatggtagacgtccagttgtgggatttcaatgattttataaatgtacattcgaacctaagtcacaaacaacacaaactttagaacattgaatcttaatatccaatttcctaattcatatgaaattaatagttggtctcctgttttggcataaatttggttcgaacttatcagctggcattactttactgtgtgtgtgatcgagaaaaacgtctcttaattaggacagttaagaaaaatgtatctttcctgtgactg

SEQ ID NO: 14826 - DNA, 475 bp, Zea mays
  Coding DNA Sequence Number=SeqID_423
tcgacaacaagtcacgtggccacagatgttcctacaaagctcgccctgattccattgtccacaaacaactgcttcatcctcgttgagaaccactccaggttgactgagcccagcgttgtcatgggttccttcgccacgacgccgactgcgaccacgctgtgtagcagggacacctcctcacctcgatttcctcctcctcgtgacatcatcaccaactactctcccaccatcctttgcatccaacaaggacaagcactacaacaagaggccatggattttggaggatgagacggggaacatcaacatcagggacaaactctgcttcatactattcgctgacgctaaaaagcaatgacatgattgatgttcaagttggttcctggtacagtggtactgtactctctgattccctctgttgttattagtctttaaatgaactatgatcatatatccatcatttgaacatacatacttg

SEQ ID NO: 14827 - DNA, 515 bp, Zea mays
  Coding DNA Sequence Number=SeqID_424
gtccacccgtggagcacacagaagtgcacattttgcacttccacacggcgttcagggatggcatgcactaatgggagtgttgtgtcttgcccggcagcgaacgcctccaacatcgcatcatcaacaatgtgcagaacttcgtgtatacgacggaagcgcaaggaaatggtttgctccatacctttctgttgatttgtagatcgttgttgttgttcttgtcaagaacagcaagtgttcttctcctttcttcctctaatcttccttgagacaatgctgataacgtgttaagttttgtagtgctcagtggcaaatcagtggagagggagagacaaatgacaggactcagttctttattgcaaagagtcttgtatatatacaggggatataaatactcccaaggggtgtgtcccatgggagtaactgccagttgatcacatgacacaatagtttgtaacacctttattctatatcgctttgtgtcacccattgcttccatgtggcagcaccaagcagca

SEQ ID NO: 14828 - DNA, 447 bp, Zea mays
  Coding DNA Sequence Number=SeqID_425
gcgggaggaacacgcccttcaagcaggccgccgccagcttcggccggaggatacccagatccggctggaaccccatccagaacagatgagagggaccgcgtcctagatgaagcccgtccgtacgtcggcggcagggtcccggcatctgatgggctgcgtcttggaagcgtgctcgagctctgtccaggactagctcagaaaccacacgcgcccacacggcgcgacccatcgagttttttttttctttttttgtgtgggatccttggcgccgctcatgcttgtgtgtacaagctcgtactagcttttacaattttgtagtcttactcatctcctttttttttggtttagttaggtattagtgcaggttaattagccagtcaggatgggtaatggctagcagcttatgtcagggtagccagctctccctgtttattccacttttcttgt

SEQ ID NO: 14829 - DNA, 493 bp, Zea mays
  Coding DNA Sequence Number=SeqID_426
gtccgttaccgtgtaggtcatgccctccaataatttctacccgatgtcgctccacattattctgatatggagcatgattagcagctttgtgattaagcattgccatgcttcgattgtgctactacatcattccatgatcctattccatgcctcttcatcactgcttaaaggaaactcttatgacaaagataaaagagctgaacctcctcttcaatctcctccaaaaaaaatcaaacaagaaccactacgcatcatagactctacaagccaaaaaggccaccaagaataatgcatgcgaccacaagaaaaccacattttcagcacttatctgcagtgtcccttcttttgctatcaatcttaaacatatgtacataacccctcaaccaagctagtcaactatacaggcaactgaagcactacaactttgtttattttggataaggccccgcttaaatatggcataaaacaatggatgtcatcattttgtaacttg

SEQ ID NO: 14830 - DNA, 586 bp, Zea mays
  Coding DNA Sequence Number=SeqID_427
atacgttatcgtcatcaaaggcctttcgaactgcttttgaattgaacattgcttcaagttcagaaaagcaagcacagcagttaaacagatcgatttggaagtcaagttcagccgtatcatcggacagcagttttatggacagcatgcacacaaccatcatgcactctagacaacctcctcctgaactcaaaccagagcttcttgtacaccgctaagctggtgaagcatggtggcgtgcctgatagcatattcgacggctgggacctggtagagcgtgaggtcctaccgccaccgccctcgcgggtcgaagatgtcgcgcagtgggaaagagccatgtatgctggcacaaaaaagaaatgacttctattgacaagtcctccctcaagtacaaactgttagaacatcagtttagatatgcccttgatcatcagtttctggttcatgtacagtagcagtacaggactagcctaaccctgtggctgtgacctgtcagtcatctacactgcaagaatgcagagaggagaattgtagtatagggtttatttgctgccatatgtacatgtacatgggtgcagccctataaatt

SEQ ID NO: 14831 - DNA, 572 bp, Zea mays
  Coding DNA Sequence Number=SeqID_428
cgcgggtcggcgcagaagccgtggaggcggacgaggtgcgggtggcggagcgcggagaggatgagcacctcgttgcagaaggacttggtgatggcggcggaggcggagggaagcgacgacgacggcggcggcgggaagtggaggcgcttgacamcggcggggcgsccggcgggcgggaggtgcgcgaggaacaccgtcccgaagccgccgtccccgagcttgcgcgccgggtcgaagcccgcggtggcggcgcacagctgctcgtaggtgaaggccgggcggtggtggtggagcctgtggcggcggaggaaggccgcggcgcgggacgccgccggctcccgcgccagcgccagcgacgcgccgcgggagcggaaccggcgcaccgcgatggcagcgcagaggtatagcaggagcagcgccaggagcgctgccgttctgctgctgatgccgccgccccagcggcggcgggggcgggtagatatgccggcacgcggctggcggcgggaggcaggcggctacgaggaggatgagcaagcggaggcggaggtgatgcggcggtcgcatttcggcgc

SEQ ID NO: 14832 - DNA, 580 bp, Zea mays
  Coding DNA Sequence Number=SeqID_429
agcctacttgagaaaccccatggcctacaacctcgccctcgcggccgccatcgccaccgccgcagctgcccgcgccccccgtcgcgccgtggtcgcctccgcctccgccggagaagccgcgcaccgcataatccgccgccgtgcgccgtcggggcagcagggctctgcgaccgtggcccccacgccacccgctcagcccatccgtcgcggaggtgtgccgtgccatcggcgtctccgacgacgccgcgtctgccgccgcatccatggaggcgaaaaactctgcattcatggacctcgtcgctagcacgccccatcgggcagccggagagcgagcccgagcgccggcctccgcgaggccgccgagtgggtagtcgacaccactgagacgcgcgcttgcgaaggacagaaatctttcttagtgctatgcatgatgacgtttcctgcgtggttcttgcttctatttattgcccttggagttataaggttaccatttgatattccggttttggatggtctcctaatgtgaggtgtttattgttattatttttttcttcttgattatacgagcttcagacactga

SEQ ID NO: 14833 - DNA, 441 bp, Zea mays
  Coding DNA Sequence Number=SeqID_430
ttgtccaggacaacgcagcactgctgctccacgagcattagactacacgctacggcctccctcccctattactatttatgtagtaggggcaacagtcgtcccctatgtcccgcaacggagatcgctacagagcacttttggtggcgatcctcttctctctcacgccacatcaagaggactgctgttcaccccctcgcagttgcttctagaggacgcaaccacgcgcgcgctctagaagaaacgaccggttccagtttcctcgactgcgttgtgtcgcgccgccgctatccaatccaacaccgacgggcagaggagcagccgccgacagccgtccgccgaggcaatcgccgccaacggaagtcaggaccgcgtccgccgagtggctttggcaacgacccagcgcaggacgagacgaggcaatcttcagctgcggcccggtat

SEQ ID NO: 14834 - DNA, 510 bp, Zea mays
  misc_feature (36)..(36): n is a, c, g, or t
  misc_feature (271)..(271): n is a, c, g, or t
  Coding DNA Sequence Number=SeqID_431
ctacttcacgcttatatctgcatgcgcagccatctnccgtsgccgccttcgcgtaccttcacccgtggaagacggcgtccactgtgcagcgctaccagcttggattcctcctctcagcgctcggstgsaacctctccaaccttytagtcttcacttccatgaccatcgagatgatgaagaaraggcmcaagatcgagcgggmcctkagtatyggcsaggaagtyggatggtyaaagaaccagcaggtggstaaatccaaccccaccctcgntgcaatgaacaagaagtttgggatgatccacgggctgtcatcmctggccaacatcatgtcgtttggcagcttggccatgcactcctggkacctggccagcaagctagagctgtkaagaaggggagacaagacgacmcctttytccgccttgttgtgaatyttgtcagktgtcmcgawggtgttgcytgstgctctcaaaccagtttcaaaattggaataactagaaaatggccagacac

SEQ ID NO: 14835 - DNA, 473 bp, Zea mays
  Coding DNA Sequence Number=SeqID_432
tcgtcttgtccaggcggtgcacggctctacaacgcaccaacagcggcaatgttcccctccaccaccggcccgtcgttctttgatttgcttcaaagcttcgagggcatcatgagctgtgaagatgcttatgaagaagatgagatggagatggagttaggaccgtggcacgactaatctagaaacaaaaagatgggagagtggctacaatatttgagttgtgcgtcttttgcaatggtgttcctctctgttcactagtttctctgatcaccaaggatatcatggcttctctagtcaccaaggagcttcggcaccggaacacctttgatgcaggacaatgaaggggcgacgaagctagcttcgtcatagcaacacatggagacaatgcaaggagaaagagtcatcctgaatgctgaaagcaaaagataatgttgcccttgtattatttgtaaattctgtgtaatccttgtgggtgt

SEQ ID NO: 14836 - DNA, 596 bp, Zea mays
  Coding DNA Sequence Number=SeqID_433
ataacatgaaagagaccacaagcaacatttctagggtgcagcaatactgggagcaacaaagatatctccgtaagaaaatttggcttcaaacctggctaagacgggaaattcaggcccttactcgggacgagaacgttgaggtcatagtccaccacattcacggtgtcatcggatccttcatgaagaggctcgaaaaggagcacacgtcgtcaaggtggacgacttcaccggagaaaaggagggaagagttcaggagattggtttccgatgctgctaggccgttcctcctcggccgaacggagcgattcgtcgccgaggtggagctcttcctggcctcggatctcaacatggaagcctacaacaaactgcgcgtccagaggtttagggagtgcagctctcatctaacgagagagcaagatgcactgccacgtgatcggtcgcttgaggagcactacatgtatttcctgtgttataacgacacggactgtgatgagatgtagtgatctgcgatttctttttcttttttggcaacatgcgtccttgttaatccttggcactatgctgccttttttagtctggccccgattactagagag

SEQ ID NO: 14837 - DNA, 386 bp, Zea mays
  Coding DNA Sequence Number=SeqID_434
agggtgtgcataaggcgctcgccatgttagattgctcgctgtagtcgtcgatcgagcctcttcgttccgttaggctgcactgcacatatatacatcttctttcatggacgttgtttgttactactagtatagtartatactatgccgtttctttgtttctgctcatmttcgtgtataccgatccattgttacctttttttttggttagggtaacccagttccttccggggaagatgacacgtcagattctccggttctctgtaagctgtgtaattctaggtttctaccgtacgtatggagttttaggtattattttcttaggctaggatagttttgaaagaaacaataatagagaggaactcgtgtgccgtttccgaggtgtaaat

SEQ ID NO: 14838 - DNA, 553 bp, Zea mays
  Coding DNA Sequence Number=SeqID_435
aaagaaacaatctgctcactctccagtacacgtgttgtaaattgtaatcaaaaggcattgtctgccaagacttctaagaacatatagtacagttagtgttacctttttctcccattatacacttcaaaaaacaattgcaattttatccttgactcatctgggaagaaatttacactcatcatggtgcatgaagctaggaattggtatgagcttccacatgtcatggctcaacacaccttttgcagaatatgatgaaataaactaatcaatccagcttgaagttgtctttgcaccaatctgcaatgtacatttccttcagttcacactttcctcccaaacgttcagaccatgcctaatttgcagtaacgcttgaagctaaaacaacagtgaaacctgaggctcccaacaccagattgagcctgctggattcaactaatattggtttaaggtttcagtgaagatggtagcaggctagcagcagcaccagatttcaaatcatccagcacaggtttcatctatgtgcacttctgtcatcccagaagtgtccccatta

SEQ ID NO: 14839 - DNA, 573 bp, Zea mays
  Coding DNA Sequence Number=SeqID_436
ggctttggaggatgctactacctacagagatatgcaaccagctcttgctctggtcaaggagtattgcatgacatgcgaagcactcttgcctggcttgaactcggattttttaagcaaaccaactgacgaagcgttcggggaaggacaatccgtgaagaaaggttattagtgtacagggaagaaagaaggttgttactgcacaggaaaaacagaggttcctagctgttactgacaggcaagaacggagattctagttcttagttgttgattcgattagatgccacagtggcacgggcaagataatgatgcatgagcatccgttcaaaaacctagagtgctgtgttttgcttttttctaaactgtggaacttgttcatgttttgaacggcagttgcgtgttagtacaaatgtacgcgtcatgagctataaatgcggtccaatgctgggcccaacatttagacttgatcaaacagttctcgaatagggcgagcgattcgaggcagactactttctcgcttctccttggttaggccactctaggccttgttcgtttggcctgggaattgtctggatt

SEQ ID NO: 14840 - DNA, 577 bp, Zea mays
  Coding DNA Sequence Number=SeqID_437
aaggacgtcggtggcctgcaagttctcagggatggcgtgtggcacaatgtcccagctagtagtcctttcaggttgctgattaacgtaggagacttcggagcaggctgtcggtttgacgaccttgacggacgcagataattagcaacggggtcttgaggagcccggtgcacagggcggtgaccaacgcgcggaaagagaggatctcgttggccatgttccacggcctggatcccgacgaagagattgagccggcgcccgctgctcttttaagcgagaaccagccggcgcggtacaggacagtgaaggccgccaaggagtacctggccgggttctatgaacatttttgtagattcatcgagtctgtgaagatccatctaaacgaggtttgatgtctcgttccccggctgcgtaacgaaagcattgttttgtttgtctcacgcgcacggttcactcttgggagttgtgtgttctagcggtcccgccggtytctgttagggcgcagttcctgtttgctccctccgtgcgtaaaaaaaaacatgaaatgtacttgttggacatgttcgtccatagatgtact

SEQ ID NO: 14841 - DNA, 307 bp, Zea mays
  Coding DNA Sequence Number=SeqID_438
agtgacaccaccaaggctccttctgccggagcacgtcacagtcagctggtccctcgtcctctgccgacgtcgcgtctcctcttgctgtcatgaatgttctacagcaagcaaaatttatgacctgatcaactatgtaaggagtccatcagtgataatataagaagggaggacctacaattctgatgaaaaaggacaattattatggtttcacttggtgtgcactgtgcgggcaagatgaggtttctaatcccttctgaagtaagtctacaccagtgacacattgcagcccatgtcagaagaggaatca

SEQ ID NO: 14842 - DNA, 584 bp, Zea mays
  Coding DNA Sequence Number=SeqID_439
gacaccaatcatgtttttggcggaatgttagtgatatgactgatcacttcatcttctttttggtactgactctaacgttcggttgctaatcagcactgctttattcacgacttcatcaagcgacacgactagtccgactggcaatatgtctgctcctgggtatggtttctcctttcagtcatatacatctatgttaatttgtagctcgtttatttcaatatgtgtcgtggtttcggaaccggggataatatatttgtgttcggaagggatacaagcacggactcactctgaatggtggatcacggggatccgagcaagaaactgagacattggggttatactaattcaggcttttgctctaatccagtgtaatgctgatcgtagtattgctttgagacgtgttacaacatatatgatggtgtgggaaggagggggccctgctgtccttttatatctcaagggtaggaccttataggggatatatattttctacaagaaagagagagaatggatcgcacgggttatcatggtcagtcctccgtatggtcttgcgtagctgtaatcttggtatggcgtatcgtctt

SEQ ID NO: 14843 - DNA, 525 bp, Zea mays
  Coding DNA Sequence Number=SeqID_440
ttccgcctgcgcagggagtgcttcaggttctcgctcaactactcccggcgcactgcggaggcgctcgggatcgcggccatgaccgggctgcggagcctcaccctcgtcagcagcaacatcagcaacgacgagctggtggccgtcctcgacggctgcccgcgcctggagtccctctgcctgcgggactgctacaaggtcatcgctgacggctccctgcgggccaggtgcgccggcatccgggccctcacgcttcccgtccccgatygagtttggtgagtccggccggccggccgtttcaggaatttccmcaaccacatggcctgggccccgcgctgtaggtatcaggaagttacacgtgcaacctgatgactcagcatattattattagcatatacacagaagctagcggtcaggactcaggactttgtttgcaatgttctgataggccccatgtcagaatacctactcatcaatgtacttgcgacaaaaaaaaacctgcggacttgttagtcctattttgtcgac

SEQ ID NO: 14844 - DNA, 368 bp, Zea mays
  Coding DNA Sequence Number=SeqID_441
tggattactcagatattaggtggtggtggcatgtcaacaaaaaagtgggagacaatgtggagcgtatgcaaaaacatgtgttctaacttactatcctgacagtagtgtaaacaaagctccggtgttgtgttcaaatgtagctggagaagcaagagggttaatatccaataaacccgttttttgttgatggccttactgaaaaggagaaggtaaccatgctgcatcggtttctaagtttccttcaaacaagttcagtgaaagctattacaacagtgtagatcccagcataccctttgacacacaagatcttggagctgcactgaagggcttcattgcgaccatatcaaagcctaatgggttattcggtt

SEQ ID NO: 14845 - DNA, 580 bp, Zea mays
  Coding DNA Sequence Number=SeqID_442
gatccagaatcatcttcacagtgcaagtaatggtgacagatcctttcaggatgttgccgtgatcaaggttcctatctttagtaatcctaactatggcaacaacctgaggcccaccatatactttacaaatataacagattttgtctaatacgacacacgacactcagtcagcctgtcgcgcgcggagcaggaaacgaccgcgcggccaacagaggagccaggggcgcggcacagtaagaaccgagcagggccgagccagggaccgagctcggcatgggcgcaggcataggcatgtagggaatttcacgactcgcggtgaccatgaccgagcgcagggggaagaagacccaggcgctcggaacctgacagcgacgcgtgcgcaggcaactgggtgcggcgcgcgcagagagccggcgaagtggaagacgagcagagggagcaggggcctcggcgccggcgagcaggagctggggcgcggcagccaggacgaacgccagggaacctcgcgagcgcggcatgggagcaggcttgctgcagaacgctcgatgcacaggtgcagggagaggcacaaggccccaac

SEQ ID NO: 14846 - DNA, 449 bp, Zea mays
  misc_feature (349)..(349): n is a, c, g, or t
  Coding DNA Sequence Number=SeqID_443
gtctcggttctattaaggaaagtgctactcatagtttatccaacaagactagagagcagcaaacaagtgcaagtaacagtaacactgctcaccatgcaacaaatagtattgctggtcaaaccacaactttgtcagatgctacaatccacatcatcaaggatcagctaacaagagcaaagatgtaccttggattgtttgcttccaagagtaatcatggcttcgcaagggagctccatgcatgagggatatactagtgttattaaaactacgtttaaacgatgtttaaactacgtttaaacgtcaaaactytaattagaggttgaaatcacgttttagcgttttggcgttntaaactgtaaaacgcagtgttttatgcattttagaccattagctatttttgggcccggtcaattagttacttttggggttcaatccagctcatggttgaa

SEQ ID NO: 14847 - DNA, 257 bp, Zea mays
  Coding DNA Sequence Number=SeqID_444
aacactagtatatccctcatgcatggagctcccttgcgaagccatgattactcttggaagcaaacaatccaaggtacatctttgctcttgttagctgatccttgatgatgtggattgtagcatctgacaaagttgtggtttgaccagcaatactatttgttgcatggtgagcagtgttactgttacttgcacttgtttgctgctctctagtcttgttggataaactatgagtagcactttccttaatagaaccgaga

SEQ ID NO: 14848 - DNA, 551 bp, Zea mays
  Coding DNA Sequence Number=SeqID_445
agtttgtgcctcgactagggtgagtgccgccattgccgacctctgtggttgtcacttggtccgccgccatcgtagatgcttgtctgcactggcgcttggcgaccgtgggtggcgatgtgagctcgcgggtgtgtgtgggtcgcttgcctaccctcctccgacgaatttgtgcaccagagccctcccaattcctcgtcgatgtacgagtgctgccgcagatccgcattgcgccatgggcagcgcggtcgaggccataatcctcggcagcatggacagaccccacaagtaataaatttggaagcctgcactctgcaactatgaaaaggaacaaacaaaaaggatgtggggttcaccacatttcatctcctagacgagaccaagggcctatcatcacatcccttcctttccaatggcgtcattggtgtcaaaagccttggttggtcagcggttatgacctccacgatgtcgactatctgttcaataacctctttgtcatgtactaacccaatctatcattggtgagtggtgcctggtgtacctgactgattgta

SEQ ID NO: 14849 - DNA, 506 bp, Zea mays
  Coding DNA Sequence Number=SeqID_446
aatcagtcaggtacaccaggcaccactcaccaatgatagattgggttagtacatgacaaagaggttattgaacagatagtcgacatcgtggaggtcataaccgctgaccaaccaaggcttttgacaccaatgacgccattggaaaggaagggatgtgatgataggcccttggtctcgtctaggagatgaaatgtggtgaaccccacatcctttttgtttgttccttttcatagttgcagagtgcaggcttccaaatttattacttgtggggtctgtccatgctgccgaggattatggcctcgaccgcgctgcccatggcgcaatgcggatctgcggcagcactcgtacatcgacgaggaattgggagggctctggtgcacaaattcgtcggaggagggtaggcaagcgacccacacacacccgcgagctcacatcgccacccacggtcgccaagcgccagtgcagacaagcatctacgatggcggcggaccaagtgacaaccacag

SEQ ID NO: 14850 - DNA, 481 bp, Zea mays
  Coding DNA Sequence Number=SeqID_447
aggaaccacatatatccccactgttccacatatatggcagcatctatgggggtgtagttttgttctctgtgcagaccactagttagaagctaactcgcatgtgtgatggcgtctgcggtttggccgcaagatagagattggctgtgagcgcacgttgtgttgtgtgattcttaaggatattgctccttgctcatgttaccatgcacatgcctcattatttgtggtgcgactgtggcatcacttacaatatcacacacacacgtggatttgtttcatattttcattgttcagtttgagtgtgtcccgtggaacatgtctagtatcctgcagcgatgcctcatgacagtaagcataaaaaataccttgtggaggtacgtcacctatgccactatgtattgattgatgggcttatatggtgtagaaaactgatggaaccatgctgcataggaagtacatagttcatgctctatcaacgttagat

SEQ ID NO: 14851 - DNA, 393 bp, Zea mays
  Coding DNA Sequence Number=SeqID_448
agacctcgtccgtaggatcgtcgttgacctcgcaacttcagctcgagttaattatggacgataaataatcacgtgatgcggaagacaagccaagtcgacaccaagcgcgggctaatccgcaggatgaagctgatggaccaacctgaagatggttaaatcaaacaagtactcggttgagggatactcgtcaaacggacatcgtctaacaacactaacctagtgttactcagactgtaatcttgctgacggagagtacatcctcgtgccggagcaaggagctgctcaggaggtagccccagatccagcacccgagcctgcaccagaggacctgcctgccactgctttggaaggttctctggaggagatggttgctgggataacttggccgtccac

SEQ ID NO: 14852 - DNA, 550 bp, Zea mays
  Coding DNA Sequence Number=SeqID_449
tcaaaaaccggcgtgcgcgaagatttgatttttttttttgtcggggagaaggcggagtaagaccaggccgggaggaaggagatcctgatctgttcttggagtggggaggagaggagaggagaggaggaagatggcggcgcaggagcaggagcacgagaagcagcaggcgaagacgagcacgacgagctcgctcccctccagcagcgagcgctcctccagctccgcccccaacaaccttagggaaggagattctgaagaacacgacggcgcacgcgagcaagaggagcggcggcggcggcggcaagggtggagacggcggcaagaagcaccacttctccaagagctagagaattgagggactgagggagggagctggttcgtgctctgctcgcgctcgcgctcgcctcacctgaccattgttggtggtgttggtgccttggtggtgttgatgttgctgttgctgttgctgatgacgtcttctcttttttttctccttttttttctaatttctactgtacctgtgatcctcttgtctcgctgatgcactgtt

SEQ ID NO: 14853 - DNA, 323 bp, Zea mays
  Coding DNA Sequence Number=SeqID_450
tctactcccatttcctccaaccgcaccctccctgttcctcttccacgcagcgcagttggctccctgtccatggattgcagctgctcgtccatctctctcgccccatggcattttccccctgcgagcagttttctctgttgtcttcaacctccagccgccctctccattttcccctgctccatggcgcccttcctctctctgttgtacatggcgccatgcagcggctccacttccctgaccacgccctgcttcgagctccgccttgtgctctgctgcagctgcgctgtccgacctcgccgggccacacgccatagctcctgtgc

SEQ ID NO: 14854 - DNA, 168 bp, Zea mays
  Coding DNA Sequence Number=SeqID_451
acggattctcgctctttcacccaggctggactcagtggcgctatctcggctcactgcacgctccgcctcccgggttcactccattctcctagctacttgggaggctgaagtgtgagggttgcttgagcccaggaggtcaaggctgcagtgagttatagtcttcattgc

SEQ ID NO: 14855 - DNA, 173 bp, Zea mays
  Coding DNA Sequence Number=SeqID_452
gagtcaaggtcccactctgtcacccagactagaatgcaatgaagactataactcactgcagccttgacctcctgggctcaagcaaccctcacacttcagcctcccaagtagctaggagaatggagtgaacccgggaggcggagcgtgcagtgagccgagatagcgccactgag

SEQ ID NO: 14856 - DNA, 548 bp, Zea mays
  Coding DNA Sequence Number=SeqID_453
gggcagaagcgctcccaaaacgtcacgaccgccttgttggagcagccgctgctggctcccgctgccctcagaccgcgcgcagcgcagcagtatcggggccgggcgccgttatacaccggatgcgggaggagagagagtcacgcacgcaggatcaccggccggtgtgcggaggaccggaggcgagggctcgaggcgattggcaagaggcgggaggggaagcagctgatgccttcgctgagagcccgagcatgagctccgccgccgtcgcctgtgtgcccagcgcgatgaagggagggagcggaagatggaactgcgggaagatgaagatgggagatgcagaaacatgcggcggctgtgtgcctgcagtgaaaaggttaggccgttagggtaagaccatgtccaccagctaaacactattttgcatttgaatatgtatgaataaatatcttaatatttatttatatgataattaacaaccgtaattaagtatggataactagctagttttaaaatataaaacmcaaagatatgtatgttatgttgactag

SEQ ID NO: 14857 - DNA, 493 bp, Zea mays
  Coding DNA Sequence Number=SeqID_454
gagggtgtgagctgcaatcgccgtcgctgctcttctacgccggcgccctggatcgggaagtgttgggagaactcctcttgcgcgtgaacagtgtgtgcgtgcagttgtgcactctggggacgaccaggacacctcctgtcgctcacctgtcctccatcgccgccgccgtgggcagctccatgcgccgccgcctcggctggggaagggagaacgcgtgtgccgtcggatcggggcggatggtcgagatttggcctgaatactcccttcacgactctggcgcgtggccgtttgatcgggatccgagggtcgcgattgaatctcagcgtgaggtcacgagtcatctgaaaaaagttggtacctggaatctcaagtcccacgcaagttgtgctcttgaccactttttacccaataatgttctataatatcattgcataggttaattttgttgggacccaataggttaccctagattgtttatctcattaccttgttt

SEQ ID NO: 14858 - DNA, 592 bp, Zea mays
  Coding DNA Sequence Number=SeqID_455
gctatttgtagtcgaggatcctgttcctaatgacccctttcagttgctcccgaaaagaacttaccagcccagtacaatcaagcggaaaagaacccatggatttcttacgcggtctgtctctctagcttttccctggccattattttgcttccctcgtccttcattgaaaaaggaagatgggtttctagttggtactatcaaattctgtttccgttcatgttttcctttggcacctcatcatttagattaggtagtttatctggcatgattgtggttcagtgccctgatgtccttgttacattggttctgcagcaaatcgaccaagggtgggcgcaaggtgattgcccggagaatcgccaaaggcaggcacagaatctcagtttagctagatccggctcgtagcagccctggatgttttctgtaacacagattcgtatcgtgttctttctatggttagcactctgctgaaggtgagcccccgcgcaagcagcagtccatgtatggatttttattgtgaaacttttttttgggtggtttcagtcctggccatctgtaggatatgccttcttccattttattttgcgacgctgtg

SEQ ID NO: 14859 - DNA, 123 bp, Zea mays
  Coding DNA Sequence Number=SeqID_456
gagacagagtcctactcttcctgcccaggctggagtgcaatggcgcgatctcggctcactgcaacctccacctcccgggttcaagcgactctcctgcctcagccccccaagcagctgggacca

SEQ ID NO: 14860 - DNA, 523 bp, Zea mays
  Coding DNA Sequence Number=SeqID_457
tatcctgagctacctttattcattgagcagctgctgggaacgggcgtattgagtgaaatcgcgcctctgctcgactgtgaccaggccctacaccagcccttctatttccaagcccctggtgctgctacggtggcctgctcggcagccgttgctccctccccagcaccctctgctcgatgcgccccctctctgctccctctccacgtttccaccatagtagggatagagcatgcggccaccgcggtggatccacgccggcatcacgggtcctcctttgggggtgtgccggggaacttcgccgggccgtggggagcgcactggtgggaagtcgtggtgcactggtgaccgcgtggctttgggaatttgacgtcggacttcatggacatcactgtgtcgcatgcgtcgtgggctgcctcactcacctctcgatcgccggacaagagcaggtggttcaagaggagccacacatcgaggagtttgacttgatctaggtggtgtctcctagttgactttatggctaagg

SEQ ID NO: 14861 - DNA, 521 bp, Zea mays
  Coding DNA Sequence Number=SeqID_458
gcattgaccatgacagtactcgagagcggcatgctagagaacattgaatatggtcactctagaggcggtctcagaactcagctcaaccagtgaacacgcaacccttcccggtcgtcggcaacagcttcgaacagattccatggtttttcttctgaaggtaacaccgagccaacagcgttgagtcttgagatatttaaagcgctggaaagagcaaaagttatggttgccttgccactaggaaataataatgctactctgaggtgtggaataaccgacaaaggagtttctgcagcaagcccacacacccaacacattagcgtgtagactgtggcaagctacgacaagcatactgcatactactacaggtaccgctaccagcgagaaagttcgacaatacgtacctagcagtcagtccatcttttctaagctggttgctgctgaaggtctattttctttttctgcgtatcggcccatatgctgcttgtgctaaattggaatttcgggtctgtctatattctgga

SEQ ID NO: 14862 - DNA, 575 bp, Zea mays
  Coding DNA Sequence Number=SeqID_459
agtaccgcgtggtaacgccgctggtggaggaaccggcgtcgcccgctgagctgccgcggtggagattgcgcggcatgtgggagctcgcctccgtcctcaacttcctccacgtgttccggccattgctgaacattccggtggagttcactgcagaggagctggaggacgcgatcataacacccaatggaacgttggatgacgttcatatgcctttattaaagtcaattcctccagtaactcgaatggccatgggacgtggaacatggatagcggtgttatgtaaaaaattgaagcactggtggcattgggttgcagaaggcgatataccgattgtagcctcacatggagcggaaactgagctttacaaggcacttgagccaggaattcgattagtgatcctgaaagccatatgtgatatacgcagtgagcaagaggacgttcggaacttcattgatagttctttgaagcatggttatcatctttccatcttccgtaaagaaaggattggaggagattcacatggaatctcatactggtatgaagatgacccaatccttgggcatcggttgtatcgt

SEQ ID NO: 14863 - DNA, 131 bp, Zea mays
  Coding DNA Sequence Number=SeqID_460
gcggtcagggcgagagaactagcgacaggcggggagcgcgggagaaaggggcggagcttctctctctctctgcccctttctctcgcgttccccgatggccatggccatcaaccggtcgttcccgagctcaa

SEQ ID NO: 14864 - DNA, 270 bp, Zea mays
  Coding DNA Sequence Number=SeqID_461
gtgtgtacgtactacaactgatgaattagcttcgtagcagttccttttgtataatatgtacatcttgcggaatgaaagcttgttacatttacattgaagagaacgacatgtgaagacttgtttcacaggggaaaaacataaatcagggtggcggcgaccctctctgccaagtcacagcattttgttctcttgtgttttgtttgtttccatgctgatcccgatcaatgttgttctgttaacgtattttcccggtaatacaaaaatagtgtg

SEQ ID NO: 14865 - DNA, 512 bp, Zea mays
  Coding DNA Sequence Number=SeqID_462
gcattgctatgatgccgtcagcattggcacacctcgtgaacccaccgttcttggcgttgcaaggttcaggagtttggtatgatcaggggatatctgggagcttttggggagcacagcaggaacggaatttcggaggttgtcaaatgccatggcagctgcagcaccaacaggcgcagcagcagtttgggaattggaactacgggatgcaggggcgtggcttaagacacgaaagactaagtaatacgaggagcgttggcaatgtgaggtatctggatagaaggcaggctaactgtgatgggggtgatcggtacaaagagaatgattttgagaagggtcgtcatcaggagggcatcttggacaaggaaagggagcaggagaagcactggaatcagagggatagacatggtggcgacaatcagatggatagaagagtacgtgcaaggtcaaggagccaatcaagtgatgatagtgatgacgataatccaaggaggcggcgctaatcttgggctcca

SEQ ID NO: 14866 - DNA, 536 bp, Zea mays
  Coding DNA Sequence Number=SeqID_463
ggtggactagattttgcacttcctcctcacaagtctactcaaatgacactttgcataaatgaggaatgcatgaatttgtgttttttttggaatgataactcacatgtgaagaatgaagtggagaatttatttcttatgagagatgtagtcaggacacacagtgcaagtgcaacatctgttccacaatgaggctcgggcctgtttggttcagcttttttctgaccagcttttctgagaatctggctgtggagagaatctggctgtgggaagaatctgagtattgtgtggattacgtgcggaggaagatcaagtggtccaaaaggttcaggatctagaaaccaacagattcctactatcatgacgattcgatcgattttgtgttcatgttgattttggacggtttttaccaaagcgattcttatagaagcaggctgaaaagctggggcgtttggcgatctgcagcagcttttggtggtcagaagctggaaaaagcccaaacaaacagggggcagcactgttttctaatactgtggttt

SEQ ID NO: 14867 - DNA, 525 bp, Zea mays
  Coding DNA Sequence Number=SeqID_464
aagcaccataactacatcactcatacaagctatatatgttatcgtgtttccacatttgcaaacactttacagaatcattcataaaagaactaatgcttcaagaagttcaaaagccttcacacaacaattatagcttcttgtatcctcctgttttaagacacaagctttctttgtccagaatttccatctctatgaacctgatgtgtacgtgtatctcgtctgaaccccctctagtagctcatgagtttcccagatttcttgtagtcgcacagacgaagactggtgacacctcgtgttccttgcggatggagttggggacgaacattgccgatagggggaagacgaggctgcagtcgatgacgaacaacgacagcgatgattagccctctccttgctccgacatggccgagcaatgcatttgggcgacgaagacggtggcgattgctccaggatgtcagtacccacctccgtcactgaggcgcgcgtgcttcgtggccactagactcgggatgctggcctacgcta

SEQ ID NO: 14868 - DNA, 584 bp, Zea mays
  Coding DNA Sequence Number=SeqID_465
gaggtcctgctaccctaaggcttaacgcccttgacactgtccattatgtaaaattgatctgggctgcactccaatcgataagcttaggttattgaatcctatggcgttcatgtcaaagaaatgcatagtgagctgatcacaatatacaggatgtgagatcaaaagtttttcccttcaaaaggaagaaggatctaaagaaaaaggagaaagaactccaggctatggaggccgagctaaacaaaagagaacggggtgccaagaaagatgaattgtgtcatggattccatcattgtatcagcgattaaaggagagactgctcccatgcagactgaattcccatctattagctccaactcgtttgcagcagttccaatcttcaggaaaccaggtcgtccggatagtctaggtgttccgctagatggaacgaaactgtcaacaaactacaacaaatgcaagaataaattaatggtcaaatatcatacccaaatcagccacatggctggaaatatatagcacaactttgtacccagttgtcaggttcgtcataaccatctctccaagagaatcaacccaagtacgcccaa

SEQ ID NO: 14869 - DNA, 396 bp, Zea mays
  Coding DNA Sequence Number=SeqID_466
aatgattattattacctcctgggagtatccgtggctctgggaatagctaagggcgttcgaacggtttacatgtctttggtgattcccacgtacgtccctctggaacgactagcggccgcttcgggaattcaaatgatggtgaacggggtgtttattttaatcggaggacctttcttgggctgggtcagggacttgactgggagttacagtctgtgcattgtccttatgaattgtgttacgttctcaacgattatcatgtggtccactgagtacatctatttttattttaaagacaaagccgaggaggagacgattgaaacggtggaagtcactacgaccaagtgatttgaaatttggaaatgatttaaaagactgcgaggattgtctggagaattg

SEQ ID NO: 14870 - DNA, 445 bp, Zea mays
  Coding DNA Sequence Number=SeqID_467
accagtgacgccaccgcgaggaaaattcaaaagtgagaaggttgtgagattgccgctgtggctgccctcccgcgatgtgaatcctcaacccgagggtgtccggagatactcgcggaagccacatggagtgattctagggccatgatgcgtagattctccatcagcgccgtctcaattgctcgccgacttcgtcctactccatcatgccgcacgtctctatggtcagccctctccaccgcttgtcagccgcgcgaggtcacgagtcatctgaaaagcaagttggtacctggaatcttaagtcccaggcaagttatgcccttgaccactttttacccaataatgttctctattatcacttattaatgcataggtttaattttgatgggaccgaataggtcaccctagtctgattatcttttactgtgtttacccctgaattatttgg

SEQ ID NO: 14871 - DNA, 437 bp, Zea mays
  Coding DNA Sequence Number=SeqID_468
atagcaaaactacccaaataattcaggggtaaacacagtaaaagataatcagactagggtgacctattcggtcccatcaaaattaaacctatgcattaataagtgataatagagaacattattgggtaaaaagtggtcaagggcataacttgcctgggacttaagattccaggtaccaacttgcttttcagatgactcgtgacctcgcgcggctgacaagcggtggagagggctgaccatagagacgtgcggcatgatggagtaggacgaagtcggcgagcaattgagacggcgctgatggagaatctacgcatcatggccctagaatcactccatgtggcttccgcgagtatctccggacaccctcgggttgaggattcacatcgcgggagggcagccacagcggcaatctcacaaccttctcacttttgaatttt

SEQ ID NO: 14872 - DNA, 575 bp, Zea mays
  Coding DNA Sequence Number=SeqID_469
gaagttgttaatcatcttgccaagaggcacggtgccgttggccatgatctccagcctagatgagtggacgtgctggaggagttctcgaacagaggtaggccgaacatcaagagctccggttggaacagtttgttgtgagggttgttggttgggtttttaatggtttaaaacaaaagctttcattttttttgtttgatcacaatgaataatccaatatatcttgccaacatagaccattctatagatctgctgattgtcagttttgattttttttggtttccaaattcagtctttttccttttccctaattgcagtgattatcaaaggatggatgagaatgatcagtatgagttagtagctttagatgaatcactcgaggatgagaggaatcttcataaaatcatggctggtcgaagggcggttgaagcagaggttgatgctaggtacgtgaggactggtgcagcagatgacataaagcttgacatgtagaactgagagacttcgccggagagcaagatatgaactatttacacttaggatcaaaattaacaccagccctgttgaaattcgttcag

SEQ ID NO: 14873 - DNA, 467 bp, Zea mays
  Coding DNA Sequence Number=SeqID_470
accgccaccactgccatgtccgccacctgtgtccgtgtgcaagtgcccagcatggacaccgtgccagtgccgcggccacccgtggtgactatggtggcggcagcggtggatatggtggcaactacggcgacagggctggtggtggctatggtggtggtggtgattatggagttgcaggtggggctgaaggcagttttgctgctggaggtagcgacagctttggcagcagtaactttgctgacagtggttttggtgaaaaccctgctggtagctttggcgcaatgggtggttccagtggcgctgatgggttctctgccggcacacctggtgacggtaacaagaatgatgaaatcatggatgatctcttcaaggacgatgagcctgacagctacgccaacaagaggagctaatttgtgtccaccaccaccatgcgaggccgtgtggattctagcccatatgtattcggt

SEQ ID NO: 14874 - DNA, 317 bp, Zea mays
  Coding DNA Sequence Number=SeqID_471
tcatccacttggtaggtcgcaccgtcaagatcgactccggggaaacatgcaatcggggcagagtgaggtctgggtgtgggagattgacaccgccgcggtcgaatcaagcctatggtgacgagggtgtccacggaatcgggcctatatgcctcgccatgtcgtgcacgatacattcagagcatcgcttgggtggattcgtgcttggatggtgggggattgctcatcgatgttcaaaatttgtcgtcgaccgcccccactgtggccttatggttctgtgtcgccgcagtggaagtaaggtcaataacaggttccacagg

SEQ ID NO: 14875 - DNA, 460 bp, Zea mays
  Coding DNA Sequence Number=SeqID_472
aatctagtttgaactgtatcctgggggcttggactatctggagacaccacaatgactgtgttttcaatggtgctcagccttctatagctggattgcttatctcagccagtgatgagttcaatatgtggtgttttgcgggggccaaaggcttgacccgtctttcggacctagcttttgtattcaaccccggctaggtggcggttattcctcttgttgtttgtgtgtgtgtatgagtggtgtgttaggtcattgtaaataccatccttcttctaatgaaatgatacgcagctctcctgcgtgttcgagaaaaaagtttgaactgtatttgcattcgacaattggtaagtagtgaattagtggttgtgtgtgcagactgcagagcagtaagatgagcacttaagtagcggtttaagttagcttgaaattaatatttcctatcatataaaggaccaatggttct

SEQ ID NO: 14876 - DNA, 576 bp, Zea mays
  Coding DNA Sequence Number=SeqID_473
atagagctcgatattgcatttgcctccgagaaattattaaatttggagatgctggtgatggaaattgctcgtcaggctactgactttgagccttctacacttgaagatgagtccatttcttctgagatcgcagagaatgctttggaattggacatcttgtatggtattcttgatgcagaagtcaaggagctacataacttgattagttctctccaagctgatgttaaaagtatagagcatgaggtttatgaagaagagtctggaggcaaggtaaaaactagaatggatgcagctaaattgtccttgaagcagatgcaagagctaattgctgatattcagaatgaatctgcaaagtttgagaaagtcgttgagttttcccaggataaggaagggaccattgaagctgttggatgtgataatgaccatctgtcatatcaaactggtgcgcagacagaagatcaacacagaaatgttttacatatgttagaacaatccatagcaagtgagatagatcttgaaaagaaactctctgattccatatctgtcatagaagacctcaggctgaagctccatcat

SEQ ID NO: 14877 - DNA, 551 bp, Zea mays
  Coding DNA Sequence Number=SeqID_474
aaatccatcaccaccggtgagggcagagtcgggttgtgcgccgccaccatcgatccccggccctaactccattcaggaatcaaagttgtgtggtagagattcgacgttgctgctgtcggatgttcgtggcgggattgggcgacaccgaccattgggacgatcgcaacgagcatcggatccgcccatcgccgcgaccagcaccaaccaagcatccatttgcgacaagcaagccactaaggaccctggtgttcagtaggtggataattctgagcaggagctcgttgaaggatttatgcaccacagcaacacttctatatgaattgataaagaatggagtggcatttcaatggggagcagcgcaggcaacaagattttgatgctactcatgtcaaagctcacataaacaccgctgctacaacttcaagaatttaataagaccttcgagcttgagtgtgatgcgagaggcattacaatggagaactacacattcaaggaagtaaacctattgtattctttagtgaaaaactacatgatctagctttgaattttct

SEQ ID NO: 14878 - DNA, 373 bp, Zea mays
  Coding DNA Sequence Number=SeqID_475
ataatgtgagtgattctcctctccccaatggcccaattcctccccttttcgggaaaaatttctgtctcatgcaaacactttttttatagtctatcacatccaccacttccgaacaaaaaatagattaaaatttacagcttaactcttcgataatttatttttttctatttatatggaccactgtatatgataggctgtcaaagagattctttgcatcccatacaaagaaattttccccttttcgctatctatccattggattgttgaatgttgtattgttaattttaaagatcttagagagtttaagtgatcattaatttgtatagtggctcggggcgtcactttcaccttgcatcccatgcaaagaattttt

SEQ ID NO: 14879 - DNA, 519 bp, Zea mays
  Coding DNA Sequence Number=SeqID_476
agggcattctccgatcaacaatcacgcgcgggggtggcaaattgagggcaagtccacgccgacgagcaagctactgtgggatctgaggttcaacaagtagagatagctgagcaggagctcattgaagatgtttaggatggattcatctggtaggagatctagaccacgaaggtcgaggggttccagtggtactcctaacatgtttgagggcaccacaacaagcaggagcaggcaagagcagttgcttgcctccctagagcagatgcggggtagcagcggaccctctaatatagaaggggctacttcgcgtgcagctgcttcagtggcacctactgtggaggcggctatggacgaggaggctgaggaagctgtcgcagaactggacgatggagaggagacttcgggagcagacgcttctacataggaggtgaaagggaaatgtgcccttaggccatttctataatgttttggtgattaagtgtccaacacatattaagtgagttgattatgtgccaaaca

SEQ ID NO: 14880 - DNA, 445 bp, Zea mays
  Coding DNA Sequence Number=SeqID_477
ttccctttcacctcctatgtagaagcgtctgctcccgaagtctcctctccatcgtccagttctgcgacagcttcctcagcctcctcgtccatagccgcctccacagtaggtgccactgaagcagctgcacgcgaagtagccccttctatattagagggtccgctgctaccccgcatctgctctagggaggcaagcaactgctcttgcctgctcctgcttgttgtggtgccctcaaacatgttaggagtaccactggaacccctcgaccttcgtggtctagatctcctaccagatgaatccatcctaaacatcttcaatgagctcctgctcagctatctctacttgttgaacctcagatcccacagtagcttgctcgtcggcgtggacttgccctcaatttgccacccccgcgcgtgattgttgatcggagaatgccctcccagga

SEQ ID NO: 14881 - DNA, 382 bp, Zea mays
  Coding DNA Sequence Number=SeqID_478
gcgctcgctgaaacggtgatcgcgtggaagtgggagaaaggcccgggtcgttgccgcgagtgcgccattgacgaggagactcggtcgtgggcgcggaggagggctgctgggcggaaggaagaccgtcgccgagaaccgaggatccgcgcgtgggagaggtgccgcaacctacctactcgcgtactacatcaaccgtgcttcggcgagcgtcacaagggggttcaccggtgcacgctggtcgttccgtggagtgattggagcttggcgcgtcagcaatggctcgtcgcacctctgcgccaccacggatttatgcccttgccgcggacgcgtcagttcacgtcgcaaatcattgcgcgaggacatgtgttcgtgaaaagcaaat

SEQ ID NO: 14882 - DNA, 389 bp, Zea mays
  Coding DNA Sequence Number=SeqID_479
ggtaccaatttgcttttcacgaacacatgtcctcgcgcaatgatttgcgacgtgaactgacgcgtccgcggcaagggcataaatccgtggtggcgcagaggtgcgacgagccattgctgacgcgccaagctccaatcactccacggaacgaccagcgtgcaccggtgaacccccttgtgacgctcgccgaagcacggttgatgtagtacgcgagtaggtaggttgcggcacctctcccacgcgcggatcctcggttctcggcgacggtcttccttccgcccagcagccctcctccgcgcccacgaccgagtctcctcgtcaatggcgcactcgcggcaacgacccgggcctttctcccacttccacgcgatcaccgtttcagcgagcgc

SEQ ID NO: 14883 - DNA, 573 bp, Zea mays
  Coding DNA Sequence Number=SeqID_480
tgccttgttctgataaccgaggagaatgaagcagtggacaaattggaggacaaggatcgtcgcagtcctgatctaccatcattcatgaaaagaaataagaaaccaaagttctgtcataatgggtgtacacagcgtatccatgcacttaaacagcagactcaaagtacagatgcattcctgaagcaaaatcagaagcaggccactgcattcaatagccactcaaaggccagaaagaaaaatgctgccaaaaactcatgccacacaaggtccgtcacggagcagatacttcaaacgaaatttcttggtaagttcaagcgcaagagaggtagaagaaacaggcctagctataagcatgataattccagtgagcacggggaagcagaatacaagttatctgatagatctgaatctgacggaaatggctgcttgctgctacttcaggcacttgaacaggatctttcacctccaaagttgtccactgaacatgatggggaggccttaactgacctgaaggaagatttcgaaatgagcgggggggatgctgagttaagtcggtgtactgctttctcggaa

SEQ ID NO: 14884 - DNA, 508 bp, Zea mays
  Coding DNA Sequence Number=SeqID_481
aatgatttcaaatccgccgctccggggcgtatcaattccccccaggccccaggcccccaccccacacatgccacgcgtcgctctcgcgcggctgtgtgcggccgtcgacccatccgtctgtctcacggcggactcccagctgcgcgtagcaggtgcaatgcaaggcccgacgtcggatcggagtcggccatgcatgatgcgtcccaggaaaaacaagcgaacctggcaaaaagcgtcgttcgttttggtggtggttggtggtgcggatgatggcgcggtttgaacggtggcgcgtgtctgcctgcagtgtgtcccgcgtgcgtggctgtgcctgtttcgctggcccccgtcttaatctgccacttaatattgtgtgggctgccgttggtggacctgtctgtgcttatgggctttctgtgggctgtcgcccrgtatgcgctgggcctgtttacatatatgtgtgctgggccttcagtagcggtatgcatgggcttcacttaatattgta

SEQ ID NO: 14885 - DNA, 291 bp, Zea mays
  Coding DNA Sequence Number=SeqID_482
gccgcgcatccggtatggaataccttttctacgttgctctctcctgttacttcagagagaaaaaaagcgatcttgggtgccgacgcagtgtaaaaacccgatcttgggcgctctttacagtttaactgtgctgcgcgtttggatctcacgagtctgaaattccgatgagtgatatggtttctagtttaacgacgatttggctggttgcatcccacagtagtactttgtagtcgcaattcgggatgcataagcgtaaatctcacaaaactttacctcccagctttggaatga

SEQ ID NO: 14886 - DNA, 143 bp, Zea mays
  Coding DNA Sequence Number=SeqID_483
gagtgcagtggcacagtcacagcccactgcagccccgaactcctgggctcaagcaatcctcctgcctcggcccccccaggtagctggaaccacaggtatgcaccaccacaccatgcaccacctccagccaatttttgtatttt

SEQ ID NO: 14887 - DNA, 480 bp, Zea mays
  Coding DNA Sequence Number=SeqID_484
aatttctacggaagctttccactgaagaaaaaaggtttttgctgctgaaataaaaggagggcgtagacgaccaatgttgaacaagttcatgatgttatcacaattaatatatatctattacctattgtctaccttagtttcagtcccctaccttatgtaacgtaagttgactaacgatattgacactcattttatgttacaacggcgttggtggtcgaaactggagatggatgggacgccggctcgttgcgatcacgtcgcgatggatgaacggaagaatcaatggggatggatggaaccaatctgctcggcacgcctaaatttataagggtagaagtagaaccaactaaccagcctgtccgtccgacgcggagtctgcattttccagcccaacaaaatcctggttcgatggctagtgacgtgtcaaatgtactccctatgcataaacacatctctcctacgttgctgttgtgctagata

SEQ ID NO: 14888 - DNA, 563 bp, Zea mays
  Coding DNA Sequence Number=SeqID_485
aacggatcgagcctgcgtgcatatgagtgacaymcccgatcggtgagggcgacgggtttctacaagacttgcaagttgcaggtacgagctcgcgtgcaagtgctcagctgcggccattgcacagcgcrakccgcgagcggaagggacaaaagcatcttgcccggctggcgcggcmrakaagaccgttcacgcaggcacaggccaggaggaagagtagcaaagcaagcgccacactykccgcgmgcatcccgtgcagcgtgcgcaggagaagcacagcagcacgaccccgggcattgacgcattgttaacggcagatagctacatggatttagttaagaaagcctataaattttagtgcgagttgaaaggcggttcctcgtgattttggccccatgattttcgatacgcattactagtatttctcatgtatacattaagtagctcgatcaactgtgcacatgcgcatttacagctttgctaggatagataaagaattagtccctgtaatgcagcaaaaaaaaatatcgtggcttgccatgcatgtgttcatgacaatcgaccat

SEQ ID NO: 14889 - DNA, 175 bp, Zea mays
  Coding DNA Sequence Number=SeqID_486
tctctcctctggctatgcccatgtcgcctctccctcaccaaaaccgctcgcccagccgcccatgacgctccagatcagcaccttgctgctcgccctcgtcttcctgtagctgctcgtcgtgccgccagatcgacgtctgctcgctgctgccgtgtagactatgatccattccgag

SEQ ID NO: 14890 - DNA, 580 bp, Zea mays
  Coding DNA Sequence Number=SeqID_487
ggaacgccgtctgggtgatggttgagggagaaaaggtacccttgtccaagacggctctgctcaaatactactacctggcgcgcaaatccggcagcggcggcggcggcggcggctgcggtcgtcgtaatggacggccgtctcactctcaccgcgacgagttcgtctgctgcacgagatgtggcaagggtaggaggtttcggctccggtccaaagaagagtgccgtgcttaccatgacgcccttgccaaagctcactggacatgcacggatttgacaactgatagggtcagctgtgccgacgaaraggagcgcgcaagccgcaaggtcctgcggggctgctcccgcgcaccgtcgtgcaccggctgcatgaagtgcgtytgcttcgggtgcgagacctgccgcttcgtggactgcgactgccagacctgcgtcgacttctaccgcaactcatcaaaggaatagtaggataggattaggaggagggtctataaaacaccmccggttccattatattggccaagacggcaagaaggtcgtcaatgcaattgcaccatcaggctgctattctattttaaacattt

SEQ ID NO: 14891 - DNA, 567 bp, Zea mays
  Coding DNA Sequence Number=SeqID_488
cttgtcatgtgatacttccttttcttgctagttccacaaaaagagatctgactgagtctagcatctagaaattctcctcatacaagtgatagtcccccactgtgttcataggaatgcttgacaggctggattcaattacagtagatttctttccagaagatagatgtccacactgccaagtacccaacctcttctgagtcttgtcacttacttatttcatctgtgctttagtcactcataggaatcttcaaatatttgataggaaaaatttccaccttgcaatgaagaagtttagatatcctctctttctcctgatcctcagccccaacaacagaaacttaacacttctcaaagttgattttcatccttgattttcacctctctcaccactcaaatcaatagctacagtgtcccactgaactgcttgtctggtccaacctcgacgagcgccttgaggagcgggttgttgagggccgaagcatccatgggccgatgtcgatctgctgctctgccctggcggcgtgtgcttcctggaggtggacgacacgaggctttctatctgttttt

SEQ ID NO: 14892 - DNA, 564 bp, Zea mays
  Coding DNA Sequence Number=SeqID_489
gtaagtagcgcctaataacctacctacccatgaaggcgtctgaaaacacaagaatgactgtctttaacagtgcacaatcaagcatcctggtagtactgcaagaagtagctaatgagagggaccttcaacgcttggctggggctgtagcactccaggatttgcttctaagggcgcttaagtgtgggcgggtccatgctgctccccttcggcggctgctgcgccgacatcgaaggggacgacgactgtagaacctgattggattcgcttgttcagattcaaacatgaggatgttgcatgtagaaggcattttgctggacgccgatgatgccctccgtgagccggcgctccttagcatgggggcgacgcgacgccctaactaacacgaggcgcaagcgcggtgcgggtccaggcaagcttgaccgccggccctgggcggagaggtgggtcggcggcggcataaacggacagcggaggaagaggaggcagaggtgcggcacaagggaggtggcggacaagagacggctgagggggagaggtaggctagacagcacgtgagagaccgag

SEQ ID NO: 14893 - DNA, 63 bp, Zea mays
  Coding DNA Sequence Number=SeqID_490
tagtgtaggttagaaaatgagcagcgctgctgattgcttatctattgagttccttttattttt

SEQ ID NO: 14894 - DNA, 562 bp, Zea mays
  Coding DNA Sequence Number=SeqID_491
ttttatcttccttcacatgtaatcctaatactcagattctctacacagccagattctctcccagctagattctcgaaaaagctgatcagaaaaaagctaaaccaaacaggccgtgtcgagctcagaggcactgcacgccagcgacacgttagccatgtgagtgaccaacggcctctcccggggacgggcaggttgggaggacgagcaaacgacgtgaggcgtcgggcgtcgtgggtgcagcggtgcgaacggaccgcggactggactcggtccaaagtccaaacacacgtacgtacacggtacacggtcccgtctggaggccggagcttcacatcgctggccggcctcccgcgaccgagaagattcgcgccgagatgtcgcggccgtgcttcacatcactggcccgcccgctcgttccccggtatcggaactttgtccacctctgcgctgctggcctcctgctgctcctctccctcctgcagcgttgccgtccacaggaacaggacgggacgggttgagaaaatttcagcgaaaccatcggcggattacataagacgacagc

SEQ ID NO: 14895 - DNA, 598 bp, Zea mays
  Coding DNA Sequence Number=SeqID_492
agaagtgtgcttacattatagataatgtcacacccgaatttaaaatataaagtcgggtgtgtttcatatgtgcgctaaaaaagaataacacatataatgaccaagtgtatagagataaatgtcataatcattattacatagcggaagagtcttacaaaaataaatgataacaataaagcaaactaaataattattccttggcgctatcaagctgactgggagacgccacctagattagctcgtactcctcgttgtaggcctcctcctggaccacctgttcttttccttccacgagctcctgctcagcgatctccacctgctgaacacctgggtcctcagtggcttgctcgtcgattggaatggcgacgacgaggaatgaatccacagcgacgctggctctccggcgagcaattcgtcacgcaccggcgcgccctacagcctgcggagacgccccgcacgattctggggacgcggtggagatctcaggcacccttccccggtgattgccgacgatggtacgcgcggtcacgacggtggcggatgtctccctcgcacacggtcaaatgcggcactagctacggcataggcgcgatttttc

SEQ ID NO: 14896 - DNA, 109 bp, Zea mays
  Coding DNA Sequence Number=SeqID_493
agggagggacctatagttgcttcgacctgggccggtggctggaaggaaggtctgccgtttcatcccagcgctgatgcccgctggcgtttgttggctagggagactctga

SEQ ID NO: 14897 - DNA, 564 bp, Zea mays
  Coding DNA Sequence Number=SeqID_494
ttaggtgctctaatcgggtcgaatgtgctaatggagcacccacccacctywctctcacctgtctcgtcgtcatttcctcctaaaatccccaagcctccaatccactgaactaaaccctagacatggcgggtagagactactgccggttgccggtgcgcccgcgcgacttctgaggccccgcccccgtcccggcgtcgccggaactggctccactgtcccccccatcactgggactgggagagtgggagttcagagccgcagacgctggggcgccgggtcaccggaaggccgggaaggaaggtgtggccgcaagacgcaggcaggaggcatcgactcgactcaccatgtctcagtcaccgggaggacgggaaggcatgtttagcacgacgttgatcgttgccgttgccagtgtttcttcgatttttcttcttctcttttctagatcgtagagctttgacaaatgcagaagcgtagatcacgattggctcgaggtctccggtctcgggaacacccaatactagwyktaccctggctccgacagatgcgcgcgaccgataatccgtt

SEQ ID NO: 14898 - DNA, 575 bp, Zea mays
  Coding DNA Sequence Number=SeqID_495
aagcaggagctgagtatcctccgccggttcctcgtcgctacctccgccgccaccgctctgaggaggggcatgatggccggatatccgtggggcctctgtgaggcgatcctcgccgccacgcataagggcgaagcgagatcagttaggcgtcgaagcaggaggagccgcagccacacgccatcagggaccaactgcatttcgtctcctgctgcctcaccaacccgccccatggcgtacgcccttccttccctgtctcctctgcctactgttctcatcgccgccgcctacatccgtcgcttcttggatctttgttgtgggctcgtgactcacgacgcctgctaccggcacggtcagtgctggcgcaacgtctacgacaccatatcctaggcccagaggctctacctcaacggatggtccgtgttccacaccatccacctggtgcgtgatggccaccaggacatggcactcggcgacctgctcaggaggaagtcgcaggacggcgtgcaggtgttgttgctcgtggggacgatcccacgtcctggagcactttagcatcaagatggtaccaggcatat

SEQ ID NO: 14899 - DNA, 577 bp, Zea mays
  Coding DNA Sequence Number=SeqID_496
taatctgcctctattgctcatcaaatttgtcgctgtaatgcagctcagcaaaacgatcagaatgcttgtttaccccaagcatttgcagctccagaaaaaaaaaaaacatatgaacacccagaaccagtgtccctccacatggttagaacaggttgtttagcatgaatggtgccatggacaaattcaagaatgaccataagatccatcaccatattcacaaagctaagcgcagacgcagccttcacagttgagttccatcactccgtttctcttcttttctgaaaggtgttccctccctgaacattctgttggatgaggtgttcatttgcattcgaatttcagaaaagacatggtatgttcctaattgatggcgatgtgccaatgtggttcatccttgcctccagcgggcagcggaacgccaagccgccaatgccagtcgaggctgcccgctgcaccgcacagcgcgcgctacgtgctgccacgcgcgcgggagcggctgtacgcctgcggcaccaccccatttgtttgcaccgcttgttgtccctagatttagccgaactggcgctaggatttcatg

SEQ ID NO: 14900 - DNA, 569 bp, Zea mays
  Coding DNA Sequence Number=SeqID_497
caaaaacctaacctagcgcctagtggcttgctggcgcgtcctctcctctcctgctcacacgccgccgccatccctagctccctgcaaggctgcaaacgccgctctctccagtccacacgctggcacgctgcaaattgctcaaagcttgcgtattctctaaacgcgactgagaagagcgatgttaacagcttcggtgtcgtactgctagttgcttacaggacgtagcccaactgatcaacagtttggcggtgaaaaggacatgtctcctgggtttcaatccatttggcagagaaagaccctgcttctgttcttgacccaaaagtaagcaatgatgcatcagatcacatgatgaaggcgttgcatattgctattctttgtaccactcagcttccatctgaacggccgacgatgagagagatcgtgaaaatactcaccgacattgatcggttgatcctagctccaaagctatgagggcaaagaacaagactgataagtaacagcgacaggctttgtcttagtaagatataccaataataatcataatgtcttagtaagacttatgtgctaca

SEQ ID NO: 14901 - DNA, 459 bp, Zea mays
  Coding DNA Sequence Number=SeqID_498
gcacgacagactatgaggaggtccatcgacgtagggctaaggtcctcggtctgaaggcggaggcggactgccacaagggggtgctgcggcatgcgcaggagggcctccaggcggtgatgatggagcgtgactccctcaccaaatccctagaggatgaacagtccgagtgctgggctctaaacacccggataggatatcttgagaaggatctggaggccacaccccggaccgtggagcaacaagggaccgagctgagggaggtgtccgaggcggtggcagacctcttctaggacctcgacgtggtgggcgtgcctcggggtggacccctcggcctcgtatgcaagccctgagtgacttcgtacggggtgagctccgcgaggccgtccacctcggggtgaagcgggccctggccatggtcgcctcacactacgagatcgacctcgagtggatgtgctgtta

SEQ ID NO: 14902 - DNA, 572 bp, Zea mays
  Coding DNA Sequence Number=SeqID_499
taatccttttatattatagaacagatagataaatttggcctatccgttgaaaaaaatccggcacctccatcaaatcagatctcacgcccctgcagccaaaacaaaatcagcatccggatctccacattccccaccaaaaatcatcctccggacgaaatcagcggcggcggayatgggagcggagtgccggtatgaggtggcgcaggcggcgtacatcaagctggcgctgcacgcactgaagcacccggcgaccgccgtcaacggcctcctcgtcggtcgcctcgtcgagccttcgtcctcaccggccgtcgtctcggtcattgacgccgtgccgctttctcaccacccgcaccatctgccgctgctccccacgctcgagctcgcgctcaccctcgtcgaggaccacttcgcaacccagggcgaaggcctcgccgtcgtcgggtactatcacgccaacccgcgctgcgacgacaccgagctcccgccagtcgccaagcgcgtcggagaccacatcttccgatacttcccccgctccgcggtgttgttggtgagctacgtttctttcgttattt

SEQ ID NO: 14903 - DNA, 599 bp, Zea mays
  Coding DNA Sequence Number=SeqID_500
gtgagagccagtgtcactaccgctactgtggtttccggtgaggtctctcctctcttccttccggatctcctctttcttcattctccatttccctcaaggtgcagaacgaggccctgccggaaccaccgcgggcttgtacctcttcgccttctccatggatgcatcagctccggtgggcgccgcgggggcagaggcaggggcaaggtcgctggacacctaaatcgtgccaccgccgttggcttggaggagggggcagtgacgaccgggtagtacgccgcggtggcaggtaccgcgggtcccgccgcggcccgcgtcggctggagcttgcgccggcgcttgggggctaattcctgctgctcgtcactggcgtcctcggatgccggctcggcggggaggcggaggatgccgtcggtgcccgtgatggcgatcgcggggaccgtgccagtgcccgtggcagcgatgatggatggctctgactcctgcagctgtctgccttgttgattgagcaagaggaagacatgtgtaggcatgaagaaaagtagcaggattcctgtacagttgtttcaatgaaactccagtgagcgctacatgtccaaaca

SEQ ID NO: 14904 - DNA, 573 bp, Zea mays
  Coding DNA Sequence Number=SeqID_501
gtttggacatgtagcgctcactggagtttcattgaaacaactgtacaggaatcctgctacttttcttcatgcctacacatgtcttcctcttgctcaatcaacaaggcagacagctgcaggagtcagagccatccatcatcgctgccacgggcactggcacggtccccgcgatcgccatcacgggcaccgacggcatcctccgcctccccgccgagccggcatccgaggacgccagtgacgagcagcaggaattagcccccaagcgccggcgcaagctccagccgacgcgggccgcggcgggacccgcggtacctgccaccgcggcgtactacccggtcgtcactgccccctcctccaagccaacggcggtggcacgatttaggtgtccagcgaccttgcccctgcctctgcccccgcggcgcccaccggagctgatgcatccatggagaaggcgaagaggtacaagcccgcggtggttccggcagggcctcgttctgcaccttgagggaaatggagaatgaagaaagaggagatccggaaggaagagaggagagacctcaccggaaaccacag

SEQ ID NO: 14905 - DNA, 518 bp, Zea mays
  Coding DNA Sequence Number=SeqID_502
gccacttgaacctgctgcgcgacgtcctcggttgctggaagtggtgctgctgagccgacgtggcagtgggctgtgcaggcggacctgctgtagcgccacttcaacctcctccgcgacgtcctaggttcgtcgccgccgacgccatcagagaggaggccaacgagctggtgcgcatcggcagcgtaaagcgcgcgctgcgctccaagtccggccgcgcgcccgcacagttctcgcgctcgcacttgacgggccactcgctcgcagcgtccgccaccaccggtaccggcggcggcgccagcacggagaggttcacgctgcgtctgcccgaacacatgcaccttcagtcttggcttagatttggtacctccatgatttcaaatttagatagtgcaattttgttctcagcatagtgcaatctactgggaatttgcaacaccagttaataatggcatgattatggcaacactgcccttagcttttcaggttagtaaaatttcttgattcagtagcacatgttg

SEQ ID NO: 14906 - DNA, 536 bp, Zea mays
  Coding DNA Sequence Number=SeqID_503
attccgggtagtcggccacgctccactgctgtcgctggcatggaagcggtgacgtagattctcgacgcgatggcgcatatggagctccacttgatcggtgcgctggcgggcggtggtggcgagcaaggccctgcatcctcctctgccaccatcacttcctctgccaccgcgccacggtacgagtacgacgatgaggtcttcggctcttcggcggccccagcatacgacgacgacctgcttggtgccggccccttcctcaaccccgtgacccccccagacgcatgctaaggtggacaagccatcccgcgacgagatcgacaaggtgtaccagcttggggacaagccggttttcaaggccgggggaatgtcagcaacatgctagggaagagacggtgatgtccagcaaggagcagcagcagaccaggaaaggtgaaagcacgcaccaaggctgaggcgtgggctgtgtaaacgagtggccgtgtgttggcttcaccgtgaagggtatttgagtcttgagtctgtacgaactgggtatc

SEQ ID NO: 14907 - DNA, 583 bp, Zea mays
  Coding DNA Sequence Number=SeqID_504
gagggtatatcaccggtgactccgagcgtgtgccgccaccgcggggcgtggagggcgcagcaccggtggctctacgtgttgccactgtcgcccatggcgttcgtcgcttcgccaccactcgtcgttcgtacacccctgtcggtggtaacactctatctcccggtgctcccgccctccgtccgtagcgccgcgcagcatcgataggtgcggcaacggcaggtcaaggcgaaggcggaggcctggacgtgagccacgaaggagtgtgccacgttcgcgctttgcgaccttgccaaaggaccacaccgactcactttgccccggcgtcgatgccgccgagtctgccgcaggggaacatattggctgcggtgttgggcattgctgcagcatgagaacgtgacaaaggagaacatccaggcggtgagccgtatcctagagattattgccatggaggtttttgctagatatggatggaaatataataatagacttcgtccctcgtaatgtactttgttcctgagagatcagccaatagatgaaacaatgtaataatacgctgtatgcggctccgcagaggcaggaatca

SEQ ID NO: 14908 - DNA, 594 bp, Zea mays
  Coding DNA Sequence Number=SeqID_505
gccactacctccgatgtcagtaggaatcgatgtcatcgtcgtggtgcactcaaacccgaacaaagggaagtgcatgagaagaaggggatggagaggatataggtggcagaccacatacctatctcaagtcataaagcgcaagagggggcgactgactttgcctcggcgacctcaacctcctctacaaccagtgcggtgatagagagcgggtgctgtcgcatgatctaccccacaacaccgtccactcaactgaaggccatgacgtccaactcggtccccattcttcgaccaatgacaacccctcctcgctcgcgtcacgacagctcacgcgcggagcaactgccaccctagctagttatggcgcacgtgccacccgtggcgtcggcaccggcctgagcaatcccctgccagtggctgggcctaggtaggtttgtgggagaacggcgatgcaaccatagacggtctagggtttgggggcaggaatgtatgagaatggcataacagggaatcatagaacatggaatttcagcctactccttgcagccttaataagtactatggatggatttgccttggtgcataaaagtcatgtct

SEQ ID NO: 14909 - DNA, 515 bp, Zea mays
  Coding DNA Sequence Number=SeqID_506
aagaggccacgtattgagctagatatgaatgatatagttgcagatcctggtcttagaaaaccaattgatgagttcccccatgaaatcagagatgatgctaaaagagcttatttacaaatgggcccatgtcaaccatttggtcatacatttccacggacaccggaaattgaagatgaaaagattttgaagcattttcaaggcttaagaactcggaagataaatttacctcgcagcatcaactcatgaacggtttcgaattggttcataaacgcgagggttcgtctgtggaagccgttgatcgaggagatgtaccaggaccttaagaggagctcgggtgcaggaggaggagggcacggtccggcgatggagccgcagcagcacttgagcaaacgttgaatttgcgagctggaagatggtggccagtgaaccatccagctccatagttgcctgctgtcgatttaccattggcccttgtagtttccgtgtgctatgtttttgtacatatcattgccaac

SEQ ID NO: 14910 - DNA, 437 bp, Zea mays
  Coding DNA Sequence Number=SeqID_507
tagacgcccagagtctcggaccgatggttgtgctgctcatgcaagtagcaagcctgactaggactggcagttgtcctcgtccaagcaccagtcctctacaatctgtacagcacgggagtggcagtcagagaaggtgctcatgaaaggatacaaacctgtagaatatgatcctctttggtttctgtccagttgccctccagaaagatatgagaagctccctgcacaaccaacaaaagttatgcatctagaggaatccaaataaccaagtcagtttgttgcttttgcaaatctattgccmcgacaagacaaatgttaatatgaagaaaaaatgggatgttcaacactccaacttaggcatttggatatggagtgcatggtggccagaacatttcagagcaaattttttacatagtggacatttttaccactatcttgta

SEQ ID NO: 14911 - DNA, 506 bp, Zea mays
  Coding DNA Sequence Number=SeqID_508
accaccgtgaggcacccgattgctgcaacctgttccgtctcgtcgtccattgaagcgtgaggtcacgagtcacctgaatatcatcctggtacctggaatctcaagtcccaggagaagaacaagtggttcaagaggagccacatcgaggagttcgattcgatctaggtggcgtctcccagttgactttcttgcgccaaggacgatccttagttggttttatatttatcctttattttgtttatgcatccgggggttctagctggattatcgacagcagatgcacaaaccacatgatgggggagaagaagatgttcacctcctacatcaagaacaaggattcccaggatacgatcatctttggagatgggaaccaaggcaaggtcaaaggcttgggcaagatagccatcactaacgagcactcaatattgaatgtatttctagtagagtcgcttgggtacaaccttctgtctgtaagtcaattgtgtcacatgggttacaattgtcta

SEQ ID NO: 14912 - DNA, 566 bp, Zea mays
  Coding DNA Sequence Number=SeqID_509
ccaagcacagcatgcctaacttcttcacgcagttcagccagcaggacaactggccttctgtgttgttcgcgatggcaggcagtgtcgtgcacagcgacgtctgttgagatggttgcttgcataggtatagaggcaatctcgaggttgttattcttcaatgtttcaaatagtatgacttctgaagctacacaggctctatggagacacacatctataagtgaatggtgtttcatcaatgagggttcaatcaattgaagtagcagaggtgacggctagcggtggcatctttgtgcaatytgatggagagcatttcggcgttytgcgagccaaattttcagttctccctggtgtagttgatttcttctgctagatcaccacgctccccttcctattcgactggatgaaagatggacacttctggttgaaatgatatggcaatcgggtagctgcaattcatctcttgctgtacatgagacaattagacaagttytaccgtgctytagtactccaccatcaatgcaatgcatctactaatagaattgcagcacatgtacattaatctctaa

SEQ ID NO: 14913 - DNA, 592 bp, Zea mays
  Coding DNA Sequence Number=SeqID_510
accgcgccgggtggccagcagagttcgcgctggctcctacgccgaggagtcctcgccggagccaggccggctgcgctcgagccgtggtcggcctcgttcgcccgtggccgccaagggtcaggttcgcctgtggcgaccaggggtcgggttcccccgcccaagccggagtcggggctcgcctgtggccaagcgcgcccgtgctggggccagaccgcgcccgcgccgggacgcacggctgccggggtcggaccgcgattgcgcccgctcgccgggggtagccgccggtcctccgtgcgcgcccttgggccgccggtccgtgcccgcgttggggccggtccgtgcctgcgtcggtgaccagccgcgctcacgtcgaccaacgcgcctggagtaggcgcccacgccgggaggtgccctgcccacgctttgcagccaggggccagggcagcgcgcctgcgcgacgaggctggtcgccccacgccgtgcagcgggcgtaggagtgatagattttgttcattaattatgaactttaacttgataagtttgctgtccgtaccttgtaaaatcagacttctctgattacatgaaggtgcgc

SEQ ID NO: 14914 - DNA, 347 bp, Zea mays
  Coding DNA Sequence Number=SeqID_511
cactattattgttgatttcgggtttaaggatattctgaaaacaatggttcataatctctactaatccttaagggtggacggagggcgtccaccaacgaatcacgcccgcgcgcgaatcgcgctccacagatgtcgtcgggtccaagaagcagagcctccgcgctccacggaggtcgccttccgsgtggacaacagcgcgacgagatgctacaactacactcatgacagcttcaatagcatatctgcattttttcctcatcctcagaatcttctctcttggtctgttcttccccctttcgtttatggcttacgaagtgctgaatttttagatccggatctctctctct

SEQ ID NO: 14915 - DNA, 428 bp, Zea mays
  Coding DNA Sequence Number=SeqID_512
gtcgcaggaaccaccgccgggagaagccaggtccggtgggcgatttccaacgcccagacgtggctcagcgcgtccatgacgaatgaggcgacgtgcgctgacgggctcgcggatactggcgccgcagcgtcgtcgccggttgcgagggaggtgatggtcgcagtcgttggaaccaaggagctcaccagcaacactctcgcacttgttcgtgggataccggttcctccatgattcaccggtgtaacgacaaacggctcatgatttctttagacgctcgaagatagattttttttattacctgcacttaaataggaacacttcgtaacgacgagatgaaggcaggatttaggtttcatttggcatagcttattcagcagcctcttgagctagttcaagttattttgtgcatctcaaatggttttacgtgt

SEQ ID NO: 14916 - DNA, 445 bp, Zea mays
  Coding DNA Sequence Number=SeqID_513
aagaagacggcaatcccagcttcgtcgtcgtcgtcgtcgtcttcaggcacgtcttcccacgtaagcagcggcaagtggacgatgagccgcgcgtcgtcgtctgcagagcgctgggacgtgcacaagaaatatcgcccgccgcaggccgccgtggcgctggacgacggcgagagcagtactgcttccagcaacgacattgacacggataaggaggagattgtatggaagccacgggccatctacgctgaaccgtgcttcatctycgccgcgccagcacccagcatgcttcccatgccgacagcgttcttgcttcgcgttgcatagcgctgcactgctgcacctagtccatggatcggctcagaactcaaggtcgctggtttcttttagctaccgaagcaagtgcgattttgtacacgtaggggctactgcgactacttgtttattg

SEQ ID NO: 14917 - DNA, 597 bp, Zea mays
  Coding DNA Sequence Number=SeqID_514
ttgagcaggccaggacgctcatcggcgcgctcaacctgctctcccgcaacctgccgctgccccccgacgtcctgcgcgcggtctcgtccatctaccacgatgggggtgcgggtgacgatgaggaggaggaggggggagagcgggaagcggagaaggaagggaatatggagatgacggccgcggaggagggttaccccgttgacggtgcgaccaaggggagctccttgattgaagagcttgaagatgcaatatataagaataaaaaaacaccaatatcctactcagagttagcagctctgaaagaagggcgattcaatgcatccattcagcatcggctagctgaacttgaaggattaccttctactaggggtgaagacttgcaaatgaagtgtttgcttgaaatgtatgggcttaagctgttagatttgcagaagaaagtgcgatctgatacagtgcagaatattggctacagaagaaatgtgcatatccggagaggcaactttttgattgggggctgatgcggatacggtatcctttatccatgtatggaataggagatatcctttcaatggatgctgatgatgttcaccgcaaaaa

SEQ ID NO: 14918 - DNA, 542 bp, Zea mays
  Coding DNA Sequence Number=SeqID_515
gacacctcatgttcatacctcctcgcgtcgtcgcgggaggatcctcggcgccgcgaccgccacgcctggcgccgacgactaccactccaccatccgctccctcaactcccgcggccgccacgtcccccgaaaatccctcgggcaggtcatcccgctgaccccagaatccgcgccacccacaggcgggctcaccattcaccacgtaccgacgcgtctctcgtctccccgcagaactacacgctcaactccaaggtgaacgaggagctggtggcggcggcgggggtggaggagggtgacgtcgtgctcgagatcggcccaggcaccggctcgctcacttccgcgctgctccaggccggcgctaccgtctttgccgtcgagaaggtctgtaacgttgctttgctcggtgttccgtagctggactgctgaaagtgagagcgagccgctagggggaaaaattcgaaagatcttcctgagacgaaattgaaattgtgtgtaaaatggttactatcatctgtgtcactgtgtgtgattgtctcaaatct

SEQ ID NO: 14919 - DNA, 572 bp, Zea mays
  Coding DNA Sequence Number=SeqID_516
gtcctccacacaatcaatcatgtagtggagtgacaacggtggcaacaccacgctcacactgccagagctagaggcccaatgggtctctcgccgctctcccaccaagtgctcttcgccgtcgtccgatccgccgatgcgaccgtcgttcgatctgccgacgggattttcgtccgtgcactcctaaccgacgccgaggtgtcgggcacctccatggtcgtgctcgccgccacgcagatagacgtcgtggagaccgtgttgtacattgtcgcggaggctagctgcaagcaggtcgtgagcctcctcccgctctacaaccttgaggccgccactgttcgctcacgcctcaaccttgatgccttccatgttgtcgccaagcagggccacaacggtgagctccccttcggacccctgcgttggtgttgtgggagcggatcaaagtcccaattatagtgaactgggaattatatgcagttaacccgcttcatttggggcttgccttttatggacgggattgtcagactgggtagaactctttgatgtctttaggtgacgggcttggattttggcaccat

SEQ ID NO: 14920 - DNA, 532 bp, Zea mays
  Coding DNA Sequence Number=SeqID_517
gcgccagcgtgcaattcaaagcctaaagccatgtcctggcggccgcgaagaacctgcgcagtgcgcacggaggccgcctcgggagcgcagagcgattaatcgggctgatcgtcgactaatcgtaattagtcggctgatcgcccctctggcgatcagaggctaatcgccgatctgaaaactttgctctgctggtgctgcaacggattcggaacctgctgctgcgatggatccgggacctggttgctgtaacgcattcagttcctgctgctcttaatggtttggctactgacgagggcgaggaggatcatgatttggatgtctcgttggtgaaaaatcggagctgtctcgaggcttggcaacaaatgcgcatcgcggtcttcctcctgtttatagtcgtcgtcgagtttcctttgatcttgtgatgcccgttttagagagttggagttgctcgtctcttgtgttgagctcggcaacgatgactcagcatgagtattgtgtgtggggttgctgttatttgggttgcactctgtgt

SEQ ID NO: 14921 - DNA, 405 bp, Zea mays
  Coding DNA Sequence Number=SeqID_518
tgtgcgttttcttgccccggtcgtcgacgtcacgattggccgacgtttggccctctacgcccaccgcgggtgactcaccagttcgccgggtgggggatcgtggcctctctgggggagatttgggacctggtggcctagattgctcctcggtgcgtggccgccgctgcggggccgctccccactgtgaacctgtgcctgcagcgccgattggagccgtcgagggagacaaagagcatcgcctcgaagcgtgggaactactactgccaccaattcgacgggggatgcggtgtggctgaggcaacccatcgctggagcaccattttcgccgtggatccgccttgcttgtgggcgaacctcccctccgccgcaacacaaccgcgtggtcacgagtcacgtgaggagcaa

SEQ ID NO: 14922 - DNA, 417 bp, Zea mays
  Coding DNA Sequence Number=SeqID_519
ttgctcctcacgtgactcgtgaccacgcggttgtgttgcggcggaggggaggttcgcccacaagcaaggcggatccacggcgaaaatggtgctccagcgatgggttgcctcagccacaccgcatcccccgtcgaattggtggcagtagtagttcccacgcttcgaggcgatgctctttgtctccctcgacggctccaatcggcgctgcaggcacaggttcacagtggggagcggccccgcagcggcggccacgcaccgaggagcaatctaggccaccaggtcccaaatctcccccagagaggccacgatcccccacccggcgaactggtgagtcacccgcggtgggcgtagagggccaaacgtcggccaatcgtgacgtcgacgaccggggcaagaaaacgcacacggcggcagggt

SEQ ID NO: 14923 - DNA, 558 bp, Zea mays
  Coding DNA Sequence Number=SeqID_520
taaagatctggacttccaataactagagaaacccacgtcagacactaagctacgcggtccaacctaatcaggttccggtgtctataaaatgagttctagacctctagggtttattttttgatgccaccatcctgacgcacgagcaacggcagcggttccccgaggaacgagtggcgacggtgatccaggaggcgtgcgcggcgtaggcggcccaggaggcacgagcaagccatccgcgccccctcactcgtcgatggcgacgaccccgaaatcgcgcgcaacggcaatggtggcctcggaggagcgagcgccggtcgcggcccggggaggagcaagcgggcagaggctcgtgtggcggctccccatgtgcgcacgacagtgttgcaccctccagtggtcgcgcgaggcgtggccgtcttcggcggcagtggtcacgccaggcgcaggtggctccgacggcgacagcgtcgcgcgaggcgcaggttgtgagggtcgacgatctgtacgacggttcgggcgtccttcactgatcaactcctccgatctggtggtcttggt

SEQ ID NO: 14924 - DNA, 562 bp, Zea mays
  Coding DNA Sequence Number=SeqID_521
gggattgtattaaaacgtgaccacttaaacactcgcgccatgcaagcaaaatatcataaagtaaaataaattaaattaaaagctacgctatgtaggcaaatcagctttatgcatgcagcatgtatcgggaggcccataggacaaaaacgatctagccacatgcatgggctgctttttccttttttttctctcacgtctctaaccaactggccccatgcatcaactgcttgttccttcttttttctctctcacgtctctaaccgcctgggcgtcagagccgccgccgcccacgagggccgccgctactccactcgggagtgccccagtcgccgtatggaggatctgcacgctggggcttgagggcggccgagccaccgcaggatctactcgctggggctcgtgggcggctgagccaccgccggatctgtgccggtcggccacgtctcaagtccgcgcgctggggaccggtcgcgtccgagcacacccgtgccggggcgctcggctgtcggggcttgcccgcccgcgccggggctcgcctgcacacgtggctgcgacttgcccg

SEQ ID NO: 14925 - DNA, 276 bp, Zea mays
  Coding DNA Sequence Number=SeqID_522
gcatccgatccccagtcttggagtggtcagcaaacgcgacccaccaacgcagtcttcctccggcgagccgccatcgtgctcggccgttcccaggcgccgacgaagaagaaaccgcgagcgcgtcgtccgccggtgctgcgcagcccacacgctcgccgccgtcgccacgcctcgacctcgccgcgcaaccgccatcgtcgtaccttcaacctctgctcgcctgccccctcgcctccccaccgacgccattgagccctcctccgattgcgatctgtt

SEQ ID NO: 14926 - DNA, 486 bp, Zea mays
  Coding DNA Sequence Number=SeqID_523
tggagaaccgcctcgacaccgttctccttcttctttacctgagcatagattgcaacaaaggcaaccttcaccaaacagatgctcagggtcttcgatctcgtagaactcgaagagttcgatcacttggttgccatgcttgatcgtcgattcctcgaagctcaggaacagatcgcaatcggaggagggctcaatggcgtcggtggggaggcgagggggcaggcgagcagaggttgaaggtacgacgatggcggttgcgcggcgaggtcgaggcgtggcgacggcggcgagcgtgtgggctgcgcagcaccggcggacgacgcgctcgcggtttcttcttcgtcggcgcctgggaacggccgagcacgatggcggctcgccggaggaagactgcgttggtgggtcgcgtttgctgaccactccaagactggggatcggatgccgaggccagcaacctccatggctgcgcaccagggatgagggaggaga

SEQ ID NO: 14927 - DNA, 567 bp, Zea mays
  Coding DNA Sequence Number=SeqID_524
aagtgtgtgttgtccgccggcctgaccgcctctccgcctctggtgctcacccagtcggccagtcgcccgcctcgtcggccgccacctcaccgcgcgcagcgcgctgccaggaaataggccgccaggcgcccgcagtgcctgtccggcgtggcgacgtccgcctcaggctgtcagacagtcgctcggcgctcgctacgcacgccgccagcccgctagtctcgatgtcgtctagacgcgttttggttggcctgccgacctaaagacaacccttggatctctcctttctgatggatcccttccggaagacgagattcaagtttctgtggagaagaagaccatacgccatcgcggaccgtctgggcccaagtgcggatcgtctagaagcacacagggaatagtggcgaatctggtcaaaaatatcgccggagtcatcaggggaaggagccgcttytgcagcgaggtcgcggatcgttcggcccagagccacgtgcagaccgtccgtgctctcgtagagagccgtcagctggttcatctagtgtttagtatcagatcaacgccaacagtatt

SEQ ID NO: 14928 - DNA, 508 bp, Zea mays
  Coding DNA Sequence Number=SeqID_525
attcgaccgccgagagattcagcgtcgtgagtcctctctctcacaagtcctgcacggatcgtcgtcgtcgccatcaccctatgtggacaaatttctcgtcgtcatcgaattgttcgccttcatgtgaaggaaactaccgatgtcgacatcaatccacgaggtttaagcaagagggaactccaggacttgctgcatgatggcgcgaagctcctgttgaaggctgctaatgcaaagatcaatccgcagacgccgagcgaggatggtgggcactgaggtgttgtcatgttggatgatctttgaatcttttgaggggctgctgatgtctagtgtttcctattgctgaaataagtgagatgtgactgagaacttagcttttatgtgtgtgtttctggtttgtttcagtttaaaaacattgagttgtttggtggtgtgayytgaatcaggtcagtttctggtgttttatcccttctagatcttagcccttgggtgctttgctagacgtggataa

SEQ ID NO: 14929 - DNA, 501 bp, Zea mays
  Coding DNA Sequence Number=SeqID_526
gctatccaacatcacagaggtccttggactgctcgcggagcctggacctgaacaccgccgcccagtgcctctgcaccgccgtggaaggggtcacttccctcgtccgcctcctcctcagctccatcgggctcatgctgcccttcgacttcgtgtgcaccagcacctaggcgcatgtgcatgcgcgtgtaataatctgcttaattatactatgttattactactagtaatacgtgtgtatcacgagcaacacacacatgcagtatatgcatgtgtgctgtgcttagcttaaataattgcttgctctgacttactggttgctgtatggatcggactatacatgtccaatgggccgtgccgggccggcccggcccgggcacggcttggcccggcacgagaggcactagtccaagcccggcacggttcggtgtcgtgccgtgccgggccggcccgcgggctggctaacgcggcccaagcccggcacggttattcttacacgggccg

SEQ ID NO: 14930 - DNA, 571 bp, Zea mays
  Coding DNA Sequence Number=SeqID_527
taatcacagctgtacgcgtcacgatcgacggctgatacgtttcttctacccaccgcagtccgagcggcaccagcgcggtccgcagcagcgtttcaccggcgagtagagggttgggcgaccaggcgacccaatccgagcgtgcatatgtgctagagaatcctctaatcacgtaccattagcggaagtgagttcataccagagatcgggttccgatatcgcgggtcgatggcatagtgcggctagcagcagtctctgacgccggcaagtaaatcccacggaccatagcgtcttcgcagccatggcttggcaacgatgaaggcgaagctgaaccatccaaggcacagagtggcgtggttgaaattccaaactccgacgaggttcaagttaccgctcgatcgatctttgcatgtggctggaagacgagtacacagcgcattcgggcggttcccacaggctggacaccatgagaggagtcgtggcgtaggcaagatggagatgtggcggtgcacggctctatctttcgatccttcaaagtccagctacggtggctgcctattcttgtcgcggttta

SEQ ID NO: 14931 - DNA, 554 bp, Zea mays
  Coding DNA Sequence Number=SeqID_528
aacactggcattgaccacaagctaacattcagtttagttcactaaacaaaactaaaattaaagcaggaaagactgaagaacgacacaaaactgaatagttgttgcacactgactgaaactaaaactagcttgaaaccaacactgactgaaacatcgcctttgccatgaccatcagtgtacaccttgagtgatatagctgaaaactagcaactcagactgaaccattgcttttgagtgacacactgaaccagtcgttgggacaaccatggatggacagagcttgtcgttgcttcccagcaattatgccgcaagtgcatcggactccactacggcacgtgctgacgcacgggatgctcctccacctcgcaagtccactccgccgtcgagataattgtctgcatccccgtccatctaccattggaggaaactcccgccgtcgggcaccatctcctgtgacctctggttgtcgcggcaagccgatgcaggtccccttggtggattcatcacggtgagaggacgatgaatctctggctgacctctaacaacgacggcgg

SEQ ID NO: 14932 - DNA, 426 bp, Zea mays
  Coding DNA Sequence Number=SeqID_529
attggagccccgagaccatcctgttcgcccacgcacgaaagcccgagccatcgccgtcactcggaagtcgccagccgcgcaaacccctcgcgtcgagagagagaaaggttgtcgccattgccgacattcaccagtgtgggcgctcgagttctagagaccagccctagttccgtgggggaccgtatggatcgtgtgccgctcctccctaggagcgatcgacaatcgggggagctggaatttctcaccggaggaggatctgcgccgcctcaacgtcgcgcgtgtggccggggacctcgccaccgtcgatattcgacgagcaagccgcagaggatccaggggttcagcaggtggagactgctgagtaggagctcgttgaaggagaagaacatgtggttcaagaggagtcgcttaacgaggagttcaact

SEQ ID NO: 14933 - DNA, 403 bp, Zea mays
  Coding DNA Sequence Number=SeqID_530
taagccacgcctgcatcgatagcgaaagccgccgccgcggtacgccggggggaaatccgtcactgtcgggagcttgtgcgccgccaccaaaactcacaccccatcgccacttcccctgtttagtgcatgggtggtcgattcgtggatttcgtggtgcgcggtgtcttcggtggggcggcaatctgtcaccgtcgcaccaactccacggcggacccgcacgatgctgtggacgagctcctgtggctcattccctcgacgagcaagccactgtggatcgtgaggttcagcaggtagaagttgctgagcaggagctcattgaaggagaagaacaggtggttcaagtggagccacgtatcgaggagttcgattcgatctaggtggcgtttcccccagtcggcttttg

SEQ ID NO: 14934 - DNA, 495 bp, Zea mays
  Coding DNA Sequence Number=SeqID_531
gacaggtcggtttcggttcgccgctgcaactcttcgtctgtctgtcttgttgctcctgggaatcttttttgtgtttgctcatgcggttcctgtgttcttgtttcacttgcaatattcccccatttttgttttagattcagttctcgccgtgagaataattttggcgctcataattttttcactctctctctctcttgtttgctcaaccttggaatttctttcttctggctgctgcaaatgaacctgtcgttccccaaggccatgagtggtgggaraaggggctgcagatgaactyttcgttcagctaccaagcagtattagttccattccatggatggataagcatgatcttaaattagatggtttctatttgctattctatttgctttttgccagtttcagaaaagacactcctatyttttacaagttttcagctgtttacaagttaratggtcctatctttttgcctgtctgtcattagataaggagccttca

SEQ ID NO: 14935 - DNA, 413 bp, Zea mays
  Coding DNA Sequence Number=SeqID_532
agaaaactcgctctattcctctttcccccttaccactatcttggttcctctaaaccctctgtcttggttactctaactcgctttgtttgtcaactccagattgtggacaagttgctaaaaacatgtttgtttgtcatcgactttccattttactagatctgcttgcacctgattcgaagctccatatttttgaaagcgattaaggcgaagaacaatacgtcaaaggaaactggaaaatttaagtcctcattaattcattgatctttcggtttcaagtccggtgcagcaaagttggaaaatacttctaattcttatagatttaataaaggaggttctgtttatttctaccctttttgttcaagcacatggaacaatacgtttgatccttccacaatttgctaacgaggatgaag

SEQ ID NO: 14936 - DNA, 575 bp, Zea mays
  Coding DNA Sequence Number=SeqID_533
gagatatcggtgtttcggtctacgcataacccggacgtccgatcattgcctagcacatgttgggatgaagaaccttcataagccttttagggtcgagcatattttgggactaatgaatgtttgttttgagaaagacagatcttgtgcagtttgccaagtagggaagcaagttggaggagggcatcacccaaataatgtgatgaccatatcaagagcactggagctaccacacatggatctccttggcctcgttgcttttcttagcataggggaaagtaagtatggtcttgttatagttgatgattattcttgatttacttgtgtattctttctgcatgataaaagacacccaagagacgttacaacggttcttaaaaccatcgtcccctccccctcactcatgccgccgctgtcggctcctcccccataaaaaccatcgtcccctccccctcccttgtgtcgtagctagtccctccctctctctaggaccatagtgttagcatatgcaataagctagtggaggagttaatcgctcatcatgatgtataggtgggctagttttgccacttgagtag

SEQ ID NO: 14937 - DNA, 548 bp, Zea mays
  Coding DNA Sequence Number=SeqID_534
aaactgcaaagcgagacttcccatccattccactccgcagtggcggcggcggcgaggtctctacgactttcagatctctccgaagagggcggaggggagggagatgtcgtaatgctgccggagggctgctgacgaagatgcggaagctggtgaagggcctcgccaggcccgagcccaggtggctcagggccatggaagacaccagtgacatttcctcgcatagatgggaagattaagggggtgtttgtttgggattataatctgtccagattatatagtccaacaacttgaacaccccctaagaagatcgagtttctgatgatgtgtatgttaggaagctaaacaaaaagaacatccggattcgctatgccatgatgcaatcaagtaagatccttctcttttcttatgtgattttccctatagaaatgtcgttctgcaaagctgtacatagttaaaataatattgaagtcgagggcaggatggtttttcttttacagttctaccgttttgctgttctccacttttctgtttttactccatttctattg

SEQ ID NO: 14938 - DNA, 593 bp, Zea mays
  Coding DNA Sequence Number=SeqID_535
agagtttgacataagttcagcccaggttcctgaagatcaataggctatttgtcaatagtctttgttcagtgaaaaagtcgaagaaaacaaaaggaggatgttgttgatgtgatgacttcctttatggctgcatgcttggtgtcaattaaaaggacccaaggacttgccccctgatcaacatcaaaaagcgcttaggaagacgttttcagccgaaaagaggaaaagtaaaatccggaaggcatgggatggaactaaagtcatttataatgttgcttcatggggcgccactgctgttggggtctacaataatcgagcattacttacggtcacaactacaacgtttcagacttcctgccgtgtgatatccaagttcctttgaatattgtgtcaactactagggcatgttagaattgcttgcgtgtgtgcttttccattgttcaggcagcataaagcttgagaccatttgtttagtctatgctgatgagttcgactgctaattagcggcgcctcccagtcaaaagcagcatgtgtattgtataactataaatattgccttgatttgaacaaacttgttttttgtgctagaactttat

SEQ ID NO: 14939 - DNA, 204 bp, Zea mays
  Coding DNA Sequence Number=SeqID_536
acctcgcttctgctcacatcatgtggccggtgtgcagcctcgcaccatgactgccccgtgtcaccatttggtttgctcaccgcgtcgagttcgccatcgcactgttgttggcgccatcaacttctcaccattgagcagggagccacgccgcgttcgtctcgccgtccggccgtcggccgtcgtcgcagaagtgcgatccatctc

SEQ ID NO: 14940 - DNA, 567 bp, Zea mays
  Coding DNA Sequence Number=SeqID_537
agtaccacattgatcactaaactgtgcacctgtttataaggtctagtgcgcacacaatatgtgtagtcttggttgggcgtgagctttgatccacgcaactagcttttttggtaacagatgagaaatgccacaaccaaaaatgacagcctactccttaccgtatatagaattttaccatattcggttatttgcctatgttcgtacccaccgccatcactacgcatgccggtccgttaagcttcctccccagcttaccgcgtgctgaaaccctagccgccgaggagccgacgatgtcggacccttacaacccgtactaccgtggagccttcccaggcggcgacggtgcgccgccgccgctgccgccttactcggactttgatgtcgacctcgtcgcgacccgttacaccggcaccccacggtctcatccatcctctgccgacgtcggcgccttcgaatcgcatctcggcgcgagacgattcgcggaaggtgagagcggtcctttctgttttggttggtatggtcgtggttgccatagtgtatgaacgtttggccgattgtttgtctgaa

SEQ ID NO: 14941 - DNA, 530 bp, Zea mays
  Coding DNA Sequence Number=SeqID_538
aaaagcacaggacgcccaggccaaaacaaccaagaccacgccacttcaaatggaacagctacagacagaactaaaacactccactgagggaaccaggagcagcagatcacatgcattataagaataaaaactgccatcgcgaagagatctcaggcatcccccacagccctgatggttggggaagcaatgggagtcaccttgcgtcccctcctcatatgccctgtcttctctaccccttggttgaccaattccatgattgcctccatctgctctttggttagcggccttgagaaaaggcgagcaatcttgggcgatgcagatgcctgggacaggagcgaagccatgctgttatcgcggccgttgtcgtcaatcggactggagttcccctcagcagccacaggagtcttgttgccaggaaggtgccgtgttttcgtcaccctcgtccaatccaatccaatccatcaaccccaaactctttgcatatcacttatatttagctaagcgacatagtcctgcatccgtacataaaa

SEQ ID NO: 14942 - DNA, 512 bp, Zea mays
  Coding DNA Sequence Number=SeqID_539
tcgcgctcagatccagtcgttgacgcccagccacgtgttcttcctcccagctcgtgggtgccgtcgttccgtgtgcttggccatcaaagttcgccggccatcacgacatccccagtctgtcgtcgatccacggttgtctttgtttctctgtcgaccgtccgcttccttcggacagcgcgcttgtcccccacgcagcgtcgtcttcaaccttcagctcttcttcctcaaacggtgttccagcagctcgctcccatggcgcttatgtcaactcctgcgcgcccatgtcctttactcggctagccatggtcaccgcgtcggctatccctatcaaagctcgcccagcttgccgatcgttgtgctcctggcctccgatcttcctcgcgcctgccccaacgctctccttggtcgcgtcctgctctggcatccgtgcttgcctagtgccctcgcgctctgaggctcatcacggacctcgccgtcgacccacgttgtgtccacgaaatgcttgtcgacct

SEQ ID NO: 14943 - DNA, 407 bp, Zea mays
  Coding DNA Sequence Number=SeqID_540
tgccattaccttagaccagcttatcgagcctgctcttttacctccaccacccatttcgtggtacttgagaggaattactacaaggacaactgagatgctggtgaacgatctgatagcggaaactgctcgattgcgcaccatctcaaacaacgctagtgccaagcaaggtactgaagaaacctgtgatgctaacataggtgatccagctagagagtgtggtgacattaaggaaaggtggcgatagagaagaaaaagtggacgtcacggatcatcccttagattaacaagtctattcttgtaagataagctatgaagcagtgctcattttaggacccgatttacctgtatcttacttagtttgtaaggttttggttgtaggtaatattgtgtaagatggctgtttgtga

SEQ ID NO: 14944 - DNA, 401 bp, Zea mays
  misc_feature (270)..(270): n is a, c, g, or t
  Coding DNA Sequence Number=SeqID_541
tgcgcgcagtcgaagcagccagcagccgtgacaagacaacccgaacggccccgcccaaccgaccgtgtcgtccgtcttcaagaaacttcgatgcatccgtttctctgtgcgtaaatggaactttaatgctgtatcaatggccgccatraagcmccggtcgccgtttctctcccctctccctctataaaacgcccggactctctccctctcttcctccsgagttctctbtctcacgctctcctctctctccctgrccgcgccgtactcagncttgccgtcggagctcgtcgccgtggtcctgtccgcagtccgtggagcctcgccagagcakccgtgcccgtvgccgtcgaatgccctcgctggagccccacacgacatcaagaatcccttcccgccattgt

SEQ ID NO: 14945 - DNA, 593 bp, Zea mays
  Coding DNA Sequence Number=SeqID_542
atgccgcccctcaagttcaagaggaaatcgaagtcggttccttaatcgatgatctcttggatttcatcaaacttttgcctattgacaaaatggatgttattgccaaggatcatttgaaaaacgacaaggaattcggagatgtgattagatatctgcaaggcaaggaatggaaggatctgattgctaaattgagggcaaaacccacctggcaagatttcaaaaaatacttgaccgctgccggtattccagttgatctcatcattgatgttattaccaaatacatcgattccctgaaaccaggtaccagtgatctcaccagcgtccgctctttcttggatgaaattgaaaagattgtaccatggaaagatcttaaagctcttttggacgacaaaatgaagaacagcaaagacttcaaagaactgtacggtaaaatctctagcgacaaagccaaaaaattggtagaagaagtccgagctatgccagaagttaaagaaatcgtcaccaaattgaagggtatgggtgtgaaagttgatgaagtcattgccgccatctacgcttggttgggttggggaaagccatctctgtaaattttt

SEQ ID NO: 14946 - DNA, 567 bp, Zea mays
  Coding DNA Sequence Number=SeqID_543
gaagacacactcagcagcgagcgactcgatgccgcgcggtgctacggtggccctcttcgccggtccatcgaggaggcctgccgtggtgctctcggcggtctttgattccacgcaggaagagccccgggcggtgcgcgcggcgcggatttggcggcggcctcatggcattaacgattgctttccacaagtgtcgccttcgccatgatagtgacgagaacctcatctgcaggggatcaggcgaatccgaacatcatagaagaaagaagcgacacataacaaccggacagggccacaaggaggtgaagaggtgggctgtcctgacggagacataataagtggagacagatataagaccacacaaccaccttcacaatggccggcagagaataaatgaagacagataagtaggttaactttggatggatgacttttcttgacatggactgcgtcgcattagttgcttagtcaggtttttgtttctctctctcttgtgtggttgacacagtgtgcacacagtacttgcagcatgttcactgtgctgtgtagcactatacatatacagttctg

SEQ ID NO: 14947 - DNA, 123 bp, Zea mays
  Coding DNA Sequence Number=SeqID_544
agggtctcactattgcccaggatggagtgcagtggcattgattatggctcactacagccttgacctcctgggctagtgatccgtctactcagtatcctaaggagctgggactacaaatgcata

SEQ ID NO: 14948 - DNA, 428 bp, Zea mays
  Coding DNA Sequence Number=SeqID_545
ctttctctgtgaaaacctccctctgctcctccatcccgccgccacgttgtcgcccctccctctgctcctccatccggtcgccgccgtgaggagtaccatcgtcagctcagattttgaggagagaaaaacaagatttttgcagcaagactttggcagaaggtcatggacaaggaggtaagcagtgcaaaagttggtggtggactatgttaatggacaccaactcaatccacatttgtgctcacctttcttagcaacattgttttgtcatggtgtaaactaaaatttgtcatggttaacttctagtttgtgggtcatgattagaattatggctatatgaactatgatttgtcatggtgttatgaactcatgtatcatggtggttggatgaaatatggttacactagtgatgaactatgtatcttttattt

SEQ ID NO: 14949 - DNA, 562 bp, Zea mays
  Coding DNA Sequence Number=SeqID_546
tgattggaatctctccttcacattctgcggatttactcaacaccattttaagaatcagaagacgttggcaagtcccttggaaacttgaagctataatcctattgacccggggcatctggaaatgcagaaataattgggtgttcaatgagattccgcccacggtggaatgttgtcgtgctatgttcaaatctgaaatgaaccttcttagtcatcgagttaagctaataataggagataaaattagaacctggcttctttattctgttctgtaattctattttttctgtactcaccctcctgtatcttcacccccactctggtttccttaagcaataaaacactgtaggcctccctacagtaatttttacttaaaaaaaataactccttcgggatacaacataagtagcaagtgaagacacacgagtggctgaaaatagcaccgaagagaaacacatccgtcatgtgagcaggagaaagtgcacaatcgctgtccgtggaataaatggcaacatagtcaatttttgaatgcagcccaatgccacagtcctctcaaagctacatg

SEQ ID NO: 14950 - DNA, 512 bp, Zea mays
  Coding DNA Sequence Number=SeqID_547
cgcgctccctgagcagctcgacgagcgatggccgacgaggcgtggagcagcggtgcgggcgtgcggcggctacctgcagccgcgctcgcctggccgcctccgcggaccgcagctccgcctggccgaccggcgcccgaccgccacgccacgcgcaacgcgcccacacgcctggctgctggcgctggccggctggcggcagacacgcaggaccgaccagccacgcacgacgcacttggttgggtggatctcggtctgacaatgatccagcaagataccatgatggatatagcagattaatagcatgggcgtatagttctcttgatcaatataagctcagtcatttttccatacatttcgggaagctcataaggtgatgcattcaagggatcttcagaagctggaaggcatcctctctacttcacacttggaggttatttagctctgtactacattgtgccattatgttgtgaatggacccatgttttatataactgataatacttttttagcat

SEQ ID NO: 14951 - DNA, 281 bp, Zea mays
  Coding DNA Sequence Number=SeqID_548
gtagacaggaaattttgaatcccatggttttgttctgcaaggttgctgttgagaacacctataagaagtgacgtttgaaggagttcacttcagtgtatgttgatccagtggtggagtttcatctaactgcttaccagagtagaagggctttgagatcttctcctgcaataaggaaagattctgatgtctttggcttaattagttactttatgtggaggtcttgaagcttagattacttatgtgtatctcttatggaaaggctttaccttgccaaatattgt

SEQ ID NO: 14952 - DNA, 381 bp, Zea mays
  Coding DNA Sequence Number=SeqID_549
tatatagatggtcgaccacctgcgctttcacttgaccctgggctaaattcgtcgtgcctcgcagccatgccactcctgccgcgggcactgccgtgggtagccgcacccggatctcaccatgactgggcctctgctctcgtggggtggccatgggaggtacggttcgccggtcattcgacgccttcgcgatacttcggagcactatgggacggagtgcgtctctgaagaatcagggggatgcaaggaagcttccccaaccaccaattcggcaaacggacggtcggagctccaccgatttctcgccgtgttcatcctcggcagcggatccgccttgtgccgcgtatggtgctcctctgcgcgtcatctgtgcggtgaggacac

SEQ ID NO: 14953 - DNA, 590 bp, Zea mays
  Coding DNA Sequence Number=SeqID_550
ggcatggcaagtcatttccttggattttgtgactggtttacccttgtcaggaggattcgaccgcattttagtggtggtggattcttttactaagtatgcacatttcctgggcttgaagcatcctacccatcttatctctgaccgcgaccgtgtttttactagtcagctctggcgtgatttgttcaagttggctgatgtgcagtcatgcatgagtactacgacgtaccacccccaatccgatggttagacggaaagggttgatgagtgcatggaaactttcttgagatgctttgtgcatacatgccccatccaaatggaattcatggctagcgctggctgaatactggtacaacaacagtccacattcatctatcgtcccccctttgaagctctttatggctatgttcctcgtcactttggcatttcagtggatattgttgtacgtgttggcagtttgtcaccatcaactcatgaccgatgccatcaagcttcatcttcctcatgccaagcatcgcatgaagagacgagctgacaagggccgctttgagcgacaggggtgtttttgaagcttcaaccatatgtgcattcgt

SEQ ID NO: 14954 - DNA, 438 bp, Zea mays
  Coding DNA Sequence Number=SeqID_551
caagacatcctggtgtctaggaccctcggttctagaaccttttccatgctgatttttataattctgtcatcttgtccaagaagcacccagtcattcgacatcgtttcattgactgggaggggtgtgagagtatgggggatgctgatgttgggggacttcgtcttccgaaggtcctcaaaaacacaactaacatgttttccaagtataaaatactgttacaggaaccttcggctttgagatgaaggtgcacacggtatgaaaggcgcggtctgaaagaaggatgaatgagttctgaatctttggatggagaaacttcggcttagcgcaaagacggtgatggagaatgaaaccgacctaactgcttagtcctcgacagattactccttagtcaatagtaaatatcaaggacatgaatgtaattggttgcgtcttgtgcct

SEQ ID NO: 14955 - DNA, 505 bp, Zea mays
  Coding DNA Sequence Number=SeqID_552
ttcgcgtgcgcgttcggcgagatccgcgcgcgccgccgaggggactcgccagagctccgaccaccgacaacatgatcccagagctccggtcgcgacgagcccaccatggaggagcggagacggagaggtcgagagcgcagagccggagcgaagacgcagatcgccatagcagcggagaggagcagccgagtggtgcgcggcgcgttatgattacggccgctgggttagggttatgagctgggccgttggggcgcgctccggcttgggccgctgggtgctgtggccgctggggaagtggacgggccggtttctaagcccaccaaatatcgggccgtgctcgggccagcccaacgggccgagatggctgtcgagcccggcacgctcgccgggccgagctgagcccgggcccggattaactcgtgccgtgccgtgctcgtgtcgtgctaaaaactcgtgcttcgtgccgtgctaacgggccacgtgctttctggacatctatacatat

SEQ ID NO: 14956 - DNA, 583 bp, Zea mays
  Coding DNA Sequence Number=SeqID_553
tgctaccggcactggcacgagcgtcctcgggcgaggacgaccggattctgggcctgccagggcagcccaacggcgtggcgttcgacatgttcgggggctacgtgacggtcgacgagcaggccggccgcgcgctctactactggctgcaggaggccgacaggacggcggtcgaggacccggacgccgcgccgctcctcctctggctcaacggcgggcctggctgctcctccgtcgggtccggcgcgctggaggagctcggcgcattccgtgtccacaacgacggcgagaggctgctgctgaacgagtacgcatggaacagaggtaacgtatgaattgaactgggtcacaactcacaagcagacgacgaccaagctgctagccgaatagccgatcgacatgtgaagcagtacgtgaaaggttagctaggtgacatgtatatatatgtctcgtacatgcatgcagcggcgaacgtgctgttcttggagtcgccggccggcgtggggttctcgtacagcaacaccagctccgacctaatcgtgggcgacaacaggacaggttaattggccggtgatgtatagttgta

SEQ ID NO: 14957 - DNA, 581 bp, Zea mays
  Coding DNA Sequence Number=SeqID_554
acgccgcagtttgtcgagtacgctaagcaaattgtggcgaatgcgcagcggctttcggaccgcctccaggaagcggggtacaaagtcgttactggcggcacggaagtgcacatgcttttagtggacttgcgctccaaaggcttgaccggcgcgaaaggggaattcattctagaggagattaacattgcgtgcaataaaaacacagttccaggagataaaagcgcgttaaatccgtctggaattcggttgggaacgccagcgctgaccactcgaggcttgaaagaagccgatattgatcaagttgttaagttaatggatgatgccttgaaattgggcaaagaaatcagcgataagtccggaccgaagttggtggactttaaaaaattgtgccatgaagatgccactttctcgaagaaaattcgggagctgaaagagcgcgtggcgcagttcagtactaaattcccgcttccgggatatgatgaatgttaatttattttcgaattattttatttaagccatggaaattgtgaaaacaatttttttttttcttaagttttgaatttttgtctcttttcgaataa

SEQ ID NO: 14958 - DNA, 502 bp, Zea mays
  Coding DNA Sequence Number=SeqID_555
gcacatagactctgccaatgcaagtggacagctgagaagcacatactacatgcttatgaagtttctctcttcactcgatcaaaatcaggtccatctgaatggtcgccaaatggtggacaggattacacaagaaagagtcacgcgagtaattaagcataagctattacatgaagcttcgtctccaggatgcaagccccttcctcatgatgaacgcacacgagacaaagacagatctaaagatgataagaataaacaccgaagctatcgccagatagacagcttcggctcataacggagacgaagtataatgatgatgctgatcgaaagagaaaaagactgcttagtccttaatgacttgtattacggtcataccaggatatttggggcataaatgcacttttactcgggctacgtcccgtgcttataaatagataaacagtaacatcgtactattcacgctgaattataatcactctctcgtgtctttaccttcgagcaaagt

SEQ ID NO: 14959 - DNA, 205 bp, Zea mays
  Coding DNA Sequence Number=SeqID_556
tgttcctgcttggatatatcgtgcgataagcaagtatatttggaataaaaaggaactcaatttaaacgcaagtaatactgtttgtctttggtcctatttgggctttggtttattgggtactgcatagttttgccctcctcttgtagtctagtagtaacggatcaaacgttttttactgagagagacaaaaccagtccgtgctgct

SEQ ID NO: 14960 - DNA, 452 bp, Zea mays
  Coding DNA Sequence Number=SeqID_557
tccaactcggtcgactgttcttgctcgcttctgtgtcgctcgcagctttccctgtccggttatggcgccctgccgcgcgccctggttctttcccctgcgcgcaactgtaccctctgctcggattcctgttggccgcgccccctgttcctccgggccggtcaagttctttccggccgcgagctctctcgtgtgcgcgttcagccgaggccctatctgtcagggaatacagttgggccatcgtgggccttagcctggtcgaatagtacccggacatcttctacaagaggcagaagcaacagcgacagggagggcagaacagatatactatcgtcttcctccttcctagctgttgttttctatctctagcttcttctagggttagtcctctacctctccctgcttagcgtgctcctgatctcctagcccgatatcgtgtacctctgcttttcctt

SEQ ID NO: 14961 - DNA, 363 bp, Zea mays
  Coding DNA Sequence Number=SeqID_558
ggagacaacgatgtggatgttcaaaagttacaagtaagtttcacggtacacgaagtcgagtcaagtcaagtgagctgtggggagatgctatgtacagggactgcatcgcatcggtcagcgagtctaaatctgagacacggagcagttcgccttttagccttgctccttgtagggagtccagatgagcttgctaacgtcgacgaccaggtcgctaggttctgacttctgcaactgatttctctcgctgaacccatcatcacgagtgccaccttcaaactgtgaacgaagtggtgaatctggaatcgggtcgcaggagagggtgcgcgtctggccggtgatgaaggcaaggcgatccgatcccct

SEQ ID NO: 14962 - DNA, 393 bp, Zea mays
  Coding DNA Sequence Number=SeqID_559
gatcaaatgcatgacttgttcgtttcactattaaaaaaacaacgccatgcaccatctagcgtccaggcacggcgcgacaaaaagaaaaaaaacagcgacatgcaagtcttcaggcgcggaaaaaaaaagaccaacgcattctgttccggagggcaaaagagggcaatccattcaaattccttatttttgaagctggagctgttattcctaccaaacacatttctcagcatcaaattgagagtccagctccatgcgtggagctgctctgtggtggagcagcagctccagagttgatttggtagagctggagccctgccaaacacgccctaaatgttgcgaattatttaatataatatttatatatttggtcatagttgaaaccgttaccttttg

SEQ ID NO: 14963 - DNA, 565 bp, Zea mays
  Coding DNA Sequence Number=SeqID_560
ggcagatttcaaacttaaccgacagatacttccatttgcaaacgcattttatagaggactcagcgatctcatttcaccatattggctgagcctgtttaatgcaaatgaatttaatcagttactttcaggcggactacaggattttgacgttgatgatttgcggaacaacaccaagtatactggtggttatactgagtcaagtcgaactgttaaactcttctgggaggtcatcaaagcatttaagccaacagagcgttgtttgctcttaaagtttgtgacaagctgttcacgagctccactgcttggattcaagtacttgcaaccttctttcacaattcataaggttccatgttatgtaacactttgggcatcaattggaggccaagatgtagatcgtcttccatctgcttccacatgctacaatacgctcaagcttcctacatacaagcggtcaagcacgctaaggagcaagctgctttacgccataagctcaaatactggatttgaactctcgtagaggtatattcagtggttttgtaaccctgctttggttttgctgtgaata

SEQ ID NO: 14964 - DNA, 327 bp, Zea mays
  Coding DNA Sequence Number=SeqID_561
acatcatacaacagtggttagtggtttgatgctttctagtcttccctccatccttgcgcagtctgatgaggagagaagaaaatgggagcttgctgggccaggggtctctccttcttggcagcccctcttcttgaggcctgacccccccctcacccccatggagttttagtgggtagtgtgagtgtttattcatggatgttttcatttatgcgtgctgtcggcctccataggaaggaactgcaaatcagaaggggcaccttaagagaaaatctgctgcacagtagtatgcaaatatcctggtagttctaattagaatgacggttttct

SEQ ID NO: 14965 - DNA, 554 bp, Zea mays
  Coding DNA Sequence Number=SeqID_562
aggtgctccagcagcgatgccataataagagtcatcagcccgccgcggcggcggacgacggaggcgcccgggatgtggctgacgcttcaggcagctcccaaccaaagtagagagcctgttttgcctcagatagcaaagagctacctaagaatcaaggacagcaacatgaaggtggaggtggtgatgaagtacttggccgagaagctaggggtcgcgcggtctcgttctcgttctcatcagcaggtggagctgacatgcagagggcaggtccttcctcccttgctgctggtgagggacgcgtgggagacaatctggtgctccacggcggcggcggcggcgcaaagggagggagtagaagaagagacaccagccgaccacctgactgcgcggcggcgctcgtcagctgctactgaccatgtcatgacactgtgttacagcacaagtaggaacagcaatgcaagctagttagatctgtaattaactccacttgttggccgacatgttctttggggtttttttaccaactccgatcacttatggctggctaaccgatg

SEQ ID NO: 14966 - DNA, 562 bp, Zea mays
  Coding DNA Sequence Number=SeqID_563
tggagtcagtccatttttccgaacacttcatttctgcgctctccacctgctggatgcatgtacagatgtcgctgtatgcttcagcagacgagttccaggatctgatcaagcaggccctttcctgggacatcaggtcgatatcacagcggaaccgtccccatcaagtgagcgtggaagctgatgccaacggccactgtggcgaagacactgatgatgaccaccaccacagggacacaggtcgctacggtgtggtttaccacttacatcttgaaggcatcgatgtgtcgtataggatcgatcagggctccaacattttcgtcgaggacgccacccttcttccagacgccgtccagaaacggcatggttatttggcgtggagggacaaacttggcagcagcgttttgtagcatggccatggcgcagcgttttgttatcgttttcaggagtgctgcagtgtggtgtaggatgtcagtagtgatgccaatgaatttgaatgtggtggcgtctagtatctgaattggatttggaacgtataccccctgttttgcgttgagtctctgat

SEQ ID NO: 14967 - DNA, 387 bp, Zea mays
  Coding DNA Sequence Number=SeqID_564
gataccggtgaaactataactctttctatataagatcgcataaatttttcatgtcgaaacagattcttgcttatatttggccacaatttggcttccgagcccatcgacaagacgacgactagacgagtataggggtagccctttcttctgtctggtttacgtcgaaacaactggctcagaggcccttgcccttgcgtggattctcttcatgactgcattagctcagtgcccgcacgttgcaacgggattatataatagctcgataacttatatatacaaatgtgtgttatactgttatgaaatggaggacgacatccacgagccgtccgggatgacgttgaagagaaactcgggcctgtcacgcacgagcactcaccatatcagaag

SEQ ID NO: 14968 - DNA, 560 bp, Zea mays
  Coding DNA Sequence Number=SeqID_565
cggcgccgaatcttagcagcaggagcgcagtggctccggacctgtcagcaacgacgacggcgtcccagtcccatcgggtcaccttccgggcgtcggcgcccctctccacgtggtggccgtcgtcaccgtcagccgtctctgctggtgccggcgccaccgccactccagctcctggtggcagcggcgggatcgccgtcgcgccgaggagggcgtcgtcggcgtccgtggcaccgactatgaaagccggtgccgggagcatgtcgtcctcgtccttctcgcactggcgctgccggtcgctgtcgtcgtcccgggtcatgccgcacggcggccgcgcgtccttctctttccccgtgtcgccggcgtccgcgtcgtccagttgcatgagcacgccaaagataccgcaagggtggcagcacaagtagctggcgttcgttcgttcgatcggcgcctcagcagcaccatgctccgtgtgtttttgtgcgtacgctgtatttaacactgggtaattcggtcgtcgtcttaaaaaaaccgagatgatgtgcgtcgtgagttttccttcc

SEQ ID NO: 14969 - DNA, 470 bp, Zea mays
  Coding DNA Sequence Number=SeqID_566
gaagactcataagcgacagtttaaaaagatagcacactaatacaatcacacggcctagtcgactgcaaccagggcttgtgagggctaaaaaaactcatacaggtgctgatttaaatatacatagccggtacatgggctccgggacctcgtcggcgccgcgagcagcaccggcagccgccatagtacccgcggttgcagcacccccacctgcagtaaccgccgcggccgccgccagggtagccgcccccgcccgggtagccacggccggggtagccacccccaccgcgccagccgccgccgccgccacggtagtcctgcacgtcggctttgttctcgccgccgtcgtccttcctcggttgggcttggtcgtcgttagctgctgctgagacggcaaggaaaacggcggcgagcaggagagctactagcacgaggagtcgcttggacgccatgttcttgtgtcttctagcttt

SEQ ID NO: 14970 - DNA, 495 bp, Zea mays
  Coding DNA Sequence Number=SeqID_567
ggagcagccggagcgaacaagcctcatagacaggcgaggccggccgccggtgagccgcagctcgcgttagttgagctctcgcaccgccgtgctgctgcatatgcagatatgcttctcgctgcgagctagctgtgcgcgcgcggagcatgcatgggtgcagatcgaggtacggtgcgaggtgtgtgcgcgcgtggccggggaattgaggcgtcatggtccgagatatatacatgtctagctcgatctcttgctaggtatcttatgagatttattgttcttagtttcagtattagcactccgatccctggaatgaacatgccttctatttcctttttcctctcttgtcttaattctgtgtcaaagttgctggccattttcgctgggattaagaagctgtaagtgacgcattcctggcgtgtagctcgttaattccttgtgatgttaggcatcgttcccaacagtctcgtcttcgatcttgagcagcattgttagtat

SEQ ID NO: 14971 - DNA, 370 bp, Zea mays
  Coding DNA Sequence Number=SeqID_568
gacctcgccgaacctcgcgagacaagccgcgcgatgattgtctggtgttcagtgttatgcttaaactggaaatcatcgtctactcggtacgttaattgatcacgtgctatggaagacgagtggaattgatctccaagtgatgctgatggacgaagctaaaatggatgaatcaaccaagtgccaggatagaagatgctcaccaagtggtcgtcgattaacaacactaacttagtgttatcccagatcctactaaagcgtctccgggccctcacccgaaaggagacgacgaaattaaaaagatggctgaagctatcatggatgaagttgttaatcggctcctgaacgaagctacggaagttgtacttagaga

SEQ ID NO: 14972 - DNA, 580 bp, Zea mays
  Coding DNA Sequence Number=SeqID_569
ccgtccatcaatccaatagtataatcacctgtaggtacacccagtgcagattctggagtggacgaatgagcacttcttctctggggtgcaaaaaaaaaaaaggaagtgcgcactagcggttacagtcaaaaggtaggtaggtaggttggtacttcacctgacagtccttttttccctggctcaactgcatgtcctggtagaggaacttaagtggcctgacttgctccatggaacctttgccgagacgaccacagccatgcagaaccagagccagacgctctatgatgacgtgatcaaggcagagagccaattcagcatggaagggatatgtgcttcttggttccagaatcagcagccacagcaacagcttcaggcaacaccagacatgtatgacaaggacttgcaaagaatgcaactgtcttttgagaatatatagatacattaagttgatacagaaatcatcctccacagctgctcctcagttgaagacctctatatggcatcagcatgatgataaacatatgaaagcatactgggaaagccttgtaaccaacatagcactcaattttggacctggcat

SEQ ID NO: 14973 - DNA, 451 bp, Zea mays
  Coding DNA Sequence Number=SeqID_570
cgagctccctgattcttctgtacaacttcgatggtggtacaatttgttcagtggttattttgaaagaatggcttggcatccatcgcgtcgctgctgctgaaatatctaaaggtctcccaatttttggcattggtgttgggcatagcacatatgacaaagcttcggtaattactctgatgcttgctatttgtttggtaggctatagctacagccaaaatcataaaagtgcctggtttgaagctatcagcactaagccaaataaaggattccggctctcatcaagtgactccccctcatgttgactttgcggatgtctcaattctagtggtggagctacgaacaacaatccgatgtcctgatcgagagcgatggagttaatgtttgaacttgtgtgtttgaacttgtgaactaaaaatgtgaactatggatgtgaacttaacttgtgtgtttg

SEQ ID NO: 14974 - DNA, 536 bp, Zea mays
  Coding DNA Sequence Number=SeqID_571
gtggtggctcaaatgcgcctggaacaaatgggcaaggagttgggagaatcatttggtgcatcacaggagtcgggtggacaacaacaacagattcctcaaattttcaaagccgctcaggagaagggtgatccaatgcatggtggtaagggagggatgcatggtttacaacgtgaacctcgacccacatggggatcatcatcatcaggtgcacaaatgggtgagcgggaatgatatttgggattttgttgtgttggagtttcctaaggagcaacatgaggataattagagtacagatattcagagtattttgatgtggagttccaggatattttcactactccaactcaattacctccagccagggtatatgaccattacattcctttgtcagctggggatactcctattaatttgaagccttacatatattcttcttttcataaaaatgaagttgagagacaggtgaatgggttgctcaaggctaggtttatcactaatagtgttagcccttttgcttcccctgtgttgttagtaaa

SEQ ID NO: 14975 - DNA, 480 bp, Zea mays
  Coding DNA Sequence Number=SeqID_572
ctgctccaggtgaactcggtcaaaggcgaacttatcctggttcaacgtcaaccttttccttggctcgtttcagtccagagggatcaggagtcagcatgaggatcatccgcgccctgttcagtgccgcaaaggctgctgaaaccgccgagattacatcatgggatagattccttttcaaggcaaatggatacaacaagttaggtctttactcagatgatctgctatcagagcttgatgatactgtggttgaagctttgaaacgaatcccagaggagacaatcaaccaaaggatcttccgagctaaccgagctgccttgctaactatgaacaaaacaatcctccctgaagaccaatggacgaagattgaggatgataagccgtacctcttcccacatgttcttcagattcaaaaggaaattgaagaaaagaagacctgggatgaaaagaacccattgtagatctacctgcaccctagaaaat

SEQ ID NO: 14976 - DNA, 430 bp, Zea mays
  Coding DNA Sequence Number=SeqID_573
tcaccacgtcgtctctagaatctagcctacgaccattggcggctggtgcccccaccagcaatcggtggtcatggtccgtccctactcaccccgttcggatccgctatgcgcgaggcgcaactgcatctatcgtattcctggctgctccctccctctccgcgggcgacgcgcatctytaggttcgatcggggtctgtccgaccggccttgagcgcgccttcgcaggccccttctctgccttcgatgagtgcatttgggtgacgtctatggtggtgtgctgtgagcaacgcccacacaatgtgatcgggctgcacgccaatgttcaacatgtgccccaaccagaacatggctgaaggtgcttcgtataactaaatctaccatggctttctaggaaaagatggaatggaactcaattttggtggccacacaag

SEQ ID NO: 14977 - DNA, 559 bp, Zea mays
  Coding DNA Sequence Number=SeqID_574
gaggccgaggcacgctttgctatcctcgcggccacgtccgatcgttgggcgcggcgcacagtcgctgcacctgaaccgttgccaggagacggcggaggaggacgccaagcgcgacgctgtggaagcccgcgccaacaaggagggggcgttggatggcatcgccgaggagtcgaggacaacgacgccgagtgcgagaccgcggagatacgcaggagggaggcggcggatacggttaccaagaagcgggaggccgcgggaacaagcaaggaggtgacgctggacgctattgctaagaagcgcgacatcgatcaagaggccgcggttgaggctggaaggggggccgtgcagtgtcgctggtggaggaagtgcggctacggtgcttcctggtgccgtgcagcgggcgtggtggtcgcggtcttgttggctttggaattggccgccgtgcagtcctgaggtgcttttgatctcttgttttgctgtaaaacttgcttcgacggtcaagctgttggctacttacattctgagaaccatgtttggttgtgaggtttacttgcagtaa

SEQ ID NO: 14978 - DNA, 523 bp, Zea mays
  Coding DNA Sequence Number=SeqID_575
gttccagacctgaagaaactccgaccggccggtgggcggtggcggcacggcaggatctgtgccgcgatggcgacgtcgaacacggcgcggatggaggacggcggcggcgacctgcggagcaccatcaagaagtggaatatcatctaccctgtctacctcaactccaagaagacggtcgccgagggccgccgcatcgccgctgccaaggcctgcccggactccacctgcatcgagatcgctgactgctgttgaggtagacagggtgacgacggacaggggcgggagctggttctccaacaacctgaaccgtggccacgtggactacttctactggctgctcgccgcgctcagcgccgtcgagctcctcgcctatgtcttcttcgcggtgacatacaagtacaagaacagaggagccgtacatgcaactgttgatggttagcgggaggagtaagtacatagtataggttatggtgcatcgtacttgtaaatctcttttttttttctcaactaggatttgtgatcc

SEQ ID NO: 14979 - DNA, 379 bp, Zea mays
  Coding DNA Sequence Number=SeqID_576
cgccgaagaaagtaactgagctgctagggtttatagcttccgcctagatcacactcctaggtgctagggttttgcagagtctggtgatgcgaggaggaggtgggatgcgaagacgatacggcggcatatacgggaccggcggcggtacctgtactccaagagcctcgaggcctcccattgggtgctgttggagtaggagcgccgtatccgggcgtcgctagaggagggaaagcccattcctaccgagctccgcaacgaggagcacgacctgcggaagcagatcgacctaggagcgtggagtgttggaggttgcagcgatgtctttctcgctaacctgcaaagattcttttcatcgaagcactcggatcaattcatggct

SEQ ID NO: 14980 - DNA, 531 bp, Zea mays
  Coding DNA Sequence Number=SeqID_577
agcacctcgtgctcatggtcgtgggcgccccgcgtcactgccaggggcagatctccgaagcccgaagcctgaaggtgaagctgttagctgtgaagcagactgcctacaagcaaactagatccaccactggacgaaagaacggagcaaatttcttatcgattatttaagacaagcaagcagacgggcctggcctggcaagcttggagccgatgtcgggcgtgacaagcgtccaggacaccagcgagttaaaaaacggcaaggaggagctaagtgaactcgacgcgctggacagaggctacgacgcttgagacaaggagcaggtgaggcgaggaattgatttgcggtgctgagagttgtatacggcgagagagaaacttcagaaatttgagctcttgggagggatgacgtacatgggaatgcagttcgtgaaggagataaacttcatgcgctggcttgagttggattagagagagatgtggatgggataagaacgacggaaatgactagaaggatatcttacggatcaggtag

SEQ ID NO: 14981 - DNA, 522 bp, Zea mays
  Coding DNA Sequence Number=SeqID_578
gttacatctcgaggaaccgacgccatgcaaatcaatcgaccggagagaaagagagaggggagccaccgcgagtaatcaccactaccaccctcgctcgggggtgagcgcgcggtcggggggggtcacctgagcaaccagatcgcgtcgggggcggtggcagggaagaaagacgggcttggtgaccacaattcctcgtcgtcgccgtgacttcgtcgtgcatcgcgggcaaccccatctccgcctctgtcgtcgacgagcaaatagccgaggaaccaggagctcagcaggttgaaaaggtggagcaggagctcattgaaggcaagttgtgtcattgaccactcttctttatccaataatgttctctataattacaagtacaattttgaaaatgatgaagtggataagaaagagaactcgttgtattaaagtttctatggtcttactcgtattcttgtgtttcctcgtgttcactagttttttattttaaaaagcaaacttaaccatgtttacagtttgcctttt

SEQ ID NO: 14982 - DNA, 530 bp, Zea mays
  Coding DNA Sequence Number=SeqID_579
caactaggccgcatctagcgaggttagttcaccggcttcgtccacgatggtcgatgggcacttgccctgcctccataagtttggcacgaccctcgtcctcgctcgcgccagccctgtccgccagaaaccctgccgccgtgcgcaatttcttgcatcggtcgtcaatgtcccgattagccgatgttcggccctctgcgtccaccgcgggtgactcaccagctcaccaggaggagctcgcgaccttctctgggggatatttggaacctggtgtcctggaattcctcaccggggctgtgccagccgccgctggatgcgcttcaccgtggccagaccaccacgctactgtcctccgatcaatcttggaacacttatgaagcctggagtttgtaaacaacatggtaagccttctcatggttcatcatctatggaactatcatctatacatatatgtgttcataattagataatttatatgttgggagtataagacaaaatacccaaaatatttaccagacaatattgcttctcga

SEQ ID NO: 14983 - DNA, 597 bp, Zea mays
  Coding DNA Sequence Number=SeqID_580
gggagcccagcaagtcgtcaaccgctgcctccgccaccatcgggcgactgctcctcctctgcgcgcggcgcgcggcatgggagcagaatatcccaccttcgcggacgtctccggggcccgcgccctccttttcctcgccgactccacgcccccgccggccccgccttcgcctcctcccgctcacggagtcacggcgatgagttctgctgctgctctggctcctcgtcctcctactccgccgcgtcgaccaggtcgtgcgtctccgactcggcgcagcgcggccgcccccgtcgaccccctctgcgtgctctccgttcatccgttgtcgcctccctccacctcatcgaacctaagctgtgcaagtgctctgctcgccgaggccacaagcgcgctgttccataccgaggcagagaaaagacggaagggcgtgtggatcgagatgaagcgaacaaagttctgaataaatgttcaggtcgcagactggtctgatgaagcgaacaaagttcagtttatagcaaacgagatatttactgtagggccggctattggagaggccaagttgtgtcttctgaagtgtatccagtaatttctacctgc

SEQ ID NO: 14984 - DNA, 465 bp, Zea mays
  Coding DNA Sequence Number=SeqID_581
ataaatgtgtcattactgacccgataataataaatgaagggatgaaaggaaacacgctgaccaagaggtcaatttaatgattattatgtgttcattgaactcaaggagcatgcggactatttgaagacagaaatggaagataaacagaaacgcttggaagcagtgaagaaatcacttatatccgtagaagccaaagatggagacatcaacaagaggatagatcgggccttcagtaaggcgcggtcgaggagcccgagcagcgcgccttaccgaaggcctcgagagtctccccgccgccaccgttgccgcggcatttcagaagcgctgctgctacagcgaccgcggcagctggtggtggctccacctccatggttgtctgccactttgcctttgcgatcttgggcggggctccctcttcccctgtggccctgcactgcttttctttctagtctgaactatttttcg

SEQ ID NO: 14985 - DNA, 533 bp, Zea mays
  Coding DNA Sequence Number=SeqID_582
actggcgggaggctcctcgtctctacctcacgccggcggacctcgtgcagtcggacccgaccaccgcccagccgcgcagtggacggatgcgaccatagagtgatggtgaagatgtcggagttcggcgctggccgtgacctgcgctccgctgtcgattggccctcctccatcggcggaagttttctcgggtgcgtgttggggcgaaggcgaagacgctacccttcgctcgatgccttcgccagtctcgctgcgccaacgaagacgacgatcgacagtcttcgctctttgtccggcacaccgaaggacgaagacctatggcgaggtcgccccatcccgcggtgtcgcccaacactggagcccacgtgcaatccggcccgtcataacgggccccgcgctatcactgcgcagtacgagcttaaattgtaaaggtttttatgttattacagtctgtaaccctgctttaatgagaatattccagggggaacctaggcacctgagggcacatgcgtccttaatccttgacgctgggcact

SEQ ID NO: 14986 - DNA, 573 bp, Zea mays
  Coding DNA Sequence Number=SeqID_583
gcggcgcatgcagtggtaagcatcaagatgatgcagcagcagcagcagaagcacgacgactctgctggctcgccgcggatgctcacgtgggggcggtcgctggcgcggcgggtgaggctcctgcgccggcgcgggggaggaggagggaaggaccggctgctggaggacgccgccgcggatgccaccacgcccaaggggcaggtggccgtgtacgtgggcggcgggggcgagtcgatgcgctacgtggtccccgtggtgtacttcaaccacccgctcttcggggagctgctgcgcgaggccgaggaggagttcggcttccagcaccccggcgggatcaccatcccgtgcgcggcctcgcggttcgagcgcgcacgccgccgtggccgccgcaggcggcggcgccgggaagaaggtgccttctgtctggtggtagcagcacgtggccacacggtggtcggtgtacatacatacacacgtgcatgcccatcaggatcaggccgcagccggtcagccctcctcaggaggatcccgatcgattcccatgggccatggggactgacgatccttctatat

SEQ ID NO: 14987 - DNA, 553 bp, Zea mays
  Coding DNA Sequence Number=SeqID_584
acaaatgttgtgttcgaacggtcaatgggtgtgtcgaccgattggtgtggttagtaatgatcgtgttgggaccatgttgtttggtatcagccattgcattggagtacgtgttattattgattggcctagacggtactaatcttttgttgttgatgtagcatcttctgattggctaacactattttaatcgtttatattctaagttttttaagaaattccaaaaaaaggaaagtcataaatccatcctataaaatagagaaggtgtttgggctcattcacaccccttactctacaattcacggtaggattctactctctgtctcgctatggatccaagatggagtccgaactttgatatgctcaccgacttgcgtaatgagcaatctccacaatgtcccgagacccgtgtcggtgcagggcatgtcttctttgatggtatttctcatgtccatcatcggtgggaggacattcctccttgttcctatttcctgactttgcaacctatattcgtatcctccccttcatatctatatcgaccattcactgatgctcc

SEQ ID NO: 14988 - DNA, 547 bp, Zea mays
  Coding DNA Sequence Number=SeqID_585
gcacatctcgacttacgtagtcggatgttggataccatgctttttatttcatgtattttacatgttcaacaacgaatggaatatgttctggcgaattgtggttgaactaaattacattgctgaatatttcgcttacagtgctatgatattcgtcttgatgattctgcttcggcgcaataaatactaccgaatggcttttgacacaatgtttaaaaagtccaaagtccagaattatcaaagtgacgatttggacaatgacgatgacaatgatttagaaacaggaagtgaatcgagcctaaatcaagaaaatcctggaccttagttagatccttagattttctaataatatcattttgtcttatatgaaatagacactttcttctggattaaaacccattttataaatttagatttaaacagtttaaatattatattattttacagtgattttttttttataaaaattctattttttaaggagttttaatataaattagttatttaatttttattttattttttgtgccattatcgtttaagtcttgta

SEQ ID NO: 14989 - DNA, 313 bp, Zea mays
  Coding DNA Sequence Number=SeqID_586
acgtcagcgctgttgcttggcttcgacacgctgtctgtctgctgcttccggcacacagcaattttttctatatttttttctcggttcttgctgttgcctgttggtacgaatagtatactgcgtataggttgtgggagtggccggtgatctgatctcggtgctggttgcagttgttgagtagtttcatcgtacctgatatgtctccttgatactcaattggtatgtatataaaaggatatttataaacttgtactccctccgtttctttttattagtcgctggatagtgtaaaattgcactatcccgcgactaa

SEQ ID NO: 14990 - DNA, 537 bp, Zea mays
  Coding DNA Sequence Number=SeqID_587
gcaaggcgcgcatcaaacactagtatgatggatcctgggatggtcggacggatgggaagacacgaccggagcgaaaacgctgccatggcttccgccccgtggcgcgcttgtcggggttggaccggcggtgtcccgggctttctggaacggcagcggggattggctggcctcaccgggggagcagcccggctttctgctgcgcattcaagaaaaaaggacctctggccctttgccgcctgtgtcgctcgccctcgccctcgcctccaccccatcgctgatcggccgccgggaagaagatgcagcagctggcggagcggcagatgggagctgcccatggatcgcatcgatcggcggcaaccgagtcggaggatcatggtgtgaaggaaaaggaggagctcctcggcgtcggtctgggttgaagccggaattaggcaccgacgtttcatcatgtttttttttttttctttctctgtcccagacgacggacaggcctcatgaatcatgatgtctccgtgtcactgtgtcggtacttggcta

SEQ ID NO: 14991 - DNA, 521 bp, Zea mays
  Coding DNA Sequence Number=SeqID_588
aacatgtcttgactacggcccaggagaagacaaatcttggtagccaagtaccgacacagtgacacggagacatcatgattcatgaggcctgtccgtcgtctgggacagagaaagaaaaaaaaaaaaacatgatgaaacgtcggtgcctaattccggcttcaacccagaccgacgccgaggagctcctccttttccttcacaccatgatcctccgactcggttgccgccgatcgatgcgatccatgggcagctcccatctgccgctccgccagctgctgcatcttcttcccggcggccgatcagcgatggggtggaggcgagggcgagggcgagcgacacaggcggcaaagggccagaggtccttttttcttgaatgcgcagcagaaagccgggctgctcccccggtgaggccagccaatccccgctgccgttccagaaagcccgggacaccgccggtccaaccccgacaagcgcgccacggggcggaagccatggcagcgttttcgctccggtcgtgtctt

SEQ ID NO: 14992 - DNA, 371 bp, Zea mays
  Coding DNA Sequence Number=SeqID_589
ttttcggtggagttccgccctagctctctcattgacatggagaacgaccgaacgttcctaaccaggggcgggcccaagtagagccgagtgaggacacatgcctccactaatttctttgttctaagtactagagtctagctagacttttaccataagttcatctactcggtctaatttagatgttcatactctattattttgttactcgtccctattagtatgtcctcagtcatattttatcctgtgttcatctatgttcctaattcctacccttagcacatgtttcccagcgatgtgatctcctgctgccttccaagcctacaacaacaacttgtagtgcgcacacagagacacccttgggcgtgttcggc

SEQ ID NO: 14993 - DNA, 288 bp, Zea mays
  Coding DNA Sequence Number=SeqID_590
agcaacaaggacaggattattacccgaccgaaatcagctctgttgattcacatgccccggtatatcatctgcaggcgggcggagacggatacacgaggaggaatggaagtacatctcagagccaggagggatggacggcgacggtacccggcgtcgtcgtcgtccatgccgtcgtcgtccccctccaggtccacctgctcctccggttcctccgacggctgccgatccgacatcgccgacagcaaaccctaaccctttgcgccggaaaaaacctacgcgcggcatgat

SEQ ID NO: 14994 - DNA, 302 bp, Zea mays
  Coding DNA Sequence Number=SeqID_591
ctgtgtggtgtccagccgatgctctctcccatggacgccctccccctcttgcagcaagtcagcaaccccatctcctctgccctccatccccagctcgcccctcaaccatggatactgccagccctggcactcgccctctgcacgccattgctctccttcctgcagcaagccccatctctactggcgctctaattttcagtcatcccgcatggccggcgtcctccccattttctacaggtacgttaattaatcacgtgatgtggagaataagagatgggttgatcacaagatgatgctaatgg

SEQ ID NO: 14995 - DNA, 547 bp, Zea mays
  Coding DNA Sequence Number=SeqID_592
gcacatttcattagacttaagtgtataaaagtctttttaaaaatacaaggaaggggtaaatgcaccggggcttgcctagaataaacactacgtcagtgttgttagatgatactcgcttggcgagcacctcccatcctggcacttggttgatttatcatctttagcttcgtccattagcatcatcttgtgatcaacccatctcttattctccacatcacgtgattaattaacgtacctgtagaaaatggggaggacgccggccatgcgggatgactgaaaattagagcgccagtagagatggggcttgctgcaggaaggagagcaatggcgtgcagagggcgagtgccagggctggcagtatccatggttgaggggcgagctggggatggagggcagaggagatggggttgctgacttgctgcaagagggggagggcgtccatgggagagagcatcggctggacaccacacagggagggagggagatggaggagaggcagccatgggagggatcggctgggagatgacgtccagcgagagagagcgac

SEQ ID NO: 14996 - DNA, 570 bp, Zea mays
  Coding DNA Sequence Number=SeqID_593
agataccacatagttggcaacctgttaatattacaaatttattaacaactctattatttaatggatccaatagaggtgtgatgaatctgcaaaaaaaaaagttgaacaatcatttctcaagagtgttcttcatagcataatttcatttctaattcaatacaagagaagtgtgcttggaaacttccaacctcactagcgttggggtttggatcttggaggagacgaccttgtactggatcttggagaagaccatgtactgtgtcttggagacaacattgtattgtacatcgtgtcgcggaagacgacggtggaggacagtgaaccgagggcagagatggcggcggagggcgacaaatccgagacggtggcggtggtggagggcactgtcgcctcacgtcccgctcgcgactgcgtcggggaaggacgacgatggagcggcagcagagcggatggcagcggtgtggacgatagtggcggcggagggcgtggttgctcggatccgcttgtgtcccttccaaactggggaaggttgcccggcctcaggtggccatgagggcttccacgggtatc

SEQ ID NO: 14997 - DNA, 541 bp, Zea mays
  Coding DNA Sequence Number=SeqID_594
gttcaattcctctagcgaatcgcaccaccaccatccagtgaagctccccgaccagtcgaatcgagctctactaccgtcatttagccggagcacatgttgacgtcaagccctgtcgcctggacacgcggccagaccattttcggccatctccgacgaggtttcgaccactgccatgaccgtcacaaccttgtgaaccttaccgcgctcttccctggactgctacagcaaccgagaggatgtcctaatcccggagaaagaaggagttcgtgaaggaggaccagatcctgctctcgagcctccaactgaggatatcccttctgcacctacacctaaaggtatcttcggattcatggtaaaagcagacacgatgaggagcttgatcgtgatgaaggttgtcgtcgctccgaagttgtgcgaaagggagcttcggctaaatcgcagaaaagggaaccgacttaaaagggaaaaggttgttcagtcctcatagatttttctataagccaatggtaaatgtaaagggcataattctaattcctcatag

SEQ ID NO: 14998 - DNA, 580 bp, Zea mays
  Coding DNA Sequence Number=SeqID_595
acgtcgccaagctgtggcgcaccgacctcggcgggcgcaccgtgggcgcgcccgagtactgccacgccaacttcaccaagtacttcacggggcggttctggtcggaccagcggttcgccgggacgttcgcggggcggcggccgtgctacttcaacacgggcgtcatggtggtcgacctggagcggtggcggcaggcgggctacacgcagcgcatcgagcggtggatggaggtacagaagtcggcggcggggcgcatctacgagctggggtcgctgccgcccttcctgctggtgttcgcggggcacgtggcgccgatcgagcaccggtggaaccagcacggcctcggcggcgacaatgtcctgggcagctgccgcgacctgcacccggggcccgtgagcctgctgcattggtccgggtccggcaagccgtgggcgcggctgggcgccgggcggccgtgcccgctcgatgcgctctgggcacccttcgacctgtacggcccccggccccggcggcggcgccgaggaggacctacatgtttttttattcgcaaaaaacaaactatatgttctccatctttttt

SEQ ID NO: 14999 - DNA, 571 bp, Zea mays
  Coding DNA Sequence Number=SeqID_596
tgttctctctgtgttgctttattgatgtgtcgagtacaaatatatatagattacaaccaaggaccatgcaagtctgatcctgaaaagatggtcacgaagtctcctgtgatcctaaaataatgggctacgaagtggccgaaagactcggacagaaacaagaaaataggatctactaacagacgctttacattatctaacaatcagcatcatgagccggcagtcagagacggccgacgagctggccgccgtgaaggccgacctcgacgccgccagggcgtcggtcgccatcgtgctgcgagaggtggaggctatggagacgagggccgtcctggagtggagagggagggcaccaaggacgtcctggcgcggatactgctgctcaacgagacggtcctgtcctctgccgtcgccgcgatcagggccgaggaggagaggtccgtcttcttccaggaggccacgctccagttctttgactctgacaggaacctagaggtggccaggcggcagatggaggtgatggagggcatggaggcggagctgctggcgaagtcggtggaagtcgagtacctgc

SEQ ID NO: 15000 - DNA, 550 bp, Zea mays
  Coding DNA Sequence Number=SeqID_597
catggtcacccggtacggtactacaacgcgtacctgtggggctcggatgagaggctgccgctggcattgtgctattcggcggcgccgctccagcagagcaagcgcagagaagagggccctacgagtggcggccttggcttgcccgactggcaggcgccagcgctttcacgccacgggcccgtccgtgggagtggactggtgtctggacggagcggcgcccgaggcctgcggttcacaagcgcgtacgtacacgtactgcacgcacgtaccagaagtttgcgtgagtatgtgtgaaggaaggagctgttgcgtacgggacccggtytgcaccctgccaagaaaacggatcgccgcgcatggatttttttttacccggtcaaagctgcgcataaaaaggaaaggagcattagtggtagttacgctgaggaaaagaaagaagtagtcgtctcctgcattgccgcatgcatgatgcgtgcatgcaaaaggaaaagatatatggctacttggctagattcactctttaaaatctgcatgcgatttttatcttttt

SEQ ID NO: 15001 - DNA, 283 bp, Zea mays
  Coding DNA Sequence Number=SeqID_598
agccccacaggtacgcgttgtagtaccgtaccgggtgaccatgccccacaggccacacgtccgtggtcggatgcagggttgagccatagaggtactgcgacagggatagaacaccgagtccttccgcgggaatagcctgtccaactcccctccagtgccgggttgaagacgtgcccaggcgccgtgtacttgttcgaccggatgatcgcccataaacggtacatccaatctgccgacttgatggagattcggtgcagatcgaatccatagcaacgtcgaggta

SEQ ID NO: 15002 - DNA, 523 bp, Zea mays
  Coding DNA Sequence Number=SeqID_599
gggtgtgttcattaccaatcactcattatcagttacattcaacgggtcatttgaccatatgagtatcgactcaactagtgttcaaacattggaaattattgaccctctccatactgaactttggggcactagcaacaaaaagaaaagcctctttcagatgctaaagactacaaagactacaggagggtctagattgttgagagctaacttattacaaccattaaaagatattcagaccatcaatgctcgtctagattgcttggatgagctaatgagcaatgaggagctgttttttggtttgactcaaggtctacggaaatttccaaaagaatcagataaggttctctgccatttctgcttcaagcccaaaaaggtcacagatgaggtattgaagcctgccaatggtagaaagagccagatgttgatttctgatattattgtccttaaaactgctctggacgccataccattcttatcgaaggttttgaagggggcaaagagttttcttcttcacaacatctat

SEQ ID NO: 15003 - DNA, 308 bp, Zea mays
  Coding DNA Sequence Number=SeqID_600
gtccaactcaagtcatcaccgtgattccgctaggttgcaccgagagcgatggcaccaaacaaagagatgaggagggagaacagagaggttaccgccaccgtcgattcaatacttcaccgtcggttcgacctcagcattgggtcatggggaggccaccgggggtacctgtgcttggtcgaagagggtctagacaagaaggtcctctggtggcatgacaattgctcaccggagttgggcgggtgcggtggattcgcaccgcaccgtgaccgcccctttcaccgtcgtcttcatctgacaacgagcagtcc

SEQ ID NO: 15004 - DNA, 566 bp, Zea mays
  Coding DNA Sequence Number=SeqID_601
gcggtctggcgatcgcgcgctccatccagaagctggaggccgacgtgtcggagacgcggcatgaggtgtcgcggctcaggaagcggggcgccgagacggaggcggcgctggccagcctccgcgcgcagctccagtgctccaccggggcctctcgacgctcgccgggacggaggccgacagggcggccgcggcagcgcggcgcagcgtcgggggcgacaccgacgacgcggcgtcgtcgtcgctcacgctccggagcgggcagtggggcggcaggctcgccgcgagcgagtgcctgagcctcggcgaggtggacaccgtggactacggcgtcgagctcgtggggagccggaggcggaatgtgaagctcgtcgtgccgctcatcggcgacattctcttttccaggaggcggagcaccaatgagaagggcgacggcggcttctacagtgcgtggtgatctctacggcgtgctaggcaggctaggctgatcgacggacagtgatttgtgtaaattttttgttattgttcgtgaggcttgtgcagggagttgcgtttacgcgaacgtacaa

SEQ ID NO: 15005 - DNA, 576 bp, Zea mays
  Coding DNA Sequence Number=SeqID_602
aaagactacgcataacgatcgttgaaactgatgctttaatatagtagagttagagatttaaaatgctattttggtgtttataataaattcaccaatattatttacaattaaaatattaaatatttatttttagaccaaagttcgttatataattaaatcgggtttcaaaataaaagaatactacacaaatttctcaacactttagcaaacaaagactcatgctccaaaatgaatgcatcaatcacttgatagacatttaatcgttcacaaaatttgttaaacacaattatatcattattttaattattcgaaaatattttccttcctatgaattaaattatattgtttttgtttgatgaatttgagttgttacatgttctaacctttcggcaaaagtggctcaacttytggatgaagcaatagttttatgtggagaaacatttggacaaaagggaggatattaatggtattatttagaggcctatcatatcccgctttggcataaatagaccaactgttgtagagtatgatgaatctcaatcttgtttggtagcgtctaatgttgtttgcagctat

SEQ ID NO: 15006 - DNA, 564 bp, Zea mays
  Coding DNA Sequence Number=SeqID_603
aagttgagccacttttgccgaaaggttagaacatgtaacaactcaaattcatcaaacaaaaacaatataatttaattcataggaaggaaaatattttcgaataattaaaataatgatataattgtgtttaacaaattttgtgaacgattaaatgtctatcaagtgattgatgcattcattttggagcatgagtctttgtttgctaaagtgttgagaaatttgtgtagtattcttttattttgaaacccgatttaattatataacgaactttggtctaaaaataaatatttaatattttaattgtaaataatattggtgaatttattataaacaccaaaatagcattttaaatctctaactctactatattaaagcatcagtttcaacgatcgttatgcgtagtctttttacaaataacctctcacatctattttaaattaaccttttgcatcgtcccctccgagcaaccaacctccacgttccaaaccacacctctgcatatagatggccaaacgggtggcccagcacggggacagggaggtcgaggaggctttgctctgctct

SEQ ID NO: 15007 - DNA, 435 bp, Zea mays
  Coding DNA Sequence Number=SeqID_604
ggaactgagccatcgggcgaattgagaaaatggttagccgccattggggaaatcgcaccgagcttcatcgaagagagagaaagagtgatgggtcgcgttgagtgccagccatggggcattgccgcaaatcgcttgtggcgcctgtttccgtgcatgcggcgcatatggccagccatggcgccgtggcgacccaaatcggctgtagtcggtcttcacaaggaggaaagaatagagaggctaccgccggtgacaataagtgcttcaccaaaggtagtgaagatggtgcgacggttgtagctgaagcttggagtttctattcgtggcgtcatcgggcttcttgcgtggacgaagatggacgagttcttcgccgatgctcggaaggcacggcggacccgctccacaccatgggttgtggacaccggagcacaagcactg

SEQ ID NO: 15008 - DNA, 533 bp, Zea mays
  Coding DNA Sequence Number=SeqID_605
ttgtaacttcccctcctgaggaattgaaaggtggtgaaactcctggttccattgatgtatctgttaaccaggcttcaattgagcaacatgttcataaaggtgcttccgaggttgcgaaacagggggtaggtcttgttatctctgttacagaagcttatgatgaaagtacatttgctacttcagaagttactcaggaggctgtggttggtactgcagaagttagtcagagaagtttggatgctgttgcagaagttgagtcttgtctagttgatgcagctgcaactgatgaacccgatggtaatggtcaaggttcagcttcaagtggtgatactatagtgaaggaaggaagtccgcgctctgaaggtcatggcaatactattgagaagaccccagaagatggcaccaataagaaaatagctgtcgatgatgaaccttctgaccttactggtggtgacatcaagttgggcctcgatgtgcacagcaagattctaaagctggaagatgaacccgcacctcctcatgatatgttgcat

SEQ ID NO: 15009 - DNA, 447 bp, Zea mays
  Coding DNA Sequence Number=SeqID_606
ggacacttcataatacaggcctagatagatcacaaaacctttacaaggctttaagccagctgttaaccgtaatctgggctagcccaaaccacataacaattaacaactactggtattatactactaatcacttacaactatccttcatccatgacaaagaggcggcgcgccagacggagctaatgcaacgggtgggggcaaggacactgcaaatcaaggggaatcaatgttggttggggcggtggtggagacgagggcgctgcagaacgaggtggagtcggcgttgggtggttggggcggcgatggagacgagggcgccgagaatcgagtggagaataaggaatatgatgatgttgtgtgaactgacccgcaacgtggattcattgaatccgagagtggtcgggttgcagttcggctagaaagaattgaggctgttgggtatgacta

SEQ ID NO: 15010 - DNA, 544 bp, Zea mays
  Coding DNA Sequence Number=SeqID_607
ttcctctgctccttcgtttctcagagctcggccagggagcttccaccctgcgcgtcctctacctggtggacacgctcgccccagcccccagctccaaccgcctctgctccctcctgcagctcgccctcaactccctcactgctgctcccatggccgcctccagccatcttcctcaaggcgtcacctcttttccccatggctgccaagccccttccatggcgctcgccaccgtctcctgtctggtcaccccatctccagcccgatctgctctggctgtcagccgtgtcaccatggctgtcctcctccgctgccactcgttggaccttgcccctgctgtgccgccggcagttccccgcgccctatcctccctggtgctcacctctgctccccctgcgttggacggtcgcccctgtatcattgcgcgtgcccctcctcacaagccatagcgcagcagccaagccctagctcgccaaccccctccgttcagccggccatggccacctcgccgaggccccagccacgacttcatcaccggtgaggaccc

SEQ ID NO: 15011 - DNA, 382 bp, Zea mays
  Coding DNA Sequence Number=SeqID_608
gcgtggtggatattgtgtctctaatctagcagaaggtcttgagttcaattcacaattcttacagatttcattttttactgccggacagggataaaggtaaaacaggaaatgaaaaaaggcagaacgatagactacccttacagccctaataaatagtagagacagagatttaaccacacaatgtcacaaccacaagatgagtactccagtatgagtgacggagacattgcaagcaaaattaacacgtcgtgtccgttggccgatcgatggacaggagacggctgctctcgacctttttcaccatttttaatccgcactagcaatctaattaaaggcgttttccacgcttgtcctaaaaagcgcaaataatcaccatatcaga

SEQ ID NO: 15012 - DNA, 495 bp, Zea mays
  Coding DNA Sequence Number=SeqID_609
ttagggtctcggaactatcgggcaccagacgttcttaatgaaacattaaggagagcagtatgtaccttggtcgagactatttttctaggtagtctttgcgatgagttctttatgttttgtaggctcgctaccactcatgattattttttgcatcaaatttgggataggattccaaggattttggttgtcgtgcacatcaaatttgtctatctaggcaactacatgtagttttaagaatccaacgtgagttcatgttctgtagactcaccaccactcaaatgattattttttgcatcaaatttgggataggattcaaaggattttggttatcttgtacattaaatttgtctatctagtcactcaactacatgcagttttaagaatccagcgctcttagaccgactttgatagttttcaatatttttttgagctatagttcatgaaattcatgtgttttggggtgtcctagaatggtcaagccctatacactctaag

SEQ ID NO: 15013 - DNA, 462 bp, Zea mays
  Coding DNA Sequence Number=SeqID_610
acctttgttgaccttcacggcgcgggagagccgagagcatcctcctttttttctctttcccaccgcatgttcgattctagaagcgtgttgcatgctggcgtctggtgaaggagcggacaggcggcggctgccggaggccccgatctggagactctataagcaacagcgaaaggcgcggacgggaggagcacgtggacatgcagaaggacgacgcggagggagcaagaaggggatgagaaactgatgaagtgatctgcagagagacgaggcggagggagcgaggaggaagagagacggtcagacggggtagatcgagcgaggagaggcggccacaatcaacgcatcaggtggaagtctccagaggcgaggggaagatagagcatgtgagagagcgtgatgaaggtgaaccagtgatccacgatcaagcggttaagaagattttcgatgacgtggatgggctag

SEQ ID NO: 15014 - DNA, 473 bp, Zea mays
  Coding DNA Sequence Number=SeqID_611
tatattatgaaagccggtacaaaccggctcctcctagcccatccacgtcatcgaaaatcttcttaaccgcttgatcgtggatcactggttcaccttcatcacgctctctcacatgctctatcttcccctcgcctctggagacttccacctgatgcgttgattgtggccgcctctcctcgctcgatctaccccgtctgaccgtctctcttcctcctcgctccctccgcctcgtctctctgcagatcacttcatcagtttctcatccccttcttgctccctccgcgtcgtccttctgcatgtccacgtgctcctcccgtccgcgcctttcgctgttgcttatagagtctccagatcggggcctccggcagccgccgcctgtccgctccttcaccagacgccagcatgcaacacgcttctagaatcgaacatgcggtgggaaagagaaaaaaaggaggatgctctcggctctcccg

SEQ ID NO: 15015 - DNA, 469 bp, Zea mays
  Coding DNA Sequence Number=SeqID_612
tcagggtttttatcatttcctcaattctaactctgacaaaggcactgctgatttaacatcagcataaggttctgatttaacattaggataagaattgagcttggttgtccatccacagtcgaggaggaagcggaagccatcgacgacgaataggtagcacagggggtcctccccgtacaccccactgagaggcgtcacctacactgacgtccccatctgatctggaaaatactgcaaacttctaacaatttgacctgtagtattttatatcttgcagataaaacaatacacttttatataattgttactgatgatagcttagtatcataaggcaacaacagaatgggtacccaggaaactcatgggcttgacaacatcgatccaacgtttctgaggtacaagaacacaggtaccattatcttcaatactgttcactggtgggcgcatgacaaaacttttctacggtggg

SEQ ID NO: 15016 - DNA, 262 bp, Zea mays
  Coding DNA Sequence Number=SeqID_613
gaagcagcctccgaagggattgcacggatcagccagctgtcgttctcctcgcggacgccggtctctgtgtcgtacatagcagccgcctccgtgtcgtatgtagctaccgctgctgcctcgcatcgagtgtctcgcggattctttccacgacgcggagacgagggatgtttcccggccaggttgagctgggaattgccagggtgggtcagggttgaagcccgggtggtgggatgaaacgaacacctatttcgttgtgggtcgg

SEQ ID NO: 15017 - DNA, 268 bp, Zea mays
  Coding DNA Sequence Number=SeqID_614
cattgtagggccgtgaccatcaccactcatcctcggacgccgccatgaacccacccgcgccgctgccatcgatcgtagctgttgtcgcctcccaacctccgatgtgcagttccaggagtccggatgggtgggtagatcgtgtacaagggcttaatcgagtgctgagacctgcggtgcagcggggatttctcgtcgtcgttgcaagccaccgcgaaactaccgagcgtcgtgaactgggtgtctcggccggcaatttctcgcgcgagga

SEQ ID NO: 15018 - DNA, 276 bp, Zea mays
  Coding DNA Sequence Number=SeqID_615
caggtaccaacttgccttagagatgacacgtgtcctcgcgcgagaaattgccggccgagacacccagttcacgacgctcggtagtttcgcggtggcttgcaacgacgacgagaaatccccgctgcaccgcaggtctcagcactcgattaagcccttgtacacgatctacccacccatccggactcctggaactgcacatcggaggttgggaggcgacaacagctacgatcgatggcagcggcgcgggtgggttcatggcggcgtccgaggatgagt

SEQ ID NO: 15019 - DNA, 337 bp, Zea mays
  Coding DNA Sequence Number=SeqID_616
ggcaatggcttcgtttcgacgacgacgccgttgtgcccgttggtgagaaggatgtcttgcatgaccaagcatatgtcctcttctacaaacgagtctgaaagcacgacgtagttgaatagttagttgctctttcgtattgctgctgcttaaacagccagatatcatcatctaactatggtcctgttaatgtagccgctgagtatcagcagagtattatgtggagtgcaccctggtgccgcctgtgtttgttagtattatttgcctggtcgtatagcgagagggggattcgtcgtcagcccattttgaggttctgtaaaatttcaactgcgcatcattg

SEQ ID NO: 15020 - DNA, 460 bp, Zea mays
  Coding DNA Sequence Number=SeqID_617
tgttcttatcagtagactgcccctgctttcatgtcatacttcttaggacctggcaatctattttgacctgtattgctcttcttgtttataggcacatgttgtttcagcgattttgaattttagtgagaattgtacacaagaaatcggcgaagcatcatggctcctgacgaagcaggggctgcgaccagcgcgctggacgttgctgggaggcggctgctgtctagaggcagcgacagagctcatgatcgttgagacctttgatactagattggtaggagttgtgttccctatgctgacgatatgtttccgttgcaacgcacgggcacctatctagtttatcatgaaaatgcaaaccatgtgcctgtgtagaaacttttgctatggtatgccctccaaacggcgtcagtatttgctccaaggatgttgtgcctagaatacagcagggtggttggagttctat

SEQ ID NO: 15021 - DNA, 470 bp, Zea mays
  Coding DNA Sequence Number=SeqID_618
gggacgaccagtgaccagctgcagacggcggctgccaagcttcagccgccgcccttcggtcctcaagatcacgtcatgcacgccatacgcgagcagttcaccattggtcccacaatgtatggcacgtccgactcatgccttgacctcaacatgccgacgatgaatgaatacgcagacggcctagccgccactagacaggaagccgaagtcagtgaaagcatgatgatgagcctcaatgcaccggcggcgtcactgtacatggactcaagggcaggacctagcaacgcaagcaatacagcgaacggtcaccacgacttgccggaagccacagccaccgaggatgaagaggatagtacgagtgccaaacgaggcaagatcagtgacctcaaggacatgaacatggctggtgaggagacctcggagtggctgcaagttggcattgccctaccgcccgagaccaacgagagatt

SEQ ID NO: 15022 - DNA, 474 bp, Zea mays
  Coding DNA Sequence Number=SeqID_619
atcgtttggattttttccacagccgccgtctccaagcttctccctccctccccttctccctcacgcactctctctccagcgcctagccgctcctctttctcctccagcgctgcgcccctggcccctctgcccgagctcgcccatggcacgcagctgcgtcttcaagctcggtctccatctccatggcgccgtctgcccttgtcctgctccctagttccggctgagctcgcgccctgctccctggcatcgcaggctcgtcggtgttcctcccgttccctgctcggaccgcggcttttcccccggagctccctgtgctcgccatggccaccgcgcctgctccctggacggcgctcgtattcctccttctcggccgtttccagcgcgcccatctccaacggcgcccggccaaagcctccctacgcgcgcgcctgctcccatgtcgcgccaccttagctcgctccctcaagctcgctg

SEQ ID NO: 15023 - DNA, 494 bp, Zea mays
  Coding DNA Sequence Number=SeqID_620
gcaaagccccgcaagccagcggcatcccggctttcctcggcaggcttccaagacccaacccaacagcttccgagcgagtacggcggcggcgacgatggcggccaagtcgcacacacgcaaggcgttcctcctctgcaactacgtcctcctgggcgcctcctccagctgcatcttcctcacgctgtcgctgcgcctgctgccgtccccgtgcggaagacgtagacgttcggtgaggcgccttgagtgaggccgattgcagggagtagtttgactgacattttgtgggacgcagcgcaggagattaacatgggactcagtagctagggtgttgttagctgtaaaaagtcatgtgacgcaacgcaagagcagcggagcttcttcctcatcttctttatcccccctctccatttttctttggtggtctaacttactaggaggctgtattgatccatcatcatttctcccgttcctcttccttatgatcttgtgacttt

SEQ ID NO: 15024 - DNA, 462 bp, Zea mays
  Coding DNA Sequence Number=SeqID_621
atagctctgggtagggactccaccaaccctcagtaggcctcgggtgtttttgtagaacggatcacacaggaggggcgggagaagaaccaagccgccgcccatgaatccaccacacgtcgtcactaaaaccagggggttctcggggatcgtctcaggagcacgagggatctcgctggcaaccggaccatgtgcgtggcaatgtggtggcgccataatttctcgccggagtgcatggcaccgccgagggccacattgacctgtgggtggagctcgtcatgacacaatcacgggtaagaaaggtcgtagtacaatccgcctccatctgctaactgcataagggcatgtacagtggtgtttaatgtggaggctcttaaggtgtttaaggggtgtatttgcaaaaaaatcttagagccgtctctccgtgaagagacgtctctggctcgtgaaccaaaaccaagtagt

SEQ ID NO: 15025 - DNA, 445 bp, Zea mays
  Coding DNA Sequence Number=SeqID_622
caagttgcagtgacagttccacgcagcagatcagagagacacacgcactagctacctgtagtctggtctgcaggtacgctagcgatctagctaccgctgtgctgcgtgtacagtacgtagtaccatggcgaagaaagtggccactctgctggccctcaacctcctcttcttcgccttcgccgacgcatgcggctgcaggtgcggcggatcctgccctagtccaggcggcggtggcggtggaggatctggtggtggtggtggtggaagcggtgggggtgggagtggagggggtggatcgggtggtgggagcggtgggggtgggagtggaggcggaggatctggtgggggcggcagcagtggtgctcaccgcctagttttcagtccttattcgcctcttggttttgagatctatatctgaactagcagtgctttcttgtctcaacta

SEQ ID NO: 15026 - DNA, 593 bp, Zea mays
  Coding DNA Sequence Number=SeqID_623
aaggagctgccgtgcgcttgattcgctgcatctgagtgtcacggccgcgactacgcgccctccaatcctccatcgcctcccgtcgccgccgcacagttgcgataggcatcgaccctgcatcctacgtggtctggtgctggggaatggggaggagtgtcaccctgctcttcattatttgcttagttttgtgtcaccagatgatgatccaagcttgaaggattttcttatgaagtccctacttggcatatacacgggcaggaatcagtaggttgttacccagagatttgagcaactagctagaggcattgcgtgaatgatgagcagtgaacagtccttgtggtctccaccatccattaacaagcaacagcaagatattggtcgtctacccatcaggtcggatggcccatccctaaattctyttggtgacttcataccaaacctcatgaactcaaatgaactgtcttggagcmcatcattgttttgtggcctttaagaccaatattttattgattcggtgcatgtatatttctactcaacaagcagcacaattacaatacaacatytagatggctcatgctgctatatttgtatat

SEQ ID NO: 15027 - DNA, 500 bp, Zea mays
  Coding DNA Sequence Number=SeqID_624
gtatgtttttgttcacaatcgcaatgtctaatgacagctggtgaatgctaggtagcttacgaagatggattcttttgcgtgatgcacaagcaccccgagctgacttctttttctggcaccatctgcaagttttttcttgatgaaagcttttcatctaggtgagacagaacatggggtctgctttgagttcgagaacaagatcttgcgacttgctgtaaagcatggaatatattgttccctcccagcagagcattgcgtcatagacaatgaaaaagttttgttaataatcgttgcttcagatatgtgaaagttttggctttccatgtagcgacacaattgggatgtaggccatttytgaaacagaccgctgtttgcaggtggtgctgtttgggacttgattaccagctgtgcccttagttttaacggaggggtggttataattttgttccttctatatctgtatgtgctaagttgctcctagtccgtgagagctttctaca

SEQ ID NO: 15028 - DNA, 212 bp, Zea mays
  Coding DNA Sequence Number=SeqID_625
gtcaaaagttgtggattcatacggtgatcgttccatccccaactttgccatggaagagaactgcccaactaaggatctcgtctgtcagactcctagccatccatagctaaaatggcacaggaacataccacaaagatgaccaaacccatcttctctataaatgccattggaccccagagacggccaaaaccagcttatctgcaaatgccatt

SEQ ID NO: 15029 - DNA, 511 bp, Zea mays
  Coding DNA Sequence Number=SeqID_626
gttttctctgttgttcagtgtgcatgttagtcatggtgttgttcgtttctctgcagataggaggtcgtccgactccaccgccaccgccaccggcagtttgactccatcgtgacctcagcagttgacaggctcctgtgcagctctaggtcgacactccgcaaggagttggaccttccacagccgcacaaagctcatcacgtttgacaagggacacatttgctgacgacgacgatgaggatgatgatgacgatgacgacgttcatgtgcgtcacgacgagatcggtctgtcccatctacaagttgctccagtcaccgaaccgtcacagcctacggccacacagacgacgaccacgtgatccttacactccaggcaccgacactcttgaggccaagtgtaagactaggaggaagtgaggtggtggatgtcttcttatttgggatgtgctatggattgtttctgatatggctgtgatttggactatgtgctacgcacggcgatttggactatttt

SEQ ID NO: 15030 - DNA, 515 bp, Zea mays
  Coding DNA Sequence Number=SeqID_627
atgttcctagaaatcgatccccatccccatttcatcgtcgtcggccgccccactgccaggctccaccactagctcctcgccgccagtccacaccgccgctaggccgctccttcaccagctcctcgtcgccctgccgccagctcccagagacctccacggcttcatggccaccgagacgccaacgcctcgtcgaggtcctctcctcgcccagagatctccctgcggcgcgccccgtcgagctcctctccgcttgtggttgcggccaccgcctctcacgtcatcttgcttggatcgctgcagcacattcccggtcatcccgtgttgagtttgtgatccaaattctgcatatggagaccgtgttggccgagaagcttgggccagagcatagcgatattagtgaccctaattagggtttgccatgtgtcgtcatttactcctcttgtaggttgccgtctacggacgacgttctgtaaacactcgtgcttctaccgtattctgtaggtgttatgcttaac

SEQ ID NO: 15031 - DNA, 353 bp, Zea mays
  Coding DNA Sequence Number=SeqID_628
ctgaagggcacagtccacttgtaatattgttatcaaaagacagctcaaaaagccttttgaaacttacagccagggggagatcaccacaccatgtgtcaaaccaaaaactagtgtcctcaccattcccaatattttttttctgtgtttgaggaaatgatccttcaccttcattaggcttttccaaaagcgagagtcattgggtcttttttttttgccaaagcaagaggaactcctttaagatacttggcttctacgatggctcggttcatggttttttgttctttgcctggcagcaatggatacgtcagagggaaagcagccatcgtcgaccacagcaacgctcggttcgatca

SEQ ID NO: 15032 - DNA, 517 bp, Zea mays
  Coding DNA Sequence Number=SeqID_629
ttcctccagggctgagcaatatgctgtccctcaacaatctgaatctctcgagcaacaacttgtcgggcacgatacccactgggagccagctccagaccctcactgacccatcgatctacagcaacaatcccgggctctgtggacctcctctcaacccttgccaagacacgtcacgtgttcatgaaggagatgtcggaggataccgggacggggacccatggctgtactactgtgtgatcgctggagtcgtttctgggttctggctgtggtacgggatgctcttctccgttgcgaagttgaggtgctctgttttcttgtttgctgatcgcgtacagtacagagttatgcagaaggtgcggcctaccaatcattttgtttcgaaagagaagagcgatccatcttctgtgcctatgatttctacaagtgatacaagctgaagaatggagtactgatatcttctcttcatcttctgccctagtgcatcaggagatttgctgtctttctttgtacgctttaa

SEQ ID NO: 15033 - DNA, 533 bp, Zea mays
  Coding DNA Sequence Number=SeqID_630
gctgctagccgatgactgtatctacttcatgtggttttaggatttccaggattgcccgagagccaaagttagacagatgggttgcaagagctgctatatttgacacccttcgtggcactgttagttccatgcaagtaacggtgattatcttaggccctcttgcacacatctgttgattgccgcaggaaacttgttgttgctgattggatcttgaggattccacggcgattgaggtactcttcagggcgacgcattggtttaggacgtgggctgttcttcataaacaagaagagggtatccaaataaaggaagcttgtcgacggttagagtgcacggctctacagatttttgctcagcatggatggaggtttacaaatcgaattacttcgtagttttgtctatggattgtgtgtctttttctggttatcaaaccatggtcttctatggtgtgtttcgggaggtctgtccctccatttgtggctagtcgtgtgactacttcatgtaaaaacttttggtgtattggctaatcctcc

SEQ ID NO: 15034 - DNA, 460 bp, Zea mays
  Coding DNA Sequence Number=SeqID_631
gaaataccatttctaggtcacttgacatccaagagcgacgtgtgcagctttagggtggtgctgctggagctcatgataggcaggcggtcattggacaagagccgatcagcaggtctgccaccagaagttgcttttatgctggatttgtggtatgaagaaactttgttgaggggaaagcgagaaggtcttgctgctcatggagagtggtgtcaggatacccttttgtgtgcatttctgcagcgacaagagcaccacaccttcaggtttcaacctgaaactacgaaagcacattcgtaacaagagacttgaagatgtccatatgctcagatatgacatggtattattctagtttcgctttctctcagataaacatttcatgtcagcagatttgtattgttgcttgttggccatttaattgtgaccattttttgtttgtgcagactatccttttccattttgg

SEQ ID NO: 15035 - DNA, 519 bp, Zea mays
  Coding DNA Sequence Number=SeqID_632
aacgatgttcctgcaaaggccgacaggagctgcgcccacgatgccaaaaaataatcgggaacggaccctgcctcaccccaatccagttcgtcgcccacccgatcctgcccagcctcgcggtgctcggcctcaccgtgcccgctgcaatcgcgcagcagcaagcaagccggagccaccgctgcggaccctgcctcaccccaagccagtttgtctgcttgccggagcttcaccgagctaccctccgcgaccatcttcgtcgagcttcttttcgaggttgcctttggtgcatcctatgcttaggtaaagaagaagaagaagaaggtgtcgaggcggatctccaggagttccaggacttcgacgagtttgaggattaggctatcgacctcccctagtcagctacctgtggtgggtttgtttacgttggctacatttctattatatacactttgatttatattatgtaaatcactctagtctgtagtattattacctactttttattactattcgaagcattgt

SEQ ID NO: 15036 - DNA, 493 bp, Zea mays
  Coding DNA Sequence Number=SeqID_633
ttaccacatccctaaaccctaggtgagtcgaggttgagaaatgggatgaagggatggcatttgagtaaaataatgtggttcattctatgatagagcttagtttagcgcctcccgaacaagaggctcaagaagttgttgattgggatgagtaacaaattattgaaacaatggatggtgaagggagattagaagttgctagtgaagagcaactgtacgtccttttaggtttgagagatgacagcgagaaagcacaaaaggattgacaagatgatagtcaacataatcattctagtgttacaaacatatatttagatttaggtggtgcaaccatttatgttgatgatcacataccaaatgagtggatgattttgtacaacaaagataaactaaaaatgaagctaggtgctttgtttacctctagatagagtttagatcatagtytaaggaaatggggtcgatgcctcgttccatggcccgggtcagcatcccaaat

SEQ ID NO: 15037 - DNA, 337 bp, Zea mays
  Coding DNA Sequence Number=SeqID_634
tgaacgtgcgcgcattcttggtacacgagccttgcagataagcatgaatgctccagtcatggttgagcttgaggggaaaaaactgaccctcttgagattgcgatgaaggagcttagagcgcgcaagagggtcagtttctccctcaagctcgccaagcacgccgtctcggagggtaccaaggccgtcaccaagttcacctcgtcttagccgccttgttgtaggcgtcgttgttgtctgcttytcaagcaagcactgtcatgtgccgcttctcatggcagtagtggtggttggctggtgtgtgtaagtggtgcagtggcttttgcctgtgttatgaatt

SEQ ID NO: 15038 - DNA, 375 bp, Zea mays
  Coding DNA Sequence Number=SeqID_635
ctgattctgtcctgtctgcgtggattcattcgattgacgcggggtttctcttgtcctgtgcaagatgtggagaggttcttcaaactctgtgaccccggtgagtgcgctcgatatctttggttcctcgccccaggatgtggagtgatagccgaggaggcttccgtggtttttctgcttgggtttcgttgctttggtgggggattggaagctaaatttggagaaatatcccttttctctgtctcctctaccctcactcgacatgcttcggattcgattattggtggccttgcagctttcgttaatgctctgcttgtgctggactgtagctgttcgaatttggtgagagattggaccccatgatgacagttttatgtt

SEQ ID NO: 15039 - DNA, 600 bp, Zea mays
  Coding DNA Sequence Number=SeqID_636
cttttgccgagtgttctaggtgacactcggcaaagatattacctttgtcgagtgtcacctaatacactcgacaaagtggttacctctttgccgagtgtccgtcagcctacactcagcaaaggggccaccaacgggcccctgtgccattttctttgtcgaatactccaggaggcactcggcaaattgttgggggccttcggcttccgaaggtcctcaaaaacaggatttaacagtatttctggagtatagtgtgtgaacaggtatcttcggactcaagtcagcatcacagcagaccagaataatacgaaggttgatacagcgccgaaggtgtgagcaggaaagcttcggcgtggcagcaaaaaatgaaaccgacttaaagatgaaaaggctattcagacctcgatagattactatagaattattatcaaatgtaaagggcataaatgtaattttgcataggctatgtcctgtgcctataaataggtgaacagtacccccgtactgttcacgctgatttggcattcacttttgtgtcacgcttttactctcatctccttcaagttgaaggtacatttgtaatttgacgtcacttctgtttat

SEQ ID NO: 15040 - DNA, 550 bp, Zea mays
  Coding DNA Sequence Number=SeqID_637
agtggtggtggcacagcttcctgatcgccttgacagccaccaaattcctgaacgagtactacagcgccgatgggggcctaatggagcatcacaagggttgattctgtggtctgggttgcatccatctctggcaacttgggaggacctgattccacttcgtcagaggttccctcgagcgcctgcttggggacaagcggcgtgttatcgggaggggaatctcagtctctccacgcgagtcgacttcagaagacctccaggtgcagcaggcggaagcagccgtgtccgaggagctacagcagcaacagagcaatgtggagactggtgggcctcaagaggagactacagctgggctgagaaggggaacacgccagcgtaaggccaatgtgagattccagggcccagaatggagaacctgaagatatacgctcgctgagacctacggagaaggcaggatgtaacagaactacgtttatcttcttcctcaagtttcttcttctcctctcgctactgtcttccctgctactgctactctgtaattctgtttccacca

SEQ ID NO: 15041 - DNA, 577 bp, Zea mays
  misc_feature (370)..(370): n is a, c, g, or t
  Coding DNA Sequence Number=SeqID_638
actccagtgcgtggaatggtacaccatatatctacctctcgtggactaactagtcgaaggtgatcttcccatcattatatcatgcgctagtcttgcactggcagacgctggaatcatgatgtatgaccttgttacatccttgtccagtcctgttttggcaagaacatcatcatcgatccgacctcggacgaggaagcacggcaagatggaagccttgtggtggctttcatgccagtccgcaaggagataacacaactcgcgctcactggagagtggagtgatggcagaataaccaaccaggcggtagagctctgtatggatgcttgcagcaagcacggtgacatactgcgtgaccgcttgaakgatgcmngcaccttgacgagtgaatgacgtggcagagacaacacttgcaacagcagatatccttggctgtataaattctgtaggcaagggaggctgatgggcctgatgtttgagtgagcgtgcatggttaatgatgattttttttctctctttctttttcttgtcatatataccccttgcaactcacttctgaccttcacctttggcttcatat

SEQ ID NO: 15042 - DNA, 441 bp, Zea mays
  Coding DNA Sequence Number=SeqID_639
taatctatccatcatcacatcacataagatcatcttcattcacacgtacaaatagccaatatagcataaaaacaaagtataagtcctttcgttatgaactttgacactagaataaattattagtttaactccttttttacaagcttcatgtggattgttgttccattttccttctccatgtcagcttcaagtgttgcttccacttagcactgtgattttgcgctttagccacattcttcgaacattgtggttataacaaagaacaaaaatttcttctgagagaggatgtgtgaatgggccttttctcttctgagaggtatgagattatagcagggagaataacaaagaacagttcatcatcgacttcttcctcctccaacaaaaaaccgcctaacatgctcctcccaagaacccattatccgacaaaatcaccgacggagg

SEQ ID NO: 15043 - DNA, 430 bp, Zea mays
  Coding DNA Sequence Number=SeqID_640
agtgaagcctttagattgaccttacaagtcaggcgccattgctgtgtgcatatggctcctacacctaccatacataattgttagctagactaaaacatagagtgcatatcatataatgcggtactgtagtttctttctttccttctaatctctactacctattaagatggtaagggttaggctgccccattctgtgttctgccattcccattccgtcttcactgcaaagctcattctcattcctagctgcctgtctttctcattccccctccctgcaaagctcattcatatttccattcccggctatcacgtgtctttctcattccccctcccacaaagcatattcccattcccacgtgcatcccacgcctagctaaaattaaattaaaaaaaacaggctccaaggggattcaaacacgcgacatctcaa

SEQ ID NO: 15044 - DNA, 580 bp, Zea mays
  Coding DNA Sequence Number=SeqID_641
tcaaagccgtgttcctcggagtttttccacgacaacgccgacagtgaagccctcgaagcagacgtggatcatgttggaagcaatggaatcgttggagcagaagagcgaggagcagtgggatcggatgatgcggatcctagaccggctcggagacaaggtggaggcgatggagattagacaacgatgcctagcaagcagattccatggaggtgggccagcaacatcttcaacaccaggtggaggttgctgcctctgcggttcggaaggcagaggaggagcgctccatcctcgctcgtcaaatggaggaaaccaggaagacagtgtcgcgtctttgcttggagtggatggccaaggagatggaaggtatgggatcgaaaactgagagggagaaccgtgagcgtaggattgttgaggaagagaatcgaaggcgagaggaagaggatcagaggcagggggagttccgtgagcagcgagggaggaacaaggagattcgtgagggggagttccgtcaacaacaagggggaaattgagagtatagagcagcggatttgccaaaaatgtcattcccaaaatttcaggg

SEQ ID NO: 15045 - DNA, 449 bp, Zea mays
  Coding DNA Sequence Number=SeqID_642
actgctgggagcaccttcgctaggggagctcggccatggctgccctgcgcaagggaggccagggaggagggcgaaaaatctgggcgtccatagcaggcaagatggagctcgcgcccatggaagaagaagggcaggggcgtcggctgccctgcgcgcaacggggaagaaagcttctgcgcacgcacaggaaaaacagaggggaggagagggacgagctgcagaggggcgtcgctggggaagggcgccatggctgtggaggtgctcggctgctgcagagatggaactcgcccctgcaggaaggagccgaggggagaagggaggccagccgtgggagggagctcggcgaccagagggaaaagctcctgctcaccggcctggggaagaaggaccctgctgcatgggtgccgagtgccatggcaaggagccaagctctggcgtgcgtggagcct

SEQ ID NO: 15046 - DNA, 451 bp, Zea mays
  Coding DNA Sequence Number=SeqID_643
tgaagctgctggcacacgggcactcagctagttctgtgatgaagagctaaaatataraagtggcggaggcccgggcacgtgcccaggatttggcctgcggcggcccaaccgcccaagtcacgccagcttgctccaggctccatccgccccacgtcaaaccctagattgagtagcgccagtcgccagctccccgctccaggccagcggccagccggctccctcctcccgcgcccggctcccgcgcgaccaccggccacggtctggccccggcgcccatgccagtcgctgcgcgacgcatagtaccagcacctgtcgccgccaggccaggcccgcactcagcaggccgggctactccctcctaattttttttattgcttcctccatttcttgcaatttagggaacaagttctgtacaattgctacaggtctggaagtgtttgactcggagctt

SEQ ID NO: 15047 - DNA, 542 bp, Zea mays
  Coding DNA Sequence Number=SeqID_644
agcctggagcaagctggcgtgacttgggcggttgggccgccgcaggccaaatcctgggcacgtgcccgggcctccgccacttrtatattttagctcttcatcacagaactagctgagtgcccgtgtgccagcagcttcacctcctccgactcgagcagctggaaccccgggtggtcgcacagcaccgtgcccgcggaccccggcggcttcacgcggaacgccgtgccgtccagctgcatcaccttggcacccttgcaccgcccgccgatgttgttgcccattgcacgcgcgcggcttctgctgctgtctcccctttggtgcacgcagctggtgtttcgcttggttttggtctgcccctcctcttttctgttctcctttcagcttgaaccgaaatgttggaacagctcacggcttacggctcacagctcgtcgccacgtcgggggtagggaagatggtggaggaggtacgccagtcgccggatctggacagagaagggagaggaagcagcggccacccgccgccgtcagtttcagatggtgtg

SEQ ID NO: 15048 - DNA, 574 bp, Zea mays
  Coding DNA Sequence Number=SeqID_645
cgagggtattcgaggcttttcaggaggcgtatgttttatctcattatttggctctgcttccaagcaagatcaggagtgggggagtcttcaaccatccaccgcaccaccgtcaaaggggttcgtgccgcctgcatccagcagaccatggcagtcagtcttcaaccagccactatgccmccgtcaaaggggcccacgccgcacacttccagtagaacaggcgagcaaggccgtcagtcttcaagggcytaaatcggattgaagtaatacatttggtttctttttttggtccattgaatatatatgctactgcatgtttactatggccaactcgagagggaggcaggcaacttgctaggagaggggagctacgctccactgcgtcgtgcgcgcgtcctcggggaggccctggccaggagccatgcgctggtggccagtgcgctgaaccgctgaaggtcataatttttctgcattcttaatgtattgatgtagcttcaaactaagtaccaggtctgattcaaagcgaggtgagaatttcttacgttgttctttatgaattatgtttccctaagaagaa

SEQ ID NO: 15049 - DNA, 580 bp, Zea mays
  Coding DNA Sequence Number=SeqID_646
aactacagctttttccaatgtctagaattgagtgggggctctatataaacccccttagccaaccatttgaaggtatggtagcccaagaaacatactaaggaaggttatacacatctccatgtgctcaaacacccaagtgcttaatagaatcattcgtttattagcgtagatgctttgcaaagtgtttaggttagttagaccgcttacgcgcttgctctaggttgttcttagttagttgagtgagtttagaaaaacccacaaaacccatcgactcttacacggagctgttgtaatattctactgagtgggacaagagtcttgcgagaccgcatcaaccgtgttgtggtgcgagcaccaccgtgtaccaaaggaaactgggcccaggtgtttcgactggaagctcaatagtgaagacggcgagaagcgtccgataggaggccagaagcggagcaccacttgcacatggagaaggcttatggctctctacagagttagtcgaccggatgcttggcccccgcatgggcttccccttgcgtagtggcaccaacgaggattagttgagacattgcgcggttctgga

SEQ ID NO: 15050 - DNA, 426 bp, Zea mays
  Coding DNA Sequence Number=SeqID_647
tcctgcgtggccactagccagcgtgggcagcgtggctacggcctgcgggctgcggaaggagcgtgggcgtgtcgtgcgtggcctactggcctggcggtcgggcsccgtgcggccaggcggagccgcggtccgcggaggcagccaggcgcgcgcggacgcgcgggcaagacgcaggcagcccgcagcccctcgctcgtcgcctcgtcggtcgtcgtgctgctcagtgctcgtcgtcgtcgcggactgcctctgctcctggtccactcggagacagcggctggcggctggcttccctaagctcgttgccctaatcttttattgggccaacccaaggtattgctcaggcaatactaggccatattgggccctccgcccctggtgcgtggcctactggcctggcggtcgggcgccgtgcggccaggcgga

SEQ ID NO: 15051 - DNA, 507 bp, Zea mays
  Coding DNA Sequence Number=SeqID_648
gacgtacggtacgactacgatgggttggggcgacctcgtcggttggatcagatgggcgctagtcggcgccaccatggtcgtcgtggcgctgttggccgtctgcatgctcgtcgtcgccgtcggccacgtcatctacgtgctctggcgaaacttccgcggcggcggcggcggcgccaacaagacgccgccgccgctgtccatcgaggaggtgctggagcggataccggactacgacttcccgtaccaggagctccccggcggtgccggcgacgacgacgacgaccacagggagtcgtgcgccatctgcgtggcgccctacgaggccggcgaggcctgcggcgtgctgcccgggtgcggccacgtcttccacaagctctgcgtcgccgagtggctgcggcagagcaccacctgcccgctctgtagggcggctttcgacgtgactgagggcacgcgacaggccgtcgttgacaacatggtgtagctattaattaattcaagccttttcgt

SEQ ID NO: 15052 - DNA, 381 bp, Zea mays
  Coding DNA Sequence Number=SeqID_649
tgctagaaagaggagtgtcactgttaggtgagtcttcgtccaatgttgaaggtgcattggaactaaactagcacttaaactgggcaaaaaatagcatctaatagtaaatcatcttcacatatagtataacatcttcacatatagcatataacagtaaacaagactaatatgcctaaactggccactaaatacctaaactgaaactcaatcttggcatcaaatccaatttcccggcaaaaacggcggtttaccggtccaaaatcacggtttaccgatccaaaatggcggtttaccagtggtttttcaatttttatgttttttcaatttttttgaatttgagacgaattttggaaaaaactgtggttaatcgaaaccgcgcca

SEQ ID NO: 15053 - DNA, 329 bp, Zea mays
  Coding DNA Sequence Number=SeqID_650
gaaacagttggcgaccccaccttggcatgcaaaagacaagacttagtccatcagaaagaaaaggaaaaagagtcaaattcaccgatcaaatcgaagaagaagaggatgaagacagtgattatagcacaatcgaccctagtgtaggtcatcatggagacgatgacaatcatggtgacgaagggaggtgatgttggatcatatggtgcagggaggagtgggatgggggaccatatcaagatccttccaacatgcatgagtactatcactatgagtcgagctgaatacgtgagtattgtgaaagaagtcgacctatgtgtcgttggaaaact

SEQ ID NO: 15054 - DNA, 415 bp, Zea mays
  Coding DNA Sequence Number=SeqID_651
ccgacgacgaagtccaggaccatcacctcgtccagcagcggcctgaccgaggccttggcctcctccaccttgccgtccccttccacggcgtccagctcctccacgctgtcgaacaccgccaccaccatgggtaatggatgtccttaaccattccaaatatagacctttggatgtcaagcaaattctttaaatacaacatcagcgacctggtttctgatagaaatcgcttttgcgagatctgcggagatgggggcatggtgtaccacgaggaggagacggcgccggtggagggcagcgccgaggctgggcgctgggattagatctctgagttttgtttattgcagctattgatggtgcgtccaatagatgggatatgtttaaccttagtttatttgcacaaagtctcttccatctc

SEQ ID NO: 15055 - DNA, 438 bp, Zea mays
  Coding DNA Sequence Number=SeqID_652
tccatcttcgcgagccgttttctagcgctgcgggcgagagacagagaatcaggagtttggtgttaccgctgccgtgtgctcgtctcatcataggtgccgcccggtggccgggagggggactggggtcatcctcatccgtcgtgggacttgcgcgagtagggaatcaggatcacgcgtcggcatccgcgacgaattgctcaccggagcaattagggcgctgcgggtccgctctcagcgtggctagcctccacgggaacacgaattctgacaagcaagtgaccgaggaccccgataccaagcaggtggagaatactgagcaggagcccattgaaggtgaagagcaggtagcccagaaggaggtatacaacgaggagtataagcttatctaggtggcatctcctagtcagcttgatggcgccaacgaatagttattagttt

SEQ ID NO: 15056 - DNA, 207 bp, Zea mays
  Coding DNA Sequence Number=SeqID_653
ttgcctcttggttcgcctggttgctttgcttcgtctacttctcaacatccccacgaaaagccgaggattggactcactccaccggaagcgtgtgtacgcacggacccctcggccctcgcccccgcacggccatggcagccgccgtctccccctcatcctcgcccctgtccacaaaccctatgtagcacaggagttcccgccgtcaga

SEQ ID NO: 15057 - DNA, 180 bp, Zea mays
  Coding DNA Sequence Number=SeqID_654
tgacggcgggaactcctgtgctacatagggtttgtggacaggggcgaggatgagggggagacggcggctgccatggccgtgcgggggcgagggccgaggggtccgtgcgtacacacgcttccggtggagtgagtccaatcctcggcttttcgtggggatgttgagaagtagacgaagcaa

SEQ ID NO: 15058 - DNA, 580 bp, Zea mays
  Coding DNA Sequence Number=SeqID_655
tatagagcaccaaccatgtcgtggagagtttggttctatgattcttgagagatttggcaaagatcggcaccaatggctgcttagacaactctttcatattagacaaaccagttcggtagctgcctatgtcgatgagttttttcagttagttgattattatacaatgaagtttgtggatggacttagagatggtattaaagcagtggttatgcttcaatgtcccccgatctcgatattgttgctgttcttgcacaattgcaggaggaaactggcactccaatgaggaaaggaggttccaaatggcctgattctagtttgcccttcaaaccacgctagggttttggtctagcacaagcttctcgagaacttaagtcacctgttgctgcgaagcttgatgaaatcaattagttgggtttttcctgtcagatggatttattgggtcggttcaaccttaaattctgggtcctctaatgttcttttaaatggtgctcctaggaagaaatttctttgcaaaagaggtgtaaggcaggggggcctttatcctccttgttctttgtaattgcagttgagcttctccaat

SEQ ID NO: 15059 - DNA, 383 bp, Zea mays
  Coding DNA Sequence Number=SeqID_656
aagccgaaaagaaaagcgtgctcttttttcatccttcgtgcgtggtgcgcgagcgtgcgcctcccttaccatctcgcgatcccaattcgatccgctcgccagctctccccatcagacctgccctccccggccgggcgattcgccgccgctactcgaattcgcgtggacccgtcatccattctcgctccccggcgccccaaaccctagatccgctgctgttcttcccaccgccgccgccatgttctggcgcatgaccggcctctccgcggcctcgccccttacgtgacaaggctcaggtggaacagttgcttcgttatgttgtggaagaagttccagatgatgctgaaaggaagcgatctttcaagttcccatttattgcttct

SEQ ID NO: 15060 - DNA, 187 bp, Zea mays
  Coding DNA Sequence Number=SeqID_657
gaattggatctctattatcaccagaacgtcatgctgccacatatcacagcacagacctggataccggcctggccgatgtggatcgaaatgcactccctcatggtgtcgtcgtacgggatggagcggcggccgacggagggaattgggagaagggggaaaggtttgagccgcggaggtaggcgagtac

SEQ ID NO: 15061 - DNA, 468 bp, Zea mays
  Coding DNA Sequence Number=SeqID_658
atcgatgtcgcttgctcttggtgcactcgtcgatagtaaaccgaggatgacaatatcggtgacatcaataagctggtggtagcgctgacggaaacagggccaaaaagatccccatytaggagcaccccctgcatcggcacacctcctattgtctgctgaataattacgaggaatatttgaagttggagacaagagttgagttcctgcatacaactcagatgtgtaattttagtagcatgtattcgttaattgtgcttactattatggattgcagatcagagctgcggcctcccttgacctccctgaatttctctgtgatgaactatggttgcaaacattaaatttgtagatgtatgatcgatcgaatagatgtattctctgttatatgccttgtgatgttgatcgagatgaatggcaactttcatattcatttgtaggtgtatgatggacgaaagttgtctcggcctt

SEQ ID NO: 15062 - DNA, 501 bp, Zea mays
  Coding DNA Sequence Number=SeqID_659
gagttttagcatttgtggttttccattccctagattactctagttttgtagccagagatccacaacgttttgaactgttgtgtctgtgattttgtgatcttcatcgtgtaatccaaggaaggttgaccggttccactcacaggttttattgaatcaaacttagtttttattgttgctgaagttcttggttcgattcgctcttgtgttctttttttcctcctcttgtggatttatggagaaccttcgagttcttgtggtacgggtgttgttgggatggaccactgcatacgcctaggtggtgcagttcttggttgtgattcaaattgatcctattttgagtttgttcgagaaaaccccaacaaaatcctatcactcacgggattttgaatctacgcacagatttttaagttgctcatgttcatacttcatgaatagacatctttccctctgtgtaaactggtggtgaagtttgagatgattctaccttgtttttagtgcctt

SEQ ID NO: 15063 - DNA, 445 bp, Zea mays
  Coding DNA Sequence Number=SeqID_660
tagaatcatctcaaacttcaccaccagtttacacagagggaaagatgtctattcatgaagtatgaacatgagcaacttaaaaatctgtgcgtagattcaaaatcccgtgagtgataggattttgttggggttttctcgaacaaactcaaaataggatcaatttgaatcacaaccaagaactgcaccacctaggcgtatgcagtggtccatcccaacaacacccgtaccacaagaactcgaaggttctccataaatccacaagaggaggaaaaaaagaacacaagagcgaatcgaaccaagaacttcagcaacaataaaaactaagtttgattcaataaaacctgtgagtggaaccggtcaaccttccttggattacacgatgaagatcacaaaatcacagacacaacagttcaaaacgttgtggatctctggctacaaaactaga

SEQ ID NO: 15064 - DNA, 572 bp, Zea mays
  Coding DNA Sequence Number=SeqID_661
tagaacttcagtacggtgcagaccggacttggtccagcgtaccaaagccctctacatcaaaaacatgctctcttaaacttcaatcgggtgcacaccctacctagtctgatgcacccaaaatagccagarrtaagtccttttgggacattcttctcttggcttgatttgggtggtgtcttaggcaattctatgacttatacaaaacatatcattagaccaacacacattacttatggttcactagagcagccaccaaccaaaactagcaaacccgatacatcaccacgacaactcgattgcaagtctaccaccacggtagcgcatgcaccagcacttaccatgctgctctggtttcattcccatcttcatttagttgcacgtccgtggtgtcacgttctttgtcttctgggtcctccgggttctcttctagaattggtttttagtgcacgataggcagcaaagacagccatactttagtgcatgataggcagcagaactagtcatacttgcttccgagtggcagaaccgacaacaagaacacttaggattatgcaagggctcctacactctac

SEQ ID NO: 15065 - DNA, 526 bp, Zea mays
  Coding DNA Sequence Number=SeqID_662
tgatcctgctcaaaggctctgtggatgctgcactcgcgctcaaagccaccccttgatcgcttcataaactactccaaagttgtgatggtcactatatatgcatctagaagaccaacttgcttcacaatgtgtggttgccttcagctgttgtcgggaaggcttcccctagagctacctaggtcgacctctgtctaactgcaagctccgcctccactcattcatgcccactatctccaaaacagacaaataccttgtcgggtggcagtccaagttcctcaatccgatgggtcgctccaaggttatctctcccccaagcaatttcgaatagatcctatcctatcggagatctgtcccaatagctcctcagatgaatgactgtttcgtagcagatcacttcgaccgcctccaaaccaaaaaatctctacatctggttatcacttgggtatgggtagcctatgcctctgtcatacttcatctaggacagctatgccccgccggcccgtgtaaaattcttcgtctggctggc

SEQ ID NO: 15066 - DNA, 564 bp, Zea mays
  Coding DNA Sequence Number=SeqID_663
gaacagagtggtagccttcatcaaggggtcaaggagcgctccccagtgtgggttctcgcagagggtggtgggcatcctggaagggcacggcgtggatttcgtaaccgtggacgtgctcgacgaggagcacaaccacgggctgagagaaaccctcaaggcgtacagcagctggccgacgttccctcaggtcttcgttggaggggagctcgtgggcggctgcgatatcgtttcgtccatggctgaaaagggggagcttgccgccctactaataattcagaaatgaaggctttaccctacagtgacttgaattgattcgatggttgtctgatccacacgtagtagcacggagatccaagttgttgtacctgctgtgcatgttggatgtggtacgtcgcgagtttgaaaagcgtgtgatgtggtatggacgtgtggtttgcctgctgtttataggtagaagttgcctggggacgacacacatatattttgttttatttatttgtggagatcggagagcgagcgagcctcttacattacgacttccgttcgtgtctggattttgtgtaa

SEQ ID NO: 15067 - DNA, 586 bp, Zea mays
  Coding DNA Sequence Number=SeqID_664
ggaaatggctcgatgctccactgcatctagtggtcctagtggatcctgctgcgctgcgaaacggaaaggagaacaaaaaaaattgcttggccgggcttcgcttggtgttgcccttattttttggcgtcgtcgttacaacaaaggaatccaatcataggtccatacccgcttggcgcttccatattttccatatataaagtcaacttgcaagggtgattctgcagcttcagaaggattccttgttctttacttggggagttattccaaggctcttgtgatcaaaggtcaataaactagtaacataattgtggtttgggtggaggtacatgtgatctggataccaaagtccaaatgaaaggttaatcatatgatggagcaataaatttttattcccaaggctgttccaaatttaggaactgctttaaatattttcaagacgtcacttactatattattcctcccatgtgaacatgtttctgcgccctgatcccctgatcagggacagggaggaacacgataaaatagtgctttggttcattattccgtgacatgtacaggaatcttgacgcctctttgtaatgctaca

SEQ ID NO: 15068 - DNA, 573 bp, Zea mays
  Coding DNA Sequence Number=SeqID_665
gttttatcatcagtcgtaccttgccttcggctccatctagttggataaatttggtcgtggccgtggtcatattctacgaccgcgccggggcgaggaacgcgcacaggcagagccgcagaggagcagcagcagcgcgctcagcctcagtgcatacacaggcgggcgccgcatcgtgtctttcactgtggataggcgatggagaaggcggcaacagacacgtacatgtccctctgtctgtgcaggcctacgagcagtatcatgagttaaatgaggcctggggacaaatcactgtgaccaacgcaaaggacatttggaagcacatttggggatcagagattttctctacaaaaaaacttacaagcatctgatgggtcattatcaagttcatcagattttcaaatcgctttggaaaaataaatgtcaaccaaagcataaaattttctattggctgtggctgaaaaacagactcaacacaaggaatatgctgaagaggaaaaacatgacacttgagtcatacacttgcgaaaactgcatctggcagaaggaggaaactctttatcatctcttcctcag

SEQ ID NO: 15069 - DNA, 403 bp, Zea mays
  Coding DNA Sequence Number=SeqID_666
tgttcttctcccaaaatgccggtgagggtgaabcagtccacgacyacggggtggcgcggmgctttccttgccgtcagacgagaaatttctcgccccgtgaggatgcagagcccgcttcaaggacacggtcggcttccccggacacttgcgcacgtcgtcggcacacaggggagcttgtttgctatactagctagctactcctactttgctttttcccttccgacttccagtaggttctttgccgaggttaacagcgagagcttactaccacacatctagctacaggagagggtttgtgttgttctagctgctgggactcgtaataggggaagagagagaaagagagcagaccgtgaactgtgcacactcccctgctgctaattttgacgcatcggcagcggca

SEQ ID NO: 15070 - DNA, 578 bp, Zea mays
  Coding DNA Sequence Number=SeqID_667
gaaatgcgacaatcacacgctcaatcctctccgaccggaagattccttctgcgcacgcgactccactctctcccaatttaccacagccatgatgacggcctctctcccacttcgtcgagcagggcaccgcacctctaccttatccctcccaaaatcatcgctctctccaagcctcctcccctacgcatccactgttggcagcggctcctccaacctcctcacatgtgattccactgctggctgcccctagagctctcagtcaccctgcctccatcgagacgatgtgctgagaagagggagatctgacattcaatcgatctcacttgcagagytgaggtagatctacttgacagttccttctccttgtaatgaatctcctgtggtatttctgattggtgatgagttttaggactaggtacttagaaagacaatttgattgtgttcttcttacaaggaagggaattgaggtcgctaaccattttcttgttcttttcttgttgtaatttcttcaagaaattaagtgcatgaatttcattttcagtgtctttttacttgaagcgtttcatgttagtttatat

SEQ ID NO: 15071 - DNA, 485 bp, Zea mays
  Coding DNA Sequence Number=SeqID_668
acaagcacgagatctgctaggcccgcctccagaagatggatggatttgatcaaacagtgaatgtgaaggttgtaatggcaactaatagggcagatactctagatcctactttggtgcggctaggtagacttgacaggaaagttgagttccctcttcctgattggtggcataaraggcttgtgttccaaatgatgaaatttccatggattgcttcaggtattgctattaaggtctttttcatctcatgcaaataactattaagctgctcaaatttctttatttgatgggcggttgcttgacmccccaaatgaacgggtgtggccaggtgttggcaagttgctcaattagtatgtcggtggaagccgacaaagccactctggtgcccagtcttgacactgatggtcactactctttcaatagtgaatcttgcagcgtytgaagtactcttaattttgtgcaatgtatgcaactactaacctttcaga

SEQ ID NO: 15072 - DNA, 474 bp, Zea mays
  Coding DNA Sequence Number=SeqID_669
gttaagcaagcagataccacacatatgcattctatgcctgccgcgcgctttacgtagctaacaagttgaattcatcatcaacatatccattgctcgagcttttyttcaagaaccagctaccatagggcaaagtgaagaaacggaagagttgagcaagatcmcattagagaataaggatattcagcttgatatcaatataagagaagaatctcggagttyttcmcaacaagggaactttgacacagaaggtaccagctccagtgaggctttcttgcttggaacggttgcttcagaaaagatgcttgagaaactgaaacataaatytggaagatgtgagcctgctttagaaaaggctattgtggaactggagcatggtataaacggtttgaagtactttgtttgccttgatccacggttgcaggtttgttccgccactgataccaggaggataaaggagacactaccttggtacat

SEQ ID NO: 15073 - DNA, 599 bp, Zea mays
  Coding DNA Sequence Number=SeqID_670
catcaaggtgatactccaagattgttgttcatttaccagagatgggtaaattccatatacmcaatccgaggtgacggcaatggatcctacatacttcagaaccttggcagttcagaaactgggtcaaagaaagcaagaaaagctaaatactcaatagcactacaatatcttgttcttgaagagaccagcacctaaaaattctgcatttttctattacagttcagttcccaacagagatcataggacccgacagttagttttatgcttttagcatactgagtgtaacaacaatttccttttttatggttctcgtagctgcacttgagttagttgtatatgtaagtttgcacctctagctgatatgggtgttttgcatttgcaccaatccacaactgggtttgatatgctatgctgaacatcagtgagcaccacaaattttcagtgtcctcgtttgccagaagttcaggatttgctcaagttgttgaactggattggttacatgtgcggatgatgtgcctcataactatttagcgaagcagcaaggtcttgctttaaggaaattcttgtcaagaacaaagtgtcaagtggcaactgcgttg

SEQ ID NO: 15074 - DNA, 457 bp, Zea mays
  Coding DNA Sequence Number=SeqID_671
gtccaaatctaggagaggcagtccattaacaaagacgatttgataaataagatattagaggaaaacaaacaaccagcaaaatgtataggaactagccaccatcaccacttttctagatttggtttcaggttatctatgatgttcttgctccaatttggtgtccgcaagagtcatcccttccttgcttcaaacaagtgcaaatgtttagcagatttacaattttttatttgcttctataaccatagggaatctgctctcataataagtgatccagaaattcaataattattacgagagtcgtcgtgttagcatgggattattaaggggctctgcaaaaaatgaggctgagcttctggatctcgagaaaaatataaaggtctatcaatatatgtatagtatgtatgcttgtcaccatttggagtcatataattttcgccaggtgtatgtgtggttgtcc

SEQ ID NO: 15075 - DNA, 564 bp, Zea mays
  Coding DNA Sequence Number=SeqID_672
taatggtgtccttgttcctctctctgagcaacaactggttgattgcgctacctctgaaggtaaccaaggatgtaatggaggtttgatggacctcgccttccaatatgtagagaagaactcacttgagagcgagactgactatccatacactggagtcgatggcacttgccatgttgacaaatctaagggtaagctatagatcaagggcttctaagacgtgaaggctaacgatcctaagcaacttatggctgctgtcgccaaacaaccagtttcagtcgccattgaagctgacacttcagtcttctaatcatatagcaagggtatcatcagcagcaagggctgcggtaccaacctcgaccatggtgttctcgttgtcggttatggtagtgaaggtggaaaggactactggatccttaagaactcttggggccctgactggggtgagaaaggtttcttcagaattgcaagagacgtgaatgaaagcggccctggaatctgtggtctccaagaataggcttcataccctaccttgtgagtaagatcagttactcacttacgaacacg

SEQ ID NO: 15076 - DNA, 493 bp, Zea mays
  Coding DNA Sequence Number=SeqID_673
tctgcgtccaactaccggacgagtaagacgaaaagctcttcctgatcaaccatgaaaagatggatgcatataacaacctgatatcaaagaaacaagttccatgaccgatgacgaaaagactaaactcgttattagcatgaagtgtttgtggaagatgttttcccctaaagttatataattcgaccggggtccaggagagtaggagactgaaagcaccgtcgagaagactgaacttatcacattgacatgaagaccaaagccaatgtattttatcctgtcataaaaactaaagtcttatgtatggtcattatagtactattttggttctgaaaatacttgtttatgttatgaaaactattggttgaaagaatggtgattgcggttttggcttgaaggttcagaagtgaatttggctaccaattctagacagatggtaatttgtagccaatgtatgctagctatgtggaaagaaattggttacctgctgtccgta

SEQ ID NO: 15077 - DNA, 464 bp, Zea mays
  Coding DNA Sequence Number=SeqID_674
agatgccggcgaatggcaagctctcggcgaagccctccccctcgccgatggttgctcccgcctcgcgccccaaatttacagctgttacctttctcctcgactttctcctccaccgcggcaggctcctctggtgcggacgccttctccgcctccgccgcagaggcaggcgcgggaggctcctcctggtcggggtcgcgggcggtgtcggtggagctggagatggcagcgcggaggcggcccattaagggcctgaaagcggtctccacggtgacccaggccagcgcgagcccccctgcgacgatcgccgccctcttcagggcgctaccctcgcgctggcctccacctcctcccttcgccatgggtgctcgcgggtcgacggtgacggatggggtggcgcgatgcgcgtgtgtttcagtgatttgctcctttttttttctttctcgtggatctatcgatggatgaac

SEQ ID NO: 15078 - DNA, 596 bp, Zea mays
  Coding DNA Sequence Number=SeqID_675
taactccttgctcgctgaaccatatccaaaatctgasccaccccccgatgatttactccctccayaagcacctgcagcagcactgccacttcctccggayacaccagcacctatggtagctccaataccaccaacgacsccaccggatcctccaccayaaacgcccgcatcggcaccggttccagtatagacgttgccacttcctcctgcatttcctcctacgccaccaccaactttggcacctccggagacaccagcacccacggtagcactggtacctgccttggccgcctggatgttggcttggtgaaccttcgcgccagactcccgcttcagcgagtccttcagaacgaggaccggggcgtgaagcgccatggtgaagtggaggcagcagcgacgtcgagggaggcgacgataagattgggagtggagaggggaagagggtgtctgctagacaggggaagacggagtaggctgagtatggcgtgcgagcggagtccgccggcgctgctgaggacctcgccttcgacgcggcaatgtactaggaagagaaacggagtagtcggcgggcagctggtgcagtccgcagtggtgaa

SEQ ID NO: 15079 - DNA, 573 bp, Zea mays
  Coding DNA Sequence Number=SeqID_676
ggataatcggttccacggtgagcctgttcagtgcaatccatgggtactgtcactggaaagccgcccaaggaagcttatcgtcacatcgcagcaacaaagtcacagggtcccatataccaaatctatttccaaaaccccaaggccaagatccatctctcaatytagccaaccttactgtctgatgcatgcgaggtgcgctgcgggaatctgggatcgaggctgcggcatcaggccacacagctgccatggcggtttatggtggttctccggtttgagcgatgctgacgcggtggttyttcaatttgggtgatgagatgctaattgatgcctctgcggatggtttggatgtgcccgtgtaggtatcttgcgtgactcgttgcacaagcttcggccacccgtggaaagcagaagacttggaggaagaagcgaaagtaatgatttttctcttccctatgtttttgtcatttggattcatttagctttgcttttgttctgtagtttatggtgcttcttgattagatcaccggtcctacgattgttaactttttatgccgactcattgtggatcttgta

SEQ ID NO: 15080 - DNA, 560 bp, Zea mays
  Coding DNA Sequence Number=SeqID_677
atgtggattcactggtctgtaacgaagtccccaccccagatattgaaaatcgggagatgaaatttatttatgactgccctggcaaatcgcacgtttgggggtacagcacttgggcttttgtttctggctgccgtgcgtatggccgcgttgggcgagggcaggcaggacggacctgagcttcccagccgcaccccacccaaaggcatcccgtgggcctcctcgaccggccgcggcggacttggcgagcggggagaagccgaatgggattcgctgctgtggtgcgcgcgcggacgcaggacggcgggagaagaggcggacggtctccgggggcggctgcgtgaggtgtgccaagcggagcagcgcgacggcgaggagaagaatacagcgacccagaggcccggcaatggtggaggccgggtgtggacgacgccggaggcaggctcttcactcttgagcgaccacggcacgatgcgaggttcctttcatactttctttgtggcttcaccagattccacatgtcttggaaatttacacaagactagttctcaatgccaatggtt

SEQ ID NO: 15081 - DNA, 550 bp, Zea mays
  Coding DNA Sequence Number=SeqID_678
tggttagaccattatcagtagcgggttacagctatcgagccccatcagcacgggcaacatagtttgccaggtgcttacatgccgggtcggttagcccttcagcctctgaatgtagggccaggtgctattctggagtcattctctgatggccacattaattcaccaatgatggctgcgctttctgattctccgacgcctggtagaaagcgtggttccccaggagatgtgacagataagttgatggagagaaggcagaagaggatggtcaagaatagggagtcaactgctcgttcaacggctaggaagcaggcctacactaatgagctggaaaacaaggtatctcgattagaagaggcaaatgagaagctaaagaagcaaaaggagttggaacatatactttcctctgcgcctcttccggaacccaagtaccaactcaggagaacagactcagcgactttctgattgtatagaatatcttgtttcgtacttcctctgatcttttttttatttgacgtttgctagtgtaaaattgaactatcatgcgtcaaat

SEQ ID NO: 15082 - DNA, 527 bp, Zea mays
  Coding DNA Sequence Number=SeqID_679
tgcgccgtgttcatcctgtccacgaccgtcgacatcgtcgtcgcccgcggccactgtgagcctacggcggcggtggtagtgcccgccggcgccggccggagaatgctgggcgccgccgcgagctcagcggctgccgtgagcatgccgcggctcactcgccccgccgccgcggccgccgccgcgacgtactccgagtcgaagagggcgagccccagcgggccagatcctcagcaccattaatcaccaatttaccactcgctcttgcgcattttgttgctacgtgtggaactacggatatatatggcgagaggatctgcaagcagagtcaaagtttcgtagttcgcaccaataaccaataaatattttaaataagatgagtggttaatttttttaaaaaaagttaactgtgtcatatatttatttacgtagagattattatgcttgtaagttgtaaggctagctccagcaaggcactctaaagggttctgtaccctaaatatagaggactaaatggtcctctacgccct

SEQ ID NO: 15083 - DNA, 492 bp, Zea mays
  Coding DNA Sequence Number=SeqID_680
aagatcgacatcttctgggacctgtcgggcgccaagttcggcgctgggccagagccggtggaggggttctatgtcgcagtggtgttcgaccttgagctcgtgctcttgctcggcgacatgaagaaggatgcctacaggaagactggagccaaccggtcgatgctgaacgccgcgtttgtggcgaggagggagcacatatacggcaagaagacctactccgccaaggcgcagttctgcgacaatggccagttccatgacattgtcatagactgcgacaccgtcgacctgaaggatccgtgtcttgaaataagagttgacaagaagcccgtgatgctttaaagacccaccggcactggcagtgagtgttgctgcttgtgtaggctttggtacgtatgggctttatttgcttctggatgttgtgtactacttgggtttgttgaattattatgagcagttgcgtattgtaattcagctgggctacctggacattgt

SEQ ID NO: 15084 - DNA, 462 bp, Zea mays
  Coding DNA Sequence Number=SeqID_681
gcccatgtcgcacgagtttctctgaccccggcgttgtcgtttcagttgaccacaccggctgtgcagtggaagcatggtgggcgcgatggtcggggactggccggttgtcgatctcctatttgccttggacagcgcctygacgccccatcacagcagcttgtcggggaactatagtgtttgacgttaattytcggtygtctccaacctttgtctcgccgtcgtcgttcggtcaccccgcctcgatgtcggtccctacatgatgtctctgactagtgttcgcgccgacaaaagaatcccaagaggatgtggagaagcaagcccctggtcgatgccccaagtgctcggcgagaggcctgaacaaggatcatcgtcatttttgtgaagttctagtaatatggagagattccaagagttgtggattgaggagaaagtgaagctcggttcaatactcgtcaggtgttt

SEQ ID NO: 15085 - DNA, 412 bp, Zea mays
  Coding DNA Sequence Number=SeqID_682
gtccagaaaatgtgagcagcaggttgttggcctggcttttgagggcacaatcgtagcattcttgcatctctttattgaagtactagtggagatggcgcgagagcggcctgctttggagaaggcgcggaggtgtggtcgcaggcagaggcgcatgcattgaccgaccgagagggtgcaacatggcgatggacgcgagcaagaggatgggtcgcgatgtcagctcaggaaggaaaaccgtgacgacacggtgaggagcagacgagctagctcttygcggcgacacgttgaggactcccagcaaggcccgcttccgtgaaggcagggcaacaagctaggacagggccatgaagcggacatcttcagctccgtcgcgacgaataagggcctattcgtttctgtaggaacacactaa

SEQ ID NO: 15086 - DNA, 592 bp, Zea mays
  Coding DNA Sequence Number=SeqID_683
agcatttgctattctctatctttgagattatgaatattgccgaatccatatgttggcaaacaaatttcttaactgtacccttttgtatattcaggcaattgatcacataattaattcagctgccaaatcgaactacatgtctgctgggcagatatatgttcatattgtcttcacgggtccaaatggtgctgctgttggagttggtgcccaacactcacagagtaaaggaatactcggagcagacccaagaaggcgacgaccaacaagttttcaagttctcaagccttcttgatgacaagcaagacttgaagatttagggaagaaagtggaaagacttcaagaactgccacttctacatgagatatctgaactaatagaagcctatagctacaggaaagttggcctgaatcttgtaaagcttcaaaagtacatcgatgaacgtttgggttataaatttacagattaatattagcagccaatcaaaccagccctactgaaattatggagaatatggtctggaagtttgagagggaggcgttgacggttatgcagagtagacaacacaatgtgcaatgggagttctttcttgtac

SEQ ID NO: 15087 - DNA, 411 bp, Zea mays
  Coding DNA Sequence Number=SeqID_684
cagcccttccgtagcaaactacaaatgccgtcgtccgctctctcccagctcggccgtagcaaacgtccgcccgtgacccgtccggccgtccctccacagctcctgcgggcaacggtccagcctccagagggccgactcggcggctccctcccagccggccagcctccacacgccgccgtccgagaccagcccgagaagaagcttgctacgccgttgagggttgcttcactttccgctgggccccacagtccacacgctgccgctctgcatctgctctccactgctgaagacgcactactccctgcatttactccctatataccaatcatgttgtatatatatatttatttatccaaaactgacttatttttgtgcattaacatgatgaagacgcactagaattttctaaga

SEQ ID NO: 15088 - DNA, 285 bp, Zea mays
  Coding DNA Sequence Number=SeqID_685
agcaacgggctcttcgggaatggaggagcagacgaagcggtccacggtgccgcgcggatctacggtggcgcgccagagccggcgagaaattccggttgcacggatcgatccccaggcgtgattcttcacgcacacgatccccgcacgtggcccaacacccaaaacccaataccagccaccaatcttcggtgcaggagcggggcttcgggggcggatgactgcccttccgcgaatgcagtaatggcggcggcggtggtgcgttttcggggaaaagaagctcgcgcg

SEQ ID NO: 15089 - DNA, 471 bp, Zea mays
  Coding DNA Sequence Number=SeqID_686
tacaacggctcatgcaagagtcgatgggttgtgtggtttttctaaactcacttaactaactaggattcacctagagcaagcgctaatgcggtctaactaacctaagcacttcgcaaagcacctacgctaatcaccgagtgattctattatgcacttgggtgtatgagcacttgaaaatgtctatactatgccttgttatgtttcttggactcccacaccttgaaatggtcggttgaggtggtatttataggccccaacataattctagctgttgaagaaaagctactgctctctacggcacaacacccagaatttgcttgcacgatgtccgcgcaagagaaaataaaaaaacggttgttaccggtgcttcctcctaagtcgtgattaggtggggtcttttctctttttctcttttcaattttctgtttgcattttattttctatttctggcttctaatttcatattttcaa

SEQ ID NO: 15090 - DNA, 573 bp, Zea mays
  Coding DNA Sequence Number=SeqID_687
gatagctgacgctccaacaggtattggattgatgctggctcaagccctggcatctaacggcgcaattgtgtacatcatcgggcgacgacaagatgttctagatgctgcggctaagacagaagtatgtaacttaccttgtcgctgagtactgcgactgcaaaccgagagctcaattgacgccgtagtaaacatagcctagcggtcggatcattccgatacaaggtgatgtgacctccaaggagtctctggtggctgccgcagagcagattcgtcaggcgcacggatacatcaacgtgctactccccaatgctggtatcaacggaccaaacttcggctcattgccgtccaaccccagcctggcagacatatccaccaagctactctcctggacgaccgcggacttcaataacacattttcagtgaacacgtccggcatgttctttacggtcgcagcgttcttagagttgctggacgagggcaataagcggagtaacctgaagcagaagagccagatcatcgcgactagcagcatcggcgcctttaacaggaagccgttggttgggttcgcatatg

SEQ ID NO: 15091 - DNA, 201 bp, Zea mays
  Coding DNA Sequence Number=SeqID_688
aaggacgagctgtagactgtagtcggcgtgcgttggtctcgtcttcgggatctcttttgaagtctagctgtagctcccgtttagttgagatatcggggagctccactcactaccagctttgtgtttaggaacgtgatacgggatcttcttcctttttttttctgtttcctgtctttgtacttgtacaaacctcagttcagt

SEQ ID NO: 15092 - DNA, 557 bp, Zea mays
  Coding DNA Sequence Number=SeqID_689
tgggccatgggatgacttccacattgttgatggtcgcttggtaactggtcagaacccagccagcgctacgtccactgctaaggctgccattgaagtttttgagagcctttaatttaagccaccatggcaaaagccagaccgtccatgattacagcctatgatggtagttaggtagagaacgaatgaattttttttctaactagtctagaagtagctctgtgaagcaaatgtaaaccttgaacagatgcgccttgagccgttgaagaggatattgtgcaccaggctgtgaggggcaggcgggcatgcatgtcatgcacgagtcgccaacaatgggttcaactaagggttcgactttgctcctgtttgtaggtaagaccttagtctttcacgtggttccaaaagaaatcatcgaaaaaaaactacatttcgtgttgagcgcgcttcagaaacaccaagagaacaagccaagtaccaaggcgtggatccaataaatctgcattccactgtcgcgaaacatactacaaggatcgaagaagtttcttcatcagtctactgct

SEQ ID NO: 15093 - DNA, 582 bp, Zea mays
  Coding DNA Sequence Number=SeqID_690
attcaaacacccttttggctgtcgagctcctgccattgctcgaacgcacggccaaagcgaagtctaggccttctcgcttgacttgggtcggcagttttgttcagatgggccatggcttcactaagaaaccccttttgcctggcgactcaatcatttctcagttggacgatgtcagcaggtttgacaagagcagataccaggattcaaaactgttgaccactctcgttgccgagcgtctcgccgagcacatcgacaagaacctagtgcttctcaatgaggtgtctccaggtccggtcttaacaaacttcggctctacatatcctgcatacttccgcattgctctttccatcgctggtcacttcatcaacaaagaaaagcaactcgccgaaggggtccggaaatatatgcatgccttcagcgtcttggggcaggagtcccatggccaatacatcagtgattataagattacaccgtgagtagagtatcctcctgtcggacttggtaatcagctaatcgcttgcaaagaagggcaacgtatacttcgtctgcggtgggtaagcaggtgggagactcgtttttcga

SEQ ID NO: 15094 - DNA, 526 bp, Zea mays
  Coding DNA Sequence Number=SeqID_691
gatggcaggatctttgcattccgatcccgccaagatgagtaaaacggccctcctggtgatggactaccaagccggcattctctctcgcctgccgttgcccccgaaccatatgcaacttctcgcaaagacaattgatgccgcccgtgctcatgttaaaataatctacgtgactgtcgccttccgtcctggccatcccgaagtttcggcttcaaatgccacctttagcgccgctgcgaaaactaactcctttgtgagcggctcgccagaaactcagattgacccggctattgctcctaaagagggcgatattctcattgagaagaagcgtgtgagtgcctttgctggtagtggcctggaccttgtgttgaaaggtctgggcattgagactctcgtgctagcgggcattagcactggaggtgttgttctctcaactgtttgtgaggcagcagataaggactttggggtcgtcgttctgaaggatttgtgtgcggatggtgatgagaagctgcacaatggtctcatcaac

SEQ ID NO: 15095 - DNA, 535 bp, Zea mays
  Coding DNA Sequence Number=SeqID_692
gcagccgagcaacatcgttataaaagccccgcatataccttcttccagaaatgtcttctctgcataagaaggtgtttaactcaactttttgcaaaggacatcactctagatgagaaacaggaacttgatgaagtacttcaaagagagtggccgtggatggcacactctcgctcttcaaaggaggtaggtttctgttatttatttttctaccagtggccgtggatcagtttacgctcttcaccctcgacgattcaactccaacatcctccaaaggaggttgtgcacacgtgcttgtacgaagatccaaaatttctaacatgaggctgggctttctagcttaagagaaacgccgaccagatcagtctacatcatgtttttttgctactctgttcccgtttattatagaagattggaaaaggatggtgcgtagctgcaaaagagaggacatcttgcttttgtgctcgcaagaaggatgcaaaggatctgtgatgatcagttgctgttttgggttattgtcacataacatctcctattt

SEQ ID NO: 15096 - DNA, 540 bp, Zea mays
  Coding DNA Sequence Number=SeqID_693
tggagcttctttgtacctaaccgtaggccgaacccatctagcaggtctgagatcaggctctgtgtcgaatgcatcacacaccatctccctgtgtgtcggtaagctattggcccgtaagactttcgcacaggtattatgtagctataagcgatggtcgagcctgatgccatatgtttcagcatactgactcgtgtctggtcttgacagggatccttcaggacttgggagcatgtcacttgtcgcagtggatctaacgtaataactcgttccttgctttgataccctcatgatcatccaattgggacccctcgctggtacaggattcggaaaggcggcttggccagagccgatgttgccgactgctcctctccctgaacatcatgtcaagatatggtataactcgcttcataaagccacgatggcataacgagatcatcaatggcttgtccatattggtaaatgggcgtcagctgagtctcggctgcagggtggcacatgtttcccgtgaaggtatctgtcagcccaaggatcatcacatga

SEQ ID NO: 15097 - DNA, 583 bp, Zea mays
  Coding DNA Sequence Number=SeqID_694
aggatgcgattattgccttgcccactacattgcgatacatccaatagccaagggaaaaaagacgatggcgatttctcccagagaacgaggcgagcgagaatagatggggcccttggcgaacgagcgacgcagaacgaccgcactgtaaaggatcactgaattcaaccgcctcaatttcagagtgtcaaagatatggccaggaatcaattctagcaatctttactcgacctactgaaccatcagtttcaagatattgtgtctgtctattttcgcacaggtgcaacgctgttccgtttgttattcggggctaaaaccggggcccaagttccctcggatccagcaccaactcacgctccttgtgtctttctgatcaacacgcactcccccgactttgcacaggtgttgacatgccctgaaaccttgggctgcggttctgacacgatgcttaactcgtttgatagagcgtggaatacatcagcagtccccacgatactcgcctagccctttttcgacgcgccaaagtgcatcaccatgccggccctgcaacgatccaactcctgcacagacataggcttcacgctgc

SEQ ID NO: 15098 - DNA, 551 bp, Zea mays
  Coding DNA Sequence Number=SeqID_695
gagaatattgatgtcaacaatcttgttgaaggacgaccattggagaacttggagttcattgaaaatatattgtgattctatgaatggtggaattatgattgaaaactacagtcctatagaaaggaggtctaagggatgcaaagaacgtggctcaaagggttccaataacccatctaaatcatcgcaaactaataggctttctggtgctgaatcagcagatggaggtcctatagttgggaaagtatgaaacactttttcttaaagagcattacatagaacagattcagaagttgtttgagaaggcggtatgcaaagtattcaccgctacctgaggcgaatgatagaattaacaagtgacatctataacaatgactacgatctcaacaacaaatgatgacttcaacataaaagaagccatgagccgacttgtttctgccatcaaacaagatctcctagcccttgtggatgctttacaatctcaaatacaaaagtttagcatccataattcaatttgattcatccagtcgaaagtttatcaagactagatcctt

SEQ ID NO: 15099 - DNA, 532 bp, Zea mays
  Coding DNA Sequence Number=SeqID_696
aacagcctccgcaacgagcgcatggtcgtggagggcctcccgtggctgcccctactgctcccacccgctgtaggctgcttgtccccgacgaggccacgaagcgggaggaccccgactggttcggcgacgaggaggagctgcgctagggcgtctggacgatcgaagaggacctctacgccatgctcaagaagagctcagattgcaacttcggcttctaaagagggagactatagacactagagatgacaacgagctttttacattgagtgatgtgatgtgaaaacatgtcaatcacttcctgagatgggggaatcccacgcttttaggaatatggaagaaatggatttcttctatgtgtttgatatgcttgttgctttgggcattcatgcacacaatgaggatgacctccttgataactgctacttactgcagtgtcctctaggggtttattcaggtagctctattcacatgattcaaatggtgattagttttagtggaaccaagtatgtttacatattgcttggttttgggc

SEQ ID NO: 15100 - DNA, 562 bp, Zea mays
  Coding DNA Sequence Number=SeqID_697
aagaagaagcgtcgtcagcgcctcccccacggtgaagcaacggatgtatcacatggctcccacgtcagatcggatacccgccgatcgccaggcccagtgaagcttgattgcgacaagacgcttgtgattgtcgcatccgaagcagagcatgtcggggaatagacggatcaggatcctagggcgaaacacggcacttgagacagtgtttcctggcaaagcttgaggtctgatcctgaaggaaacccggtctaccgaagctttgttggtggactttggtggttgatggttgcggtgcagtgcagtcccagtgcttgacaggtgcggcagtggttaaggtgtgcccccaacaagccactgacatgcaccaagcctcgcatcggccggctcttctttttttggctacagcttttttgcgaatcttggccttttcctacccagcaacgcgcgtcgcgacttcatccgacttgactcgaacgacaaccccgaatcattgttgtttctctgggatctggccaaattcgagaaacgaacccaacagacggcactgcgcaatggacgactc

SEQ ID NO: 15101 - DNA, 531 bp, Zea mays
  Coding DNA Sequence Number=SeqID_698
agcttccgtgaagcgacatgctcattgcacactcgaaggagggccgtcatgcaatgcatgtcctacctgggtgctcgatcgtctgttatcggagatgacttctcaaacaaggcagcctggctgaggacatcaccgatggcgccatgttgtgcaatgtcggatcaggggtggggaccatcgacttagacaggcctacatgttccccatgtagtcttgctgtggactgaggacaatgcagctacgtgacggcttgcagaactgatgtcattcagtctataagtgaagtcgctttggcacaagatccagcccaaacccctgtgctattcaccttctcctctcttgcgtcttgtttccatagacctaagtgacaccttcaagaatcatgcagctcaaggatctgatgctgggctttgcccttgtttccggcgctctagcagcaccgtcaaacagcaaaagagatgatgggaaatttgacgaagggcaacccatcagcgcaracggcaagggaggcccaatcctcggtaagtggtt

SEQ ID NO: 15102 - DNA, 506 bp, Zea mays
  Coding DNA Sequence Number=SeqID_699
tgttagccataagacaagctgtcgaggactaagcagtcttttcccctttaggtcgatttcatcctccaccatcgtccttgcgrtaagccgaagcttctccagccacagcttcagagctagttcatccttcctccagaccgcgcctttataccatgcgcatcttcatctcaaagccgaagcctcctgagacagtatgttatattggaaaacatgttagttaagttttttgaggaccttcggaaaaggaaggcccccaacaatcccattcgactataacctagaagcaaaatactttaagcgcctaaatgcacttccgctatataactctcggattacaactgaaataaacctattgatgctatttgcttccaactaataaggacaatgaagaacatttattcaagataattaacttaaacgaccaatctccatctatgacatttactcaatcaacaaacatagaacatgacaattactaacacaagccatcacttcaccaattgaga

SEQ ID NO: 15103 - DNA, 588 bp, Zea mays
  Coding DNA Sequence Number=SeqID_700
atcatagggaggttccgctgtccaccgattcatcggagcagtccagctggccagagccaggcagcaacgtcggcgaccaagaccctgaactgctggtgaattggccatcggagaccgacttgtcagtggacgagccatggctgggttttatgagcaacggcaatgagcttggcgatgtcgaggggacgtcgccgtgggacggaacaacagactggctgctggactaccaagattttggcatgtgcagctccaactcggtgacgattcaatgttccacgcctcaaatggattgaacttctaaacgttggagaaaggctgtccaatttcaagaaatagggaggaagacagactgcaagtttgagcgcactgcacagctcccagtatagaaaatagatacaatactttcaagaataagattgtgaaaagagagagagagagaggcatggggcgtatcttgaccatagaatagtgataccttgcccttaaaagtaaggggtttgtattgttagaaacctaatgtttctcggtacgagaagctgaagaactagacccaaatgttcgaaccatgcaaggcatcctatcctatga

SEQ ID NO: 15104 - DNA, 543 bp, Zea mays
  Coding DNA Sequence Number=SeqID_701
attgagagtggtgtgttgccagccacagtgcaaaataatgctgcggttgagtctatttctcctcatgtaggtctaacatttaagcagcagaaggagctgttgctattgacattaaatgcggagatggaggaagaacatctcaaacattctttggaaaaagataaattaaatgcggagatggagaaagaacatctaaaacagtctttggaaaaggaaaaattggggttgcaacagtaccgattagaccttattaaagcaggaatgattgtgggtaatgctgagggttcaggatcgtctgaagaacccgctacagcacaggtaaaagggtttgatgtggttcgtaatttgcgtcttataccaaagtttgacgagaaagatccagacacgttttttatactttttgaacgtgtagccgatatgagaggttggcctgaggggggggctctggtgggcgctttcgaacaacccacacaaaatcccatgttcaatgctgtaggcttatttagtcaacatcgcaagaaattaacctactaaagcctcgtg

SEQ ID NO: 15105 - DNA, 303 bp, Zea mays
  Coding DNA Sequence Number=SeqID_702
gcagcagctcgggatcttgggctctcggcgagccgctgctgcctgctggggggctgcgagctggcgggctgcggctgggcgctggctgcctggtcgcctgcctctgctagtctgctgcccgctccagtgcttcgcttgacgcaagacgctatcagctagtctgatgtccgctgtcggctgcctctgtgtgactgcgtcccggcgtggtcggctgatagggtatttgaattattgaatatagtccagttcactacgcacagttcaattccaatttatttgattatacgtgtctaatccattaga

SEQ ID NO: 15106 - DNA, 575 bp, Zea mays
  Coding DNA Sequence Number=SeqID_703
caggtacgtgttttggttacgccagttgcaccgtcgaagaagatgaaaaagccggtgttgtcgaaaccgacgtcgaggacgagcgagtcgattggcggtgggcgatggggatgcaaatcggatcacagatcagagagaaaaaaagaagaaaaacaacaacaaaaaagacacagagggagacagaggcagggtccccatggccctcgtccaccagaccaccacaagcgaggggagacggcgcctcctggcagcgatagggtggcgtgacgcgggcatcggatccgggcggtccgtggcctcatgacctacggaattcgtacaacagtagaggagcagcggcgcgaagggtcggtcagaagaggcgtccgggccaaccggctggccaggcgggcgggcaacacgcgccgacggacgacgctacccgcagccagggccggtggacgggcggcgcgacgaggggcctccgcgctggtgccgagagggcagcgcacccctgcagcagaagccacgcaacgacgatcttcctgccataaggaaggttatcccaatgtaaatcaaccctcaaccaagacttg

SEQ ID NO: 15107 - DNA, 462 bp, Zea mays
  Coding DNA Sequence Number=SeqID_704
tcaagtttacattgtttatcggagtgattacaaaagtggttcaaagaaataaactttgcaatgttataaattgtttataagtttaaaatatattctagcttaagtgaccatccacaataagaagtgtagaagaagtacttagacttataagaaggccgagcccccttgcacttaacatcatcatcagcagcacaaactatagcctaggataacactaggttagtgtttgttagacgacggtcacttggcgatcatcactcatcttggcacttgatcaagtcgtctatttcgatattggtccgtcgacatcacttctccaagttgaccatcctttacaccacttgacgtcaactcagctcttgatctccgcatcacgtgatcaactagcgtaccaaaccaaactcgacttgaatccgtgaaatcaacgacagatccggttcatgcaattcatcgaacacctag

SEQ ID NO: 15108 - DNA, 540 bp, Zea mays
  Coding DNA Sequence Number=SeqID_705
aagtcctgtcaacttgaatttgggagttattgtctctggtctattgagcacaaagaaataatgaaagattatatagtgaaaaggctaaaagatcaactcttcgtagcacgctcatactatccaagcattgcaaaaattcaaggacaggaagctctgactcaggaaatgaagcaaaacatacaagaccatgagaggattcttagtgcatcatcagttgatgctgatctaccatcctttatcaacaaaaggatgaagcagatggagcgaacaatagcgagagccaaatcttgcacagtagattgtaagaatgttgacaggaagcttcgccagatacttgacatgactgaggatgaagctcgttttcatatgaagcagagtgcattcctgtacaatctcggtgcccatacattgccgaaaagtcaccattgcctttytatgaggttgacactagaatatttcaaatcatyttcattggattttgatgattytcctgggaagttgagcagaccagaatacaagcactatgttatactatctagg

SEQ ID NO: 15109 - DNA, 592 bp, Zea mays
  Coding DNA Sequence Number=SeqID_706
ctctcaaacaaacacctcaacaaaacctcaacaaacatcaaaatgttcggtctcgacgcccccaaaatcactcgcgcccaattcaacggctccgaccctcaactccagcttcagcaacgatacgccgcatctctgaaatcacccgctaccagcgcaatctcctctgcgcgtgtctcccttgacgatgatgcttcctccatttcttcctctgacgagaagaaggccattcctagcactagcaattcgaccgagaagaagcagaagaagcggattagtttgttccgggctgcgaatatggtgctttctttgaaatgatcgatacaagttcgcttcaaaaaaattacaaacggtggaagaaaatggcaacaaaaatgaaaacgagagaaaaaaaaaagaataacgacacgatacgaccaaacaaaaagttcattcccttttgatttcgactattcattcatttcaatataccacttcgcgaaaactcgacaactgctgcattcaaaatccgacataccacgcgcggatcaaaaagttatggagtttggagacatttattctttttcatttgttagttatacttggctacgattaa

SEQ ID NO: 15110 - DNA, 594 bp, Zea mays
  Coding DNA Sequence Number=SeqID_707
catcttaacaaaccacttttcgcgtacttacctgcacccaaaatgtctgacggagtcaccaaccctcacggcgaggattcctttgctgagagcaagggcaagggaaaggcggttcaggacgatgttcctcacgacaccgccatggatgaggatgacgatgaggacgacgacgacgatgatgatgaagatgagaatgctgagccagaagaggacggcttggaagaaattgacctgaacaacattgtcgagggtggacgccgcactcgtggtgcccagattgactacgccagggccgctgagcagactcccatggaggacgacgacgaggatgaggatgacgaggacttccagcctgcccatgaggacaccgagatggacggttaagcaagtgcacccctttggcttccgatgccattggatgactgacaaagtctatgatgttaatgtttatgggttcaccaaggttaaaagctcgggtgattgagaggggagctgggcatctatcgagggggatcccagtatyttagccgatgggtcatgtaacgacaaaaaggctctctgtttgctatttagctaggcgttagtttgccaccc

SEQ ID NO: 15111 - DNA, 426 bp, Zea mays
  Coding DNA Sequence Number=SeqID_708
ggttgtttcaataaactcctccaagagaaaaaaaggaaagtaaaagacgagaaattgtcatcacaactaagattagacatgacatctggtattatcaccgctgattatccgtttattactttgtgttgccaagagggtgtttgattcctgacatctggtccatctcggattgcaatggtcctctttgctccagaacttggcaaccagcatcttcacgaaagccctgaagtcaacaacaaatgaagttacaatctccttaacttattgcggatccctcttaattgagcggcgatttctataactcaagaattataaaatgaatactgatgttgtttccaagcacttggagcacgctatatgatgtagaatgttaatccgctgtgcttttacatttgcatactcataagatctgtgcttcttctgtct

SEQ ID NO: 15112 - DNA, 583 bp, Zea mays
  Coding DNA Sequence Number=SeqID_709
gacggccgtacgttcgcatgcccagctagcgttagttgtggctgcctccattgccaccggaaccttcttccggagggctactaggcggccacggcggcgtcctcgtcgcggccaacacctgagtggccaccacctcgctgccaaagggcttgtctcctttctgcggcgattctgctcccacagaagcagcggcggcggcggacggcttcgggtcgctgcggtagccgcgcagcaggcccaccaggcagccggcgcaggcgcggagcaggagctggagcggcgccgaggcttcttcttcgaccacatccaccaccgcctgctgctccttggtcagcacaccccgcgcggtctcatcagtatcgtacccgccgttgtccgtggactctccgtggacgccctccggcaccgccgccgcgacgtctttgcgcttgcgccgacgatccgacgacgattcctgcagggagacgcgctgatccattcctgggaggtgactaggcctaggcctgactagacgacgggggagtttctggagagcggagtttccggcagggagggaggctcctgagtcctgagacgagaccga

SEQ ID NO: 15113 - DNA, 388 bp, Zea mays
  Coding DNA Sequence Number=SeqID_710
tggaccgattctctcgcttgggagctcgccaaggtggtttccttgctccctggaggccataaatgcgcagtcccggtccaccacttcggcgggcgccttctcctacccctagatccgcgctgctgcaaccatagtcaggaggctgagagagaatcgagagaaagagagagaaccgggagaaagtcatccgcgccgctaggtcggccactgttgctgccgctccgccgtcgccgcgcatgtgggaccaccgaccgccggggcatgttagcaggacaggctagctcgaaagcctccatggcaatgggaatgtctcgccggaggaagagaccgctatggatcggccattgatgcgagcatgggctctctgcgccttcggaaccgcggtgag

SEQ ID NO: 15114 - DNA, 453 bp, Zea mays
  Coding DNA Sequence Number=SeqID_711
ggatctaatgcaagtcgtctaccctccgagggctgcgcaggctactcctccagctcgcttcctcgtggaagggagtcgttcctccttcctctcacacacgagtcacgacacacaccggtcgagaggaatgactggcatcgaaacactcgtggcctctgccattgcatcgcaggtagctcgcaagatctccgatttcgcgaacgaagagatcaagctatgctgcaactaccacgacgacctcgagcacatgaagaagacgctgtccgacattcagccccggctgaagcgggcggaggacaattcctttggtagtgatagggaaatcgtccgggagtggctacgtctgatgaagaccgtcgcctatgacatcgaggacatcctggacgagtactactaccaaaaccccggtgagcaatttgacgagatctgctgcatcgcctgttatgggaagga

SEQ ID NO: 15115 - DNA, 415 bp, Zea mays
  Coding DNA Sequence Number=SeqID_712
gatgcggtgcaggtcacaggatcttcaggggctgkagcctgcaggaaaagagggcttttgataatactgagagatgagataatgaatttggtggccgagcctcacatgcaagaatcttgaagtgagaattgggagaaggaaatggttyttgaagatatgaaaagggaggaagatttgctgaaacaagttaaggaattatacaggaagcagaagcaagagstcatggattatgtcactcaaccagcagcgacacagacgtcacgtgattcgccagcaactcattcacccgcaactcctgagagtaatctgtttggagccaagctytccaacaagtggcggtaacattttggtggsgtacgtccctattttgttggggcttattgcctgttytggcatcagcacgacgtaactagct

SEQ ID NO: 15116 - DNA, 435 bp, Zea mays
  Coding DNA Sequence Number=SeqID_713
aagtttgacgtcacaccatcgccggcaccggsggsagggcayccacgagcgctgccgctcacgttctacgacctcgttttcttggccatcccgcccgtackacgcctgttcttctacgacagggccgacctgctcgacgtctccgacttcacgctgggcgagctgccacgattcagggactccctcgccgccgcgctacaccacttctacccgttggcggggaagctaacgtgcgagctggtcgacgaggaggccgccgcgccgccgaagggaccgagggaccagggagcgccgggaggaggaggagggatcgagggagcatggagcgccgggtggatggagcagccgagcagggagccagccagccagggaccaccgggatgaggcagcagccgagcagggagcaccgggaggagggagcagccgagtgccgcg

SEQ ID NO: 15117 - DNA, 515 bp, Zea mays
  Coding DNA Sequence Number=SeqID_714
ttgcgaagcgattcctgccgtttctcggtcgcgcgctccacctcctcccgccgctcgtccgcgcttgtcctgtttcgggcgataagggcggcgaagccgccgacgaactgcttgagatctacggcctcctcttggactgcctagaggccatatcacccttgccttgcggggaaaccctactccgtgttgstccaamgcggccgcttyatytgttgcctcgagtygsgcggtcacttygcacgcgccagtgcggaggctgccgctaccctygacgccctccgstccgsgctytytccacccaccacgagcaccmagtykcgacgtggtgctgcaggsgttgatyccgtcctccttccggaccccggcagcgctggggaggstggcacggatcctgaagtcaccctccttkcggttgagctcactgtttgccytgctaattgttccagcaagggcaaggtgaaggaacctaccccttatgaacgactcatcagccttttcaaacagctaaaaccatg

SEQ ID NO: 15118 - DNA, 158 bp, Zea mays
  Coding DNA Sequence Number=SeqID_715
atgagccgttacaggttcgttttcaacaattggactgagcatgctccttttaaaaaaaaacagtaccaggatttgctgctgcagggttgaatttcatacattctaagtttctaacaacacttgtaatgtgaacttatgttccccaggcaatgatgaaa

SEQ ID NO: 15119 - DNA, 523 bp, Zea mays
  Coding DNA Sequence Number=SeqID_716
gtatcagagccaggttggccctgtgcattctcagataaaatctcggctcacaatgtgtgagggggagattgttggcaatagtcccacattgtctagtgagagtgagaaagcaaggtttatatggttgagggtgcaatcccctaataggctagctttttgggggagtgttggcccaagagacctaaagcccgttgctatacgtgcgggcgcgtgtgtcgcggcccgacaacttgggtgggcgcgccgtttgtgcgggcggccccgacggacacgccgtgtgtcggcgatccggttccaacaaaacagaaggaaaaaaaaagagcacaggtttatcatgcttgagatggatcagtcagtcactccagcagaggagcatgacgacgcatcggcggatgatgtagagccgagccttctgctcccttagcaccctctgcagcttccccctctgctgctgctgaggctgcttcttctcctgctgctgcgccatggctgctgcggatgatcagggccttcaggggcactg

SEQ ID NO: 15120 - DNA, 144 bp, Zea mays
  Coding DNA Sequence Number=SeqID_717
ttctccattgcaacctcgctgacggagagtatgtgctcatccctgagcaaggagctgtccacgaggaagatcaggagcaagctcccaagcctgccatcgaggatctccccgcagccccagcaattgaaggtaccttcttgattt

SEQ ID NO: 15121 - DNA, 264 bp, Zea mays
  Coding DNA Sequence Number=SeqID_718
tagtaggtcgccctccccgcccagcagcaagcagctcttttcccctcgccatgaacgctgtcgatcccctgctgcagttcctccacatggtctggtcgtcgaccgtgcgcgtcacctgctcgtggttatgggaaaccagcgagcctctcctcacgacgtagtttcctcgcgtcatcgttcagcctgtggaggtacgttaattgatcgcacgatgtggaggaaaagtgttggattaacctcaaagtgatgctgacgaataaacca

SEQ ID NO: 15122 - DNA, 277 bp, Zea mays
  Coding DNA Sequence Number=SeqID_719
tggtttattcgtcagcatcactttgaggttaatccaacacttttcctccacatcgtgcgatcaattaacgtacctccacaggctgaacgatgacgcgaggaaactacgtcgtgaggagaggctcgctggtttcccataaccacgagcaggtgacgcgcacggtcgacgaccagaccatgtggaggaactgcagcaggggatcgacagcgttcatggcgaggggaaaagagctgcttgctgctgggcggggagggcgacctactaaggtcggacgcca

SEQ ID NO: 15123 - DNA, 520 bp, Zea mays
  Coding DNA Sequence Number=SeqID_720
tcccgacgtggccaggctatcgctggctgagtcaggcgccttcgtcaaggcccctggcgacgcgcccaccaaagtcgcatgtgccatccccatgatcggtgggtgctccgcctatgtcggcaaggtgttccgtgtcactaagcacgttggggtcgcgctcgccgacctcaccgccgacgaccgcgtcctctcgcgcttcctccgcaatgagtgcatcaaccacttcgtctacgaggcgccgctccccatctccaggctcgctaacaaggtgcatgtcgattgcagttaagtcagaagaaaaggtggaagaagatccagaattcccattaaaagttatctcaaatgctggaggtgtacccatattgatggatgaaactatttggtttaattttgatagtgaaacaaaatcttccattccaggacgttatgcaactytgccatytgttttacaagattgctaataaggttgtaragaatgatgacattaacmcaaaatactccaacgaaagttataacacat

SEQ ID NO: 15124 - DNA, 511 bp, Zea mays
  Coding DNA Sequence Number=SeqID_721
gtctcgagtctagccatggttccctgcttagggtggtgattctaaagtctacaggtctctgtagccctctccagttcatcgcatgccattcccctgtgctggtgaccacgcctgcagttctcccacctcgccatggctcggacgtcctaaggagttgctggcctggatgaagcttgttctgtaatcatctcagagctcccaaaataaagagtgaagattcaagatgaagtggttgctaaagaggagtctactccagtgcctgctcatcaagtggatggagctatctaactaaaggttgggtagaaggatctagtacctcttcactgcaataaggtgatgaggagtacactacctgttcctaaggctggaggacgtttccagttctggaggaagattagttaggcttatgtataagctttggagggttcctacctttctgctattgtaataagttatgcactttgagtatatcaggacttgtaataaatgtaaccttcccatgtaataacct

SEQ ID NO: 15125 - DNA, 376 bp, Zea mays
  Coding DNA Sequence Number=SeqID_722
aaactgaaggttattacatgggaaggttacatttattacaagtcctgatatactcaaagtgcataacttattacaatagcagaaaggtaggaaccctccaaagcttatacataagcctaactaatcttcctccagaactggaaacgtcctccagccttaggaacaggtagtgtactcctcatcaccttattgcagtgaagaggtactagatccttctacccaacctttagttagatagctccatccacttgatgagcaggcactggagtagactcctctttagcaaccacttcatcttgaatcttcactctttattttgggagctctgagatgattacagaacaagcttcatccaggccagcaactccttaggacg

SEQ ID NO: 15126 - DNA, 551 bp, Zea mays
  Coding DNA Sequence Number=SeqID_723
gtgaagttactcaaccaacctacaccgccagtcgcctctgccttcgagtccgagctccgaccggtgaccggatgcgggatgtctacgagtgctctgacgccgagcggctgcctgctcgcgcccgcctccgcctggccgcctgatggacgaccgccgatcgccacgctgagcgccgcggcgtgccctgcccctcatcggcttgctgctcgtggctcgtccagcccgcgcgatcgcgccagcgcggtagcgcccccgcgtctggcgacgggcgaccccaaccccatccctgagtccactgctcggcgcctcggtgatagggctggaaaataaggtccaggcccgcgagtcggctcgatctcggagtggtcggctcggagcggatcgcaagcctcgaacgagccgagccgagccaaccttttaggctcgtcgtagtagcgagccaagccgagccggttcgcgagctgtgccaaattacttaatatgttgaataatgatggatattggataattttatatatagtcaatttgttccttagcgtttcatgatagat

SEQ ID NO: 15127 - DNA, 424 bp, Zea mays
  Coding DNA Sequence Number=SeqID_724
ttgcccgaggttcacgcctgccgaggccaccctgtcccccatgccgaatcgtgatggttttgcccccacccatgtgccacgggtctccttccccgtcgttcccaccaagttggtgagcgcccttcctcctttcgatcccttcccctgtctccgctctcaacacggccggccagccatggagtgtgacatcggattcgccgagcgagccttggtggcgtccggcgctgccgttgtgtccgtcgttytygtcaatgtcctcgacgtcaccaagatgctcaagacatttcccaatgcgacaaaatatytaaaaaacaattataagctttggtaaggttgatcctaggcacaaggaaaaagttgaactgagtgtcttgtccatctgctcatgggaagagtttytgcaactaataagggaggtgaacat

SEQ ID NO: 15128 - DNA, 533 bp, Zea mays
  Coding DNA Sequence Number=SeqID_725
gatacattttacttctcttctttttctctttatatctgtcatctttagctttgtcatatcgaaatggccactgttgaggttgaacaagtgattgctccagtagcagagaacgttgaggtaccagcaaatgcagtggaggagccagacgtagagaccaaacaacccgaagaagtcgtcgccacgacagactctgctgctgctccagccgccctaaaagaacaagaagccgaagccgaagcaccagtcgtagaaacgagcaaagaagtggttgtggaagaggcagagaaaaaagatgaagaaacagaagagccaaaggtagaagagaaagaagagaagacggaagctccggtggctgtggaggaggcaaagatagaagagaaggaggaggtgactgaaactccggcggttgtggaggagaaggagaagactgaggctgaggaagttgtggctgctggggaagtcgccgccgagaaggccgaggagtaaagaggaagaaacaatatatgaccttctttggtctcatttcgttgtta

SEQ ID NO: 15129 - DNA, 550 bp, Zea mays
  Coding DNA Sequence Number=SeqID_726
gattttccgacaaactattccgctgcgggcactgccgcaaccgctttcaacactcctattgtagtaattactacagtgagtttgcggagccgaccgagatttgcgactggtgccagagcgacgacaaaaagctgagcagcgttgctaaacacggcggatcttcgttttcttcttcaaagaagaagaaggcttcttcctccgtaaattacgagagcggggtcacaaaccaatcggagtatccttccggtggcgggatcaagcatgacaataaccatcacgatcaagtggccaagagcgttgttgccggacctgcaggaggcggcgtgccgtcgccgaggacggccacgcgaaggtacaagcttctcaaggatgtcaggtgttagatcaatttctgaaagagagcttaataatataatatgctaaaataataataaaaatgcgcctttgagatatgattgagtggtttacaaaatattacgattatctatgtataattaattagatatagtgaatgtatatcttgttgagaagcttttcgtactaatgttga

SEQ ID NO: 15130 - DNA, 541 bp, Zea mays
  Coding DNA Sequence Number=SeqID_727
agtcggacgagctagtaggaccttcagacgagcttgtagggccttcggacgagcttgtaggaccttccgatgagcttgtaggaccttcggatgagctggtaggacctccggagcttgagtcggggcttggagccggagttttggctgacgaagattttggagcgtttgcgggggagccaccacctgaagatggggaagcgcttggagtggcggaggagttcttcttggtggtggtgggagcagaggccgtaggcggcgaggttggggcggaagcggtttgttttggggaccctgcggcgggtggttttggggatcctgcggcggttggttttggggatgctgctccggagggttgtttgggggatgctgctgcggtgggagaagcagtgggtgagcttttgttggcgttggctttaggcgctccggctggtgttggaggatcagcggcgaagacggcggtgatggccaagacggcgacggcaatagataggagcataatggtccttgtcatctttaaatgtgtgaatgtgagattttctca

SEQ ID NO: 15131 - DNA, 422 bp, Zea mays
  misc_feature (77)..(77): n is a, c, g, or t
  Coding DNA Sequence Number=SeqID_728
tcgtccgccgactggcacgggcgaaggaagaaagggaaggacaggaggaaggagaggggaggaggtggaggaggcgnccttgtgggcggagggatcggcggcgacgtgtggtgcgccccggggataccgttcgccgcggaggcgtcgtccgtggactgcgtggtggcgcgccaccagatgctggggagggggcgcggcggcgacgccgagaggccgcacagagaggtgagccgtagatgcttactggcttctttggatctgttcgcgctcacagcttgtccatttcgtaggattgcttgctgttcttggtgggtggttattctcatcagttttctcattcctcatgtgcgtccgtttttgtgctttttttgaactcgttttttgtctgttgttgaaaagaaagcgtgtgttcttctccaagt

SEQ ID NO: 15132 - DNA, 580 bp, Zea mays
  Coding DNA Sequence Number=SeqID_729
gttcaggagaaatcgttcacatgtttatatacagagggagatacttcattcctgattgagcccgatacgtttgagcaagttgaggtgccattggacatatttggcaaagctgctgtatatttaaaagaggaaatgagagtccagttgcagctgtatgatggaagagctttatctgcatctgtccctaagcatgtcacatgcacgatccaagaaactcaactaccaatgaaaggcttaacctcagctcctcgttacaagagggctctcctggataatggttctactattcaagtaccatcttatctggaggcaggtgaaaagattgtgataaacaccgaggatgattcttttgtcaagagagacaacaaataaaacgacttgcatagtcaaaatggcgctgtctctcatggaggaagttttatgttgagaagcgttttaatagaaagattaagatgctaatgttactgttattcaagttctcataatctatgaacaccttcattgattaaggtgttacaatttctatacgaaaatttacagattcttgtaaaacatgagtgggtgtctgtctttcaataaa

SEQ ID NO: 15133 - DNA, 579 bp, Zea mays
  Coding DNA Sequence Number=SeqID_730
tatcgactctagtgcacggtggtctctttgacgcggtgtagctggctttgactccggtgttttcgcgatcttaggcgaaatcattcggctttggtccacggttaagggtttggatgagatcttggtgtttaatcgattgatgctctccaaactgggtatgtgtttagctgaagaagcccaaaacgtccaatacagttgttggaggtggatttctttagtgtttatggttgagttcccggtgaaatccggtggtcgtttgttttgtttgggttgatggagaagcttgaagtcggaaacgatggtggagaatcgtgctcacgatttggctctgatgaaacacggtgggttacggtgaattagccgtgaacatcaccggcgtcatttctggatttggtaaaagcggtgaaggataacggtgaagcgttgatttcttgccgcgtgtatgttttatgtgtccttctatggtgtctgttttactgggcctttaaggcaggttagcctggtgcttttttggacttttgtgtaatgtattttatatttgggttttttgtatggtctgggctggtttcagtttttcaa

SEQ ID NO: 15134 - DNA, 188 bp, Zea mays
  Coding DNA Sequence Number=SeqID_731
gtggtggccggcgtagctcgcccggcgcggcggcgtggtcggcctgcctgcacggcgcgcagcccgcgcggcccgcggcgtgcagccagcccagcgtggcggccggcgtggctcgcctgcgcggccccggctcagcctcgtcgcgagctcgcctcgccatccgtcgtcgtcggaagatcgcgatttgt

SEQ ID NO: 15135 - DNA, 554 bp, Zea mays
  Coding DNA Sequence Number=SeqID_732
catcgacattcgatcagctcagctatatcctgcatcgatctggtcatggcggcagcaatgctcccgaggctcgttgccgtggcggcgctggtcgcgctgatgtgcgccgtcgctgtggcccagaaggtacctgccgtcggcggtgcgccggtgtgcaaccttgtcgatcagaacgtcgtgaatgcttgcttcgagagctgtggaagaggtatgaaaattgccactgccgacaggattacttcagcgggtaaagtcaaggttcaagtggactgctgcgtagcctttggaggccactcgtgcatgtgccagatgaagaaggcgtggaaggctcagggcaaaagtgcccagaataatgtggggtgcgtcagggaaaaggcctgctagtgagcacatgcgggaggtctcttcgtgcatgcaagacctctagttcgtttgatatgtgtgcttcttagtttcaagcggtcgatgtccacctgctccttttgcttttatttgcttgtttgtgttgtattttttttcctacgcatgagagcattgatcggtcagttgactct

SEQ ID NO: 15136 - DNA, 557 bp, Zea mays
  Coding DNA Sequence Number=SeqID_733
gagcggtagtgagcacaacctgcctcgccgttgtgctagctgcgacacttcttctactcctctatggagaaacggaccaaaagggcctaagtcgttatgcaatgcgtgtggaatcagattcaagaaggaagagaagcgtgcagctgccagaaactcaataacgtccggtggtggttcatcagtggcagaagttccggcagagaacccgtacaacggaggtggaaactattacactcatcatcaccatgcttcctcgtcaccgtcgtgggctcatcagaacacacaaagagttcagtatttctcgccggcaccggagatggaatatccgttcgttgatgacgtcacggctgcctcgtttatgtcttggaattaacgtcacggaaaccactggccttctccaccatttttgacgagatgaatgaagaaacgttacctatggaaggtcttgtcatagattctcacccaaagtaaatcagtcctggtcaaattcattataaagtttctttttatttatttatttcttacatcgacactatctccttgtgttttctttttat

SEQ ID NO: 15137 - DNA, 502 bp, Zea mays
  Coding DNA Sequence Number=SeqID_734
tttttgttcatcaactcgaaatgtaagcattattttcacaataagttgaagccttccaagcttgcatggaccactatgtaccgtaaacagcacaagaaggatgctgctcaagaggctgtgaagaagaggagacgtgcaaccaagaagccttactcaaggtccatcgttggtgctactttggaggtcattcagaagaagcgtgcagagaagcctgaagttcgtgatgcagccagagaagccgcccttcgtgacattaaggagagaatcaagaagaccaaggatgagaagaaggcaaagaaggccgagtttgcttccaagcaacaaaaaatcaagggcagcatccccaagactgccgcacccaaggctgctaagttgggtggtggtggtggcagacgttgaatagattagccctcattcatctctgcacttatcttttttaattgtttcgacttttgtttcgtcacaagtttttattacagtcttgcaccctatctgatatatt

SEQ ID NO: 15138 - DNA, 519 bp, Zea mays
  Coding DNA Sequence Number=SeqID_735
cggctatcagatcccgatggcgcgtcctatttactttttggacgttatgggagtaggcaacggaggtcgtgctcagcctccggtggcgtcagcttttaggtcgccggtggcttgtgtggctcagagcgactctgattcgtcgtcggttgttgatttcgaaggtgtgatggagaagagatctcagctgtttgatctagatctaaacttgtctcctccgtcggaacaggcctgaacttatcgaaggtggtcgtggtcgtgttcatttccgacgcgcatgcgttttttttttgtttgggagctgagagaattcgtattctcgttagttttttattctctctcactctagaataattattattatcggtttaaaaaaaaaaagtttatcgggagagagaatataattttagctgacatggatcgttatgtacatattattacataactggagatctgaacttttgttgtgtgcttttttgcgacttggtttcaccttgttgttcctctatctgtagcctttaa

SEQ ID NO: 15139 - DNA, 495 bp, Zea mays
  Coding DNA Sequence Number=SeqID_736
ggacaaaccagaggccatgctcaagtcctttttatgatcttaatcattttcattaatttcaaaccatatcgaataattattttgagaaattctaaatatacttgatgtacataacatttgttggataatgcaggagaaggctgagcagtggactgagtctgccaagcagactgcacagtcagcatgtgacaagaccgcagatgtagcgctatcagcacgtgacaagactgccaatttgacacaatcaacacaaagcaagtctgcagatgcatctcattctacccgagaatcagctcaacatggccaggaacaaaccgctggttttctcggtcagaccggtgaatctgtaaagaacatggctcagggtgctttcgatggtgttaagaatagccttggcatgaacgagaagaaatgaggaaatgagtattcgtacttctcaaataactatttatttattcatggctatttctggtgtctagcaattttttatttctc

SEQ ID NO: 15140 - DNA, 506 bp, Zea mays
  Coding DNA Sequence Number=SeqID_737
aaaaggtcaccagttttgctatgggtggatggtggagtggtacacctattttgtctttcaataagctcttcttgtcaaaggttgaggagaaattcccaaaagaaacagagctgatcgttgcttgccaaaaaggattgagatccttagctgcttgtgagctacttattaatgctggatatcagaatattttctgggtgcaaggcggtttagagtctgctgaagacgaggatctagtcacagaaggttctcagccgttgaagcttgctgggattggggggttttctgagttcctcggttggacagaccaacaaagagctcaagctgcgaaagaaggttgggggtaccgtttagtatttactgctcgtctgtttagggtaattctggctgcggatgccttgttccttggtgctcagcaacttggtcattatattcaggagttaagaggtcactaggactctctctgtaaccaaagctccgtgtggttgtactgcttctcttcacaaaaa

SEQ ID NO: 15141 - DNA, 556 bp, Zea mays
  Coding DNA Sequence Number=SeqID_738
ggcacggtcgtcaagctgctcaggaggaactccatgcccatggtaggctgcgtcggcaacctgtacggcagcgtcgaggagctccccgacgacttcatctgccacagggacgccagggccgccaaggacaccctgctcaggcccgccggcggcaggcttcccctgctcacgaacgcggggtcgtcgtcgtccagcaccggcggctttgtgagggcgggcgtgacctacgaggtcatggacgacctcgagattgctcccaggtctaacgtcgatttcatcaccaacctcaacagatatggtatcagggacatcggctgtctccagaggaagactgtccgagttggcgacaccgagggtctccagatactgagggcgtcactcaagtcgaagacggtcctcaccgacgtcttccttcggacgaacactccgagtccgagtccgagggccttaactgcagggtgaagtgtccttgccgtgtcatccttgtggtgcgtgcatgtgtttctttggtcatatcgttcgtgtgtggtcactggttcacggctcacatactatg

SEQ ID NO: 15142 - DNA, 288 bp, Zea mays
  Coding DNA Sequence Number=SeqID_739
aactcagcaaataccaaaccctactcatattcaccggccacaggccacctctctcatacataccttcacgggctcacggccacacacagacgcatggtcactggcggcttgccggcttcacctcacggcaggcaccaggcaacgcagccgacaaccgctgccgcagcccgaagcgcatggctgcacgtcgccgcccatttcttctgttgccgccaccgccgtccgcttctgccgctgccgccgcagtccgattcacgccttcacctgtagccccgcgaggacacgtgt

SEQ ID NO: 15143 - DNA, 234 bp, Zea mays
  Coding DNA Sequence Number=SeqID_740
gggctacaggtgaaggcgtgaatcggactgcggcggcagcggcagaagcggacggcggtggcggcaacagaagaaatgggcggcgacgtgcagccatgcgcttcgggctgcggcagcggttgtcggctgcgttgcctggtgcctgccgtgaggtgaagccggcaagccgccagtgaccatgcgtctgtgtgtggccgtgagcccgtgaaggtatgtatgagagaggtggcctgt

SEQ ID NO: 15144 - DNA, 462 bp, Zea mays
  Coding DNA Sequence Number=SeqID_741
gtccctcgtcgacgtcccgagaggagggccaggcgactgcgacgcgcgcgaggacgtaggggaggccaaggagccggaggtgtgggcggacagcgtcaagaagaagcgcaagcgcaagatgaacaagcacaagctccgcaagctccggaagcgcctccgccgccagacctgagccgccgccgcacgtggatcccgtaggcttgaggattgtgattgcaaggaggttctccggtgccgctgccacaccggtttcaagctgatggtttcttccagttattttggtttggttataggagtagcagttctggtaccaacaaagcaattgctgcgactgggcacgacgtacctacaaacactgtaatgacaaggagccaggaacgggctgtttcatgtctggatttctggcaaataaagcttcaaatgcccgtctaactcatttgtactgttctttccccggatcaa

SEQ ID NO: 15145 - DNA, 519 bp, Zea mays
  Coding DNA Sequence Number=SeqID_742
gatccaggtactgttggcgaacgccgccgcgtatgcgcacgcacggaccgttcggccaccaggcgccaaccgtccgactcggcgtagagaagaactcggtcctgccgcacgttgtgggccgtccaaccctaggtcgtgtaccgtccgcactgccgcagaaagcaccgccgctatactacctcgtagtgattgacgtccagatcgacgccaacagtattatagcctaggtttgcgtgtcgggcgccgcagggttggacgacatagcttggaccagaaatgaaatgaaaccatatgaaaccatatgcatgtatgcatcgtggaaagctagcaagggaagcacgcaatttgcaaatgaaacgagtctctggcatagtcgcacgcaacacgcaagcagcggacggcagcgatcagcatggccaccgggtcatagacggcgacagatacataccgcgccggtgacctggcatggcctccttggtcgtagtctctctctctctctctttctgacacgcaagtata

SEQ ID NO: 15146 - DNA, 556 bp, Zea mays
  Coding DNA Sequence Number=SeqID_743
tcaagtttcttgaattgaaggccaagaggacataccgtttcatcgtctacaagattgaggagcagcagaagcaagtggtcgttgagaaactcggcgagcctggtcaatcccatgatgactttgcagctagtcttcctgctgatgaatgccgatacgccattttcgattttgatttcgtcactgctgagaattgccaaaagagcaagatcttcttcgttgcatggtctccggacacggcaagagtgagaagcaagatgatctacgcgagctctaaggacaggttcaagagagagctagacgggattcaagtagagcttcaagcaaccgacccaaccgagatggatctcgacgttttcaaaagccgagccaattgaggaaccggttgaattgaacttctttcatctactattgccgagtgatatgcttttacttaaggtttgctgtgacggcaccaaccaaaaaacagcttcatttttatctgtctttggtctctgtctttattttattttggtccttacagtgttgtcttaaaacttaagaggtctggctcgtgctc

SEQ ID NO: 15147 - DNA, 589 bp, Zea mays
  Coding DNA Sequence Number=SeqID_744
gttatttctgcaacacgtacccaaaacgtattgggtgataagggacgccgtattcgtgaacttacatctctcattcaaaaacgttttgacttcaaagacaaggcagttgaacttttcgctgagaaagtagcacaacgtggattgtgtgctgttgcccaagctgagtcattacgttacaagttgattggtggtttagctgtcaggagagcatgttatggtgtgttgagattcatcatggaaagtggagctaagggatgtgaagttgtagtgtctggtaaattaagaggtcaacgtgccaagtcaatgaaatttgttgatggacttatgattcacagtggtgacccatgcaatgattatgttaatgtggctactagacacgttttgttaagacaaggagttttgggtatcaaggtaaaaattatgttgccatgggaccaaacaggtaaacttggcccaaagaagcctttgccagataatgtcagcgttgcagaacccaaggaagaaattctacccatagcaccaaccagtgatattaaatctaaacccgaagtagcagtacctgctgttccagttgtacctgttgttggtt

SEQ ID NO: 15148 - DNA, 533 bp, Zea mays
  Coding DNA Sequence Number=SeqID_745
gaacacgccaattccgagcaaacggacgacgccagcacgctcgcgaaaggcttgctgggcgtcaccctcgtacctgagacgacgatgcagtcagtccctgacgtgacttcgtcaccgcccgtcgaccaagaggtacctaccggttcccatctcacgccctttggatttagcctcgacccgccaagcgacttcgctttggcggacgctctcgtagaggcgagtccaaaccctctggtgtaacaccccaggtgtttatattccgctcgacaacgggtacggatttaagcacgtgaacagtggataaactggatgttaaattttaaacatcttcgtttttcgcgattttaatatcgcatctgtcccatctgtcgcgagtgcgacgtcgtttttatttttatctacccgggcttttccgaaattttcatgatgttcggaacatagctgtttcgaagatcggtgcgtccgatgtttatttaaaatacatcgctcgcgccaatacgaattcggaagcccaactcactcggatgatttta

SEQ ID NO: 15149 - DNA, 592 bp, Zea mays
  Coding DNA Sequence Number=SeqID_746
agagcgtaagtggttcatctgactagactattttagctgtccgatcgaaagcggtgatggccgagtgcccgctgtgcgggacggcgtcgcgccgaattcatagccgatacgccagacaagtcgcggacctgccctgcgcgggtaggcagatacgtctgtgggtgatcgcgcgacggttcctgtgcgagattccgcattgtcgtcggagaattttcgccgagcggttcggtcaggatgtcgtcccggtgcagtcacgccgaacagccaggttggaatgcatcgtcgtcgccggcattgatgattgggccttccggaacaaccattgctacggaacaatcgtttgcgatctggagcgacggcggatcgtgaggttgctgctcaatcgcgagattgcaacggtgcaggcttggctatccgaccatcccgggatcaaaataagtatcgcgcgatcgtggcggcggctatggcgaggctgccgcaaaggcgctgcctgaggtcatccaggttgccgatcgctggcacctgatggaaaacgcgagcgcagccttcctcggtgccgtgcgccggtcgatgcgcgtgatctgtacggcaa

SEQ ID NO: 15150 - DNA, 144 bp, Zea mays
  Coding DNA Sequence Number=SeqID_747
gcagcggccgcgaggcggtgcgccgccgcggcggcggggggccgttcgtagggcgtggaggcggcgcggaggtgcggggcggcgccggatctttcctccggcgccggaaccgtcgtacgggcttgggtacatggcgcggcggag

SEQ ID NO: 15151 - DNA, 592 bp, Zea mays
  Coding DNA Sequence Number=SeqID_748
gattcagaccactaagtcttatccaaattctttaagttttaaaatatattgaattatattggagcggcaagtcttttgcctctccctttcaaaaaaaaaatatattgaatgtaaataagccgatggatattgattgtttcaacatggttgttcggatgctcgaatgcaatgatgccttgtggttagaagacaaatatcactacatagacctataattatgtgtaatctaaagtaattattctgtagtcatataaatatgtttattatatcactattttactgacaaaaagtaattcatatctaatttcgcttgagacccttactttcgtgcaaagatagatatcaacatgttggcaaaattatttaaaggttggcttgacatgaatacaataattcagattgcagtcatgaaagctatattactttattattttttaatcttgcattttgattcttttacatgaatgatttggttgactaaattttattgccctattctttcttgaattactttagcttatttgtacttaacatggacactaaaagtgtctatataatagattccatgtctgtatcgtcatggtttaagtca

SEQ ID NO: 15152 - DNA, 40 bp, Zea mays
  Coding DNA Sequence Number=SeqID_749
acgtcgaagccatcgtcgaatctgaagccctcattgccga

SEQ ID NO: 15153 - DNA, 537 bp, Zea mays
  Coding DNA Sequence Number=SeqID_750
cctcgtccggttcggatcgtcgtcgccagccaggtgctggatccgtagcggcggcggcggccatggacaagagcatgctcggcgacctggatggcctccccgaggaggacaagatgtggatggccgccatgatcgaccagctccagatccacgacaggttcatgctataccaacgcatctcgtgggtggagcagggccgctgcttcgtggtgtggaagcccgtggagctggcgcgcgacctcctcccgctccacttcaagcactacaacttctcctttgtccgccagctcaacacctacgtgagtacatcaaaaacacactcgtccatctatacatcatatgttctgttggtgactgagattgttgttgcaaaacaaaggtctgctttggttcgatcagtgtgtcttttgtttatgtccaatgaaactgatggaagaaaaaagcctctcgatcggcggtgtcagagttgcctgtgacgatgtaaaaaacatgctagatgtagcaatgactaaacctgtgatgatggcatagttgtgc

SEQ ID NO: 15154 - DNA, 553 bp, Zea mays
  Coding DNA Sequence Number=SeqID_751
acttgatcaagtgttccatgtgcttgttggtgtgaacttgagatgattaccagaaaagggcgtcagcggaacactccagaatcgcatagcgagtacatattatacatgataaccagatactcacaaaaggcatgacattattcacaagcgacatattgccatggcgtcgtatctcttcagtctcgtgtcacatgccatacagggtaggattttaggtcaaatcccatgatccgaggtagcgggtttcgccgcaagaggcgcagaagatacaacctcgtggatttcgacaacaatcaagcccctgatcttgctgtgatcagttcaattacactatactgcgtactggaactccctgcgggtagtcctataccttggaacaacctcattccacctccaggttgcgatacggaaactcaaagcaacacagcaaccatggggaatgtcgccagtagtctcgttccggccaacgcctcaccagcgcaatacacccaagcgttcttcgccctctcttcagctttcatcttcagcatccaatttcttcctgatgacatcc

SEQ ID NO: 15155 - DNA, 485 bp, Zea mays
  Coding DNA Sequence Number=SeqID_752
caggattcatgtctttcgtttcgatccccccgcttttccgcgaatgaaactaggaatcatcaaaggcacggcaacacgattccaattgtataattattcggccctatccatcgaccagccacgatcagttaccttcatcggcggattcttctcagctagcacgcacctcttcgctttcggtagccgccggctccgatctataccgaacccgcaccactctccagctcgcgttcggtcacaaacggagtatccatcggcacaagaatatttcattcgagcgagtgcgatctcaggtggccggggctagctggagtagtcgatctcattcccgaccgtgcatgtttatacacgtacgatacgattaaacccgggaagtggccgaacgcgatcggttctctgttggtcgcgaatcggatcacgtcgtcgggttctgaagctagctagatgcagccatcatatcgacggtacccaagcaacgaaagcag

SEQ ID NO: 15156 - DNA, 543 bp, Zea mays
  Coding DNA Sequence Number=SeqID_753
aatcaaacgctggagctttgccgtcatgttcatggcaaggacactttcgaagcattctacaagaaagatctggcacgccggctcctgatgggtcgcagtgccagctctgatgccgagaggaacatgatcaccaagctaagagatgaagctgggtcgtctttgactcagaacattgagaccatgttcaaagaccaagagctcgctaaagaggagatggatgcgtttagggagtgggacaggaacacattaggcaaaccgagcgaccttctccatgtcatggtactgtcctctggcgcatggccgacgtatcccgacgtcaacctcaatcttccagataatgtcgcgagtcagcacgagaggtttgataagttctaccagcacaagcacagcggcagggtgcttacttggaagcattgcctcggccatgttacactcaccgccaacttccccaaaggtcgcaaagagctcttcgtctccgcgtttcaggcctcagtccttctcttattcaacaccgttcctaacgatggctttctcagctacgac

SEQ ID NO: 15157 - DNA, 486 bp, Zea mays
  Coding DNA Sequence Number=SeqID_754
taacatctgtcaccactactttttgtcctagcagctgaccttctgcaatctatcattaataaggcaaaatatcttggtctccttcggctccctattcagaatggttgtggccaggacttccccattatccagtatgccgatgatgcaattatggtgatggaaacctgcccaaagcaactgtttttttaaaagcgatgctaaactcctttgcagaatctaccggtctccatgtcaactatcataaatccaacatatatccaatcaatgtgtcaagccagaataaggagctcctggtaaacactttccaatgccagattagaacccttctgttcacatatttgggcctgcccatgggtctaaacaaaccgaacctataagcctttttcatgttgatccagaaaatggaaaggagactagcatcgacatcccactttctgtttcaggtcggccgactggaaatggttaacacagtattttcatccctcc

SEQ ID NO: 15158 - DNA, 468 bp, Zea mays
  Coding DNA Sequence Number=SeqID_755
tggcgagagctattttactgagtcagcaagtcaggggtttgaagcagcttctccagatttgcgggggaaaggcttgccttggtttatcactttctcagattccactcatgtgggagccttcgatcgggttagctcttgatgtagttgaccgcatgtgtaaatccagttctgatgtgccaattgaatcatttcacccaatcatacatgcttgtgaacaaagatgtgaacttcacatggcccgccccatatatgatttgatccgccaccacaatttgaaatttaaaagcaaaacattcagaagcataataagtttatttgtaaaattgaaggattttgaaggtgcttacaatatactcacagacgctgaagaatctggggagatatcaaccgtaagcctgtataatgctataatgctagggtattatagggagaaaaactacaatggagcacaaatggtcatgtctcaaa

SEQ ID NO: 15159 - DNA, 558 bp, Zea mays
  Coding DNA Sequence Number=SeqID_756
agcattggagcatatggttctggaagtggaacatatggtgttgtgggtagccatgcctcctaagattcaagttatggagcaccccattcacaacgacgtcattcggtttgcggacctatttatgatggtagccataactcagttatctcaagttacaactatttgcctcgatgtgtgtaacaccctgaatttgggggtataagatttctcttctaatatccaccaaattcatgtgttaccgtctcctttctttgctttccttctctttttttctaaataaagatgagttattttgttatattggtgtaagcctagtgaagtgagccctagaggcactttggttgttgcattcatgacattgcatagtgtttctatatgaaaaggtgtttgaaacatgttaatatgtctcgtagaagtttccggtaaattttcatatttttctgaatattttatattttttcgaaattcaaaatatatttatttgaagtacttaaaaacacttttcaaaagttctaaatatgatttttgagttcattgggtgccaaatcatgtctagga

SEQ ID NO: 15160 - DNA, 387 bp, Zea mays
  Coding DNA Sequence Number=SeqID_757
atcagctgtgctcctggctggcagaccttaataaccagtacgtgtttcgaatctcttatgtttatttctgggaactgacctgtgtttatatatgtttggacagtacgaactgaaaaacaagagtaaagaatttccgtgagatgagacgtacgtaaggataatccccaagacattgctcaatctgtttctctctccttttttttcggcgagcagtttgtccttttttttttcaattttttactactatctccgttctcgaatatttgtcgtccgctggcttatttttgaactaaaacacgacaaataagaaagaatggagtgagtagtagtttagtttcatgtagctagaactctaacaccctcctggatccttgtgcagagaatgcc

SEQ ID NO: 15161 - DNA, 367 bp, Zea mays
  Coding DNA Sequence Number=SeqID_758
tcggcttgtgtggagtgtgcaattagaatcttatcttattactactagcgaagtggttgcgcagtaacctgccagtttcggacctagtgtagcatgttttggaaatttgctgctaatattcctgtgattattttggagttgttgtattgatgctcgattcaattcattttggccctgactttgtttaaatttaaacgaagggtggtgaaaaaataactggcctcctttcactgtgtactattggcttcactgtttcagtggttccttctgggagtttttatttttattattatctttccaactctgcttcctaggagcacacgagtagtcggaagcatgatttgtgcactatatgaaggcctacgta

SEQ ID NO: 15162 - DNA, 344 bp, Zea mays
  misc_feature (261)..(261): n is a, c, g, or t
  misc_feature (264)..(264): n is a, c, g, or t
  misc_feature (312)..(312): n is a, c, g, or t
  Coding DNA Sequence Number=SeqID_759
tccggtgcaaggtacgccgctgccatcccaatccctacccccaggcaagctttgttgattgctttctggttgttgatttctgagctagctatttagaagtcaaaaatttggtgaaatctgattaaccaaactacctggttagaaatcaaattggatgaaatctaattaattttgatatgtgtctcctgagttcaaggatgtcttctacaataattcagccaagaacaagaagcgctaattggaatccaaattgtttgatgnggngatatgatctggaacttggaccatcttttatgctttatgggggctaanaagcataaagacctgtccgaggcaattgtatc

SEQ ID NO: 15163 - DNA, 502 bp, Zea mays
  Coding DNA Sequence Number=SeqID_760
ttgctttaggcacacactcgtcgttcccatgttgtgcgctcctctttgaccaccaacacctaattcctcaccttgagtcctcgacctttaccgcaacctcctagatgagcgctgggacgggtacgacatggccgcatgggcaccgcagtcggggtgtgggcgaggccacattgcgacgacaattgtgtggggaaaatggtgggctggtaataacaacaaaggaggctccgtcatccttaggatccataattgtcgcaccatcttcactgcacattagctacaaggtgcaagcaagaataaagatatggcttcgttgacacttgttcttaaagtttggcatggatgtcaaggatcattctgcttgtttcaacaatcataggagtgagcataacttgtcagataccctcccgcattaagcttgtgacacacttctaaaattgtttaacaacacttgtacttatatgcggaagatgtaaacattattgtttgtcttggctttcca

SEQ ID NO: 15164 - DNA, 497 bp, Zea mays
  Coding DNA Sequence Number=SeqID_761
tagtccatgcaacctcgatgtggctcaatgacctatgcccatgcccgatgtggtcaaccatcatcgtgacaccatcaggttcctggtgccctatgtcaattgccccaagtcgtgaaattgagttcccctacatagacaatctcctcttgttggtgttgatttcctgcaacgacgtcgcatagaatgctttcaaccctcgacggaccatgcccmggsttccatgttccatgtcagaaccctaagacgatctttgtgagtccctacgcttgatcccctacacccagctggtcgtgcctgcccttactcgccaagccagcgtccagaggtggaataagtaatatttgcaagctacccctagcgattacgattaatagtgtagctagcccctaccttaatttctatytgtaaaaatattatttggtataaagctactagcctcataaaaatgtgatcaagcatttttaactgctatttcccatcaattttatatccccgta

SEQ ID NO: 15165 - DNA, 213 bp, Zea mays
  Coding DNA Sequence Number=SeqID_762
tgcccgcacgggttgtacttgtacatgtaccactgctagactagtacttctgctgtgcctgtaccatagtactgtgtattgtattgtacgtgctagtagtaaaccgctgccttcttcctcctcttctcttctctcccccaccactmtgctgttttgctcctcctmgtcgtcatcgtcgtcctcacgtccgctgtgagttgtgacctgtatgta

SEQ ID NO: 15166 - DNA, 596 bp, Zea mays
  Coding DNA Sequence Number=SeqID_763
tatacagtgggccaacatctcctcgttaactagcacgaatgcattgatatcggtaaaaataaataaatctagataaattaaaatgaaccatcgttaatttcacacgtcatgtgtatgcatgggctgacgtgtaccctagcggaggcgtgttctatgctaagtgtgtgagtcacttgacaaatgtttttttcaattggaactaattactatgttctttagttctagttatatggactgatactaaaggatcctttaataccgattggtggatccaccagcctgctcaagggtccaaaagtgtaaaaattaagaaaaataagaacctagaatatcacaagtcacatgatttttttacggaatatgcacgcacactattacaaaatagttttatgcctgcggtaatgtctactttttacagacagtttcagttatcaaacgccagtaatatcttttcagacagttacttaagaaaacttcagtacaaatcattttctactggcggtttcttaagaaaaccacgagtacaaatccataatttgtacaggcggatttactaaggaatacgcatgttgaaattgatttctactggcggtttt

SEQ ID NO: 15167 - DNA, 212 bp, Zea mays
  Coding DNA Sequence Number=SeqID_764
gtgcttggatattacgtctggtcttcaataaggcatggccttctttaatggctgtgcttctgaaaataaataaactagttgtccaggtattatcgttgctttggtgacgtgtcgatgtcactgtatatatatgaatgggtgggaaagaatgatgatgtgcagtgtgttctgtgcaaatattgccgagatgaaggatcagtatccatgtagac

SEQ ID NO: 15168 - DNA, 570 bp, Zea mays
  Coding DNA Sequence Number=SeqID_765
ctgtccgcagtgatgcatggttggttgctgtgggcatttcactttggggctctccacggatttgataaagacgccaggagacaactccacataatgatcaataatcatcccactgtatatgaagttgtgatagggagtggggagaagcaaccaaaagcccacaacacaaattacgaaaccaagtcaagttctatcaaggaacctagttctagcagcaagctagcagagcagcctctgccaaagaaggagcgacagatcatcaaagaagatggaggcgacaaggatgaagctttcctgtgcggtacatgtggagggatgtactcggaaaatggagtattctggatcggctgcgacatttgcgacaagtggtaccatggtgactgtgtccgcatcactcctgcggaggcaaagcacatcgatcagtacagttgtcccgcttgcagcaacaagaggaacatagagtgagtgagcatgggtcgtctgcgcccctggttgatgtagttagggtagtaagcactaatactgggctacgtttggcgcactaatcgtagtcgttgttactcgtgctta

SEQ ID NO: 15169 - DNA, 251 bp, Zea mays
  Coding DNA Sequence Number=SeqID_766
ttgtagcctcgtcccacaccgtgaggaggataggagagagagaagagggccggccaccacggggactcatcacaactagtcggcatgtggtcagagtggttcaccagcgcatgaggaagaagcatagcttcacaacgaagagctcctgggggaaaagattcatcgccagcgatggtgatgatgccggagttcggcgcctggccgcgacctgtgctccgcgtcggtcgaccctacctccatcggcgagcgag

SEQ ID NO: 15170 - DNA, 451 bp, Zea mays
  Coding DNA Sequence Number=SeqID_767
tcctcttgaatcctgatgctgctgttcctgttgccactcgcgtcagctggtacggacagttgccggcctattctgacagctccatcggtgttgaagccaggtcacagaaagaaccacgatatttgggcccttgaattgagttcaagcatgatggaggattgtgaccgtttgattttaatgttgctggattcttggatacaaattgtgtggtatacgaagattggactacctgaatggacaatagaatttgaagtgtagccaactttattttgatcgttcctatatagaacattgttggaagccttcttctccgccgaaggtcctcaaggcaagaacaccttcgataagataatacgaaggctcgccgaaactatcatgaacctcagctttgttcctcgagactaagactttgtgtacaagcaatgttgcggaatgccgaagctcaatagct

SEQ ID NO: 15171 - DNA, 464 bp, Zea mays
  Coding DNA Sequence Number=SeqID_768
aagggtatgtcgtccgtgtgtgcatagtctctcggcgttcaacccatggagatggaagggtcgtactgtcgaatcagctggcggctccaaggatttcatggcctttggagctggtctgcggctatgcgttggtgccgactttgccaagcttcagatggctatcttcctccactgtttagtcaccaagtacagatggagagagcgattagcggaggcacaatgatgttctacgcaggactagggtttccagacggttttcatatcaagcttcttcccaaagattgaagtgtgataactgacaaagctataagagcattattcgtgtgctcgctagctagcataccaacccaactgtcagctcaattgctgtttctaaatgctgccaatgcgttgcgtgctagctagattttgtgttgtaaatcaagccaaacaattgtaggggcttgctagtctgatgtttatga

SEQ ID NO: 15172 - DNA, 473 bp, Zea mays
  Coding DNA Sequence Number=SeqID_769
cacctgggggacaatcttggacatctcaatggctcaagtttgacaacagctatttcaaggcatcgaagaaaggcgagatgaagacctcctagttctgcctactgatgctgtgctgtttgaggattcctcattcaagatctatgctacaaaatatgccaaggatcaggacacatttttcgaggactacgctgaagctcatgccaaattgagcaatcttggggcaaagtttgacccgccaaagggtatctcactcgagtagttgtggatggaggtgactgaacaggaaggggtcatgtttctttgcgtgaccattttcgaaggttggcaaggaaaagttattgtagttgaatgatagctccacaaattggattcaccgattaaaggattttttttcttagcgtgccctgtttttttagtagtgtcctacactatgaataaagcaacacctgtcattttaagatttgttacactaa

SEQ ID NO: 15173 - DNA, 172 bp, Zea mays
  Coding DNA Sequence Number=SeqID_770
atcgactgcgacaagttccaaagcgaagaaagtcttgcttcaccttcatcaaacaggaccaaaaatgatcgaatgaagggatactgttcccttaccagaatccatacgacgggatggtgatgttcagtgccctgctagcagtaggctgcatctgcactgagtgactagaata

SEQ ID NO: 15174 - DNA, 457 bp, Zea mays
  Coding DNA Sequence Number=SeqID_771
atgcattccgcgcacagcaagagaaggggcatctacatcctgtacgaggacgtcaagtcgtgcccctgcgaggacgtgcacatcctctggtccatcctcgtcgactcgtcccactcccgcccgccgccgatgcgcctagaccatcactgactcgctcgctcgctcgctcgtccctccctccctccctccggccgccgcgcccaccccgtcgaccaagaccgacacaaggaaactgtcggccggtgtgtgtacatacaaaaagatgacgaccagtgccggccggtatagttcaccttcttcagccgtgatacgtggtctgtgtttgatccacggagatggtgtgcgtcgtaggtgatgagctcctccgttcatcctgcgctgccgcctcttccgtcctccagaagagcaggtgcagagcaggcgtccctctccctcaccgacactgcggagcggtttt

SEQ ID NO: 15175 - DNA, 571 bp, Zea mays
  Coding DNA Sequence Number=SeqID_772
ggagaagttcgtgagcgatccaaatgggcagctcaccgaaacgctgagcctgaaatcgccgagcggcgcgacgtggctcgtcgacgtcgcaaggaacgccgacgccgacgagctgctcctcgggtcaggatggggcgacttcgccagagcgcacgagctacaggaggacgacctcgtggtcttcacgcgcggcggcggcggcggcagcggcagcggctgctccttcgacgtcctggtcctggactccagcggctgcgagaaggcgccctgtttcttcgccgccaacaaggtgcacgggcgtttcagtggcggagggcgtcgacaggctgcacgccgccgcgtgttccgtggtccggaaccggaaggcctgggagcgcagctgcgcctcgctgcggcggcggcgtccacgcacggggcatctacttcgaagcagaagtgtggcgagactgataaaccaagtagagcagagagatttgacattatgaaacgcgacgggtgcggcttcaacgaaatagaggctcaggcgagggtttctccattatagaaaagctgggcatagccaacactctaa

SEQ ID NO: 15176 - DNA, 508 bp, Zea mays
  Coding DNA Sequence Number=SeqID_773
gcctccggccctagatcagcgggatgcattgcaagatatatagggacactgtcttaggggagctgaaccaccacgagcctatgcctgttttcctcaaggacacaagcgagcgcgggttgcgtcgcaagaccatacagtccggctctgggaacctctgcgttcacagactacaaggcactttccctgataacacatatggtgttgatagtggtgggaacccaaatgaaatcccaaaacttacttttgaagattccaaggagtttaatattaagtattatcatccaagcaacgctaggatctggttctatggtgatgatgacccaaaagagcacacattctaagtggttgtccccactgtactcagtgctcaggaggagatgttggcaacatggaggactttgaggagttccaggactacgatgagttctagtttattttagtggcaaacccccagtcagctgcctgtgtaggcttatcttctacgtttcgtttctctgcactttaatat

SEQ ID NO: 15177 - DNA, 99 bp, Zea mays
  Coding DNA Sequence Number=SeqID_774
agatttcttggatttccagttgactgacgaataaatgacgatgtctccgttagggcctatccggttgttcttcaatccatgtggatttgcattcggatg

SEQ ID NO: 15178 - DNA, 556 bp, Zea mays
  Coding DNA Sequence Number=SeqID_775
gtggcaaagacacatcatgtcctgtgtgttcgagcgcaagaccagcagagctgtcagctgaaacgattgcgaatggaaagacgcaggcaggaacatgtgtgttgcatccttccactggagttgcagtggcatctgcaaatctgctgattggatcagtaaagtccatcaacgttgcgtgagagtgagaatgcacttttgggctgtgattccattgcaatggcatctgtaactgataagaaagctaagatggagagtttaatatcttctgcggcctttgtggagggtggcattcaggaggcatgtggtgatgcatgcaacatttgccttgaggttttctgtgagagtgacccttctgcagtgagtagccattttgttagttgagctattttatatataaatgttatttctgtaaccaattacttggagttcggagtgtttttcttatgcaggtttggtgtatccttctcagtgacaaagtaccttttaaaatgcactgccctgtacactctgacatgcaagacaatggtatatggattggcttatttatgtatagtga

SEQ ID NO: 15179 - DNA, 564 bp, Zea mays
  misc_feature (185)..(185): n is a, c, g, or t
  Coding DNA Sequence Number=SeqID_776
gatgaacctgcggaagacgtgatcatggaggagccttcggaggaggtgatcatggaggacgaggagcctacgccgtcgccggcggaggaggtggttggggaggggaagaggaggaaaaagagggtggactatgaggtcttyrtgtccgcctgkataaggatacgaagtccaaatcctcatcctanccggttccctacttccctcaaaccacgtcctctgcaacgagcgcgccctacgcgacggcgttccctcggctacctctacctcctggacatgccaccctcctcccggcctccttcgcctcaaccctaaccccgcaccttcgaacccagatgattgttcatgagaggacgatcacaagatggataccacaaccgtgtcgtgagcaacaagacaaaccatgcagagaagaaaccaaaagggacatgcaaagacaaaaatcctgcagagaagtattaagcaacgaacagagcatacaagtgtgggggtggtgtagtgtttatctattggacgtagtgcagagctttacagttatttctagcttacttatctacaaactgaaat

SEQ ID NO: 15180 - DNA, 533 bp, Zea mays
  Coding DNA Sequence Number=SeqID_777
taatcgaaaacgatcgagaatacccggaaggccggaacccacctgctgcgcacctgcaagcctcgagtggagctcttccacggccgcggtggagatggcggcgaatctggaggacgtgccgtcactggatctgatgcacgagctgctccgccgcatgaagtgcagctccaagcccgacaagcgcctcatcctcatcggtccacctggctctggaaagggaactcagtctcctattatcaaggatgaatattgcttgtgccatttagccactggtgacatgctgagggctgctgtggcgcaaggcaggctgtggaactggcagcatggccccataagcgttgctcgatctcctcatcgctactggatggagagcagttgggctagttgttagcggtttccctagtttctcttcctcctgtgttccccgtttcagtttgcttatagccccgaagactcttttctcccgtagtgtcggaatgccagggtctgttgcgtaactgggatccgaatgtaccctgctgtgttcatcgtta

SEQ ID NO: 15181 - DNA, 557 bp, Zea mays
  Coding DNA Sequence Number=SeqID_778
gacaaggagccttctctcgtagaaatcattaacatcaagtttgtagagagtggagagaaggagaagctgacggagctcctccgcgagcggctcgttgagtgcggctggatggatgagatgaaggcattctgcagggactatgtaaggaagaaaggaagaaataatgtgagagtagatgacctcattcatgttattgttccgaaaggaagagcatcagtgcctgattcggtgaaggcagaactcctgcaacgtatccggtcctttatggctaccacacttcagtagtcatttaycgggacggttggagctacatgtaccattgtacgaacactgggaggtcgatcttgttggggaccaagggtgcaggtactatgagcatgaaaaggaacagtgtgatcttcatgatgccatcgacatgttcctcgtcagacaggcggttggcgcgatttcaggtgtagaaacacagagtaataatccccaaactagccctaaaggaaccttgtagcctgtaatgctacattgccttatcattgtatcaacagatgctttatttcaca

SEQ ID NO: 15182 - DNA, 501 bp, Zea mays
  Coding DNA Sequence Number=SeqID_779
gaagttttttgtgtggatgcatgccattcagctgcctgccaagacaagaatgagagatcgatgtgtaggcagaggcgcatgaatcgtaatttggagtaggatgcaactgaaattccggtccaacaaggtgcaggagaatcgtactcgtatgacccgacttggtagaaaacatgcaaggcgccattacaggctacaatagtgttgttttggtcgtcagggtggtgcttgtgcttcggaaggcaaggcagatcagtggcaggctcagcctgtacatgcatggctcagcgctggcaatacatatgagaatgagatggtgtctgtggacgagtttcccttttaaaatacagtaagaagttgatcgctcaactttgacatgttggccacgggtgatcccctcactccacctgacaataatccttggtgatgcaaagaccattgctaagcgttccttgcattgcatgcgaattaggctagattagagaatcatatcctgcttgttcg

SEQ ID NO: 15183 - DNA, 492 bp, Zea mays
  Coding DNA Sequence Number=SeqID_780
tatattagcatgtttccgaccgaacaagcaggatatgattctctaatctagcctaattcgcatgcaatgcaaggaacgcttagcaatggtctttgcatcaccaaggattattgtcaggtggagtgaggggatcacccgtggccaacatgtcaaagttgagcgatcaacttcttactgtattttaaaagggaaactcgtccacagacaccatctcattctcatatgtattgccagcgctgagccatgcatgtacaggctgagcctgccactgatctgccttgccttccgaagcacaagcaccaccctgacgaccaaaacaacactattgtagcctgtaatggcgccttgcatgttttctaccaagtcgggtcatacgagtacgattctcctgcaccttgttggaccggaatttcagttgcatcctactccaaattacgattcatgcgcctctgcctacacatcgatctctcattcttgtcttggcaggcagct

SEQ ID NO: 15184 - DNA, 575 bp, Zea mays
  Coding DNA Sequence Number=SeqID_781
ccgattgttcggtttgcagtttgggtccgattggtgttaagagtttgtcgtggcgtggcaacgtcgtgctcatcgcggtagccgtcctggctacggagcaatctgcgccatagagttcacccagctacgatctcgccttgctccctgccgcactcacctcggcatggtccctatcgtcgtcttccaatttcagcagttctgttcagccctatgtcgacctcgctaaccacccatggttgatcctatgaggatggatcacagtttgagattgaaaaaggagcttagaaggtgtagataataaagccccagattgacgtttgccagatattcggtggaacggaagttcgtcgtcgttcttgtggattttggatcgatttggctcggtaagctgatttactatttttattaactgatctgatgaatggattggttgaattagttgtccgtaaagagtgttttattcttagcatgggtgcgtggtcgaggtattagatgtatgtcgtgatgcctcgctccatgcatcaatggagtgtttacatacgtatgaagtggttgtgtcacgctaaactcgtttt

SEQ ID NO: 15185 - DNA, 488 bp, Zea mays
  Coding DNA Sequence Number=SeqID_782
agcctcttcgactgagctgtgtgggcagtcatcacatcagagtagtttgttttgttttgacttttgagtcgtggaaccagaggaaaatcgtagtcgttgtttggactttaacctcgttttatgttggaaactagtttgaaaggctcctactgtctttaatatttggtaattcagccgtaggtcgacattgcctccagaggtttcctggctgctcactgttatgctgttacatgtcgacatcgcctcgttcatccttgcgtacgtgcgtggtaccatggaatctgttgataggaggccccagcgaattgtcagtaactactctcagaggctggctgtcggtattcgggcttgtggcatgattttttgcattgatataagcaaaccgctgcgaagttcatatcagctggattggatataaagatccgacacacacgattgattgcctccgataaagctgttcgatatttggagcactttcagacgaggga

SEQ ID NO: 15186 - DNA, 466 bp, Zea mays
  Coding DNA Sequence Number=SeqID_783
tagctagctagtctccgttttccttcgtctctccctgcctcgccgtacgtctagctagttctagctcttcagatgattttgttggtgtgctttgcccgttcatggccgtacatgacttatatattggaagccgaagcaatggccggcggcggccgcggcaggcgaggaagaggtgaaagaaagctagggaatatgcctggctccctgtatgccactcgcacggctaccacacccccggtgggccgctgcggctggcgtgcgaggtgccaagcatggccctcatacatctctctctctcatttctcattaaggcggataagttggtgagcgaagtggatgcccgtcgccgacgccttgggggtgcgggaggctccgtccccgcggtacggatcgttccctacccaccttagggtttcgtctctataaatacacttgtaatacgcagtagatcttcacatcattgtaa

SEQ ID NO: 15187 - DNA, 552 bp, Zea mays
  Coding DNA Sequence Number=SeqID_784
ctcgtggtggagttctagacaaaaaaaaaggcgcgccgcccggtcccgatggacgcccaccaaaaaaaaaaacacagcggtacaccactgtagcatacgcacttcttctacataccatcatctataggcgctgccggatcgaccgggctacatacataagtacatagccagcccaaaaataggagcaagcaataaccagggccccacttgcacgccgcccgcgcttctggacggacgaggacgaggaggccggtgcaatgcggctcgtacggggcacggttacttccacttccatagcagttactgtgctggtaacaacggtttgggtttggtgcctcactgcctctctgaagggaaacgaggttgttatagcagttactcttgtcgtcgtcagcctcagccactactaagttttgcgagtttcacctataggtgtttgctagttttttttaccggtgcttggtatacgcgagtagaatgtacatgtacgtatactgtcagagatggggggaatggtggtaggggggtgtagctcccggtgttcatattcgt

SEQ ID NO: 15188 - DNA, 584 bp, Zea mays
  Coding DNA Sequence Number=SeqID_785
atccctggaagaagatttccccatgttctccaatccaaagattgagagatctcttacctatgaagcaaaggaagtgttccttgcagctctcgtcagtgaaggtcgtgctgagtggatggacaaaggtcacaagaagtgcctagttctttggctaaggatacaggattgggccaatttcatattaaactttgtaaagaataatgggttggaagtaatgactattgaagaaatacgctctggaattgatacacgtggaactgaacttgagggaatcgatcgtggtgttctcatgcgggcgctgcggcacttaaagcaaaagggtaaagcagctatcttcaaaggcacctcggccgatgacgagggcgtaaaattttcggtatagttccttttgcaaccctcaaactggcattccaataatctcgatcagtcggtgtcctttaaaatggcttgacacatagcggtacggctgatcacatccttccctagtacagtagtaatctacttcagtgctacggctgtggttaaacttgccaactcatctctgctgtcgtgaaaatttggccaagcctgagtaaacatatgtg

SEQ ID NO: 15189 - DNA, 418 bp, Zea mays
  Coding DNA Sequence Number=SeqID_786
cactgcgttgtgcaatttgcaaagcgcagattggatagatagatatgatagctaacaaataacttacaaccatgtgcctgcctcgtatagcttcgccttttgttttccgtcttcatgccttccgccctgtttttgttttctggtaagcattacattgactaagaaaaatcttggtggtggaagtgtcccacaagtccaaaaaaaaaaaaaaaaaagcttctcgtgccggcttctcgtgccgttttttttttttttttttccacaacatagctttttgcagagattcagtacataaggattcttcaaattaaccataccacaccataacatgggacatttgcgaaactacgggtacaggtatcaaaatgcaacgagttcaatactaaaatataagcgtagtgcaatctaatcttcttct

SEQ ID NO: 15190 - DNA, 275 bp, Zea mays
  Coding DNA Sequence Number=SeqID_787
tgccagcaccgctgcaccgcgcgcgcygcygccgccgcgcactgaccgaccgcgcggggcagccgagccagccgacgactggtttctgcttgcagcttggtattattgacccagcaacctttttgcccacccacccacccgctcgcccgcccgccggcgaatcatggcgtctggagcctttgaagccagccgtggattaggatttttgtttgtgtgtgtttgtgtagacgtaactgtaaagactaaagagagatgaggaatctgtaatctggtga

SEQ ID NO: 15191 - DNA, 294 bp, Zea mays
  Coding DNA Sequence Number=SeqID_788
caccaggagacaagatgcaatgtaagttgaaagaagatgatacaccagcatatctgatcaacgctaaggaccctggaaagtacattgacggcaatgggtttatgaaattattaaagccggcactatctgacgatcttcctgacataaaaactgaaggctctagagttgtggaactcaaggggaagtacaggagctttctatccagcaagtttgaccaatgtttacccgaggaattctctttttaggagatacatcctgaggttgcaatgaacatgaacaagcactcttgaaaaa

SEQ ID NO: 15192 - DNA, 508 bp, Zea mays
  Coding DNA Sequence Number=SeqID_789
aatcaaaaaagttctcgagcacctgcagcgccgccagacactccgtagtctgtaccccaagcaccggcgcggcggcggcggctaccatggcagtcgggaagaacaagaggatctccaagggaaagaaggttggtaagaaaaagaccgtcgatcccttctctaagaaggactggtatgacatcaaggccccatcggtcttcagtgtgcgcaacattgggaagactctcgtgtccaggacacagggtaccaggattgcctctgatggtctgaagcacagagtctttgaggtttgtctagactgatcttcagggtgacgaggatcaggcttacaggaaaatcaggctccgtgctgaagatgtgcaaggcaggaatgtgctcacaaacttctgccaaatcgccagttctttttgtgtactgtgcgctagccgccgcctagctgcactgctgtatttttgtttcaggattactgctgctgttcgcacattccatctttggctcctcccggagc

SEQ ID NO: 15193 - DNA, 480 bp, Zea mays
  Coding DNA Sequence Number=SeqID_790
ctgcttgcctgtgcgcccgtggtgaccacgatagcacacctacgctcctgctcgccagacagcgtggcgacggcgcccgcgcttcgaggccgtatacccgtgcggggctgctcgcgttttgatggcggcgaggcagcgtcgacgcgcgcgccttcgggctgggttgcgaggttacggtgtccacgtgcccacgaggcggtggcttgctagcgcgcccgtgtggccgcgacggagcccgcgtgcccgaggagcgacggcgggctgctttgacaacacccttcctggcagtcgtatagctgtacagagaagaagatgtcggccatggctgctggccgtgcttcttacgcagggcgcaggtgagttaaggctctgcggcgacgttctcatgtacgtcatgtgaagtcacgacgatggctgcgtgccagatttgttttcttctttttctattgcgttccttcgaaaacttcttactgctacgga

SEQ ID NO: 15194 - DNA, 519 bp, Zea mays
  Coding DNA Sequence Number=SeqID_791
aatcatagactcatcacttagcctcgcagcagcaccgccgccatccaagccacagtagcccgccgccagctaagctcgcagccataagcatccatgaccagctcgtcgaagattgactcttgcccaaactctagcgacaactccggcgaggaatttatctccgtccgttcatcttccggggcaacccagaacattgtcgtgaccagttcggcgagagctttgtcaccgcgcttccggttagtcgatcagatctctggttcatcgtcaaaaactgagatgaccggtagcaacatgagattgaagtacttgattggaagaggcgaggtgacgatgatcagaagcccaacttttagatcagcatttggacaacatgttatcgcgggtataaggcaagttggcccttgatcactcttctttacctaataatgttcctgttaatcattgtgacatactcaggataatttgatggaacctaataggttactctagtttgtttaccccacaccttgcaaataaatg

SEQ ID NO: 15195 - DNA, 203 bp, Zea mays
  Coding DNA Sequence Number=SeqID_792
aatatcccctagcattctccagatgtgttctctctctctctctctctctctctctcttccctttttatcagatcggtgttttgaaaaaagtgatttgtgcatttgaccctgctgcggcaccacattcttcatgagtgctggattgctttctcggggaaatctagagagggagtgtcgcacaaccggctccattgccggaggtt

SEQ ID NO: 15196 - DNA, 300 bp, Zea mays
  Coding DNA Sequence Number=SeqID_793
gggaacaatcgagcagctgtatagttagcatgacatgaattatatctgtccttgtactgtgtgtgtgtgtagtcggtttgcattatattgttcttgcacggccttgttctatatatatgctagctactcctacgtatgaatcctctagctcgttaacataaacacctgcttaactcttctttgtagtggtatttctttcttgtatcctaaacaaaagagcaagactagagtagtagctatatagacctcaatatgcaaagagagagagaaatgcagtgcgttttgtacgtactctacaca

SEQ ID NO: 15197 - DNA, 477 bp, Zea mays
  Coding DNA Sequence Number=SeqID_794
ccactgacaccggtcgaggtataatctcaccctgggtgaagcttcacccgactgctccgatcacaccgaaccaaacccatccgagcgcatatacccagcaaaaaagtggacacattttttacagcctaggttttccgctgcgccccctgttttcgaaatcctttccctagcgatcataactgacgccccgaatcgccgcgcggcgggggaggagattcatcacgttttctgctagggttttgtatttggactagacagagcggaaatctggtggtggtgattctgtaaccagaagatcagaaactacggaggagtggggttttgtgattggttaccgataggggttttgattcatcggcacccaaattgctgttgattttttcctgcagtttctctcaatgtatttatggtcatggtagtactggattatggatacatttttttcaagtgattcataatctgcatcactccttttta

SEQ ID NO: 15198 - DNA, 482 bp, Zea mays
  Coding DNA Sequence Number=SeqID_795
aaggtcttcggcgagctcaacgtgggagagggctgcggctcctcgwtcagaacctccaacaataagagctgtgactccggtggaagtcaagccgagggaatcaaatcaaatatgcccgcggttgcggacggtgagaacagatgttgcagggtgacgaccacgatggtaaccgcaaccgaggttgctcaatctgctgttgcccagaagagaaagggagggaagaggaggaacggaaaaagatccaagaagactccgaaccagcaacaaacaccgggtcatgttcttggttgtaatcaggaattcaggataccacagttctcccagattcaacaacgataatggcttcaccctattttgtaggcggtgatcgaaaatgagtaattccacctattatatttccaaattcttcccttctcaactttttgagcaattggaatctaagctatttttttagaatgtgacattgcacgtctttctaaggt

SEQ ID NO: 15199 - DNA, 504 bp, Zea mays
  Coding DNA Sequence Number=SeqID_796
cgatgtcgtcggtaatgaggaaatgggcaaggcctagcccactactcctcatgctcctctcctgccggagcaacatcccactcgaccgtccaacccggtggcagggtggtaggccaagtcacaccatcaaccaattccagcatggtaccttggaacaattagccgcactcgcatgtgcagaagtggacgcggaagctggccctagtgtagattgctgcagcgcctggaacccttcggagctcttgccgacggccaatctcgactatagaggaagtgtagcctctcctgtgcccgaacaaatcgaagtgaaggcatggaagcaagccggaaggggtcccgggaagccggcatcgccgtgacgaggaagagcgcgggctagagaccggccacggtgtcgcggggaggaacacggcggggtggcgagcgaggcatgtctgcgcggacatggaggcaacatgagaggggggcggctcaaccgacggcttcacagggaggacgacgata

SEQ ID NO: 15200 - DNA, 468 bp, Zea mays
  Coding DNA Sequence Number=SeqID_797
aacttcaagccaatgtgacaccctgattgacagaacccgtgcagcattgcgatatgcagtgcatacgatctatagaatcactactggtgcaaagctagtttgtacttgtacatgtaactwgagcgttagctgtctacctcagcggcggacagatggaagttcgttcaaaacatcaaccgaccagaaacatgctascgatccttcttattacagtaaaaccactcttttttctaaaaaaaaaaaaaaaaaacggcacgagaagcttttttttttttttttttgacaccaaacaaaacacattcaccgttaagatgggatgggacagacaaatgcgaacggtcccactcaccgtgtgaggaatcaagagagaaccaagaaaacatatactagaccactgagacgagccatagatttaggaccactgaacggcgatgaaaaggttaaaatgcaagcgacaacagtttaagg

SEQ ID NO: 15201 - DNA, 561 bp, Zea mays
  Coding DNA Sequence Number=SeqID_798
aacgcccgagccatgccttgtgtcgagcagccgtgcaccggaccggccaagcgcacgcccaggccaccagcccgaccgcgacacccgccagaccgaagcccaagcgacgcccacgccgttcttttcttcaccgagttatgaagcttcaatgccgcgactgtttttcttcactttgccattacagccgccgccattaatggcatttctgctgcaattaaatcctcagccgcgaacccctcgccctcgcctataaaattggacgccgagccctctccctctccctgcccgagctccctctctcactccctcctcattctctcgctcgccgccgtgtagctcgtcgccggaccgtccgcgcccgtctgtcgttcaacggagctccgcccgtgcctacgtgctgtctatcgttcgccgtccactttgcccatcacgtccgctctctcgccgagctccttgcgcagcggagttggctagaggtagaagaaggtgaaaaaaaatcacaagtcatctctccaattatatgtttaatcatgaatagaccttgcgacagttttcctattt

SEQ ID NO: 15202 - DNA, 563 bp, Zea mays
  Coding DNA Sequence Number=SeqID_799
gtaaaagtacatggcgacacccgcgggcagaacactaaccaccacccgcccgcggatccaaagcaaccaatgcatcatcatcgtgtacatcaagaatcgatcgtagggccggtaaaattaaataacaacaccaaaggaaaaaaaaaagatgaaactgaaatggagcgagcagcaacgtcgaggcacggggagggggtgacaacatcggcgtgaggacaggaggaagagtcggagtctagtttttaaagcaggacggcgaggcccgcgcccgccaacgccaccaccgtggcgaagccgaccgcgcgcgcgcttgcacccgagtcctagttcgtcggcgtgcccgtgggcgagagcgagggcgccggggacgccgcagcggcctagacgaatccggcctcgggctgatcctcagcctcttctcctccgccgccgccatctcagcggtcgtcgccgcgggctcggtctcctcgcccacgatggcggtgtctgccagcacgacgccgtcggggttgggttgtcctcgtccccgtggcggcgcatcgggcgcctgcatcatcctgtgg

SEQ ID NO: 15203 - DNA, 179 bp, Zea mays
  Coding DNA Sequence Number=SeqID_800
tgcaccgtctgactgacgtcctcgatcggttagctagcgcctagcggcatagtagcagcagcccatgcattatccgtccatgcacatgcatgtacgtagctatgccttatgctatgcatgcatctctctgcaagtggttgctgtctgctgcatggtggaagactcgagagctactagct

SEQ ID NO: 15204 - DNA, 322 bp, Zea mays
  Coding DNA Sequence Number=SeqID_801
aaagaaattgcttcgtagccaggaaaggaacttgggggatttaaagcaatcttagtgttgcatcttccacaagaccgagaggaatgttgtaaaaagatcagttaggtgacaatttatgcaaatggagacatgaagtggagttatggatgggtctttgagtcaacattaagacaaatacgttgaagagtagttgcatcctttggtagcatactcactgtgcaagtaagttgctgtcttcaatgtctgcagactgtttttcatgtgttgaacaataataaaatagtaactccgcctgtccgccatgatcgacatatcgccttat

SEQ ID NO: 15205 - DNA, 579 bp, Zea mays
  Coding DNA Sequence Number=SeqID_802
aagtgcacaggtagttagtggcagtgggctcaggtacctgaacctgcacaggttaggaagcttaactggtctggatggcctgggtaaccttgcttttgctaaaagcctctgcgttctgaatctcaggatgtatcgctatctcacagatgattctgttacagcaatagccagtgggtgcccactgcttgaggagtggggaaccttgctgttttctatgggtgtccatttacctggctggttgtactgcaataagctaagagtgctgcatgtgaaccgctgccggcacatctgtgaccacagtttgctggccatcggcaatggctgtctggttctgcatgtaaatggttgtgtcaaggtcaccaacaatggcctggctgatgaagtcatgtccattggcccttccattgagaacttgttccggctgcattgaggagaaactgtagttaggttttctaagcctggggctaaaagtttagtagccccgtcccattacggttacggctgattggttcttcggtcattatgtgcattgtgtttgctctagtgtacttgttgtaagataacgagacccaccgtact

SEQ ID NO: 15206 - DNA, 483 bp, Zea mays
  Coding DNA Sequence Number=SeqID_803
ccactcgcgtagcagtagcaccagacagcagcgcgcacgcgacgtccgcaatggcggcgcgggcaaccgtcgtcctctgcgccgcgctcctcgtcctgctctccgccaccagctccctcgcgcagtcccccgcggccgcgccggctaaggcgccgcccaagtcctcctccaaggccacgccggccgccgcccccgcgcccaagtcctcctccaaggccagcccatcggcgccggccgccgcgccaaccaccccggcacccgcggcggcgccggccacgacaaagcccaaggcccccgcgcccgcgcccgccctgctcgcctagataagatccccggatgccaccatcacaggatttgatgaccttttcctgcttttactttttctttcggtattttgtggaaaaaaaggggttggctctgcctttcttctgcgtagtagagtagtagcagtagactagcagggcccatgtcacatcgattgat

SEQ ID NO: 15207 - DNA, 214 bp, Zea mays
  Coding DNA Sequence Number=SeqID_804
gccaactcggcgaaccaaaccaaggctgcttctagctgcttttgttaatggatttttttttgcgttttggccgccgctcgtctttcctccgtcaccgtacgtccgtatctgaagtttccgagggcgttcttcttttcaacttgtgtcgtctcgtctcctctgaacgccgagggcggcgacggcaggatgtatctgaagtctccgagtgcatttt

SEQ ID NO: 15208 - DNA, 346 bp, Zea mays
  Coding DNA Sequence Number=SeqID_805
cttcaccaagtgttatcagtgtgtatgtccagtaccagtacgaccaggtgtccaccgtccaggtcgtccttgtagcgtagccgtagccgtagccgtagccgtagtgtgtgctttgcgagctcgtctttttcttgggtttcttccggtgctttgtttgctagctagctagcttctcgctgttcctacctactgtatgtctcgcaggagcaagcagcatgcatagcagtgtgtgtgtgttcgtgttcggctggcctttcgttttggatgaaggccatgtccacgaagaagttgtaggtagcagtgcgagtgatttagaagcaggtctggttcgtgtgtctaagctgct

SEQ ID NO: 15209 - DNA, 38 bp, Zea mays
  Coding DNA Sequence Number=SeqID_806
tcatagttccactcagctccatgcatgagagttacagg

SEQ ID NO: 15210 - DNA, 557 bp, Zea mays
  Coding DNA Sequence Number=SeqID_807
gacaatactattttttactcaccatatggaattattagttagtaagtagttattacttatttattacttagtaagtatttaggcataagtatttattcagtagtaaatacctatgaattattgagatagtaatccgtgtttgcaatagatggacaccctagtgacactataacatggaggaagctataggtgtacatttgtgctgtgcctaataggctggcccaaagcacacaatttttggcacgacacagatctggcacggcccaacctaattgtgggcctgggccggcacggcccaatatatgggacatgcctgggcctcaagtcaagcccatgggtcggcctggcacgacccatttaactaaggcctatcgaggcccactaaatatagacttagtatttaactaaggcttgtcaaatcccacatgaccagcacaatttggagaatctagagcttcaataggccttcggagaaccaatacctagatagggatagtaaatagtgatgatgatcattgtatatgtattctgtatgactgtatagtactcagttaaac

SEQ ID NO: 15211 - DNA, 520 bp, Zea mays
  Coding DNA Sequence Number=SeqID_808
tggtcgccgtaccagagacgcttacgctcgatggttggtgcttgatgactatggaggacggtgggctgggatttgcagagttgaacttgcattcgactctcacgctctggtccatggtggacgaagggagatgggccgtaagcagggccatcgacctgaccgaccgactcccagttattgccctcgcggtatccacttgtatggttgcctttgcggacattgccggtgtcatcttccttaggacgacagatgggctctacacttatgatctcaagactgagcagagcattcttgttatggataatgatttctatggcatcataccctacgcgagcttctacactccagtgttacgggtggccaccacaggcgaggggtctgcctcaacttcttgacagagacctatggtgctgatcagatgctttcttggcaatggaaagttttgttggtagtagtattagctttatagggggacaggtcattagggttgatcttgtgcttgaggctttgcctacaggca

SEQ ID NO: 15212 - DNA, 538 bp, Zea mays
  Coding DNA Sequence Number=SeqID_809
acatagagcgctgaggacgttggtcatcagtcatcacctatctaactagctagctagcttgaacaagagcgtacgtagcaagaaacgagctccgctgcgagagaaagctaagggacctagctagctatcatgtcttggacctaccgtgagaacgcgctgttcgagcgcgctctggccacctacgaccgggacacgcccaggcggtgggagctcgtggccgccgcggtgggcggcgggaagaccgccgaggacgcgaggcgccactacgcccatctcgtgctggacgtcggcgacatcgagtccggcggctacgacaaccccaaccccaggcccgcccccaccaacagcggcgggaacggcaacaacaggggcggaggcagagccaaccggccccagacatgacggcctcccgcctcccgcctcccggaaaactacacccagcatgccgtgcgtgcaatgatactatgatagcatgtatgtacgtgagccatgagatatatatgtatgttcgtgtgcggtgtgcctgtgtgtagatata

SEQ ID NO: 15213 - DNA, 516 bp, Zea mays
  misc_feature (418)..(418): n is a, c, g, or t
  Coding DNA Sequence Number=SeqID_810
tgctggacaacatccgcgccatgaggggcatggtcagcaccggcggcgcggcaccggggaggaagcgggcgcgcgacgacgagcccccgtggcggccggcgttccggatggaggacttcgagctggaggaattcgactccggctccgcggggtgcgacgggggaaagaagaagagggagagcagcatcgcgaagcggccggcggacgaggaggagcaggccgaggtagtggaggccaaatgtccccggtgtgggccgcggccgccccagtcgcacaagccgcggcgcgagggagtgcgagccgtcgacacgtgacaggaatcagaatacacagccctggtccaatttgcacgtctttcacatttacgatgatatatgatgctaattgcctattaggagcatgtgtcatatgctctctncaactctgtcacatgtataattaagactgtctgatgtcctactagtcattagtagcagcctgttgcctgtgtagttcgtatttttcttgtgatgtaca

SEQ ID NO: 15214 - DNA, 385 bp, Zea mays
  Coding DNA Sequence Number=SeqID_811
agcggtgggccgactccgagctcagggcctacgcgcgccggcggcgggagcggaggggcccgctgacggtgcggccgccggtggccgtgctgggagtggtgctcaccaccgtgcccaacgtcgtgatcgtcgtggccttcgtgaaggagtacttctggggcaggaccagccgcatctgaggcgtggtgtctgatgcttcttttgctcttgatgtaaaaaaaaaaaggaaatttggatccataccattaaaagatcaccactttggatccataccattactatctcacttacatgtgggtccacatgagtcaatgacatgtgagatccatggtatatatctaaagtttggatcttttaatggtatagatccatttgttccaaaaaa

SEQ ID NO: 15215 - DNA, 515 bp, Zea mays
  Coding DNA Sequence Number=SeqID_812
aaaagaagcatcagacaccacgcctcagatgcggctggtcctgccccagaagtactccttcacgaaggccacgacgatcacgacgttgggcacggtggtgagcaccactcccagcacggccaccggcggccgcaccgtcagcgggcccctccgctcccgccgccggcgcgcgtaggccctgagctcggagtcggcccaccgctcgggcgcccggctcgatggccgcggagggcacgaccggcggcggggagcctggaaggggcaccgggaccgccaggacgagggcgggaggcagaggctcgccgcgcgcgggaggaacacggaggcgagagcccagcggaggagcgaggcgccggggcagaggagcggcgggtacgacgtggtggagccgaggccccgcggcgggcacgggacgcgggaggcgaggaagagctgcgagtggagtgacggcgcgtgggacgggtgggtcaggacgtgggtcagggcctccgtgcgctgcgcccatgtgggagtgg

SEQ ID NO: 15216 - DNA, 558 bp, Zea mays
  Coding DNA Sequence Number=SeqID_813
tggagtctgctcagcgcccagtaaaccagggggcctggacgacgactccatggacgaactgtgcagctgcggcaatggagggccaccgctccctctcctcctcagtctgcgcccacccaccgctatgggatctggtcgcgcctcctctggtgcacagccgccctattgtcgccgccgcggggctctactggcggccatcgtcacccatcggccatgccgtagcgagctcgttgccggtactctttcgagggacttattggtgtcggttctgggggcttctccaaaggcgtgaagagcacatcgtaaggatcaaagttgcctgcaggaccctggaagtctcaatgatgcaaatcttcgccaagcacggttggagctttagaaatagaataactagtggctagttattccaatcccaactgcgcttgggtctttttgccgcttgtggcttcttttattttctggcagtactactgttttttggacggccgtcatctttgatgtaggccgggaacctttttcccattatctaaaaaaaatagcatggctctttgtgtttgc

SEQ ID NO: 15217 - DNA, 406 bp, Zea mays
  Coding DNA Sequence Number=SeqID_814
ttcgcctgtgatgccattccgggcatatggaatggctggggagcttcggggagcctcctcgttgctgatcggggacgctccagggaagattggtggccggagcaccttgaattgttcaccgccactggtgctccaccatggatcatcccactcgcgtgggcagcctcatcggcacctccatctccgcagcgaggttacgagtcacccgaagaccaagttggtgaagtacctgggaatctcaagtctaaggaagatgactggcgcatcgttagactcaaaactcatcaacgtcatctgcgaagtcttggtcatcaccctctgatcaaaatattagcaagagtgagctcacttatggtcggggctcagcaagtgggggaaataatgcgagttagcaaggtcaagaaca

SEQ ID NO: 15218 - DNA, 574 bp, Zea mays
  Coding DNA Sequence Number=SeqID_815
cttctcagttgagccgcagatgatggtggaacaaaactacactctgcttctgtgaacaattcatgtagtggttaaggacacaatggaagcacttgtggctgagcctaaagtagaagggaaataatctaagacccctacagaagcagttggtcaagtattggcttcatcaaaatttcttcaaaatgtcggtcttgtatctgccacaaagagaaacaacaatggtggtgatcctacacacataagagaacttgaggcaaagaagcaaagcacattagaagttagagctcagttagatgtcctcgagaaaaaggtagaagaatcagaagaagcaagggctaaggggttagaaaaattaatgatctgcaaaaaggagcagatgagaccaatactctccatcgtctctttagcctcaataagcagtaggtccaagcatttttgtgtggccttagtatgtcatattgctactgtatggtcctgattttgtcgtgtccttttgctactttccgttctattgtgctgaacttgccaacatgctactgtcctttttgtgctgaactcgccaacatgatgcagt

SEQ ID NO: 15219 - DNA, 494 bp, Zea mays
  Coding DNA Sequence Number=SeqID_817
gcgcgcggaagcaactacgtgcgcatccaggccggtaaggcgctggtcccgatccgcgccgacgaagcggccgtggccgccgaagcgatgctagcgcagcggaacgtggagtcggtgctgttccgcgagcggaggctgtcggagtggacgaacgccgagaaggtggacgcgctggccgcggagctggtcaaggagcaggagcggcggaggcgcagcccgcttccgaacgtggctatcaaacaggtcggcacaccgccgcggctgtcgtccgcgaccactgcttcgtcgggcactgggacggccaggacggcgtcgacgatgccgtcgccggcgtcatgggagtcacgcaggtagtagttgtgttgattttaggcggtaattgacgtgtgtacatgcatatatgaaatgcaaagctaggagtggggtgtgttgtttttcttctttgaacggacgctcaatcctgcgtgcaactcttcacgtttctagcaaaacgc

SEQ ID NO: 15220 - DNA, 525 bp, Zea mays
  Coding DNA Sequence Number=SeqID_817
ggacgaatcattgggcatggcgttcgggcgcgcgcgcggaagcaactacgtgcgcatccaggccggtaaggcgctggtcccgatccgcgccgacgaagcggccgtggccgccgaagcgatgctagcgcagcggaacgtggagtcggtgctgttccgcgagcggaggctgtcggagtggacgaacgccgagaaggtggacgcgctggccgcggagctggtcaaggagcaggagcggcggaggcgcagcccgcttccgaacgtggctatcaaacaggtcggcacaccgccgcggctgtcgtccgcgaccactgcttcgtcgggcactgggacggccaggacggcgtcgacgatgccgtcgccggcgtcatgggagtcacgcaggtagtagttgtgttgattttaggcggtaattgacgtgtgtacatgcatatatgaaatgcaaagctaggagtggggtgtgttgtttttcttctttgaacggacgctcaatcctgcgtgcaactcttcacgtttctagcaaaacgc

SEQ ID NO: 15221 - DNA, 378 bp, Zea mays
  Coding DNA Sequence Number=SeqID_818
gctggcgcgagcactgccggtcatcgccgcggccatggtcgtgtgtgcgggagggcgtcgtcgaatgacggtgagcgagcttcactgatgctggggagggtctccatcggcgacgtcgtgcgcgcggtggtggccgagcacagggatgagctgaaccggctcaatgactacatccagggaggctactaggacggcgtgtgcagcgacgaccccctccgatcccgccagtcagtgagccgcgtcagacgcatccccgtgccgtcgatcaccgggatgtgtctgacgcggctcaatgactacatccagggaggctactaggacggcgtgtgcagcgacgaccccctccgatcccgccagtcagtgagccccgcctttgaa

SEQ ID NO: 15222 - DNA, 223 bp, Zea mays
  Coding DNA Sequence Number=SeqID_819
tagctgatgagctgggcttgggattggctcgatggttggcatattcagcccatcgataaagatactgtttagccatcgtttataccatgcactaaattctggtagttttgtagttagaccttctatctacttggattaacaaaaggtgggtttaagctgctgtcaaaatttgagtgtcaattttcacgctaaacaaaaggcactgtacactggtaaaacactt

SEQ ID NO: 15223 - DNA, 434 bp, Zea mays
  Coding DNA Sequence Number=SeqID_820
tgagacagatcctttactttcgcgtgagatagctgccaggaactgctttcagccatcgagggcaagtsagcaaccaggaattttgggcaccgccaccgtcccgcacttcgccaccgcgccactgccaccgccgtcctggacttcgccgctgtgccgccagcaccgtcttggacttccccgccgcgcagccgccttgctggacttcgcaacctcgctcgtcgacatcaccagtagccgtatcctcgtcctctgtatcagttcgataaggttgctcgtgcctacaaatttacagatattatgagaaattcaagagttaacattgcttatcaaattttcgggaacctttaataatctttgtatcatgctcgtcacatgtgatttatttgttcttttctagaacctgtaactacgatctgttacatatgagttactta

SEQ ID NO: 15224 - DNA, 426 bp, Zea mays
  Coding DNA Sequence Number=SeqID_821
gaatggacggcggtcattgctccaagcggaaaayaggcgagcgggtcaatagcggccactttttttaataaaaaaaatctcaaccgcacgctctrttttgtttactggaaaaacggatcagcgtgctactccttccgcacgcaatcgtccaggccatgcaaggcattagaaatttggaggaccggccgtgcatgtggtccatggaaccgcccattccgcgctaaaaatggctagctgcggcagcagctgcagactgcgctcccgccgcagagcgaataggtctcacaagtttttttttcaccgcagtaaatttcataccacttttctttaatttttttcgaggaacgaatgaagaacaatagattcatcctacttaaaaaatgcataccacgtttgcgtagagggcaaatcgaagacggtcgcgta

SEQ ID NO: 15225 - DNA, 242 bp, Zea mays
  Coding DNA Sequence Number=SeqID_822
tcacgtggtcgttccccaggtgctagctgctcacctcccgcgcctgcgccttgggctctgccccatcgggccgcctgtgagccgccgtgcgggctagccagtggagccccgcgctggctcccgtggagctacctgcacacggcacaccctctactgcgctccatggccgaggcgccagctgacgagctcgtccaggacgatgcggccagcgcccctctctctacagcgactgcgatccattt

SEQ ID NO: 15226 - DNA, 511 bp, Zea mays
  Coding DNA Sequence Number=SeqID_823
tgatctccatcttggcgccaacagtggttcacataggtttgctcttgagaattaagttgttaatgaagctactttccgttgccctgatgagctaggatggaaaccacagaggacacctatcatatcatcagatggaagcatcttacacgcaagacagcaagctttctggtatggagctgaatggtactctggattatcaattgttaagtctacaggctctgaaaacaatggacttaagcaacaaccacttgcatgattcaatcccttaccagttgccatcaaaccttacctatctgaatctggcaaaaaataacttctctgttaaaacaatctaactgcaaggaaccattgggtgcagcaatctcagccacaactcgttatttcagaaaattggtgaattttctttcagaattgtatattgtgtaaggcctactgtatatttcagaaaattggaagcctcaattcactttcagaactgtaaggcctacttaatcgttgttttcgtatgcaa

SEQ ID NO: 15227 - DNA, 229 bp, Zea mays
  Coding DNA Sequence Number=SeqID_824
gtgaggtcccgctccgcttgtgtagtgtttttgcttgtgtgtacgtgcgtgctgacgtatatcggtatatatagctgctgctgctgctgcgaagtatagtagcaatggttctatgtatggcggggcggccgaataaaagactgtgacgcgtctcttgtgctatagtcgtgtggacaacactggaaaaaatgccgtgttggtctggtcacgtaagaagtgtgtattatta

SEQ ID NO: 15228 - DNA, 289 bp, Zea mays
  Coding DNA Sequence Number=SeqID_825
atctacctcgagttctactcacataccactgcatgggtgttggggttcttgtattcctgctagtgatgaccctctcccacagccaccaagtctactctgtccagagcatcaagcgccagtggtgaccacgctcacaattcttcaccccaccatagccagaacgttctagggagttgctggcctatatgaagcttgttccgtaatcatctcagagttcccagaagaagatgaaattcaagaagtagtttctgaaaaggagtctgcttcagtgcctagtgcctgctcatca

SEQ ID NO: 15229 - DNA, 373 bp, Zea mays
  Coding DNA Sequence Number=SeqID_827
cggcgccatcggttgcggcggacgacgacgcagcagccgccgccggatgctgggaggacggcgacggcattgcgctctggagcttcagcttccccgctctggactgctgagctgaagcggcgcagattccgctactactgacgattgacgactaatcgccggtcaagcgatggaaaccgctttatttgcttcatcgacggcacaggtttccgcatacatgataaatttacccaatttaattcgatgtatgtaaacattcttaataagctgattgttaagcgttgtagtggtggggagctctcatggctgaagctgcatgttttaaggtagctttttccatggagttaacctctttgctattgcttgtctatga

SEQ ID NO: 15230 - DNA, 373 bp, Zea mays; identical to SEQ ID NO: 15229
  Coding DNA Sequence Number=SeqID_827

SEQ ID NO: 15231 - DNA, 457 bp, Zea mays
  Coding DNA Sequence Number=SeqID_828
acggcctgtttcagtttgcggcggtgatcaacctcaaccttgcggccataaacttgttacccttaccagcgttggacggtggcacgctggcattgatccttctcgaggcagctcgtggtggccgcaagattccgcgagaagttgaacaggggatcatgtcatcagggatattggtggtgctcatggttggcatgttcctcatcgtgcgtgacacactcaaccttgatttcatcaaggagatgttgtgatgatgcttcggatggaaattaactgatcgcagctgtagtaaaattgccggtatcagaacatggttggcttgggaaattaaggttagttgttgtgattctttttttttcacccttttatggaactgctctagcactccaggctttgctacactgatcgtaggtccttgtattgcaattttcggaatgaagtttgtgatcgaggcaccaaa

SEQ ID NO: 15232 - DNA, 511 bp, Zea mays
  Coding DNA Sequence Number=SeqID_829
tgtcctagccttagcactcatgttaacggtttcagtgcatggacaattatcgtcttcgtcgccgacgcctgcaccctctcctgctcctgcagccccaacaccgacaccatcaccatcccctgcatcagcaccagcgccgactcctgctccggcaccatcccaaaaccgatgcccccctggcttccctgacctaaaatccttacttgaaggcattaagaggtaccttgcgcaggctatttatattttctacgttccatctcgacagaacccaggcaacagcagcaacaaatgcctgtgctttccggcctctacaagtattatttccatcttcagtggaccctacgaatgcgttcctgctcctttaaagtgagcatgcacaaatgtgcgcatgcatgtatggctttagagcctgatatatatacatactatactatgaataagtgcatgcatgtccggtcttctgtatgtggaggttcattggttccatgcatagctgcagtctgtgcatgtt

SEQ ID NO: 15233 - DNA, 481 bp, Zea mays
  Coding DNA Sequence Number=SeqID_830
agatcagcttcccagatactttctgggcgaccagcatgaagggagcccatatcaggttttccccaatgactccggcatccgtcgtccagatccaatgcagcggcggcgtccaaggcatgccgtgggtgggccacgtgatgaggaccgtccttgtgggcccatgtggctccaagtcaccgtgtttttattcctgactgtcaacagcggcatggcgatgtacctgtcgtggggagacgctggggacatctcgttcgttgtttccacatatataaacttgctcggcctctcctacctaataatgcggttccgaattccaagaggagggagcagctcaaggtgtacgtctggatgcccgccgtgtcgcttgcgatcgcatttgcataccagaccatcggcagcactgctaagtcgacactgcaattgacactgctgctgtgggcgatacccgcgggcacaggaatctctgtgtttatcatctttt

SEQ ID NO: 15234 - DNA, 250 bp, Zea mays
  Coding DNA Sequence Number=SeqID_831
tcccactctgcaacagggctagtttacttgcatgcagctcctaatgcggccgagccgcttgccactcgttcggtctcggacgactcctgttcttcagttctgtgacgtgctgtgtctgctacagatgtgctgtgctctctgagacataatgtctgccaatcgtttcttacggccggcttagagctcgcgtctgaatgttcgacgcttccgcctgatcgttttcgcgcgttcacgtttaccttttgggctg

SEQ ID NO: 15235 - DNA, 37 bp, Zea mays
  Coding DNA Sequence Number=SeqID_832
ccgggcgccgtcgttgcgtacgccgattactacgccg

SEQ ID NO: 15236 - DNA, 511 bp, Zea mays
  Coding DNA Sequence Number=SeqID_833
tgcagcagcgattggacagcggcctcgtggatctagatccccgtcttcgtcaagatccctctccacggctgcttgggcgtctctgcttacggagccgaatgtcgcgcttcgtcgctgattaaccattacggtagcatcgagcgagacggagccgaacatcaaagcacaaagaaaaatattccttattaattggttgtacaatacaatatggtacggtgccttacataatcctagtcttcttcgttccttaattggagcctcttttgtcaccattctctgaaacacaaaacatgcagttatgtgatttggaatacctgctgccgacgacatttgcctccgattcctgcagcttctggcacctagagatgtctagctttgcaggattacgttttaaggtttataccctgtgtttgttgggtgtcgtgtttatatttatgtttgtggtgtaagattgcaccctatattggaaatgctggtcttttgatgttagtttgtatgtcaggctgtgccc

SEQ ID NO: 15237 - DNA, 586 bp, Zea mays
  Coding DNA Sequence Number=SeqID_834
aaggctcccgagattttgagcacatgatatatatatgtaaatgtgaaattttgaaagattaacttttttatatataaaaaacggccgtagcagtgaatctccgccggcacggttcagcaacactttcgtcgagtacccatgccatgcccagctccacccgtcaagttttgcatgcccacaccacggcacactcgtcgtcgtgtgttcgcaggtctacaacaagactagtacaaccgccttcgttccttctggagccatgcacatccccggacgccggaggccttgtctccgctgtccgctcgcagcggcgaatatcctttccatctccggcggcagcagagcactggcccgctatctagctgctccccttggccgcccgcggccgattctgccacgcccatcccatgtgctgccccctccgaaatgggacgagctcgatctaggggttccctagttagtagtcactcactactcacagagagactctggtgaaacacatcatgtgcctagttgtgaatgcattgcagcgcttgcaccgcagcggcagcacccggcgcgccattgccggcaagctagcacaggtttt

SEQ ID NO: 15238 - DNA, 100 bp, Zea mays
  Coding DNA Sequence Number=SeqID_835
acttcattggtgtcaggcgctcattgattgtcatcggcattgttggatgtgcgggggacatgaaaaagctattacaagaacatttctggtatgcctaaaa

SEQ ID NO: 15239 - DNA, 350 bp, Zea mays
  Coding DNA Sequence Number=SeqID_836
cccaggtgagactaactgcttgtgttttgtttattccccaccaattcctatatttgattatttactgtatatgtttgtgtgtttgtggtggaggtaaatcctaggaaatttagatgagaagaaagctttagcgaggcgcttgccaagtgcttggtgaatcgcctcaatcggatgtggttgtcgatctcgcggagtcgagtcgagtttagtcgtggtacgctaattgatcacgtgatgtggaggacaagagctggatttgtctcatggtgatgctgatgaataaacctgaagattgatgatctgatcgagtgccagaataggagatgctcgccaaacaagcatcatctaac

SEQ ID NO: 15240 - DNA, 441 bp, Zea mays
  Coding DNA Sequence Number=SeqID_837
ggtttcctgctagcagtaacctcaattgtatcctctatgactgaggctgtgaagagacaacataccacttgttgtttgattgcctcttcagttcagaatgctggaattacgtgggaatccagttgaatcatgatatggatttcttctcgatgattgaggctgctaaaggtgcttttcgatacaatttcttcatggatatcttggctgtggtggtttggagtatttggaaccagagaaatgacttcatcttcaggaccattgctccttctatttcttcttggcagtgctgcttcagtggtatgctgaagatgcaaatgtttaggtttagtctctctcggaggctcagggtgacttcgtggctaattctcgatagcctgccccttcctctccccccgcttttcttctttgtttcttttgatcatgttatctcagctatctatt

SEQ ID NO: 15241 - DNA, 565 bp, Zea mays
  Coding DNA Sequence Number=SeqID_838
attgcaggaaacatgttcacacaaaaagactaaaataagttcacacagcatcatgcatactactgctctatttcacaccaccatcaccaggaagacgcagaagtagcaaaaatcaatccatccatccaatttaagatgattcaaagaataatttcttcctcaaaaatttcaaagcagcaacatgctcaactctgacttcctcaggcattccagaccatatcttctttgagtaggcaagtaaggtatatgacacatgggcaatagatcgagcacctttgaaatttttgaggaagaaattattctttgaatcatcttaaattggatggatggaccgatttgcagggcgcgcgtagcagtagtagcaatcaaggtcactagtatagtctgtcagtacgacgacgtcgatcagtcaatgtctcccctgacgataattattaagtcgatctattcagtagtaacttgttaagccatgtagattagtagcagctggtaatctttgtaaatgtgtgtggattatcatgcaagtgcgcgcttatcatgatcgaaccagtggtctctgcgatgt

SEQ ID NO: 15242 - DNA, 554 bp, Zea mays
  Coding DNA Sequence Number=SeqID_839
gatcgaccgaacagccgtgacccgatgcccgacccgcgccaggagcagcgccatgaacggccgcgcgccccgactcgacgccaagcagccgcgacgcgccaggagcagtcccgcgtgaccgttattctccgtgtgttatggaattcaatgcgttcgtttcttcccccactcctctccattgaagccatgagaagaaaccgccgcggttaatccgtgtaatggagccgccgaccgttctcctctccccctcggcgacctctcttctcccctccctctcaataaatatgtcgagctctctctcccttcctcccctacccgagctcactctcatttcctcgcactctctcgctcgccgttcgaccgccgaagtcgtcataccgctattcgccgaccacgccgccgtttgctggagctgcgccgcgccaccatgctgtgctcagccgccgtccgctgtcgaacccgcccggcctccctagctcaacgtcgccctgcccagagaaaccgagaggaagagaaggtagaaaacaagcatattgtattctatcccctgcagc

SEQ ID NO: 15243 - DNA, 563 bp, Zea mays
  Coding DNA Sequence Number=SeqID_840
tgcagacgtcgttcctcgcgctggacgcgtccatcaagaccaccaaccggcgcgtcaacgcgctggagagcgtggtgaagccgcgcctggagaacaccatcgcctacatcaggggcgagctggacgagcacgagcgggaggagttcttccgcctcaagaagatccaggggtacaagcagcgcgagctcgagcgccagaaggaggccgccagccgctacgccgaggagaaggccgccggcgaggtcgcgctcaagcgcggcgtttccgtcgccactgcggagagcatgctggagaacggcgacagggacgaggaggatatcatcttttgagcctgtggagtgtggagtcctatgagtagagcgtgcagtggctgtgctacacctgcggcgccaaacagcaaccttctgtacacacagcccaataagctcgtagctgcagccggtgagccggagcccggaggctacgcgtatattccatctctgcgttaatccatgcgtgtgttttctcacttttttttgttgactgtcacagtggcgaagaacatcctcagctgaatttcattg

SEQ ID NO: 15244 - DNA, 464 bp, Zea mays
  Coding DNA Sequence Number=SeqID_841
aggccaacggcatctccgtgcgctacaacgccggcgcggcgtccctcctcggcaccatggccgcgcgctacgcggacatgcactacgcgctcttcgactcctccgccgcgctgctccagtacatcgaccacccggcggcgcacgggttcaccgaggccaaggccgcctgctgcgggctcggggacatgaacgccaagatcgggtgcaccccgctaagcttctactgcgacaacaggaccagccacgtcttctgggacttctaccatcccacggagaccaccgcccggatgctcaccagcacggcgttcgacggctcggcgccgctcatcttccccatgaacataaggcagctcagcgccatatagctaggccaccagaattagagtgctgtccttctaccttgtatatgttgttgtgtatcacatagtggccttggacgtatgtacgtcgtcctagaagaaatc

SEQ ID NO: 15245 - DNA, 598 bp, Zea mays
  Coding DNA Sequence Number=SeqID_842
tgctcctcataagctgtctccacgctccacccgctgcctcttccttggctacgctcttgaccacacggagtatcgctgtctagacctcaccacccatcgcgtcatcatctctcgtcatgtcgtcttcggcgaagatgtgtttcccctttgccggctcctccccacccaccgacctcgactccctccttgattccgatccgagtgccgggaaccaagccaaattttgtaatggtgtttaggggggagggcgtggacatcttcagtcttcacggtgaacgcgctcatcagctctggacccgctcgcggaggagcgtgttcgacgaggcgggcggcgtctcgtggtcgtggaacaccatgggcgctgggtacaccgggtgtgggagacggggctcgcgcaggagctgttcgacgaaatggcgctgagagacatgttcgggggccttgatcgacgggtatggtgtgaagcaagtgctggtgtggaccgtgcgcgtgagtacaattcctcgagagggatttgatgtgctgtaactcgatgttcaacggtgatgacaggaatgtcaggatgatttaagagaggtcaccgtttgaggaaacgctg

SEQ ID NO: 15246 - DNA, 381 bp, Zea mays
  Coding DNA Sequence Number=SeqID_843
acccctctgcggctgtcttgtgggctccagcacgcaggtccatcgtccccgctgaatcgaacgcagaaaatcacgtgggtgccgtagttctcagacgagtcgatataggcgcgggtcttagccctgcatccgggctataagaagaagtcatccgccgcaaaccccctggccatccaagtcacaagcttcatcggcgtcgtctcaattgctcatcggtcttcgtcctgctccaccatgccgcgcatctccgtggtcagaccctccacagcttgatagccgatgaacaagtgatcgaggacccaggtgttcagaaagtggaaattgctgagcaggagcccgttgaaggagaagaactggtggtctaggaggaagtctacaatg

SEQ ID NO: 15247 - DNA, 335 bp, Zea mays
  Coding DNA Sequence Number=SeqID_844
tcattgtagacttcctcctagaccaccagttcttctccttcaacgggctcctgctcagcaatttccactttctgaacacctgggtcctcgatcacttgttcatcggctatcaagctgtggagggtctgaccacggagatgcgcggcatggtggagcaggacgaagaccgatgagcaattgagacgacgccgatgaagcttgtgacttggatggccagggggtttgcggcggatgacttcttcttatagcccggatgcagggctaagacccgcgcctatatcgactcgtctgagaactacggcacccacgtgattttctgcgttcgattcagcggg

SEQ ID NO: 15248 - DNA, 493 bp, Zea mays
  Coding DNA Sequence Number=SeqID_845
tctgcctccatggtacggtctgagccgccaccatcgagggggagggacacgagcggatctgaggcggcctccacggtcttctacctcgctccactttctctgcccccttcgctccacttcgaaggtaaggaaacagtggtcgtcctctactacgaaactgaagtatattatccactttcttcttcttgggattttagtttctctgcggcggttgatttgggattcgcttgcactcgtttggttcttgcgaaacctagactacaggtaagctgggttcttgcattttggtcggtccttgcgaaaactagattgcaggtaagcctgacagtatgtgctctagtaattttgatttgatttgaagggcgatactcctcctccaccgccgtctgtgccgctaccatctgttgccatcgtccccgtctaagatccgaaccccagctctagtgaggatgacgaagccgaaggtcagtgatccaaagcttgacgaatactg

SEQ ID NO: 15249 - DNA, 463 bp, Zea mays
  Coding DNA Sequence Number=SeqID_846
gatccccgtccgtgtcggaggcaaacaactcctctacgtcaccggcgacggcgagctcgcggtcgcctccgtgtacttcatatacgtgattctttggactcaggcagccggaggcggaggcggaggcggaggcgacaccacccctgcgtgggacccgcacattgtttaccataccagtggcgccggtgcctttcccacacgtagacgggtatctgaagcaccggctggagaggtggtgcaacttcagccatggatcgttgctcgcgctgttcagggccaggggcgtcttaatcctcgatcttaacaccaaggccatggaggaagtctccatccccgacttgcacaacaaggcgacgatcttcatggctgaatatggtgctaatcggaatcagacgtggctgccctacgagatggacgtggtggagttcttcatgctccaccttggtggaggtactgtctcaga

SEQ ID NO: 15250 - DNA, 536 bp, Zea mays
  Coding DNA Sequence Number=SeqID_847
aaaacctgattgtgcaggctccacctctcccatcgggccaaccagaatgcgctgagaagaaattggatgtcaacagctgcaaagaacaaaataaatacgagatcctgtctggcaaccagcatatgttcacctcgcaagatccagtcttttattcgcaagaacacggcaagaaccaacaaacggatatgcgagagatcaatacctcccaccacgacagctgtccaacccgaagggggaaaagttggagccttggtctgatagcgggcactgatgacgagtttagatggagggttcaaatggagagctccaggttcgggcgaccttcagatggcggcggtccttccaaaggtggcgatgggggacctttagaggtcggacacggatgggatgacggtggttcgacacggccagacatagactcgaggtcggcacggcgcgatgagagttcgtcgatgggagttcggcgccgttggaacttgctctcagttgcaagaggatccaacaagggtgaacagtgatgtcaacagggttctcgc

SEQ ID NO: 15251 - DNA, 488 bp, Zea mays
  Coding DNA Sequence Number=SeqID_848
gagaacgccaggacgtacaaccagaacctggtgaggcacgtgtggaagggcacgccgcggaggcccaggagggtggaggcatacgtgttcgccatgttcaacgaggacaagaaggacgccggagtggagcagaactggggcctcttctacccgaacatggagagggtttaccccatcacctttggagccggacggcgacactgacgacattatagaaggagcttggtggacgacgaccggtgcattgcatgcaatgatcgaatttgcactcgaccgatccaagaaatgaatacgtactggggtcatggtgtgtgtgttttatttgcgtgtacacagcattcaatgtacaatatatagaggaattgttgcgaccgctgagcgtttgtttgctcasacgtgtacgcggagaggggtcgatgcgtarctgggtctgggtgtacgtaaacgtcatgcgtagcagtatgcacaagcgtatgtacattccgtga

SEQ ID NO: 15252 - DNA, 536 bp, Zea mays
  Coding DNA Sequence Number=SeqID_849
agcctttagctttgtgcttctgtattaaacaaaaccttgacagaagacggacagaagaaggatcagtttctacttggttttgtcctcatgcaagagtgacagaagaaaacccatttttttaaaaaaaattcaattgagtatggcaagtattaaagtggcatacccttgcatcggtagaactagtgaagcgggccaactctcccctatctaatattgttatgatcataagtttttttattaacattcctacacccatacctttgcacgggtagaattagtgaagttaactacgatacctattattgatatatgagcttagccctttgtttttttattcacattagcgcttgtattgtaatttgtgaaagaaccatccttacatttttttgattttgataccatgcattgtaacttggatatgtgaatgacagtttaagaggactgcggatttccctgttgcgtagaacgagatatacttgggtgacatgcatcatccatgttgcttttgtcaactgattaagtctgttgcgattgca

SEQ ID NO: 15253 - DNA, 411 bp, Zea mays
  Coding DNA Sequence Number=SeqID_850
tccggtacgaggttcgccggctcaacgccgtcaagcggccgcggttcaagggccgtttcattaaggaagaggaaagggagctccggcctgcgcctgcatagcctcctgccctgccctccttctcctttgcttcttccacggctgaagcattcattgagctgtctgtctgtctgtctgtctgatgtatgcttcccaaatctactgcatatcacacacagtcatagactgacagaccacaagtccacaacatgtgacccgttcctagtcagataggcccacctgtcagccaacgttctatgtagagtttgtcttgttccttgcgcctgccacagtgccacctgggtggacgagagcgggaggcgggagcagtgtcggcgacgccgatggctcggaaatcctttggcaataaaa

SEQ ID NO: 15254 - DNA, 59 bp, Zea mays
  Coding DNA Sequence Number=SeqID_851
aggtgaagatttccatggaagtcccgaccatcaagtgtggtggtcctagaccgacaaat

SEQ ID NO: 15255 - DNA, 299 bp, Zea mays
  Coding DNA Sequence Number=SeqID_852
ccatagctgagcctagccgcgccttccctgtcctctgcacgctcgcagttcgccccaactcccgtccatagtggtcgccaatcgtcgaccctgctcggattccatctcgccagcagcccccttgttcctsgtcgtcaatccacgtcacgtccgcgacgtgctcgtcgaccccgacgatctatcttccaattacgcgctacttgtgttgagctctgaagccccctgtcgagctcttcctytggaagtcgccttcgagcacaacccctgccaagtgttcgctgggaggtgcgataattaat

SEQ ID NO: 15256 - DNA, 456 bp, Zea mays
  Coding DNA Sequence Number=SeqID_853
gctagcgtatcaagttcatcttcaagttttgcggtggctgcctcctagatttttttttcttctagatagatagatctcgcgtgcaagttcgccatgagagggcctctgttaagcgccgttagctccttgaacgccggttatgcatattgcggcttatatgaaagggaagacgagtaccggccagtacataaggtcgagccgaccgtccggctgggcctcagggtctttgcggtcgtcaacgctatcatgctgactattgttaacatcatcataagcgagagcctcctcgggaagatagtagctccggctgggatgatagtcatggtggggtttgtatttgcaatcacaacagacgatgcggaacctggaatcacccaagcagagtccatggtgtgatttttatccacgacacgccggacccttttcttctagattgtttttactacttgacatcag

SEQ ID NO: 15257 - DNA, 529 bp, Zea mays
  Coding DNA Sequence Number=SeqID_854
ttccaaaggttgcagggcatcccgccttcccgcacctcctcctgctgctgctgctggacaagatccgtctatccacgcactcctgttctgtctccgtcaagcacctgccagttccgcacgcggacgcaacggagcgcttcctgcgtcgccggcgccggcttcaccttgcgccccgcctctccgacaagcacggccgcaatactgtccacaatcagtgattcaatggactataaacgccgacaggtccaaaacatcaagcaacacacggtggcagtctcattttggcgagaaggtgctttagagtgccattccagcgaagcagcttattgggagtgtcataaacgcaaatgtctcgtacgagaccgtgcagtggtggggctgatggtccagtccaggcacgtgtgcctgatcacttgccactgacatggtggtccgtgtgtttagactgatctacggatccagccttgaatttcgtactgctcccattcatggccctgccgtgccgctgattctcggttgtcatcgtact

SEQ ID NO: 15258 - DNA, 389 bp, Zea mays
  Coding DNA Sequence Number=SeqID_855
gatggttaacgattttatctatccttctggagcttcatcgaagcattgctgtgcattccgttaatgcactggttccactggataatcatcacataaccggaatcacacaagcgactggaagcatatagccatataggaccatttggtcagcctgtagatagacattcagaaggctgttgcaagtccagtcaggcctggagcactggactatttggtcagcctgtagatagatattcagaaggctgttcccgctggctctgttgttttatccagacattctatgcaataaatacatctggttgtaaatgtcaacacatgcagccgtgttacgcctttgttgttctatgtctgttcagtataaataaggctttccttaattatgctgaagc

SEQ ID NO: 15259 - DNA, 506 bp, Zea mays
  Coding DNA Sequence Number=SeqID_856
ttgactttatactctggcaggactgtagaaatcaacaacactgatgctgagggcagattagtccttgcagatggagttgcttttgctcaaaaggacttgaaagccaatgttattttggatatggctaccttaactggagcccaggccattgcaacagggcgttatcatgcagctgtcctcacaaacagggaagaatgggaagagtactgtcttcaagcaggaagaactagtggtgacctcactttcccaataccgttttgcccggaattacacctgcctgaattttcatctgcctttgctgatatgaagaactctgtggcggatcgaggtaatgctcaatcatcatgtgcagggttatttatatttgcccagttgggtgttgatttcccaggttcatggatacatgtagacatggcaagcccttgtcactgcggagaacgtgctacagggtatggtgttgcactacttgtaacactgttcggccaatactcttcacaaccattttt

SEQ ID NO: 15260 - DNA, 543 bp, Zea mays
  Coding DNA Sequence Number=SeqID_857
taacttggaacctctcctactagacctcaggaaacaggaatcgcagatcaacatagagatcaaaagacagaacaaggataacagaacgtccttcaacaccctacccaaagagctaagtaaacaggaacgaacttcaagcagcaacatccgaagccttctcacatgttggtcatcaacctcgagaaacaaataacagacactagaacaacctagcttcctagaactctttgatcctctccatcaacctggccaaatcttcctggagctccaccgccgatggctaccaccacgatggtgagtatgcagaagtagaggatggcgtggacgaggatggcgagggcgctggtgcccatgttgccgaactccacaaccctgaccctcgccggcagctggaacaggaaccccggcgacagcaggatgaacagcaccaccgccacgatgatcggcccccagtccgtcgtcaccatctctctctctctctctcaccgtctcgctcgctcacaccttcgctgtgtgactatactttgctcacgtcgctttggg

SEQ ID NO: 15261 - DNA, 599 bp, Zea mays
  Coding DNA Sequence Number=SeqID_858
tcctaaaagaggaggcgcttctgctcatgctaagaaagcaagctttgaccgtgaaacctaatggcagaaaagtccttcctcccccaagtccctagagcctagacgaatggcgctgcagctcactgttccttcttcagttcactcatgtagtcctattcatgtccattaaccagactaaagtagtgcatattttaaattgaatatttttcttcttttcggtgagaagtgaaaagtggaagacatttcagttctgcactttgtagttgaagttatcttcctgattggaagataaggaaggtttgaggagctcatttctgaagttgtagctggaagggagaagagctcatgttaatggtattttgactgctccaaaacactttcgacttgtgatattctttaacctatatgcgttgaagaatttttggagacaaagcatgcaagcacagagtctgctctggtggtaagataagtgaggtgacttctgaagaagcctacagagaatgtaaaaataagtgtgttattttcactgctttgacacagtctcaattgtgcaatgatttattatcacattgtaatttgacatatgctacatgatccta

SEQ ID NO: 15262 - DNA, 472 bp, Zea mays
  Coding DNA Sequence Number=SeqID_859
agttcctcaagcgtgcgagtggcagcgatcctgaagcgagcggctgtggtgccccaaggcgggcgacagacgacagcgcttccgaggcgagtgggcaagcgtcaccggcgctcccccaggaccaagcgacgacgacgctcctgaggagggcaggcaagcagtgacggcgctcccaaagcggacaagcgtcgacggtgcaccccaggcccgatggccacgacggttacgcgaggcacggtaggcttcattcggcagccgcggtggcggccatgggagacgcgggtagctccggcggttgcgcgaggcgcggtcgtctccggcgatgacagacacgcacgacgtgggtgtctcggacgtcattcgatgaccaactcctccgatccggtagcctcggcactggcctccagcgatgacctcttctaattctttgtttatacgtgcggctgttggttgaacctatactaagattttt

SEQ ID NO: 15263 - DNA, 528 bp, Zea mays
  Coding DNA Sequence Number=SeqID_860
ggatgattgatatcgcgcaaagcataaatcgttacagaaagttgcataaatacctaaaccgtacataataattaacaaaaaaatcttagtataggttcaaccaacagccgcacgtataaacaaagaattagaagaggtcatcgctggaggccagtgccgaggctaccggatcggaggagttggtcatcgaatgacgtccgagacacccacgtcgtgcgtgtctgtcatcgccggagacgaccgcgcctcgcgcaaccgccggagctacccgcgtctcccatggccgccaccgcggctgccgaatgaagcctaccgtgcctcgcgtaaccgtcgtggccatcgggcctggggtgcaccgtcgacgcttgtccgctttgggagcgccgtcactgcttgcctgccctcctcaggagcgtcgtcgtcgcttggtcctgggggagcgccggtgacgcttgcccactcgcctcggaagcgctgtcgtctgtcgcccgccttggggcaccacagccgctcgcttcaggatcgctg

SEQ ID NO: 15264 - DNA, 531 bp, Zea mays
  Coding DNA Sequence Number=SeqID_861
taatcgaaaaggacacgactcgccgcacccatcccaatccgccgccgctgccatggccgacgagattgacacgaggccggctcccgcgggctcccgcggccgtcctgcgcacgctaccgaggacgacgacagggaggagggcgagatcgccaccgacgccccctcgcccgccctccccgccgcgcacccgctcgagcactcgtggaccttctggttcgacaacccgcacggcaagaacaagatggtgctcgcgcgcgtcggcgagggcggatgcagcgccgaggagtgcgagcggatggtcgccggcgtcgacgccgacggcgacggctgcgtcgggttcgaggacttcaagaagatgatgtgcccccagccgcaagccgaagccggcgccgccgggcgggacaaggacaaggccgaggccaaggaggagtgataaaaaaattctagtatttgctggggtggcaggatccaacggacatggaactgaaatctagctgtaggggacggagggatactgttaaacctctacgg

SEQ ID NO: 15265 - DNA, 428 bp, Zea mays
  Coding DNA Sequence Number=SeqID_862
aatgtcatatcttaggatcaaccaaatgaggtgcttatttgtgaagacctagtcgatcagaaagtatccttcgacatccaactaatggaagggcaagaaaaccaactaaaaatgttcttattcaataataagaatgtgtttgccttgtctacaaatgatctagctggctagggtcccattaactaaaagcgtaggtcatcatacctaacctagagggtgtattagccaccttaggaaggcataactacatgagggatcacattaaatgtgagcatgatgttttgggcatgcctccaccctaacatgcgtacaaggggtaggtgtacccaaatctgttgcacaagcacactttagtatgatgaccatatctattgaggcaatatcctacataccgtgggattaagaaagtactcatatttgtcactagg

SEQ ID NO: 15266 - DNA, 582 bp, Zea mays
  Coding DNA Sequence Number=SeqID_863
gagcacagcgtggtcaaatcgccaaccatctccacagttcaccgcaggaccactggggctcaagagaggtgtaggaggaaccccgcctccgccaacaacaagggcaaggaaccggtcgctgccacggcgagctgccccccgcttgggaaatctgcaaggacccacagcaggaaaaaggatactcggcccatctccgcatcagttccctgtcatgaaggtagaaagaagcggcccattgcaaacacacccaacttactagaggaccttttggagaagcagagagcatactttgcagatatcgatgcctttgagctggtagaggaagaggtgtcggaatccgagctggagtaaaaaccaaagcagatatggcctttcttttttttcttgtacagaagcaaattactggaaccaccggcgaggtatggtagcaatgtgtagctagctctacttgtaacacggggggcactaatcgctcgatatttcgtatgcttgggaacttgttgctctggattatattatctaatatacttgtacactgtaggcaagtgtttgcaaactggttttgtttgctactcgcagcag

SEQ ID NO: 15267 - DNA, 539 bp, Zea mays
  Coding DNA Sequence Number=SeqID_864
ttgacgcctaatcttctccctatggcgaactcgcccaaccactcgcctccactacagcacgccgtgcttgcgcagccccggcagcgacaccctcctctgcgtcacgccgtcgacccgcttgatggaatgccgcagcgagctctacccgatctgcaaagcctgcacgcagtcgtcgaaatccccgcaaccgtgttggtctgcaacagcacgtcgtcgatctgcaatccctagccttatggttgaccttgccctccgtcgatgtcgcgccttgcgcatcgcttgctcgacggaagcctcactcgtgaacgacatgcgtggctcattcgatcccgccaggttgtttgatgtgtgtgatttgtagtcgttctaaatatgttttaatcgatgtcatgcatatatgtatcgttgaggttatagtggatgtgtatgcatgttaattgaagattttagggaagagaaggaagtagaaaaagaacttagatgtttctcatgttttcggattgttattaggagtgagttggatgcgtgtaaaatgattc

SEQ ID NO: 15268 - DNA, 283 bp, Zea mays
  Coding DNA Sequence Number=SeqID_865
atcgagtcgatacttccatacaccaagccaccatcctcgacatagagggagagaagagagggtttcgccgcgtcgtcgcttcaagcttccgtcgccatccacaattaagaaggagggccgaggaagatggctagaaggatttgccagggagtgcggagtcgtgtgtagggcttgatcgagtgcaagggacatccagggcagaggcgcacctcgccggagtccatggtttgtagtcgatctgcgtcgagtcgtggatggggctcccgtctctcttagcaatggt

SEQ ID NO: 15269 - DNA, 430 bp, Zea mays
  Coding DNA Sequence Number=SeqID_866
gatgacaatgatcctccaccatcatagttgactgggatacgacgacctagacctctccgaactcatagtagcatattgtatgctcctcatcttgcggtacttgttcttgaccttatacttgttataaccttgtaatccagattcttccccaaaagttgggcttcaaatttcttgtgaccattgctaagagagacgggagccccatccacgactcgacgcagatcgactacaaaccatggactccggcgaggtgcgcctctgccctggatgtcccttgcactcgatcaagccctacacacgactccgcactccctggcaaatccttctagccatcttcctcggccctccttcttaattgtggatggcgacggaagcttgaagcgacgacgcggcgaaaccctctcttctctccctctatgtcgaggatggt

SEQ ID NO: 15270 - DNA, 548 bp, Zea mays
  Coding DNA Sequence Number=SeqID_867
aggaagcattcccatcgatgtactccgagcaggcgccttgtttccaaaaccatatttactttcttgttttcttttgatctctctgtctcgtgatctcaaattctcaattcccatctgtcttctccttcctggtgaacgaggaacgactcctccggtcctccctccagtcctccctgagctgatccctggctcctcctcctcctccccgagaccccgaccaactactgcgttgaattgctgatcaagaacaagagccaactctggttatcaactccagcgactcaggcagacaagaagatgagtacttcatctgaagatatcagtgttcaagtcattttccctggatcacaatatcaaacaaatgagcaggagcagccaaagcatgtctcctctgctgtggatagtaccaatccagttggtttggcatcctcggctgctcctctctctgtgtgtgttcattatttatttttcggattcctgttgcttttcagtagattccattcacaaatgctcctgcacttttttaccgactgcgattgtgattgctt

SEQ ID NO: 15271 - DNA, 589 bp, Zea mays
  Coding DNA Sequence Number=SeqID_868
caccacagtaggtcgggaagagcttccctgtccgctctcgcgaagcctcctcctcctccctatctccctcgcaaagccgccgcctccccgtctccctctcgaagtcgtcgctgctcactgcctcgcacttccttggactggatccgtcgtcgcccggtgatttcgctgagcacgggcactccctggcaccgcgcgctcggcgaaacaccgaagctttctcgcgtatggcggactcttcttcgtcgcgcaagcaccggatctccctcctcttcttcacgcaaggcaccagatctccctcttctctagagagcttctcaggagcctaggtgcgaggatcctgcaagccgacggctggagaaaagcgagcggcacggcgacctcgacaatgcggctggtgaagaccgagaaaggtgagtgccttagccttgtcacagatatttttctttttcatcaattatttttcaattcaacaatgcttagttcaacgatttagtttaggagtcagtcgttgtcatagattcaattcaacgatgctttttttcttctcttcacctacagactgatgactaagactcattcctgtcaaatg

SEQ ID NO: 15272 - DNA, 516 bp, Zea mays
  Coding DNA Sequence Number=SeqID_869
agtccaattttgaccaatccatcctgagcgggagaagaagaccaagagggagaagagaagggcgcagaacggaaccacgaagcaatacaaacccgagagccacccagagaggaagagagcgctgttagcaatcgggagtcatccgccggaatccaccgtcccttcggccaagcagcctgcaggggagatccatggccagattgcccaacctgaacagcagacaacggcggcgcgggggacgacgacggaacgtagccagccccgccggagccggacgacggggatgcggcggcgcgcgcgaggaccctagctccgtgctccgatctgcatcgcctcgagtcgagccgttgccgcggcggcggggaggacgacagcgcgcgggcagcgacggagcaagccggcggcgtgggagggcgagagcggcatgcggcgcagttcggtcgtgttggtcactgcatctctctctctctgatactctgattacttttgkgctgagacagtggtagcgattggatt

SEQ ID NO: 15273 - DNA, 336 bp, Zea mays
  Coding DNA Sequence Number=SeqID_870
ttcttcgccagctgctattagatgtagtagctttgtatagtttcatggaggtacttcaagcatgatgacgacgatgatcaccacaatacaagaggatgcatggagctttggatttgtggattggcggtgtgagcttttactgggctacaacaattgtttgtcctgcccctaaaacctgtcacggtgagctatcaactgggctaaataaaaaggctcgccgtgtgatcttgtctagcgacctggcctgtcagcccaaaaactgaacacacatacttgtcagcccattttttttttgtttggattcagatagatatcgctgatagtgtaattgttttc

SEQ ID NO: 15274 - DNA, 591 bp, Zea mays
  Coding DNA Sequence Number=SeqID_871
agccaagtgcatgattgacataaaggacaatgttccatgagtgggaggtgccgagctggtgaagtttcagtgcccttcttacaagggctcgcgagccggaacaagccggctcggctcggctcgctgcaaaaacgagctcaaagaaggggctcggctcggctcgttcgaggctcgcgagccgctccgagccgaggccgctccgagctcgagccggctcgggagcctcgagcttattttctagccctactctcagccaagcaactcgagtgtgtttggttggacgtacaaggagggatcgaagggggtggccacagtttctatagtgtttggataagagtcacgtgggggcgaggtaaacaccgtagtaatttttgatgacggcgtgatccaaaaaaatcgaggggacggtgtcgccctcacctcatcctattttgaccttaaatcaaacacatactaaggaatcatcgaggacatgtgagggtgctcccattgtgcggcagcaaacccctcttccagtttactgcttttttcactattattattgcttctatatgttccaagcacttgtaagcttctgataactgcgaacta

SEQ ID NO: 15275 - DNA, 596 bp, Zea mays
  Coding DNA Sequence Number=SeqID_872
tcctcgatgattccttagtatgtgtttgatttaaggtcaaaataggatgaggtgagggcgacaccgtcccctcgatttttttggatcacgccgtcatcaaaaattactacggtgtttacctcgcccccacgtgactcttatccaaacactatagaaactgtggccacccccttcgatccctccttgtacgtccaaccaaacacactcgagttgcttggctgagagtagggctagaaaataagctcgaggctcccgagccggctcgagctcggagcggcctcggctcggagcggctcgcgagcctcgaacgagccgagccgagccccttctttgagctcgtttttgcagcgagccgagccgagccggcttgttccggctcgcgagcccttgtaagaagggcactgaaacttcaccagctcggcacctcccactcatggaacattgtcctttatgtcaatcatgcacttggctcaggccttctcctctggaccgcggatccgacgaatcaacgatggtggcgaggtccaaatccttccgccggagtcgaccttagagaaccgccgtcgccgcccactgaacactggacccgaattttt

SEQ ID NO: 15276 - DNA, 437 bp, Zea mays
  Coding DNA Sequence Number=SeqID_873
acccaccgtcgttcttagcgtcaagctcatcttctcccctctgatttttccgccgccttcctccgatgcttatcagccaccggtggtatatttttcctggccgccctgatctttatctacgcacgtcattctcttctccaaccggccagcactccagttcgttcggtgcctgctctgctctcagttttctccccaaccgcgcccctgatcgagctccagctcctgcgcgcccttgctccttttctccaggccgccagtgctcagttttctctctccctcagcactccacggcgcttctgccctctgctcggtgtttctctgctcgtccatcttccctgtgccaaccatggcgcttggcgcctaggtcccaagccacgcagtcctctctggcgcgcaaagcttgctctactgcgcgctacgtgctcgccatggagctt

SEQ ID NO: 15277 - DNA, 386 bp, Zea mays
  Coding DNA Sequence Number=SeqID_874
gaagaagaacagagctacggtacgagggatagaaggcggcggaagaattcccccagccgtttctgtttattcctcgatggctccgagctcgatcttgttgccgtccccctccgggatggscaccagcaccggccgccagctccgtcgcatgagcaggctccgcagcccgccggagccgaacctccggcccactcgccacgcgccggcgccgcaggcggtacccagggctggsggcccccgcgtaggccggcgcggggctgcgcgacgggctcggcgcccccgccgcgcaccgcgtrgccagcagcttgaaccgctgcggcagcgtcgccattgggagttgggaccgcctccctcgactctctccctgtctgctcttctgtgcgtgt

SEQ ID NO: 15278 - DNA, 514 bp, Zea mays
  Coding DNA Sequence Number=SeqID_875
aaacaaccgtggattctgggcgagcgaggatgaggtgaaggcgtgcttggcgaaagaagccagcgtcgactccgttggacgtcgccagtgtcgaggagtacaagcagaaagcgggcttggtgtcgaagcggggccggagggtcgacaggcagcaactaactaccgtgaccatcgtcaccgttgtggtggttcttcgccctccgtgccttcttccccctgtccgatagccgacgccggtgctagatctactccccccatcctcgcttcaacgagcacctttctttaatcggttagatggtgcgcttacctcgtcctcagttgctataatgggctccaagtgatgggaggcatgaaacatgctgaagtgatacaggctcgtattttggaaccagatagctgcaaaaccaagtcaataaagcaaagtgttcaagatcaaatgctcaaaaaagctgtcagtccagagccagagaagtttgacgattaaaaaatagaggacttcttgcaatattgatat

SEQ ID NO: 15279 - DNA, 559 bp, Zea mays
  Coding DNA Sequence Number=SeqID_876
agaaaatcttgctcacgccaaaacctcttctgtgggcccaatctaatcccatcgacccactcctccaactcctagtcgtgtggcccagcatcactcacgcgacccatttcctcaagtgcgtgcgtgtaccccggacgctgttaggtgggacccacgcgtcggtcatcttcttcccaactccgtgttgaagccagcaatctggggccgaccaaatcgactgaaaccaacgccccgcaaacgctccttcgcaccagttgattcggcctcagcccgagcttcttggaaacggattctatcgaccggctatataaccctagctgtctcgcgccctgaaccgaagagctgccgcggtgcacagagagcaatggaggagagagggtcgccgcacctagaacctttcctcaccggagccgggagagtgaagattagcctgtggccgacaccgtctccatgccggtgtcaaactcgattaggagaggcgttgaggattacctctgggacgcgacgaagccgtttatcgccgcaacaacttccgatgtatgcttatccaacgccgagg

SEQ ID NO: 15280 - DNA, 510 bp, Zea mays
  Coding DNA Sequence Number=SeqID_877
tcgctgtagccgaggtcggcctcaaccacgacgacgatgcggtctcctcgccccaggctcgacctcctcgctgacctcgccctgctccacctcaactccaaacattgtctctccgatggagaattgtctgtgccttaacagttcaacaaaaggaggcgtactacttgttgaaatattggtagctaatgacaaattccttgacctatttttaaaagcttgaattggcagcatcagctttgtaagaatcctcgtccaaatccagatatcaaaactttattcactgaccatacatgttctccacccaatggagctcgtgcatcgccggtatctgtaccactagcagctgttccaaaggctggtgctgcatatccaccactcacagctcatactccgttccaacctcctccacctggtccatctttagctggttggatggcaaatgcagccgtctcttcatctgttcagtctgctgttgtagcagcagcatcaaatacttgttccacccaatca

SEQ ID NO: 15281 - DNA, 275 bp, Zea mays
  Coding DNA Sequence Number=SeqID_878
gcggtgccgcccagagaaaagaacgacgactggaattggcggtgcattccagagaaatttgcgcgaagagaagaggataaaagaacgacggcggctaggagagaggtaacggatgtagacgacgtgagtatccatggttttaattaaagaggttaccaagtaatagagtgttcttgttcgttttagcgagtggtctattccctgcttttccatatcagctaatccttcgcctacgcctccaaaacgtcgaagccgcacgtgaggatctccataat

SEQ ID NO: 15282 - DNA, 556 bp, Zea mays
  Coding DNA Sequence Number=SeqID_879
cgtgggtgtccaacgtcatcggcgccggcgcgagcctcggcatcctcacgtcactgatggtggccatgctggggcaggcccggtacctgtgcgtcatcggccgctccggcgtcgtgcccgcctggctcgccagggtcgacccccgcaccgccacccccatcaacgcctccgccttcctcggcctgctgacggcggcgctggcgctgttcacggagctggacgtgctcctgaacctcgtctccatcggcacgctcttcgttttytacatggtggccaacgccgtcgtgtaccgccgctacgtgggcgacccgtgccccggcgcacttgcgaccttccgttctctgctagcaaccttgttgattctgttttgtgcgctcggttctagtcttcccggcgcacttcccataggcaagctgtcaagaggattatagggtacctttgtttcactcctgagtttggtttgtggtactccttgtcttctgccatgtctttgtctgggtattcagatgttgattttgcggcatgtcctttggatcgcaaatctacttttaggact

SEQ ID NO: 15283 - DNA, 590 bp, Zea mays
  Coding DNA Sequence Number=SeqID_880
agagtgtgtgttgcgttcttgtgcacttgatcttggagttttaactcccattcattgtaaagttagcagagcctccaagcttgttgaaagtcgcctagagggaggtggataggcgggatctgaaatttacaactttaaacacactacaagccggggttagcgttagaataaaatccaagtccgggagagaggggaaaacaaatcaaccaagaaaataaagcggatgacacggtgatttgttttaccgaggttcggttccaaagaacctagtcccccttgaggtggtcaaaaagaccgagtctctctcagcccattccctctctcaaaacggtcacttagaccgagtgagctttctccttaatcaaacgggtcacttagacccccacaaggaccaccacacacttggtgtctcttgctttgattacaagtgtcttgagaactataatgaggaagaagaaagccaaccaagcaacaagagcaacaaagaaacacaagaacgatcctctcacaagtcctaaagattagaattgaattggggactttgatcggatcggtggctataatttgtgtcttggagtgttgtgttttgc

SEQ ID NO: 15284 - DNA, 540 bp, Zea mays
  Coding DNA Sequence Number=SeqID_881
gcttggtgtacgacatcctgccggaggagtacacaagattggacgaccgcgccgaccgcctcaacctcccgtccatcgccgtgtccgacctcaaggactccgtcacggtctcgcgcaccgtcaccaacgtcgggccggcggaggcggcgacgtaccgggccgtggtcgaggcgccggccggcgtcacgatggacgtggagcctccggtgatcgcattccagagaggcggcgccaggaacgccacgttcacggtgacgttcgtggcgaagcagcgggtgcagggcggctacgcgttcgggagtctgacgtggctggacgacgccaagcggcactcggtgaggatccccgtcgccgttcggaccgtcgtccgggacctcgtcgccgatgtagcttgatggtcgagttcggtttctgggcacgcacatacatgtgttccgcgttgtttacttgctgtgttgtcgtctcgcggccgattcgatcgggttcttgtaataagaaagatggcgtggaaacacttgcatacaaataatgccctcttgc

SEQ ID NO: 15285 - DNA, 508 bp, Zea mays
  Coding DNA Sequence Number=SeqID_882
tttgagggcaaaatcgacatgtccggttacagctttgtgccattattagccctaattagttacgttattatttataatgtcggcgtgggatgcgttccaatcatcctcctcggagaactgttcccgccaaatgtgaaagcgttcgctctctgcctttgtgacatttggtttgatattgtagtgacatttatgtcgaagttcttccaattaatgaaagacaatttcggaatgcatgtgccattctttgcgtttgcgctattttgtggtataggtttagtttttatagtattgtgtgtgcccgaaactaagggcaagactttagaagaaattcaattgatcttaaaaggcaagtcgaaaaaaaatcacgacattgaacttgaagttaatacttgactaagatattagtaaaaattctattttgtaattatttattgtgacaattgtaaattattatttttattatgttttgtaaataaatgttttttaactgctcaggatattttgtatg

SEQ ID NO: 15286 - DNA, 475 bp, Zea mays
  Coding DNA Sequence Number=SeqID_883
ggaacagccacctctgatgacggcagcgccagccgtttcagcacgcggtatggaggcggccgacgggacaccggcgcgtcgacatcaggcgtgcgcgtgccacggacacggatgtcagcagctgcatggatggtctacaggaagcgtgtgtgtggctgatgcgtgtgtgactgatgatgcaagtgggccggcccaggaaggcaaagacgagccgaggaagagcaaagccaatgtgcggcgtcagcatcccctacaccatcagcacctccaccgactgctccagggtgaactaaaacctagaccacgcgcgacgacggccgcctgatcgatcgaccaaccattccgccgtcgccgccggccggatcatcggtcgtcgtcatgatgatatctatcaatctacgcgtgatgatcgatggctacttgtctactgctatgtactactaaataaaatctctccccgtgtgtgtacacgtac

SEQ ID NO: 15287 - DNA, 294 bp, Zea mays
  Coding DNA Sequence Number=SeqID_884
ttctaccgcttgctcagttcttcggtctcggagcagcagcagcggctgcagattgtgtatggtcgagactgcgtggagccggccgccaagcccggggatttggcactggtaatcatcaggggagtgacatggatcctcgaacgatttccgagccttgcaagaaggctctgatgaccccaaccgagacaatagccacaggatacgctacgcatggcttaatttgctctcaaaagtccagtgagatcgagctagcagacgtgtataatgttatacaatacattattctgagaaact

SEQ ID NO: 15288 - DNA, 127 bp, Zea mays
  Coding DNA Sequence Number=SeqID_885
gatgagcaccgaatcttccctttggacgatgtgaaagaagaacggggaaatgaggaaatagggtagaattggtgtaggatgtatctacaagataagagcgtatagaagtctcaacgactccgctcgc

SEQ ID NO: 15289 - DNA, 564 bp, Zea mays
  Coding DNA Sequence Number=SeqID_886
tcttcggctggatccccacagctggtcccctccggcagcgccccgtctcctcggctccggccgtgcctctcctcgtctgagaagcggacgaagaagaagcgagagatggcgcggcgcgggagccacaagcgcgggtgcgcttcgcggacgacgtcgtggacaaggacaatggcgtcgccgctccgcgggaggaggccgagccgtcgtgcgccgcggcggtaaggacgctcatgccggccaaccggaagggcgctgtacggcggcatgctccgcggccgctccatgctcagggtcgcctgctcctactagctagctctcctaggctcctagcctagcatagctgcatagcaccaccggcacccgcccggctgctggtccattgattaatctagacctccgatccagctcctccgcgtcgtctctactctcttatgcgcgcgtgctgtgctgccaactagtagcgctgctaattgcccggcctagctcccttgcccattgctggggaagtatcgttggtgctgtgttgcttgtactggtagtagcttgcttccttgtacattagtt

SEQ ID NO: 15290 - DNA, 186 bp, Zea mays
  Coding DNA Sequence Number=SeqID_887
ttcgtttttatctcgtgcgatggcttcctcggtacaaagtacgagatgaggcataagactgttcatataatcgtgcaaaacactattttacactgtagattgtgttgtttaacgagagaatttcgaaataagagatgagatgctatgaataagctgttggaggcatcctaaaaacttgtatggtaa

SEQ ID NO: 15291 - DNA, 586 bp, Zea mays
  Coding DNA Sequence Number=SeqID_888
agctcatcgagctcataatgccccgatcccatacccctcccatcacctgcagctcccactgccaatttcgtgacgacagcctaccaccatgctcccctgatgctgcccatctgctgtcctctaccaccaccctggtagcgccccggccgcttgctttcccacctatccactgcctccaccaccatgctggccttcctcccctggtcttgcttctatttccggtaattatgaaatccctccaaacccctaaatccttaaccctaaacccacagtccttcactggagaagcctcctctttgaaggctttaacccttaaagaaaaatcatctgttgtgtcactctgagtttatgatagagcttagcacactgattattttagtggattagtaattatggaagctccaaaatgactccattttaatgacgccttcctagatttgatttggctggtcattctattcggagtatctttgtgatgtggttctggggctaacagcttcagaatttggttgtagggaaggctagaggtgtttaaacctaattgctgtcctttctggtcgattttcactcctgttctacaaactgg

SEQ ID NO: 15292 - DNA, 416 bp, Zea mays
  Coding DNA Sequence Number=SeqID_889
gacgtatgaccctctgtcggcggcggggcggcgggaggcggcgcggacgcaggcgctgggacgcgccgtgcactgcatccctgtcgtgcttctcgtctgcgccctcctcctctggctctccgcctcctcccacacccacctagattgagagtaccagcggggatcttaagtgaacctggcgggtagagtctggttctgttacacttgtaccactgaagagttccgagttccaaaagagaaagagaaaggtaaagcaggctagacatgatcatcagctggcaatacataggtgcggattagaatggaaagtagctcatttactagcaggcaattttttggaagtcttaaggccatactgagttggactggtttggctcagcgttacatactgtatacaacgaatgcccaatgtaacc

SEQ ID NO: 15293 - DNA, 572 bp, Zea mays
  Coding DNA Sequence Number=SeqID_890
gggcagctacctaacagacgcatggcacacgcacacgtcgaccggccacggagccgcgccgtgctcgcggtcgccgtcgccgccgcggcgctcctcctttttgccgcagcgggcgccccgcgtgcggccggccagacgacgacgacgacagcggtggtggatccggacagctgggccgatcgcggcgcggcgtgcacgggcgcggtggaggcttgcggcggcggcggcatcggcgccacggccaggagggagctgggttccggcgggtacatcagctacgacgccatgagccgcgggcgcgtgccgtgctcgtaccgcggcgcgtcctactacaactgccggccgggcgcgccggccaacccttactcccgcggctgctccgccatcacccgctgcagaggctagggcagagcgagcgatgatcatccccctcccccccggccatgcatatgctctgctctggtggttttgtgttctgtagttagctgggcttttgagaggttggttgttgatcagctgacatagagcaagctgcatcttgctctatgattttgtaattggcattggaaaaa

SEQ ID NO: 15294 - DNA, 572 bp, Zea mays
  Coding DNA Sequence Number=SeqID_891
aaagatggcgcgcttcgccaacggttccgtggtgatctccatggaggacacccacgtcctctcaactgtcgccgccgccaagtcctctgagcccattcgagacttcctcccactaactgttgactatcaagagaaacaatatgctcaaggtgttatccccacaacacatatgcgcagggaaggtgctcctaaggaaagagaacttctatgtgggcgtataattgatcgaccaataagaccattgtttcctcctggcttttaccatgaagttcagatcatggtaaatgttctttcatcagatggaaagcaagatccagatgtaatggctgcaaatgcctcttcagctgcactaatgctatctgatataccttggaacgggccgattggagtaatacgtgtagggaggattgatggagcttttatattaaaccctacagtggatgagctaggtttgagtgacctcaatcttgtttatgcatgttctcgggataaaactttaatgattgatgtacaagctcgtgaaataagcgagagggatcttcaggcaggaatgaaacttgcacactctgagg

SEQ ID NO: 15295 - DNA, 571 bp, Zea mays
  Coding DNA Sequence Number=SeqID_892
agtgcaacactaaccagaagagctgctgatttaactgaacaacaatacaatggcatggatcaacaccttggcctttcccaagtccttgctggagacttagctgtcgtgcacgcgatcgtgttaatcggtccattcawttgtatgtatagaagtgatgtcctcatcatcctccctctcttgaaattggattcgtcctcgactcgatctcatcttcgtcacccatatatggcttcaaatctggagttgggacgacgaggcaccccaacccacgtgttctgcggttcggcactggaaggcatgctccggcgacyaattcctctatgcccgaccaccattcgccttaacgcacgctgctccccacttcggtgccctccgtggaacgattctgcgcgcacaccgagggtctgacgctgccatacgtgaatctatcatagcgactgcttctctatgctctttctctgtttctactatggcgccgggtgggtcttgctctcggctctaggggatgatggggggggggggggggttgttcggcgtctggttttatagatcctagcgtgggcgagaccga

SEQ ID NO: 15296 - DNA, 319 bp, Zea mays
  Coding DNA Sequence Number=SeqID_893
aacaaatacatagcagtggaactcatcccggcccatatcttgtcgcgagcgtcatgacgcaagtggccagatcaagcgatggtggcggcgcgattcacgacggattcacaaggcttcttccgccgtcggctgcctccatcttcaccgacgagcttttctataatgcagacgagagcgcttcatcctgcgattaaatcagcactagtgttgcacaacggtacctgttgcatttgtcgtagcagctttattgggcatatcaagatatgcaggacaaggaagtggtgttagtggtgctagtacaaagaaggatgtcaatggc

SEQ ID NO: 15297 - DNA, 544 bp, Zea mays
  Coding DNA Sequence Number=SeqID_894
gaatcggtatccaaaccgtcggatcgagatctgcggcccggatttaatattactacggtccatccgtatccatcagattatagatctacggtctacatcgattaagccgaaagggtaaactgatacagatgttcttcaacctcccggcttccagacacagccgaccgcgctaactctccaccccgacagaccgcccaccggccatggcgttcgccagcccacgacggcgcatccaggcgtgatgccccggcgaacccatggcccatcacccgccgcacctaacgccataagatgcaaggagcccggcgaaagaaacaagcgttcttaccggcaaccaatgtgtagacgacgtcggccgtagagagcaggaatacacggtcaaccacaatgtcgccgaggcaataggagcgtcccgcccccaggcacgccaggtagaagcgcgccccgacgaagcaccacgtggaaatccacgcgtagacgatgactcctacccccaggagcgacggtgagacactcctctatctctctccatcactagtttttt

SEQ ID NO: 15298 - DNA, 578 bp, Zea mays
  Coding DNA Sequence Number=SeqID_895
gacatttgtgactaccccataggtggatatccccacgacatctgtggcggcggcatcaacgttggcatttgaggcggcatctacggagtcatatgtggcagcatctacgatatctgtggtggaattgaagatggtctcggaccaaatccccacgacatcggtggtggcattatttggttatggggacctatcttagaaccctgtgattccaccgccgcacagtggtgccgcgccagcgtccccagacccgacactgtggatgacgaactcccctcccaaggacgtgttatgcgtagatggagacaaagcgaaacggttgcagggtttctcaccatgaggcgtgcggtagggacggcagtccacggcgacgggcggaatcacgacgacgtcagaatcacggcgagaaattcaccgagcgtcgattcacctcaacacccgcctgcccacgagaatgtccaccaatggctaacacagcccccaaacaccaccctgaggtcccaatgacggcgcctctgtgagtcaccaacgggtggccgcccaccacacttctctccacgcgacgagactattcggctagt

SEQ ID NO: 15299 - DNA, 475 bp, Zea mays
  Coding DNA Sequence Number=SeqID_896
tcggcctgttcaccgcaaatcagaatagaatatcagatcactcctccctgtctccatcgccagcacctacatgtggggtgaaatccaatgtcgcacgaaagcgtcgcccratkttgtctctccactcaaaaccctacgccccagccccgcggtcatgtttgtagccacctctcctccgttctccaccctccacaactgctgccacgatgtcgccgcctccggagtcccactcagtatagtgaggcrscaccaccgggcacgtcgacaacgacgccatsmcywtataccctctagcaaaaagatctacaatacggtgcagctcattggattgtaggcaccggtgtcgacgtgcggcaactgccagcttcccatcgctccgctgttgtgaggagttgctttgtcgtatggaagtcggccgtcggtactacatggtattgcttattttgatccgtgttagccaattctaattcattga

SEQ ID NO: 15300 - DNA, 379 bp, Zea mays
  Coding DNA Sequence Number=SeqID_897
gctcactcgagcacttatagagaaggtacaggatcaccactactccatctctatcaagtgatgctgatctgttatgtatttccaccaaatttcaaagggcactgaaagtgtttgtggtaatgagtgttcagactcaactcatgctagacccattgcctactatggtgcttggcataaaaccttggctaccacctcagcaacactgcgacatttgcatgtctgacattgttcagctatgcttctgtacttggcttgtattgagtagtgcttggattgatgtagaacaaaaatctccatggccaccacctacactaggctttatgcacagtgatgttgttcaattaaggccaacaccatggcctccatttagactgcatag

SEQ ID NO: 15301 - DNA, 547 bp, Zea mays
  Coding DNA Sequence Number=SeqID_898
ttgcccacgcccaaggagatttgtaaggggctcgacaagtatgtgattgggcaggacagagccaagaaggtgaaataaatactttcatgttggtagcttttcatggttagagttggcatcctgatgcggccagctcatgcaaaatgtgctaaaacctttgatgacttcaattcttcactggagggacttttacagcatttctttagaaaagtctgaggtgaacaggacaattttgaagagctggtgggatcagacgcagatcggtaccttgattgagatcaatgatgtgcagacgctgacagctgataggatcgaggcatatattasacgaattggcggctttgatctcgtgatcggtggaagcccatgcaacaatctcgctgggagcaaccgccaccacagagatggcttggagggcgaacattcttccttgttctaccattattttaggatcttggactccgtcaagtccatcatggagcgcctgtagtttttagaaacttttgatgttctggttcgtagaattgtagccgtctttccctgtgat

SEQ ID NO: 15302 - DNA, 556 bp, Zea mays
  Coding DNA Sequence Number=SeqID_899
acaattaaggacaccgccgccactaatggccttgatggccgaccgaccatcttcctcccccgcgcccctccccttcgcctctccctctataaaaaccagccgaccggacctctctcctctccctttgcctaagctctctccctcttctctcttccctgcccgagctcgccatccgctagagccgcgcctcgccggagccatgccgcgccgccccatctcggccagagccgcacctcgccgtccgccgagccgcgccaccctgtcccggccgtgcccgcatcgtcggagccgttcatgcccgccccgccgagccccatcgtaccacgcccatctgtgcccacctcggccgagcccctatccgccaccgcgcctcgcctgagctcgctggaccgtccacgcccccgccctgaccgtccgccgccgcgaacgtcgcctgagccactgcgctgaacccccggccactgctcgctgttcgtcgcaatgttgaaagcaacctgaaaataattttattaatttttgaaatcacattttgaactagtttgtgaattttgtaaat

SEQ ID NO: 15303 - DNA, 355 bp, Zea mays
  Coding DNA Sequence Number=SeqID_900
agatccagactcctgaaacgaaagacccagtaacgctttagaccaagtagcacaatggtttaatgcaaaaaaaaaagatccagactcctgtgcggaaacaagttcaacatacttggggtacaatcaagtacatgagccagatgtcacatggcagataattctgtctcgggtacaaatcacaagccagtgagcccaccaggcatgttaagcagatccacagacagcatccattccacagtcaccagcaacgcgatgtccgccatcctctctctcgtatctgctgggctcgctgacgacgatctcactctgctcttgtcggttgttgctctgctctagtgctctggtgactgtggaa

SEQ ID NO: 15304 - DNA, 561 bp, Zea mays
  Coding DNA Sequence Number=SeqID_901
acttccactggccacactgcagtagtccttgttgccggcgcctggcggcggcgagaagttcggcgaacgatggcggactctggcagcccaaggaagcgggaggagaatgaagaggaggacgacatcgtgtgcctggatccgtccttcttcgtggaccgcagctacgagatgacgaccttcaccttcgggtcccacgagctgcgcctcctctgcctccgtgccacttccactgattttgatcttactggacagttagtgtggccaggggcaatcctgatgaacaactacctatctcaacaccctgaaattgttaagggatgttcagtaattgagctaggatctgggattggcattactggcatattgtgcagccgtttctgcaaggaggttgtcttgactgatcacaatgatgaagttctggaggcaaggttcaaattgtttaggaattcattcactgatacctcagcttcactttcatataggaattaaagaacaaagtaccattgagacttttgctttagttttagccattttgtatatataggtaaatgcatcccgttt

SEQ ID NO: 15305 - DNA, 542 bp, Zea mays
  Coding DNA Sequence Number=SeqID_902
cacccgcaagaccaacaaggacatcacttccatcgcaagcaacgggggaagagttagctgcatgaaggtgtggccaccaattggaaagaagaagtttgagactctatcttacctccctgaccttagtgacgtcgaattggctaaggaagttgactaccttctccgcaacaagtggattccttgtgttgaattcgagttagagcacggatttgtgtaccgtgagcacggaaacactcccggatactacgatggacggtactggacaatgtggaagcttccattgttcggatgcaccgactccgctcaagtgttgaaggaagttgaagaatgcaagaaggagtacccgggcgccttcattaggatcatcggattcgacaacacccgtcaagtccaatgcatcagtttcattgcctacaagcccccaagcttcaccgaagcttaatttcttttctaaaacattcttatgaattatctttgctcatttcatttcctattggctggggtccttttctctcctatgagacaatttctatcggattgtg

SEQ ID NO: 15306 - DNA, 598 bp, Zea mays
  misc_feature (561)..(561): n is a, c, g, or t
  Coding DNA Sequence Number=SeqID_903
ctggctttgctggatccaagtctaaccctatcgtttctggtttggaaactggtggtgttgatgttgaatatgatgatggtgctgatcttggtttctcaaagtggcttcagaacattaagggcaacaaaccagataaggatgcagctgataagaggaagctagtgagcaaatggcacccaacgacaaagggaacacttagaaggaactacaggataccttccaaaggcgaaggaaaccgtttgcttaaagccattgcgtctcttctctcagatgatgatcattttagagatgcaacatctcacaaggggttgtcaaatccggcgggagagtgcgcacggacaaagcgtatgttgcaacaatgtgagagctctgtttgatgagttaccgacgccacatttggtggtggagatcacaccttttccagccggaccgcttacggagaatgattaccttaaggctgagaagctggagaggatttttaggtttggccccaacatttgaacactttggcatatagagaaagtgttttacaatgtgtcaaaatttagaatttggaaatanttttacgatgtctttactccccagacgttcaaatgtt

SEQ ID NO: 15307 - DNA, 512 bp, Zea mays
  misc_feature (414)..(414): n is a, c, g, or t
  misc_feature (427)..(427): n is a, c, g, or t
  misc_feature (429)..(430): n is a, c, g, or t
  misc_feature (469)..(469): n is a, c, g, or t
  misc_feature (474)..(475): n is a, c, g, or t
  misc_feature (481)..(481): n is a, c, g, or t
  Coding DNA Sequence Number=SeqID_904
aaacgctcgcttaaggatttgctcttctttctccacgttccgcgaactggaggcagaacatattttcattgttttttgaggaagttgtatgatagctctgataagagagagagagagagagagctcactagtccccccccccccccccctggtccacgctcagagcatcttagccatttgggctactcaagttatcctcatgggagctgttgaaggctacagagtcgccggagatggtccattgggagaagcagaggacttgctttacccaggtggcagcttcgacccattgggcctcgctactgaccccgaggctttcgcagagttgaaggtgaaggagctcaagaacggaaggttggctatgttctctatgtttggattcttcgttcaagccatggtcacaggaaagggacntttggagaacctngnngaccatttggccgacccagtcaacaacaacgcttgggcnttggnnaccaanttagtccccggaaagtgagcggctgcttatt

SEQ ID NO: 15308 - DNA, 568 bp, Zea mays
  Coding DNA Sequence Number=SeqID_905
aaaatatatccagcggcgagtcgggcagctttagcttggtcccggmggttggacscaatcttccgtattcggctgaagatgctgtaggtacaggtacagtgcccatcgtctcgtrtcgtcgmggctgcgtttcaggcccagcagaacagatagtgtgactcaagaaggccagcccaaaaaacctactgccattcgtcgagggcagcacagaagcaccagaacgactggcaggtaaggcagatggcaatttggtttttcctggtcagatcgcaggacatcttgaacgcttcagtggacggtacgacgggaccatgtctgaaatcctggatcgagagatcatcgccatccgtatctaccgtgatgatgcagatgcgtgtcggtgccaaggcaccagcttcattcattgctccatgccaaatactgtcccctccctaggccttccccgccctagaacagtgactacaggacaggaaggctactctggcctggcgtcgacgcgtcgtcctcatggtccgcccctccagctcggcacataagataacagaatcgttgcatcgcatcatgttgc

SEQ ID NO: 15309 - DNA, 492 bp, Zea mays
  Coding DNA Sequence Number=SeqID_906
aaactgcttaaatatctacactgtgtagcataattaatatccatatatatcataaactggataaaacgagcctagttgcatggctgttggagcgatcctatatttataaagccattcattttttgcacgcatgcagtgaaaatgaaaatgtcatccaaaatttgcgcccatgcaatggaaactcacacgatctgccataattattggatctaccataaaaataggatctgccatacatgtgcctgcgcgtgtggacataatccaacggctgggtgggggttttatgctatctctatgaactatttacactgtttatgtgatctgtttacgtcatttgtgaaaaaaaatagaaccataattatggcgtgcataccacgcggggggggggggggttagaccagggggtttgactgacgcgcgtacgtgggaatgtttgacctggtgcatggtgggactcaccaaacaacatgtacctggttgtcggtggagtct

SEQ ID NO: 15310 - DNA, 588 bp, Zea mays
  Coding DNA Sequence Number=SeqID_907
gtataggatcaaccaacaaccgcatgcataaaacaaaagattggaggaggtcgtcggaggaggacaccaccgatgccaccagatcggaggagttagtcaccgaaggatgcctgaatcgccatgcggaccgccggccatcgcagcccgcaacttgcgcgatcgtcgacgctgccggagacacacatacctcgtgtggctactgccgccggagacgcacgccttgcgtgaccgctggatggggccacacgtgcctcgtaccgccaccacatgagcctttggtcgctcgtggctccctgagccacggccgacgctcgcgcctcaggggtcgtcgtcgcagctcgctcctcagggaaccaccgctgccgcacgaagggtatgccgtcgctcgctcggacctccgaggccgagccgtcaccactcatgcctcgggtaaccatcgttgccatgcaaggggggctctgtcgctcgtgcatctggatggaggcgtcaaaaaatgaaacctagcggcttgggattccttttatacatgtctggacgtgatgcggttgaactggatggtaccgttgggccagagctttctctagttat

SEQ ID NO: 15311 - DNA, 586 bp, Zea mays
  Coding DNA Sequence Number=SeqID_908
tcacatctcgcacataatcacatacatatacacacaattagcatcaaataaatcaatgttgggtacaaatactggcgatgaatacataaggagaatagtgattccttaccgaggcgaacgacgatgtgactgagactgcatagatcgaggtgaagctcgctgcgacatttcgcgaacacatcaaggcgcgacacgaaggggttccatggttgttgctgctccatggcctagggcgaggccaagcaccagggaaatggcatcggcgaggttgaggatgacatcacagtccgacatccaacgttggcgaacgcagggacgtgctcgaccatgggaggcgcttggcggccatggaaacttgctggagcagggagcgcgataaacgacgccacgacgagagttgggggcgagcgctcccatggcggggagaatggggagtagaggataggggttagggcgagctcgccatggaagcaggggtgcggccatggcagggttgctgtagagaggaaaatggagggaggggcgtcgactggacatgtgggggctggtgaagcggccatggagtgagccgagaacatcatttttt

SEQ ID NO: 15312 - DNA, 584 bp, Zea mays
  Coding DNA Sequence Number=SeqID_909
acgatttgctcgtatagtcggatactccaaggctaccttatagaatattcttcaagacattgaggcaattgcttgcaactttgaagctctccgctagtaagtccatggctaatgaatgccataccttctctgcaggcaatgaattccattacctctagaccaattattcgtcgtayaactagacctaatgctcacatgaactgaccagccacatgcccacatccctggcaactcgccattgccaaagccttcaactcattcatggacaaccctggcacttgagattccagttaccagagtagttcttcagatcctcgaaacctcgcgcgatgatgcaccagcactggatttgacgattcccgagccctccggccgcgcagcggtgatgtcggtcaacgacgagtcgattcgagcgtccaactgcactgctcgtcgattagtgcttcgccgcaacctctccatggatcggtcaactcccgcgaggcacgattggggccgatttacaacatcgacgatgatccccgatggtggtctccaatcttccctgatccctacggcgaacggctgtgctggtcgatggattt

SEQ ID NO: 15313 - DNA, 586 bp, Zea mays
  Coding DNA Sequence Number=SeqID_910
aaagcttttccaatctttagatctgtgatttaagcaatcttgtgtgtcttgcaatttttggatgtccatttcctatcttcgtggtctggttttgttcaatggatggcagtgactccagcgaaggttaagagcctcgggagactcacaaaatgctccaggtttgggcagaaactgttcctttgttttgggtcgtgcactgtcagcaattgtatcaattagtacttcagaatcacacaagaatatgattcaatatgtcgaacagtgtgctaagttggacttgcatttctgccgcaaccatttacatgcagcatccgttaattcattaacgtgcaaggggcttcgcttttagacccaaaactgaagctcagtgcgtagagcatgtagttttgagttctctatttgtttaaatagtactagtggattaagatagttcgtttgcctatttgttatatccatttgtatgcagcctgcactaattcatctagttggaaggggttttgctcttggacctgatacatctgaagatcaacatgtatttgttgtagttcagtgtcccacaagagctatgtaattggtcactcgtttg

SEQ ID NO: 15314 - DNA, 600 bp, Zea mays
  Coding DNA Sequence Number=SeqID_911
cttagcacactgttcgacatattgaatcatattcttgtgtgattctgaagtactaattgatacaattgctgacagtgcacgacccaaaacaaaggaacagtttctgcccaaacctggagcattttgtgagtctcccgaggctcttaaccttcgctggagtcactgccatccattgaacaaaaccagaccacgaagataggaaatggacatccaaaaattgcaagacacacaagattgcttaaatcacagatctaaagattggaaaagctttggaagataagattgttctaaaaatagccgtgtgccagtgcatgataaaaaaaggcaaacaaattccttagagcagataaacagagtcaaaccctattatttgcagaagaaagaagatgaaactgagagcacgcgcatgccgacggggaactggtcctcagccccgtgaccgccgttggccctcgcgtgtagcttcagctccttggcggtcatctcctccagctccgcaaatccaattgcgcgtctgctcgctctttctggagccaggcggcgagtcggcgacccgcaaggccagtgcgacccctggtcccttctaggacatcctttttg

SEQ ID NO: 15315 - DNA, 306 bp, Zea mays
  Coding DNA Sequence Number=SeqID_912
gcattttcttttcgctcctttcactaaaaacggtgacgccggctacacggcaacacctcgctcacccaccgaagcatcgccgggccaagaacaagaactagccgacaccacacctcacctcacctttccttgctctacaactacaacataagtttctgcagcctcccccgccccctcctcagctaccttttccactggaacttcctgtggtggaagtgaatattcctcagcgagggacggcgtcttggcttccgcggccatgggcgcagcagcagcctcgaagcttctacagtggcggctgcgaga

SEQ ID NO: 15316 - DNA, 110 bp, Zea mays
  Coding DNA Sequence Number=SeqID_913
ctagaatcaggagtgatgtggccacgagctttttcatatgtattcttagaatcaggagttggagagcagagcgatctatatatcacaactcgttcttcccagagcaacat

SEQ ID NO: 15317 - DNA, 599 bp, Zea mays
  Coding DNA Sequence Number=SeqID_914
atgtcttcaacttcctgcatagcagtcccactcctgtgcagaatttctcttggtcgttcgatgaaacttgccagactcagatgtcccggaaagtacccagtccagttcttcgcgaagagcttcgtggggagatactcgcgcttcttactggagcataccatgcatacttggagagggtgaagaaccctttgtttttgtccttgcatctgtccctgtaaatggtcaactgctgaagcttcagcgttgtgatctctgactctctgagccttgagtgttgtgatatccaagtatgctgggacttgagattccaggtaccaacttgctcttcagatgacacgtgacctcgctcttgagcgccctgtgtcgtcgatgttggtgctctgaatttcgatccggtgactccggccaccccagcaacccgagccgcggcccttttcaccgccagtagctcaccagagccgccacgcacgggcgtgcctttccttctcccagtaccgggagatcgtctccaatccggctatggcgaacgccgcccaagcgaagggagaggagcagcgttgtggatgccggaagggagccagaggccacgcgattttata

SEQ ID NO: 15318 - DNA, 582 bp, Zea mays
  Coding DNA Sequence Number=SeqID_915
gaagaggtccgtcagtgaccgaaaagctgttttgccattaaaggttactgacccagcgccaaaatggaaagcaatgggagtactcaacgaggagttcaaaacgtatgaactaagtgattattcaggaaagtttcttgttatggtgttttatcccttaaacttcacctttgtttgtccaaccgaacttattgcctttagtgagaagaaagatgaatttcttaaaagaaacacacatcttgtgggtgtttcttgcgacagtcatttctctcatttggcctggaacaatcaaccaagaaaagaagggggacttggaggtctaaattttcccctaatttcggatatcaaaaaacaaatttctcgagattataacgtactgttaccagaacaagggatttctcttagaggcctcttcattatcgacgacaagggtattctccgagtaactatggtcaacgaccttccaatcggaagaaacgttgaggaagttctcagacttgttgacgccattcagtttacggacaaacatggagaagtttgtcctgccaattggaacaaagggagctctacaatcaaacccaacgt

SEQ ID NO: 15319 - DNA, 446 bp, Zea mays
  Coding DNA Sequence Number=SeqID_916
aggaccccgtgctgcctggtgcctggactccaagaacccgccctcgaggcccaagcaccgcttctccccctctcactgtcactggtcaccacacgccacactacagagtccagatcacggccaccgcgatggctgcttagtgcgtccgcggcagctggagcctggagaatgggctgctgcttcagcaagaacccgaggacccgcccggtggccggagcctctggtcgcgtgcagggggcgtggtggactggtggtggtggctcttgagcgatcgcaagagacgctgagatgtgtttgtttaagtagcaagcagcaggagcagcagccgagagaacgagttgcgataagctttagcgttttattttattttagtttagtagcagagacgccgatccggagccgagcagccgagccgagtggcctcgcgatggagacgcgccgaataa

SEQ ID NO: 15320 - DNA, 491 bp, Zea mays
  Coding DNA Sequence Number=SeqID_917
agacgagaacgcgactggtgatcctcgcgcccatgaccaattcgacggtgaccactgccctggaccttcgctgtgatcgtggaaagggtgtgccaaagtccgagaccgcaaggattgccgtgtaatctgcgattgctcgccgtacctctgcgccaccgtgggatccgccctcgctgcggatgtgtcattccacgtcgtaatcgtcggaaaaaaaacgatatgcaagcaggcacgacatgaagataaatgccgaagctacaattgagggagcttcggcatggtggcatgcctaagacgaaggatgacaccgacttaaagaggaaaataccacatagttcctgataatttgtattatgattatcattagttatcaaggatacaaatgtaattttgttcgggctgcatcccgtgcctataaatagatgaacagtatcctcgtactgctcacgctgaattgtaattgctctgacgatattcctgctttcttacct

SEQ ID NO: 15321 - DNA, 454 bp, Zea mays
  Coding DNA Sequence Number=SeqID_918
aaagcaggaatatcgtcagagcaattacaattcagcgtgagcagtacgaggatactgttcatctatttataggcacgggatgcagcccgaacaaaattacatttgtatccttgataactaatgataatcataatacaaattatcaggaactatgtggtattttcctctttaagtcggtgtcatccttcgtcttaggcatgccaccatgccgaagctccctcaattgtagcttcggcatttatcttcatgtcgtgcctgcttgcatatcgttttttttccgacgattacgacgtggaatgacacatccgcagcgagggcggatcccacggtggcgcagaggtacggcgagcaatcgcagattacacggcaatccttgcggtctcggactttggcacaccctttccacgatcacagcgaaggtccagggcagtggtcaccgtcgaattggtcatgg

SEQ ID NO: 15322 - DNA, 511 bp, Zea mays
  Coding DNA Sequence Number=SeqID_919
gacctcgctcacctggttaggaaaagccagcaaaaacatttggaccattccaccaaaccaaacaaagccgaataaatcagtccaatatgttgtccaattgacaccacaaacatcagcatggtcgcctccaccccaatatccaaccaattggaccattccaccaaaccaaacaaagccgaataaatcagtccaatatgttgtccaattgacaccacaaacatcagcatggtcgcctccaccccaatatccaaccatgacatacccacctcaattctcataccctcatacatacacacccacaccgtatgttccaaataaaatatggggcatactatcatacccttacaggatgccacgacaccccacctggggggcacaacaagcatatgtgtttgacaggttaatcccaccagtacaagaccagttgagtctccctcaatctggtcagcatgaacaactccaacaagatagctggaatacttaccaaaaaggtcgatcaattcggcatggg

SEQ ID NO: 15323 - DNA, 535 bp, Zea mays
  Coding DNA Sequence Number=SeqID_920
aacacaagacatgattttcgcccgtcctcgacttcctccagcgttgcgcatttacctagagatcttatcatctttgttaaaatatccacaaacgcaacatgcctatcatcacggattacaagctccccaattcggcggacgccttggacctgcccgccgactcaaactcgccatttttcatcgccttcctcgcctctcgcgaccccagtacagggaggccttggtgcccagatgttatagcggcattgccgtacctcgaagctactttctctgctgagggcagtcctcgtgccgctttcattgaagtcggacaacgacctgaatggagagatccccgtaatgtttaccgggctaagtggaatgtaaacaatactcctactttggctcgctacgaacgagttgacggcaaggtgaaggaggttggtcgtttagtggaagccgagattcttgattcaaaacgactcaaaaattttattactagctcatctgcctcattatgagaagtggaacattgattgagtactgtccggctgtc

SEQ ID NO: 15324 - DNA, 580 bp, Zea mays
  Coding DNA Sequence Number=SeqID_921
gggacaagaatttaccacctctccatccatctcgttgcctgcctgcctgcctcgggctgcgactccactggacgaccctacttcaccctggtcttccaccccaccccacgcacacgaagacagagagagccctccgggcgtcgattccgccatactgccaccattactgacgccccctcaccgcctccgggcccaacgagcaagccagggaaggggagccgaggcctcgcctacgcctaggcacgcccctccccctgcgcgacatgtcaggggaccgctcgcccacggtagaacgccggtgcagagaaggggaatgtggtggcggcgtcggcggcgacgacgaatcgagcacaggggcgttcgtcgtagatgttgtagaggaagccaagcaggggcggcgcgccgtggaatctgcggtagcggcggaggaagatgcggctagagaggagcttccgccaagccttgcagacaagggaggcgcgcacgaggcacgctgggtcatccggtgggaggcgaaggagaatctcggcggtggcgtcatcgattagatccggcggaggagacgccatgccgtgcacgg

SEQ ID NO: 15325 - DNA, 491 bp, Zea mays
  Coding DNA Sequence Number=SeqID_922
caacaagtcaatatggccgacggctctgctttgtgcattattatcattactttattcataccacctctcggcgtcttcctgatctcaggctgtagcgttgacttgctaatcaacatccttctcaccattctcggatacttcccaggccacatacatgcctattacctagaatatgtgtattaccatcgtcgcggtcttgctgctggcggaacgacgtttgcgaagcccgctacgggagtttattccgagcggattcagtcgggaggtcatcatcagcagacgcaatatgggactatacggacttgatcgagcgtggcttattggaaagtggctagtcattagagatttgcagcttgagtctttgcatgtctagttaggggtgggagtttgggtaggttggcagtggtggatgatacctatttgttatggcgtcggtttgggaggttttgtcgaaagctagttactgggttacttgatattggtgcccatta

SEQ ID NO: 15326 - DNA, 550 bp, Zea mays
  Coding DNA Sequence Number=SeqID_923
atttcttcgtccaagctagccaatgttcaaagcttacaaatctcaaactatacttgatgacgaggcccccagagagcatcaactgttgtcgggtattttggtgggagaattctggtatcgagcaggtcctacagctggagcaccagactcctctacacccctgcctcgacggcggcagaccatattctgggaagagaaaccaattgcatttgtgcaatatcctcgccaagggggtaaggcatttgaagaatctctttattgcctcggacttattgtgcarcarcatcataacgtctaggaaggmtggagaatcttttctagtcgaggatcgcaccatcgccattgtccctccacgaggatcagatttcgaccctgcatgtctcctttccgagaagtgctgttctgggaaccatggacctggagttgttgttctgaggtcgagctgcgcgacaagctgatcgccttccgtgctcgaacgcccaaagctcgacgccttcgcgtggtagggcatggcaaccgtcscagattatggacggctggctacagtgcc

SEQ ID NO: 15327 - DNA, 334 bp, Zea mays
  Coding DNA Sequence Number=SeqID_924
gaatttatgtataagggcatcaaccatacttagggcttgttcagttaatccccaaactgagaggatcggatcccctgcaacaagtcaaaactcccctccagcccccttgacttggagttcaactgaacaaggccttattggggaaacaaaaaccatttgagatttagtagttaatcagcattatgcttattgtatctttcttccttctatggtagcaaacggccaacaagttttgtcccactgctttctcaagttgcctactaatgtttcatgagatatgacttgatgccgatttacaatatgttttgcactgttaccaggaaagggatgtcaa

SEQ ID NO: 15328 - DNA, 593 bp, Zea mays
  Coding DNA Sequence Number=SeqID_925
agctgttctatagcgacactgggcatgcatcagcagctccactgctgaggggctatgccaaggtcgagcctctgactatagctgagctcaatgaattcggtgacaagaatgaagaagagctcagacaaagggttgtgctacgtttcttgctccaactgtaccaggaagcttcaatgcactgtctcagcctttacatgtgttcactgcaacaatactaatgctgttggtttcctttgctacggtgtggaaatggtcattgctgatgatactgctgtagagtctatttgtgtgttttgacggggtaatgatgacgaaactgcataacatgagagtctatgaagatgatatgtctggtgccaactcagtacctgctaaggcagcaccaaatacaggagcaggtccaagtggtgtcaacacaactaagtctccagcaaggatgttctaagatggtcaagaaagcactcaagtcatagataaaaataatgatagatttggcatgagtatttcttctttgaataatgcttaggttttttttcctttgtttttgaacaagttcatttatgtttccctcctcttttgggtaatctatgttt

SEQ ID NO: 15329 - DNA, 562 bp, Zea mays
  Coding DNA Sequence Number=SeqID_926
actagtactctagttagatccctaacagaaggcctgccctggaagggaaaaggaaaaggcaagcagggaagaagatgccagccagccagccaaagtagtactagtacttgcaccagtaccactccactgaagtagaagtactagtatagtcaggctcaggcagtggtagggcagctccctccccttctatattctcccaatcaacgcccacagagaaaaaggaggcaggaaaagcagccgcgaggtagagaaaggaagaaaacatcaactccactcagagcagtgctctcccccctctaacggtgagcgagaggatcgatggcatggtgggcagggagcatgggcggcctggatctccgcaaccacctggcgcagttcggcggcccagctgccggcggcgctgccatgggcggcgccgagcaggccccgaccacaccaaacagcagcgggagcaacaaccacgacgactcctccggcgcagcgcaggactcccccaccgccggcgcgggggacaactcccctaaccccaacgccgccatctcaggctcaggcccgtcgggag

SEQ ID NO: 15330 - DNA, 524 bp, Zea mays
  Coding DNA Sequence Number=SeqID_927
tcgcgcagatcacggtccacgacagcgggaacctggacctcgccgcgtacagcgtcagcctcgtaaacgggttcaacgtgccgatggtgttgagtccgcaggcaggcggtgggcagtgtccggcgctcggctgcgccgtggacctcaactgcgactgccctccggacaaccgggccgccgaaggcaccgcgtgccgcgggcccgcggggtacttcaagaaccgttgcccgctcacgaggacgacgtcgaccgacgtggagcccgtgccgcagagctgctgcgcgcccggggagctcaagatcgtcctctgccagtcgtccatgctccagcgcggcgcctcggcggcggaggacaccgacatggtcatccgcactgtcgtcgccgacaactagagcacagagcttccgtgtcgcatgtccttctcgctttgccgtacttctacgccaggcacgatccgtcgtactacgtttcagttaacagtccgtgagcgttaattaaggggccagttttcatacaaatgtcgc

SEQ ID NO: 15331 - DNA, 597 bp, Zea mays
  Coding DNA Sequence Number=SeqID_928
gccagcttattctagcgaggcaacttttgatcaatcatcaagttacagtgtaacctgggcccagaagaaggatacagtagagttgcatgatgagcctgaacatgagcctgcgtatgagcatgagcatgagcctgaaaatgagtcagaacctgggcctgtgacaactatgcttgaaccagattcagagctgaaaccaaagtcatcatcattttatcaagaggaggaggaggagagagagagagagagagagctccctagtccccccccccccccccggtgtgtgtcacctatctttcctctcgcgtctctcccctttactcagaaatggcgaaatcgaagaatcacacggcgcacaatcagtctgccaaggcgcataagaacggaatcaagaagccaaggagacaccgtcacacaccaaccagaggaatggatcctaaattcctaagaaaccagaggtatgcaaggaagcacaacgtcaagagtggcgagaatgctggtgtcgaagagtagatcttttgatcgtctgattgacagtttaagttttttttatgaatttcacttgtttagacaaaggaaccaatgttctacaatcaggga

SEQ ID NO: 15332 - DNA, 536 bp, Zea mays
  Coding DNA Sequence Number=SeqID_929
taatcccgagactcagagcgttgttgctctggacgacgggtttatttcgggtaaacgcgaggtctcttacgcaaagttacaaggccgaaggggtatcgcgagatcctagctgttggattagatacgggcgcgccagattaaatcattattcatgcgaaccggtacggaatcgcgtccgttggatccgaatcaaacggtgagggttttattactctagatctatctatgtccgtccgatccagatcgacgaaccagatcaaaacgtggtgaaagggtacgcgggacctaatctcaaccctccatcctcgcatcaacggtgagggagcgttcttctaccttgctgccaactccggcgatcgtgcctagcgatacggtggcccgccatggctgagatgcctacaacactaatcggtacacggttcctatgtatctcgggtgcgaaattgaattaagtggatggcgaactcgaagagcgatttcttaccccaggtctggcagtgcctagctcgggttacggcgcgcggtgaagtcacgac

SEQ ID NO: 15333 - DNA, 585 bp, Zea mays
  Coding DNA Sequence Number=SeqID_930
atcttactcctccaaaatcgacgtttttcgccaaaacactgacgagcaccgacgtcagtaaaggcggtggatttttcgtgctgcgtaattgggccgagatgaacttcccaccgctagacttcacggctgagtatccggtccagaccctaactgctaaagacatccgcggagagacatggaatttccgacacatctacagggggacgcctcgccgtcacctgctgaccaccggctggaacacttttgtcgaccagaagaagctcatcgccggcgattcaatcgtattcctccgctctgaatccggcaacctctgcgtcggagtccgccgcgccaaagtcggtggcgacgacacggctagaagggtaacggtagaggcagtgacggaagcagtggagcgtgcagcgagtgggctagcgttcgaggtggtttattaccctctcgctaacacgccggagttctgtgtgaacgcggctgatgtgagagcagcaatgcggatagaatggtgcagaggcatgaggtttaaaatggcatttgaagcagaggattcttctagaatgtccacaggcactgtgtctgctgttcaag

SEQ ID NO: 15334 - DNA, 496 bp, Zea mays
  misc_feature (225)..(225): n is a, c, g, or t
  misc_feature (230)..(232): n is a, c, g, or t
  Coding DNA Sequence Number=SeqID_931
atggcttcctgtctgttttgccgccgccgctttaccactccagactccactcttcttgctctcccctccccccagcccgtcgataaagccgaggcatcgggactgcggcaggtagaaggagcacccattgattccgcatctcgtgccaggctctccccaccgcactcccacgcctgataccctaccattccgccgccgaatcgacttctcctcctctgaacccgngttgnnnggcggacggagatccagccggacctggatcggtctactccgacaccgtatctccgggtaattaaaaaggtccgctggctaacttcttcatctttttgggaagataagcaagcctgcctctcagctgattgttcggaagaagtgggagggatttcacgcttcatatccctatatatcttcctcgaggccgaggaacgcactgtgagaaaaagggagtggacaggggctcggtcactcatgagctatggacagacacggctatgcg

SEQ ID NO: 15335 - DNA, 540 bp, Zea mays
  Coding DNA Sequence Number=SeqID_932
agacccgcctctaaccgtggttgagcttctgcgcgcacagttcacgtacaaggggtcaagcagtctcattagctgcgagaagcagacgatccgaatcgagtttttaaaccttgcaagtgaccgcacttgtacccaccatagctagcatgagagacccagtctcaggacaagtgaggaggaaagtccgcgcccggcttcactcagcacacctgttgattgcgttcgcacccgggtccctaaaacccaggtgtgacatgataagaccctgaagctgttctaatggaatgcagcgtcagatcccatagacctttggattaaggtttgaataagcacaagaagggagaaatatcccttttatcccctaattgcatggaaaacagggccaatcacttggtaacggtgccaaagaatctccgaagcccttggttgtaggttttattttgatgaagtaaagatgaaggtatgtgaaacctttgtttttgagtaggtaaaacatatatcttatttttactagcatgtgtgctgaaatcgagggctaaa

SEQ ID NO: 15336 - DNA, 511 bp, Zea mays
  Coding DNA Sequence Number=SeqID_933
atttgcagacccatggtgctgacgaagaatgcactccgcattctctacaaatagcttggcaccttgacacctagcttcacctccctcctcctggcccagtcgtcctagccatcaaaattcagttgagggttcttcagttcagccatgaagcttgagatgacagcagcggccatggtcttgatcctgctgacctcgggcgccgaggccaaggtctgctactcgcggagcaggaccttcaaggggtggtgctaccacagcatcaactgcatcgccatctgcatcaccgagggcgacaccagcgggttctgccaggccggggcctgcatgtgcacttatgagtgtctcaatggtgtcgtcgccggtggcggcggtggcggcggacagcatccatcggttggctcatcgcgtggtggtggtgctgaggctaaagcagccgtcccatcagtgtagagcttctgattctggcggggtgatggcagatggtgcactactactcttccgtgcacatgct

SEQ ID NO: 15337 - DNA, 153 bp, Zea mays
  Coding DNA Sequence Number=SeqID_934
atggttgagcattattggtgtcatattttgtccggtctatgtgtcaaccgtgaagcttttaatccaaatcctttcactctttctgcctctgtcaagtctggggcaggcaaagaagaagaccaaagaagattcgcacatctgcacatattattg

SEQ ID NO: 15338 - DNA, 420 bp, Zea mays
  misc_feature (28)..(28): n is a, c, g, or t
  misc_feature (31)..(31): n is a, c, g, or t
  misc_feature (41)..(41): n is a, c, g, or t
  misc_feature (55)..(55): n is a, c, g, or t
  misc_feature (60)..(60): n is a, c, g, or t
  misc_feature (71)..(71): n is a, c, g, or t
  misc_feature (73)..(73): n is a, c, g, or t
  misc_feature (112)..(112): n is a, c, g, or t
  misc_feature (126)..(126): n is a, c, g, or t
  misc_feature (129)..(129): n is a, c, g, or t
  misc_feature (139)..(139): n is a, c, g, or t
  misc_feature (143)..(143): n is a, c, g, or t
  misc_feature (154)..(154): n is a, c, g, or t
  misc_feature (182)..(182): n is a, c, g, or t
  misc_feature (190)..(190): n is a, c, g, or t
  misc_feature (195)..(195): n is a, c, g, or t
  misc_feature (208)..(208): n is a, c, g, or t
  misc_feature (212)..(212): n is a, c, g, or t
  misc_feature (214)..(214): n is a, c, g, or t
  misc_feature (222)..(222): n is a, c, g, or t
  misc_feature (233)..(235): n is a, c, g, or t
  misc_feature (238)..(239): n is a, c, g, or t
  misc_feature (243)..(243): n is a, c, g, or t
  misc_feature (245)..(245): n is a, c, g, or t
  Coding DNA Sequence Number=SeqID_935
gtaagatcaccagctgcgatttcctgtnggntcctataggnttgaagaattgggntttcncattccgaagncnccgctggtgaagaggtacgggggaagaagggaagctatnggagctcgtgagcnttntgggaaaatngtcnccgtagcagcncttgcagaaaggccaaggagcataaggnggcaaaanatttnggctgccattggnggtncnctattgtncgttctatgtnnntanntggncncaataatatgtgcagatgtgcgaatcttctttggtcttcttctttgcctgccccagacttgacagaggcagaaagagtgaaaggatttggattaaaagcttcacggttgacacatagaccggacaaaatatgacaccaataatgctcaaccatccattaggattcacccaacata

SEQ ID NO: 15339 - DNA, 193 bp, Zea mays
  Coding DNA Sequence Number=SeqID_936
cctgcaggaccatgaagacgttcgacccgtggccggtcttcttccgccgggagtggaggcgcaactggcccttcctcacggggttcgccatcaccggattcctcatcaccaagatgacggccaacttcaccgaggaggacctcaagaactccaagttcgtccaggagcacaagaggcactgactcgagaccca

SEQ ID NO: 15340 - DNA, 193 bp, Zea mays
  Coding DNA Sequence Number=SeqID_937
tgggtctcgagtcagtgcctcttgtgctcctggacgaacttggagttcttgaggtcctcctcggtgaagttggccgtcatcttggtgatgaggaatccggtgatggcgaaccccgtgaggaagggccagttgcgcctccactcccggcggaagaagaccggccacgggtcgaacgtcttcatggtcctgcagg

SEQ ID NO: 15341 - DNA, 41 bp, Zea mays
  Coding DNA Sequence Number=SeqID_938
ttgctcctagttttttttcttgcaattatatgtatttatat

SEQ ID NO: 15342 - DNA, 567 bp, Zea mays
  Coding DNA Sequence Number=SeqID_939
tgatgcaactgaggcggactaccatgagactgctcctaatgactcttggagatcaagggtgcgagtactatgccagggatttccatggcggtgcggcttccatcaaagtacaacaagctgatacccctggcgcaggtgacgcgttcgttggtgctctgctccaaaggatcgttaacgatccatcctcgcttcaagatgagaagaacgcttgtggagtcccctaaattccctaacgcgtccggaacggtcacctcctcaaagaagggggcgatcccgtcgctgcccaccaaaagggaggtcttgcagctaataaaggaggcttggatcatcatcgtcctgtccgccatggttttcaccagcctttacttcttcggattggttcggattctcacacccccccgaacaattcatcggtctgccgcttcttactaaaccattttgagtgccctagtctccccttgtcaaacgcgcgctatctttcataatctctactggggaccagccgagcctttttttacttatgccagggggggttccaggcgatatgtgagttgtccatccatgcct

SEQ ID NO: 15343 - DNA, 395 bp, Zea mays
  Coding DNA Sequence Number=SeqID_940
ttgctgggtgcttttttgctatcgaaacagtattacggccacttcgagcagaaaattctccaccatttactactgctatgattatattagcatcagttatatcatcaactgtttccaatgttctgctaggggaaaaggcagcatttattgtgccgacagctgaaactctaccttattctgggcatgctttgcgttctgattatttttggtgttaataaggtagttgtttcttagttaccttcaagatatagggaagtatgtgttctcaccttatttttggctctaattttcatccatatttttgagataatttcagtctgtcatttttgtgatacatggcctgtacgttttttgtgcttttgctattttggggaacattcatgttagtgaatatc

SEQ ID NO: 15344 - DNA, 598 bp, Zea mays
  Coding DNA Sequence Number=SeqID_941
agagctttgaactccggcgaggacccgcaggccgcgggcgtgcagcccacgaacggctcgatggtctacctcggcggcgagcaactcgccacctcggtcgccgccgcggcccgtgcgtcgcatctcctcctcctagccgccgccgccgccgtcaacctactcgcagttcttcaagaacgcttgcccgcgcgcctacagctacgcctacgacgactctacctccaccttcacgtgcgccaccggcatcagctacgccatcacattctgctgcagtggagcctacggaaaccccaacacgtgccgcccgtcgcgctgctctgagcttcgttcccgcgacatggccgtgtgaagtcggcggctcgagtctttgtcctcttccggcgtgacgggccagcgataaaaattcgacaaccagcagagaggctcagacgagacgagtgacgccggtgctgcttcgcctacccgagaaaaaaaaccaatgaaatataggtagcttatggcgtagggtttaggaaaactggtagcatgagttttaacctttgcatttttttccacgcttcctcgatttgttgagccacccgaaaaagggattctatat

SEQ ID NO: 15345 - DNA, 435 bp, Zea mays
  misc_feature (214)..(214): n is a, c, g, or t
  misc_feature (217)..(217): n is a, c, g, or t
  misc_feature (219)..(220): n is a, c, g, or t
  Coding DNA Sequence Number=SeqID_942
aaggcacgatggtctatgcttaattttgcttgaaggccctctttggtttgtgttattatttttcccgtctgtgatgtcagtcttcctagatttagccatttagggtattaggtatatcatatatattcatttgtaactactttccactgattggctataggtccgttttccttttgtaaaagtgtatcaaggcacgatgatctatgcttccccnccncnnaaaaaaaaaaaaaaaaaaaaaaaaaaaaaaaaaaacctggttctccatccggtcagaccaatcaacaaagtgacgcgagcacgagcatccatcgtttccccttcttccccatcgcgtgccctcgccgcagccatcttccatgggggaccagctcacggacgagcaaatcccggagttcaaggaggccttcagcctctccgataggatggcgacgg

SEQ ID NO: 15346 - DNA, 457 bp, Zea mays
  Coding DNA Sequence Number=SeqID_943
atctttgagccgcacgggacagcagatattaattttgagagctgtgaagcagaaaactctaatctttggaggagactttctgaatccgcatcaaaagttgagtgtgaattgtttgtatacgttccagtgccaggattcaattcaatccatcctctccgatccatgcgatccatgcattccctgtaccttctatatgaaggattgtaagcaagcatgtctgattgtaagctatgttacttgcagaatgttaaatggaaacaacacaggaagctgacgtggagaagaaaaatgaaccacatgaagctcgtgaaaaggaattcaactcataattttttctacttgcaaagtttctaatgaagagacttgtactctatttttatgttatattgtctatttgtacgtgtgaatggagatgatcttatgtgatgtgatgatgaatagattagctttgttggat

SEQ ID NO: 15347 - DNA, 529 bp, Zea mays
  Coding DNA Sequence Number=SeqID_944
gcaagagttccaggacctgagaggcaccatgagcaccgaccaggtcagcgaagggctggggctgcacgacctcaggaacaggatctggcacatacaggggacctgcgcgctccgcggcgagggcctctaggacgggctcgactggcttgcgtccgccctgaagcagctgcaagaatcgggccacgcgacttcggtcgctggcccttccatctgatccagcgcaagtgagctcagtgcctcagccaactgacagcaagcccacaagaatatgctccagcgcgagcgcattcctttggtgggtgtggctgcccgctggtggtggtggagttccttcggtcggtgttgccgtgttggtatcatatgagccagttgttcatccggcagggactcgcgtacttttttttctctcctgagattgtttgtaaattgttgaacggatgcaatgccggcgatgttgatcttgtgtgctggtggtgcacgtggttgttttgtctgcttttttttgcaatgacacagaggtcgtctgcgg

SEQ ID NO: 15348 - DNA, 282 bp, Zea mays
  Coding DNA Sequence Number=SeqID_945
ggactttcgtcaggccgtatgcatgttcttcgtcaggctgattccgacgaggatgatgttttgacgttagatcagatagaagctcgtccagaaaaaaaaaatgctggcggaagttaagcttagctgctgatcatagattgtttggaagaaaccatttctgaatcttgagtgtattgtcttggctagtccatctgacatgacacgagagttggcaagaatttgggtgtgtttttgttctcagcagcattaacaatggtggagctactcggatatagtaatgaa

SEQ ID NO: 15349 - DNA, 165 bp, Zea mays
  Coding DNA Sequence Number=SeqID_946
ccggtggaccgtcgcgggtttgcagcaacgacatagaactcgtcccagagacttcacagttcagggcctctgtccctggtcgctactggattgagagtcttcactttttcattcagtgtcccgatgttcgttccgagattttttaggcttgttgtgaagtcagct

SEQ ID NO: 15350 - DNA, 280 bp, Zea mays
  Coding DNA Sequence Number=SeqID_947
gcaagctggccacaatgctgctaatggtaaaagcaatggagctggttatcaagcgtctcgtctgggcaagatttcgcagtaaccacctggtcctattaacaatatcctcttcatccagatcttgaaagaccagacctcgagcattatgctccagatcctgttccagcagaaaccgggatttccgggaagtccgtatgattgaagccaaaccagtttttgcatttgtggagtttgagaacgacggccagtccatggtgactatgcaggctctacagggctt

SEQ ID NO: 15351 - DNA, 367 bp, Zea mays
  Coding DNA Sequence Number=SeqID_948
ccaatctcattttcacccatgtaaacccaaagccatgcaccaggaagggatacaggtgagatccatagcacaaaggctcgcaattaggacaaaatatatggaccacctaacaattggggggcaaacatggggcaaatgactcatccttcccttattcgccttaggtgatgtctcagcggctggattaggacaagggtctgattaatgattattgggcaacatcactccacgggtcagtggcttcaccgtatcaaaaggtaccacgccaagaaaaagcaaaatgctcccgagtcccggcctggtttccgcccaaccaagggccaaataaaggtgcttttacttgtatatgagagcatctctgccaccc

SEQ ID NO: 15352 - DNA, 578 bp, Zea mays
  misc_feature (398)..(398): n is a, c, g, or t
  Coding DNA Sequence Number=SeqID_949
gttcaggttcaaactgaccatcacgccatgaggggagagtacactatgaaatactccttatcaattgcaataacatgtcctggatgatccctaactcattccacgcagtatcctacgatgcattttctccatatttgctggacctccagtggattccaatgacttatgtgccattcaagcccaacaagaagcttctctactacaaaacaatatattgagaccacctacactatttagagcacggggcgtatatagctactatgtactccctttcttctataacgaataagattcaaaggctcacagtttgtcctaaaataaataatattttacacacatatgaaagatctgtctcctaatatgtaagtttatcataggtgcttgcaagcaatagcgtngcgggtccaatatatatcctctacaaaaggaaaggagataaggatacagcttcttttgccaacgttcctaatatatctgaaaatttctaggaacttgtttattatgggacggatggagtatgttaaagatgtatgttagtgtttcattcaaaactgtcctatctgttactaatgctatat

SEQ ID NO: 15353 - DNA, 534 bp, Zea mays
  Coding DNA Sequence Number=SeqID_950
aaggtgattgatctcgcttaactgaggatgcttgctggtcacggagccccatacgccagtgccgtcccagcaacctgtatggaagctgctactgggctatctgcccaatgaccgctcgctgttggagcaggagctggcagagaacactgggcagcacgctgacctcaaagatgagtgccatacaaaccctgtagatagagcgcaacaggtgccaacagtaggccaccacaacttaagcgcagagcatgttgacaacggcttcctgctcaggtcagagctgacccgagaggagcaccctttaagccttgggaagaccagtgcttggaattagtatttagagtacttagagattatggagcatattgacctgtatttaaagttgacccactttgacatgcaattttttcttgtgtgatttgtctttttcaatggcctattaatgattttttatatattgactgttaattttttttcaagctttatgttttattttgatattttcatgtgttgatttgttatatgttacctcttctt

SEQ ID NO: 15354 - DNA, 438 bp, Zea mays
  Coding DNA Sequence Number=SeqID_951
gatgagctcctagcggatggctgcatggctaatgctgaggatatctataagatatgaccagatgataagacgccgctgcgcagatcctggctaattgatgccacatgccaatctcacattttcgcgtgacctgtgtatcggtcaccagagaaatactatgcttcctacaatttcatcaaaggattggctcgacatagactctgggattgccgatcgtgtacatttcatcgctggttcatttgtcctgtctgcagaagtaattaggcacttgaaaagctacatagctgcaaggagccgtggaagtgacatggcagtcattgcgaacatcgagagcatcgactctctaaagaactgggagagatcatcgagcgtcagaggcgccatgtagccaaggacatggggcgcagatccctggagcagtccctcgatcagcaagat

SEQ ID NO: 15355 - DNA, 498 bp, Zea mays
  Coding DNA Sequence Number=SeqID_952
tttttgcatggtgtgaattaagatcaaacgaatccgagcccttccaaaccctaagctcgcctcccctcccccccaaacaccaccgcgcacctatggcgaagtacggcgagggcgacaagcggtggatcgtggaggagcgcgccgacggcaccaacgtccacaactggcactgggcggaccgcgcctgcctgaatgggcccgggccgcggtttttttcctggttggggggcttaacattcttgaccgcgtgggcggcctcaggctccgcaccggcgcgctcgacaagcttggtggcgaggcctacctcaacctccgcaagggccagggcatcccggggtaccagctctcgctcaccctctcctgggaggccgaggccgcctcggagtccggagctgcgaaggtcgccggcaccgctgaggttccctacctcgccgacgagaactctgtcccaggtcccctaccttcctgttaccgcccgcgtccactagtacctatttt

SEQ ID NO: 15356 - DNA, 446 bp, Zea mays
  Coding DNA Sequence Number=SeqID_953
aatctatcaatttctatgctggtgtggatttcccgcagaactgaagattacaacgaagaagcatctttacaagtaaactcaacacacgggtaaaacgcaccaatcgtcgggacacatctctccacttccagttttggagtggaaaccccccaagaaggaagggtatcaggtctctacagcgtcgtcatgggaagcacacacatgccgtccatcacaactctccctctacatccaattgctaatcggaagaataagaacgctaccgaggcccgcggccatcagagaaaaaattgcggctgaccgatctttgagagcgggggtggcggcgccaaaggcgagcaacgcgggctcacgttgtctgaaaaaggcagatcgaggctcccacgtaaatgaggtatgagagagagataaacagagtgcaaatcttcctccctaaatgcggagag

SEQ ID NO: 15357 - DNA, 438 bp, Zea mays
  Coding DNA Sequence Number=SeqID_954
ttccggagagttacatagcaattcatggggatgttccgcagaaaggccgtcttgcattggtatactggagaaggtaggaatgaaatggagttcactgaagctgagagcaacatgaatgaccttgtgtttaagtaccagcaatgccaggatgcaactgctcatgtcgagggctattagtatgaagatgaggaagaacctcaggaagatgaggcttaagacagtgtagtagtgttgtgcaggcgtgttcttgtatgtgtggtctgctgagaaactctgcttaacgttgggttttttttcatcatcccttgacctggacatccccttcgggaaaaaaggattgctttgggggcactctctggcttcgtggcttatctcttctagtttagggattttatttttctgcatgttttcactagtgttcacatggtggtcgccctt

SEQ ID NO: 15358 - DNA, 205 bp, Zea mays
  Coding DNA Sequence Number=SeqID_955
agcagcagccgctctacaggatgaaaccttactacctcctcgcttcgctacgacataatatcttctattatggcgcctactagctgcactctactcgccgttgtacaacaacgtcactactaaaaccatcctgtcaccacacatattagtcttctagcacatcatccttttttcagctgctgtcatagcaacgaggacgccacca

SEQ ID NO: 15359 - DNA, 465 bp, Zea mays
  Coding DNA Sequence Number=SeqID_956
gaggctgtatcaagggcatcccaagaagcagctcagaaggaagctgctcttgcaaggaggaggcaagagaaggccatggctcttggagctgaacctgagaaaggaccacgtgttactcgggttctcataagattcccaacgggagagcgcacagagcgggggttccacagttctgccgccgtcgcttccgtctaggactacgtcgattctctaggctgcatgaaagcggagaagcccagcctagtttcgaatttcccacgggtcacatatggtccagagaagcaatccctgacgctggaggaggcaggcttgcatccgcaggggagcctgtttttcgagatagagcaatgatgctatggaaaaaccggagctggtaagggtgggggtcctttttggaatttccccggtccccgttgggttttacaaatgtataacacaccaaggagcatgcttgttcataaaaaa

SEQ ID NO: 15360 - DNA, 389 bp, Zea mays
  Coding DNA Sequence Number=SeqID_957
acgcgcaccattttcagcgaacataatattgggtcactacgtattttcaaggatgtaggagggttagtggtcccaccaaccaacaggtgagtatagtcagatgttgccccgagttccgcaccatcaagtactagccgatgcctttggtgcatgtgccgccccctgatgatagctcgccgctcacatgatgtatgggacatttagagttcgctcagtgcacgtagcttcacaagaaatctgttccaagacctcatttacaacacacgctgcaagaggtggcttatagtctggcagagcggcaatggtctcctgtggagagccgctggcatcgcaacaggcgcggcgcggggctcacccattgggccaagccgacggtgtactttccaagg

SEQ ID NO: 15361 - DNA, 372 bp, Zea mays
  Coding DNA Sequence Number=SeqID_958
aggctacggtagtgctccaggtgctggctcttcctcgtccagcaataacgttattgctgcgcacgcagcagtgtgctcggcagcgggagcatgcatcagcgtgtaccatcatggcatgtacgtgcacgtctgcgggcaacgatcgagtgtctcggtctgtgatcatcattccctcggccagacagaatcgtcgtgcagaaatgtcaccctcgtagatagtgttgggatgtccctacgcgaaccttatagagcgcatgcgtggtcccgttaaagggtgaattgaggtaagggctctcggtcatcctgctgcgtgtggcatatgcggtacatagtcccctgtgccggtagcaagtggaacgtgttcttcggttc

SEQ ID NO: 15362 - DNA, 470 bp, Zea mays
  Coding DNA Sequence Number=SeqID_959
ggtcatatccgaagggttactgtttatccataagggtttgattggaagtaagggtaatggggaggattgaaggggctagaatctctcactattctattttaaatagtgaggaattctagccccctcgatctccttcgttccattcactcccaaactagccctaaaaaggatgcgaagacttggtgtcattaacccatacacttgcggactagtgttggccttgtcaccgattgcatactactggccaactggtgtaatagctcaggacagtcaagagtaaaataaagttggtgaaaatatagttgggtctgaaccgctgaagtgagtggagactaataatttgtttttgtttccggtacttgattttactgttttgaccttatttttgtgtcactaatactcatcatgtatttgtagtcatacaggtatagattaaacgaaactcttcatcacacgcgaactgagcaaaa

SEQ ID NO: 15363 - DNA, 443 bp, Zea mays
  Coding DNA Sequence Number=SeqID_960
gggtcaacgatcaacttcattctgttcgacctgggcatggacgaccccccgtgggaccccccaccagtgttcattccggaaaggttcctgcccggcggggaaaccaaggcgctggacatccccggccccaaggaaatgaaaattatcccgtttggggcgggcaaaaggatttgcccgggcctcaggatcgctttcctgctccccgagtactttgtcgccaacctcgtaacgaccttcccctggaaaaaggtggaaaagggggacgttgatgtcccccccgaggacgctcagctccccgtcctcatggggaaaccgctccgggggggcctgcttccaaaaaagcatttgtttggttaatttttttcatcatcaaggggtaagtcagggggtcccccaataatttattaatgcgaataaaaatccagcttcaaagcctccaaaaa

SEQ ID NO: 15364 - DNA, 523 bp, Zea mays
  Coding DNA Sequence Number=SeqID_961
gcgtgcgcctaaatcctgtttagtgcgagggggagacaacaggaggatgaggaagaactgcaccttgccccctcctgcgcgcgcgcccaactaaaaaacaagccaaccgacttggaaatgctcttcgcaccgacagctggcccaccacaagtccacaagcaaccacaaaagacaggtgtagccttccaactggcaagtgaacctgcagttcgcaaagaagacaactgtagtcaacaattacgtgacaaggtgaccccttctgcattagaacctacatatatggaggagtcacacgccaagcgtgatgacgacgagccatcatacattcagacatcacgtattcacgtgctgtagatgagcaagcagatcgtatgcacaacctgaaagtgtcttttccttttgctcttcagggggcatgtacattgctgtttaatgtagaggctgttaaaatgcttaaataaggcactttgcaaaaaaaaaaggtatttgcaaaaaaaaaaaaatcgtggcactgtctcgtcgt

SEQ ID NO: 15365 - DNA, 355 bp, Zea mays
  Coding DNA Sequence Number=SeqID_962
aaacgatccacaaaaaagagcaccacaccgacggatgaaccacacgggacgaatgaagcaaccttaataagccgtcccatgtcaaagcagcaaaaaaaatgtagtcgtcaggctggtattagactcctgcttggtctcgccagcatccccaggcttaaaatggcccgccccccgtaagggaaagataaagctgtcataaatcgtagccccaatgcattatgtgtggtggtggtaataagtggacaaacttggattggatgttgtcagctgtagccagtaggcgtccagcatgtgacgttccgccacagaaaacgagaacaacggaccgcgcgtgtgaaaaacacccacatcacca

SEQ ID NO: 15366 - DNA, 372 bp, Zea mays
  Coding DNA Sequence Number=SeqID_963
tgtgcccgaacccgtaggaaaatctttgttttaaagcctggcacccctctttttttttttaattttttttttttttttttttttttttttttttttttttttttttttttaacgtatcctaatataataaatagagatagagatgtttgtccgaccggcaattaccaaggtacacagacgaggactataaatacttcaactaagggatgctgttgacaaatcacaatcgatatagaacaaaatgatgggcgacacaataacattttgcattcaatgcatgcaggaagcgaatcgaaccacatattcgcttgcatgccttcaccatgtacgattgtgatttatatggccgactccaggctctgcaatgaagga

SEQ ID NO: 15367 - DNA, 480 bp, Zea mays
  Coding DNA Sequence Number=SeqID_964
acgcgtccgcagttcacttagatggagaagatgctgttttggttaagcaatcttgtcaatcaaagcaatagtgaaaatggatccagtatcccacgaaaaggtaattgtccgctcggttcgtgcgttgcacaaactcaaggaacctgcagcacgatccttgatcatttggatgtttggagagtatagcttcatgggggatctcactacaaagattgttcctcctgttctcaagtatcttgcgtggtccttcgttgctgaagtgggggagacgaagcttcaaatcctaaattcttctgccaaggttataatgcgttgtacacaagaagacatggaagaattcaaaagcatagttgcatatgtgcattgagtggcctacgtgtgacttgaattatgatgttccggatcgggcttcgtctactatcaagactctggcccggctacatgactcaccaagggtcctcacatcaacctcagaatggt

SEQ ID NO: 15368 - DNA, 413 bp, Zea mays
  Coding DNA Sequence Number=SeqID_965
attggtcaccactggcatcccaatgctgctgttcacgcagtggttgaagaacagggacgggatgataaagttatagtgaccaagtttcctctggtacttcttcttcttcttgtacttgaacactataactttatcacagacagccaaacacaaggttaagaatcacaggcataagtggatacgaagagtaccctgctgacccaatacttgaccctgctgcagctttaagctaaactgtaaagttatgttggtacaaatccggctggttgttcagacgcttttatgattaaatcttttttattcttctacaggggggtaacactccccacaaaaagcttttcaagggatttatttcataaactcttattcttgttccatttcgtcttgtgttttctatccaatattatcacata

SEQ ID NO: 15369 - DNA, 434 bp, Zea mays
  Coding DNA Sequence Number=SeqID_966
gcatcaaataccaggcccccaaagtggtgccgggtccccccctccccaaggtccagcgcccggtgtgcatattttcccaacccccccagggtggtgggggtgttttcccgcatcaccaccaagtttgccctcatgtaccccaagggggggtttttgcattggtacgtcgccaagggcatgaagaagggggagttttccaaggcccccaaggacctgccccccctggaaaaggactacaaggaggtccccccaaagggcgccagtaattccggtcccgaggaggaggaaaactgatctgcttgcataaatctgtttgcctgtcaacccaggttttggttttaaaaaccctttgtttgtgtccggccccccctgggaaaagtttgggtgtttcctcccaccaccccttgttgaacggctcaagaatttgcatttgt

SEQ ID NO: 15370 - DNA, 216 bp, Zea mays
  Coding DNA Sequence Number=SeqID_967
cctttttgggctgattgatccctcccgtatggtggtccccccccgtgtgctacgggtgggtgtgttaaagtgaaatcgagcgccccccgtgttgtgggggggtacgtatgtatgcgctcgtgtaatgcccgaataaggggggctacgtaacccatcgtatgtaaacgtgtgggtatgcatgggcttgtgtatgatcgtgggccgaggcccgaaaaa

SEQ ID NO: 15371 - DNA, 526 bp, Zea mays
  Coding DNA Sequence Number=SeqID_968
gaaccaatcaagatacagcgatacttgcatgctgattattgctactacatgcgtgaagtgcgcactgttgcctactcacagcttgtggaatcgtacaagagtgcgacaatggaagtcatggctgatgtatttggcgtcacagtcgactttatagaccactaactgacacacttcattgccgctgggaagctcccccgccggatagacaatggggcgggcgtcttgcaaacgaccccacctgatgctaggaacgccttgtaccaggcagccatcatgcaaggagacttcctgctgagccggtgcctgaacctgtcaaaagttatccacctgtaggggaaagcccttcattcaggagcttgccttggttcatagagtgaacgggaggtgcttaactttcaatgggtctcagttgaaaaagcttttagggatatttgtgttctgagaaattgtgttccgccctttttagcccaactacatgaagccccaaaaaaaattcatggcgttgcttgtaaacgtctcttcatta

SEQ ID NO: 15372 - DNA, 461 bp, Zea mays
  Coding DNA Sequence Number=SeqID_969
ggcattaactatcacattccacataggttagggacacctgaacaaagggacctacacaggccggcccattgcaccaggctacagactcggcactaacggatggtgaaaccaaccctctgattgggggggcggcactcaatgccggcgacaaatgtctccatgggggacgcgtggccttttttggcaaaatatctactacttggtccaaaaacaggacgcctggttcgatgcctgctcggtcagaactgccaaggatgcatttggggatctaaccaccccgagcgagatcatcgaccacacaatagggaataagattcacggtcttaagggtcgcaccatgcaccatgaacccagtaatgggagccacatggtggctcttggcgctgattcacctcaccatggacattgtcatcaaccatggatctgatcgacacttggctatgtctcacggcggaactcct

SEQ ID NO: 15373 - DNA, 591 bp, Zea mays
  misc_feature (265)..(265): n is a, c, g, or t
  Coding DNA Sequence Number=SeqID_970
gggatgtttccaggtttctattcctttgggtacgcatgataagtgtcccatttcagtttcatttattgctaagcatggtggtgatcggtttttgttggataccactcaaaccatgtatacaaccatccaagagcaagtggagatactagcgaaatctagtgtttcaagtaaacaagcaatgaatgaagaagcagctgaagcttcaggtgtatagggtaatcctgcatttaaggaaaaccaatggcaaaagccagtaaattactantactgaagcaataaagttaaatggaaaattggctacatattccagcaacagagctgctgcctttctagaactaactagttcccgtcaggctgaggcagattgtacaagtgccgtcgcccttgatccaaaaagcgtgaaggcctatttacggaggggcactccaagggaaatgttaggttattacaaggaggttgttgatgatttcacccatccccttgttttaaatgttagactacccgtttagggtttttgttattccccttgtaatacccgttatcccccctgtgtaatgggtttggcccaattactccctcctattaatatcc

SEQ ID NO: 15374 - DNA, 132 bp, Zea mays
  Coding DNA Sequence Number=SeqID_971
cggagccattctctcgttatggacagtgtggctaaatcttttgatgctctgataaagcttctgtgttctactgcggatgatgcacggccattctccatgcgtagggggggtggcatttgaaatttagaattt

SEQ ID NO: 15375 - DNA, 409 bp, Zea mays
  Coding DNA Sequence Number=SeqID_972
gaatgaggccacacctttggcccatcgtagacgttaggcccgctccaaatgatatacggtttgtgtagaagcccccacaagcgtccggtgggcaaatatgcgctcctgatttcattagagtgagtgacctgctggggctgctgaacccttatgcccccttataattgccctttcgtcagcaagtatagcatttgcgagcatggagcacccagctccaatgcggtccgggaagctctaagaaactgggatggaaggtcaggccgattaaggatgacttttgcggaacccgttgagttgtgccagcaagttgggtttctcgagcccgtggagggattccgttttcctcccctgcccaacataatctagttagcaagggcgtcagtagtgtaagagcaattccctcggaacc

SEQ ID NO: 15376 - DNA, 580 bp, Zea mays
  Coding DNA Sequence Number=SeqID_973
tattgtttctgtgccaaagcttgtgtttcattgaaccatcaaaaattttggagaaagatcccattggcttcttcttggcaggaactttctttcagtcacagtctcattagacttcctgagcaaatgaagcatacgattgcccttcgtcatctgtacacagatgggtgcacaaggttggagggcatgcctccagagcttggacaaatcgcctcacttcgaacaattacatggtttgtagtgggaagtggcttgagttgtagtagtcttggagagctgaaggatttaaatatcggtggttcgttaatgctaaagcagcttgaaaatgttcctgtagggaggaggagtgcaggagcagccaaccttgtcgagctgcgggtgcccagtcgtaagaataagaaggaactgagacaactgtcactagagtggacaagtggtaaggaggagggactacagtgtcatgaggtgctagagggccttgaagctcatgatggactcctggctctaggaatacattactaccaaggcaccagttttccatcttggatgggtatgttgaaaaacatactcgatcgaccttcgg

SEQ ID NO: 15377 - DNA, 448 bp, Zea mays
  Coding DNA Sequence Number=SeqID_974
gttgtttttgaaccaccaaggaatgcgacctccatgggggtccccctttggggtcgggggggtaaccttttcatccatgttgattcaactgttggggctcaactcagggggcccgaagtttttgccagggattaatttcttcaaagtgttgccagaccccgaggatgggttcgccgtgttgtactgcatagggttcgaaatgatggccgcccagtggctagcaatgggagcctggtccatgcggttcaaagaggtgttgggggccccaaggcaccagcttgagagggggctctccctgggggttttcaatggcatccatgccctccctgcctgcacccttttgtccaaatagggctcctgggagttagattatattactgggatcccgccaaaggaaaatttgatcgggttacttggtaccccgcatcttcagccctgtaaaaaagaa

SEQ ID NO: 15378 - DNA, 565 bp, Zea mays
  Coding DNA Sequence Number=SeqID_975
gcagagcacggcacagcaaagcagagtcgcagagggatagatccgagcacaagcaggccccgatggcgacgacggcgacgaaccggcgggtgatcctcaaggagtacgtggagggataccctcgcgaggagcacatggagctgctccggggcgccgaggttcccctccgcctgacgggcgccgagccggccgggtccgtcctcgtcaggaacctctacctctcctgcgacccctacatgcggcccaagatgtcgcgcccgctgcgggagtcctacacggccgccttcgtcccgggcgacaccatcacgggctacggcgtcgcgcgcgtggtcgactcctccgacccgcgcctcgcgcccggggacctcgtctggggcatcaccggctgggaggactacagcgtaatacccgtggctacaccggcgagatcaatccgggagcgtgagtaattgcaggggaaatcgagagggggataggatctcacagccagaggaggaagacgagcttcctgtgttcctcggtctttcttctttctgaataattcctgtcctatgcatcgatgctt

SEQ ID NO: 15379 - DNA, 529 bp, Zea mays
  Coding DNA Sequence Number=SeqID_976
tcataagtggcgtaccctcacaactatggacctgacacagggactctttctgaacacaatgacccattcgatgcgttggtcctgatgcaggagcctgttattcctggctcgttactgcgagcatgaacaatcggtcttatgcccatgattgaccagggtgaaaaggatggcaagatattcgcagcctgggctgatgatcctgaatatcggccctactacgacatcagtgagctgtctcctcatcgcctgcacgagatcaagcggctctttggaggtttttagaaggatgggaattaagaggttgctgtggatgcatttttgcctggggccacaggttgagaggccattcaggactccatggatttggatgggcagtatattttgcaaagcttgaggcagtagattggaagcaactatttatttgggggtcttggaatgagggtgattttaataagggaaaaaacttccccctcgcccccaattttggggttggggacaatggcacaagctgggatttacttttgggacg

SEQ ID NO: 15380 - DNA, 506 bp, Zea mays
  Coding DNA Sequence Number=SeqID_977
ttatgggcagtaggctctattctgggtgcaactcaaaaagtagatatgaggtacactcggaaaatgggggtggttcgtattttagttgatgtgacggatgtgaatcacatttcggagtctgcagaaatagttgttggtgaagggctttatgagattttttcaaagttgatagggttctcaaagatgggaggtggattgataatgatattacgagaaatcaagatggggatgataagactgaaggtgagaacaaagattattccgagaagcatgattttgatttggccccgacggaggaggcagcagaagacacagtcatggaggatacttctaagcaatgtgatcatacgaagtctaatgatgtggctttggacttggagttggtggtacagcaggagtatcaggacgttattactatggaggcagcaacgtgtttggtttcagaattactagaaattgatgagcatgcagttttgaactcaagccttcttgtttgctccgttctg

SEQ ID NO: 15381 - DNA, 584 bp, Zea mays
  Coding DNA Sequence Number=SeqID_978
gtccttgtctcaaagaccttagacggctatgcatgtgcaccagataacttaacaggatctgtccgagtgtcccaaggaccccggataaaccacttacaaccaagatggcaagattaagtaacacaaatcacacacaccaacagtttgcagcggaaatcttattgccaaattttacaagttacaaaatttttacagtattttatcggagtgattacaaaagtataagtttgaaatatatgctagctcaagttaccatcctcaataagaatataaagacggggtatacttatataagaaggccgagcccaccggcacttaacaccatcattagcagcacaaaactataacctgggtaacactaggttagtgtttgttagacatcgatcacttgacgaccatcctttgtcttggtactcgttcaaattattcatcttcaggttcatcatccgcatcacctcgcgaatcagtccgcgcttggggtcgacttggcttgtcttccgcatcacgcgattaattaacgtaccacatcacaacccgatttggtagttgcctgaacgacgacagccttcagcttgacgacgaga

SEQ ID NO: 15382 - DNA, 234 bp, Zea mays
  Coding DNA Sequence Number=SeqID_979
ggcacagcggttcgcccaacgcgggcgtggcggcagttcctctctgccgaggcttttagttgtagatcaaaggccgccgcgcgcttcagctccgctgctgttgctgcggtgcgggggtactaagtgatttccgctatcggttttggcagtctttttatcagggtcgtcgtcgcgtcgtcagggagtctttgggtaattcgcttggcttgtagtgtaccgttcggcggtccagtt

SEQ ID NO: 15383 - DNA, 500 bp, Zea mays
  Coding DNA Sequence Number=SeqID_980
ttggtagccgagtttttctgcgcagccccagctgcgacatcgtctatttcgttcggtgtgctctaagtgttcgacgcaatgtcaatcagagacccccgtggttctgggccctgctctctgctccagctcgcccagtgggacccctggccatcgtcattcaagggactcccaaattgcattgagatgtggtgagctgattcgctatttttcctattaattttatggtcgtaaaataagccgcttcgtagccgtataagattaagttagaaatccccgtgttgcgaggtgtgcttcgaggaatttagtggccgaaaaaatttgaattagttctattttgtagaaaatagtatttcagtgccgggtgggttaaatccagtattttatgctattgtcgatcgctctgtcacccctaatggtgtccaaaacccgtaagctgaagtcgatgccctgctttagtcccccctattttttacgtttatgcccggttaaaagtcttgaat

SEQ ID NO: 15384 - DNA, 595 bp, Zea mays
  misc_feature (127)..(127): n is a, c, g, or t
  Coding DNA Sequence Number=SeqID_981
gcctcgttcggcagcagcaatggtatcgcgtcgcgcgcctcgcctgccgttggaatatgcgagcgtgcatgatgaccgactgtacgcagaatcacgtactgcttcctggccgcatatgcagaggtgntggatggccccccccccccgcagatggggcaccggggcaggggcagcggggagcgagcaccgtcagcatcacggtcgtcggcgcctccggcgacctcgccaagaagaagatcttcccggccctcttcgcctttctacgagggctggctcccggagcattttacagtgttcggctatgcccgtagcgagatgaacgaccaagagctcaggaacatgattagcatgaccctgacgtgccgaatcgacaaaagggagaactgcggcgacaagatggaacagttcctgaagaggtgcttctaccagtctgggcagtacaactcggaggaggggtttgcggagttagacagaaagctcaaagaaaaagaggtaaaatatctttttcgcttggtctgccaagataaaaggatcggacttgtaccaaaatgactgcacattgatggatttgaaatggctgtcatctcgaatgccc

SEQ ID NO: 15385 - DNA, 472 bp, Zea mays
  Coding DNA Sequence Number=SeqID_982
tttaccagtctgttaaaccaggatggtgtgggggggctgactatacatagattacacatgctgatcacaggttactgtacttggatctttagaatgtactcctggtttcgcttttttttatggtcacatcctatatgaagtgccttcatctctgagatatctttaacatcttcctgggggctgggcgcggacactcgaccacaaaaagtacaccatggctaatagtatctgttcacacctgatggcacactattaactttgataatcttgggaacacccatattatcattaacctcaatcctaacgatatgattgataccaatcttatgcaatatgttctctacctcgccgtatcttattgcccgaaggtgacatctaaaaatgtttccggtgtagacacttgtctaactatgactgctttaaataaatcttcctgcatgatgctaaggatgctacttactttatcatagtc

SEQ ID NO: 15386 - DNA, 578 bp, Zea mays
  Coding DNA Sequence Number=SeqID_983
gcccaggcacaagcagcggagagcaagaaaagcccccccgccgtccgggtaaggaaccctaataataacggggggggccccgcccccgcccaggggcaggcccagggatacctgatccggtacaccccttcccctttgccaaggtggaaggcaaccccgggggggcacaattctttttccggggagtcccggagttactacccaaccccggtgcgcgagggcttttaccgattggccaccgacgccaacaggctcaccaccttcttcagcgaggagaatcccaacgcctgcaccatcgtctgagactgagagcgacggccaggaaggaataacccgttgttccgttcgggcaacggctcgtcttcctttgggttcttggttgattggggatggaatcattagccaagaatccggttcttcttgtagggagtgttgtagataagaaaaaagcaggaaactttcggttcggccggtatgatgagatgtaaacttccttgtgctgctctgctgctcgccttggattgtcaatttgtcgttgttgtttaagccaaaagcagttataaccttacaataatgaa

SEQ ID NO: 15387 - DNA, 318 bp, Zea mays
  Coding DNA Sequence Number=SeqID_984
tttcctgctcaggtgtgggtggcaacatgaaagatctagtacccggtggaggaggaggcctttcggtccatccagcaccagtatgcagggcccaagttccggctctagctctctgtcaataaggccctcgccctccttgacatgttggcaggcaaggacgacgcatgatccccattggatctgtagtcgggccactcgaagatgggatgcacgaatgaattcacaaacaataatatcggatggatgggcatgtatatcgtcatgggcatgtcccctctacgagacgggagtatgcctcggtgtagtagtgttatatta

SEQ ID NO: 15388 - DNA, 489 bp, Zea mays
  Coding DNA Sequence Number=SeqID_985
ggaatttatttctatttgctactagaatatttttttatctagatcttagaagtgtaaagcattcattgttaagcttctgaatccggaatggcataaattatgctatgcttgtacttcttaccatcaccattctgttctgtccactgcgaatgaatctcttcaaatccgttttttccgaagacccggatcctccaccacccggatccaaccatgcatcgccagacaaagcaccggatccccattccccgcccccatcgaatgccaccgactccgctgccggaggaggcggccggcgaccgctggaacctcggcggcctcatcaaaaccctgaccatcgaaatcggaatccataattgagacctaccgccgcgatctgcaggaattccgcaccggtttgaagaaagagatcgaggtcgcgcagggttctctcgggaccgtgggccacgtcatcgatgagttcggaaacaccgtcgtgaaaggaacggctca

SEQ ID NO: 15389 - DNA, 439 bp, Zea mays
  Coding DNA Sequence Number=SeqID_986
tcactccaagacacaatacaaaagatcaaatcccctccaagtcccaaattcattccaaacacttagtggcttgtgagagagagatttttgtgttcatttgcgctcttgtcgcttggattgcctttcttcttttcccattcttattctcaagtgctttgtaagcgaggcaagagacaccaagtgtgtggtggtccttgcggggtcttagtgacccgtgagattaaggaagaaggctcactcggtctaagtgaccgtttgagagagggaaagggttgaaatagacccggtctttgtgacctcctcaacggggactaggttctttggaaccgaacctcggtaaaacaaatcaccgtgtttttttttccgaacacgcaggagagctgcgtatcattgaattaagaagaagggtctaaaattagaccaaatacaaacacaacag

SEQ ID NO: 15390 - DNA, 415 bp, Zea mays
  Coding DNA Sequence Number=SeqID_987
acgatgattctcaggcgcgtagctcggcggacaaacttcgatattgaaccagcgtgaccctgtggatggttcagctgcacagctgtatgaaaatacatgctatcaaatcacaatgccgctttgagcagctggaatatgcccaggacacaaggcccaatgcatggcagcagtttcaaaccacagggaaagccaaaaaggcgggggtcttctcctgtcgcatgagggagagcttctgagagtcacccgacgaccacataggttaggtgggtgtcactgcgagtggcaaaggcctgaccgactcccacaggagggagaagcttgtgctccttactggtgagctccggcgatgccgcggatgattgaccaggagtatactgaataaccgcccttgtgtttggatctagccgaacagaca

SEQ ID NO: 15391 - DNA, 322 bp, Zea mays
  Coding DNA Sequence Number=SeqID_988
gcggactaacaatttatttatcctttcaaccccataaaaatttggtcctttttactggcacttgggataattaactaaaaaaccccccccccccggggggtaattgggtacataacctcaaggggaaacacaaacatgccccccaaaaaaaaaacacgtggaaaatcccctttttttttaactccggccctttttttttttccctttgggcccaaaaaaactaggcgttggaggcaccttacccccaggtttttctcccatgcttacccaaccaaagccggccaaaccttggatgctcacaatttgtccttaaagggctcgg

SEQ ID NO: 15392 - DNA, 480 bp, Zea mays
  Coding DNA Sequence Number=SeqID_989
aagggttccacctttaggcgcagcgtgctggtaaaacggcaacaattgttgccattcaaccaacttgttttggcaaacccaacagcattttaccaacaacccatcattgggggggccctcttttagattttttatgagttatagttcaataataaagttttttgtctaatgtttggggcttcccaaaaataagccacccctccgcccgcgcgtccggggcttctagtctccaaatgggggtgatagtgtatttccccctaagatcggcagtaatgaggtataaatcctcgttggcgtgggctactcggttaattgagcattaacccccccaaacttggcgtggatggttttttcctaaataaaaaaaggaaatgtagttaaaaaaggataaataattaaataaaaaaaaattgatgaagatttttaaataaaattaaataatgggggggctgttttataggtgctaagttaaggtccgcg

SEQ ID NO: 15393 - DNA, 248 bp, Zea mays
  Coding DNA Sequence Number=SeqID_990
acgcatcagattccgtgtaacttatggacaaaacaagttaacaaggaacacagcaaataagcaaccagccactaccgatcgacgaccggggtgcctgtgtgtctacttcagtctgcacacactgtgcgagaccgagagcacaggtctagcaggtagctagccttccctcaagtgggaaggggtgggctctctctgttccatgacaagtacgaggggtctccaagcgccctttgtcttggtgacgtata

SEQ ID NO: 15394 - DNA, 412 bp, Zea mays
  Coding DNA Sequence Number=SeqID_991
ccaacgtaatgtcttaggcggcaagaagggccccgtaataaatccggcgcgagcgttcccgcccgccgtggtgggcccccgtcgctggagaccccaatgggtgtactggcgtagggcccatggtgggcaacgacctgtccggggtagtttccaagcacctatttgccggttcggccacttaggagcagaaagaggccgcacccaggtgcggccgccctccgtcgggggtagaggactacatgcatgcaggaacatcaggacgttgttttagtccccgctcctcggaatcttgtcaaaaaaaaaaaacaccttgcatgcgggcccaaatagccatgtgtcggggtgggtcaagagtacccctaatgtttcaggcaagcactcgtcccgtcttcttcctatgaccgggtttggt

SEQ ID NO: 15395 - DNA, 273 bp, Zea mays
  Coding DNA Sequence Number=SeqID_992
ctcgtcttggttttctcgtcttcttggtggactcagtgctccactaattttacacacatactgttgttggtacatgcgcgcgaaactgcacagccatattggacctgtccccccttttcgtacaggagatgatgccacgtgcctaatattatgtaactagcgcgatgtctgatcgtgcggcctgatgctcagcgatgacactaacatacatgtatggcactgagacgctagccgagtcaactcttcactgacgtgcgtcaagacccctatcac

SEQ ID NO: 15396 - DNA, 238 bp, Zea mays
  Coding DNA Sequence Number=SeqID_993
gtgctgctatacaatattcgcctgaaatgctcttctccttgtcatgccttattgctttgcagtgtgtattagtacttgagcggtttccatctgttacgtgtttgtgtgttagtagcaccagccttaagcgctaatgattacccattagttgatatgatttccatgccggtgctgtatatacttttatctcttcggtcttagcttcatgggtgtgaaattacgtttgcagggcactcaa

SEQ ID NO: 15397 - DNA, 410 bp, Zea mays
  Coding DNA Sequence Number=SeqID_994
tgccaaagtatctgctgtccgcgtcatgcctcgctgtcagtagctggtttaatatatggtaccgtttgtgttgtgtgtgcgtactacccagaactatgtaccaatcatgaataagtttgatgtttgaaattaaagcctgtgctcattctcttgacattgatagagctcgaggcatatgtgaaagactcctcgtggcctccgcacactcaactctgtttgggccctacttcttagcggcgaatagaagagaacgttctacaagaaccggcgttatagcaacaagaaggcttccgcggagtatgctctcatatatgaaaatgatgctggcaagaaggaaattcagctgcagcttgatattatgaagaagtatgcttctgttatccgcgtcattgctcgtacccagattatgg

SEQ ID NO: 15398 - DNA, 596 bp, Zea mays
  Coding DNA Sequence Number=SeqID_995
gatcgtatcgatcaacttcaagacaactgcacatttaagatgtcggacgtagaagataaccagcccgaggtccaggaggaggttgaggtttcggccgatgccgcctccaagggccagatgtcggttctggacgctctcaagggtgtcctgcgcctgtccctgatccacgatggtcttgcccgcggtctgcgcgaggcttccaaggccctcgaccgccgccaggcgcacatgtgcgtcctgaacgaggcctgcgaggaggatgcctacaagaagctcgtcatcgccctgtgctccgagcacaagatccccctgatcaaggtccctgacggcaagcagctcggcgagtgggccggtctttgcgttcttgaccgcgagggcaacgcccgcaaggttgtcaactgctcttgcgtcgtcgtcaaggactggggtgaggagtcgcaggagcgctccatcctgctcaactacttccagaccgagcagtaagcggatcgactatcggagttcgagtcgtttgttcgattagatacgatatacgatgcgatacgatgcgatgcaatgcaacggaacctgggatcgggatagatagggcaccaaaa

SEQ ID NO: 15399 - DNA, 407 bp, Zea mays
  Coding DNA Sequence Number=SeqID_996
gagccactatgggtgggacgccctttgcatacctgattggcacgggctctacgaggataaggaacagctatgctagaggcatctcgccaagcacttggtgatgcataccagagccggtgtgacaccatggaggcaataaacaatattcggcacagcaggctaaacattgaccgtacaggacgacgaggcacatcactgggtgccccagagaattctgacctgggaagagatcgaacaggaatacaatgtctatcgtcgaatagaacggcaagatgggagctttgaccttcaatcggagggtcaccgggccaacgagtgcctagaaacagcgtgccacaagaacactcaagatgagcctcctaactgacataccggcccttgagtctgatcgagacattcttttcccc

SEQ ID NO: 15400 - DNA, 321 bp, Zea mays
  Coding DNA Sequence Number=SeqID_997
gagcaggatcctgacccagtaaatggtagcagggggtattctgcacaccagagcctaggtcataagccactctccaagacaatgtgcatctcagcgcagcaagagctggttcaaagacctagatatctctatctatgtatcatcagccccatagctcagcagaaactgagatggaggagcatgtatgtagaatcactaaacgcacgggtggagaaggcactgtgccggtgctgcacggagaccaccgtgggaataaccacatggacgcacgagcctggcttgtacggaaagcggtcaggtaacagaccgaacaggaagcat

SEQ ID NO: 15401 - DNA, 310 bp, Zea mays
  Coding DNA Sequence Number=SeqID_998
atcgcggttatgtttctagcactcacaagaatgtcgcggaagggaaacgtcatgcctcttcatcatcttaggctcaggtgtagcgggtacacaatgacgatcgtagtggagccacggtgcttgatccagcgctgggtggagctcacacgtaacgtgaggcagcggtcatcgcagaggagatccgggcttgcatgcagagcgaccccagccgaagaccgagcacgaggtaggtcgctgccagtctgagggagtccgtgggtatctcaccggctagctgggagtcccagtctgtccctgctaggttgggcct

SEQ ID NO: 15402 - DNA, 302 bp, Zea mays
  Coding DNA Sequence Number=SeqID_999
cctatagtggtcgtggagcgcgcattcaccagcccggagctcgtaaacgccaggccttcagtgagaagagcagtgtataattcggtaaagtcttggacccgtgaaggaaatgtgatcaaatatatggaccttgtcctcccccggtgtcttctacctccagtaagtggaataaatagggtgccagtcctgtacgccgtggttgccctccgtttgattggagcgccatctgctttgcgcgagttatgagacctggtctaaaggatcagtccggtactccttgttgcagcgtggccctcggtcat

SEQ ID NO: 15403 - DNA, 246 bp, Zea mays
  Coding DNA Sequence Number=SeqID_1000
gatcagtctgctaacaagcatctgtaggtcaagagcatttttagccagttctggaattataatggggcaatcgtatgcccctaatgtgagagaaatggggtaaattctgtggacaaatataatggcccatttacaggtggatctttatcctggttgtgcatacgcaagcgtcaaatcctatgtgggacctgtactggtcctggcttattgggtgaatttctaagcacttgcgatgaacttgtgcaa

SEQ ID NO: 15404 - DNA, 487 bp, Zea mays
  Coding DNA Sequence Number=SeqID_1001
aaatgggatggataccggagcttatcctctgcagcgacgcaatgcgtacgaaggaaactcttaagatcctgcaagagcatgtccaaggattgtctgaagcagtagtgcacttcatcccaaggttctactccattgcagcaatggatggccaaactgcagagcatttgcagaaggcgatctgtgaatattcgagtgatgagatcttaaccgtgatgtgcatggggcataataaaggatgggaagaagcagcctctatgttttctggtgattcagtagcgctcgagacatgtaacgctgcgtcgcgggcggctgcaggcaaatcatgggttgaggctttttctgtggctggtctggggggttggaagcttcatggaattgcaaagccatgaggtgtaactaaaagctaggtgtaatttctgtcgctgttcctcaattcttgctaacttttgcgtagcttgtttttacgtgccactgaagagcgtggatt

SEQ ID NO: 15405 - DNA, 486 bp, Zea mays
  misc_feature (40)..(40): n is a, c, g, or t
  misc_feature (64)..(64): n is a, c, g, or t
  Coding DNA Sequence Number=SeqID_1002
ggaaattcgcaaaactaccagtccatcaatgccttgcatnggagatacatctgtggcctcaagnagaggaaacgctcaacgatccccttcttccttttcggattagcccgttgataatccaacctcgaataatgtaaggcataccaaacatttcttcgaaaccctttttcaagtggtccccagatgtgatgtggcgaaggattttctgggctcgaccctttcacctcggcggtctcagtctattctcattcgccatgtttgcgatagctccaaatcaattgggaatgtcccttgtcaggcatttcctttctttcccaagtggctcatccatgatcaagaccgcccggcccttataaaacccttcgccccagggtgcaaaaacttttaaaaactgcacagttttgtagttgtacataagttaaacaggttttggggggtttcttggcggcgggtttaggggttaccaccaatgttataaaaccctgt

SEQ ID NO: 15406 - DNA, 392 bp, Zea mays
  Coding DNA Sequence Number=SeqID_1003
ggccattgtcatgacgatgcccgtcgtagctcggattacgctctagtgcgagctggtaagatgcgatcgttgcaggagcggaacattaagaagggggagagggagatggaggaggcgcgcaaggaagatgagcggaaggaggaggcgggggacaggaatacccaggagccgcagcaaggtcaaggcctcagccgtctcactcgccaacggcagcgacagcggcaggtctggaatgttgccgatgtcgaacccttcagctaatcccacacagcttacaattgtctatggtggatcagtatgtgtgtatgaactcggtgccaccagaaaaggccgagacgagcatgcttatagttgtggatgtaactgatctgatggccaccaaatgcagcgct

SEQ ID NO: 15407 - DNA, 289 bp, Zea mays
  Coding DNA Sequence Number=SeqID_1004
ttttaatgtcatcgaaagcttggaaatgcttgaaagagagatcctggttacagaagctaacgttgagtacagacagtaggcagagattcggattccaacgtgaatggaatagcttcacctacccgttcgtataatccgctcctcacctcgcaaggagattaggggggatggagtggagatcacttggtatactcgcgccacgcatagaaggggtcaaaatagatggctcggaagccggtgaagcatcaggcgttgacgcagaggtggcggaactcctcctcggagagct

SEQ ID NO: 15408 - DNA, 262 bp, Zea mays
  Coding DNA Sequence Number=SeqID_1005
gggatccctgtgaagcctgtactagtcgacctgcagcatgagggtctgccccctcttgttcatttgataataggcattctttgctgttcttcaaagctgggtgtcaagaaaatttatgactggatgtgtagttcttttgccaattgctgtcacattcttcatcacttggtggtttatccaatttgttgatggttttttcagcccactctatgcaaaactggggtttgacatatttggtaattgtttatcttttattggtggt

SEQ ID NO: 15409 - DNA, 307 bp, Zea mays
  Coding DNA Sequence Number=SeqID_1006
ggacaaaacccttctcaaggcgcctgggggctccaattcttttgggagaccgcgggctctaactctttccggagaccgagggctcgcagcagggatgcgaaagggaggccgggagcttgggccccgtcgtcccaagatccggataaggcgcgctcggctgggaggaccaagccccagcagagggggcaccagttggtctgggtccttttgtatcaatttggctgcaaagtgtcttgtggcccttcaaaggacatagattgttggcgggcaaccaacccccaagaaagtatcttggatggtttctaaa

SEQ ID NO: 15410 - DNA, 287 bp, Zea mays
  Coding DNA Sequence Number=SeqID_1007
ttcaaaggaggagggtagaactacttttgattctggagatgagtataacaaggatgaaacatcgaatggccatggtgttgagcaaggcaactggagtgctgttggggaccttcggcatccgaaggtcctcaaaaacaggatttaatagtgtttctggagtataatgtgtgaacaggtatcttcggactcaagtcaggcatcacagtagaccagaataatacgaaggttggtgaagcgccgaaggtgtaagcaggaaagcttcggcgagacagcagcagttgaaaccg

SEQ ID NO: 15411 - DNA, 473 bp, Zea mays
  Coding DNA Sequence Number=SeqID_1008
tgctaactcagcatgcggtcactaccgaatgacttccatattatggaaattaactttgtctattcttacatgcacacttgtaatttgcctatgccagccaatacagttcagattaagccatatttacggtgttttaagcttttacgttgcacgcatcagtttcgtgagcctgcctgtggttttgataattgagctgagtccatatcaaggtttcccaacaatagctcaaagagaatataggatgaagggttcactggatcaacaatactatcatgctttaatttacttactgaactgcagtcaatactcaatgctacatttcagcgagaactcatgctcgcctatcaggtgaatctctgtcattctgacatattatatccaaaataagtcctaaacttcatataaattatctatcattgcaataaaaagctaaagtatgtgcatgaattgtcctcctctgtttgtacttaaaa

SEQ ID NO: 15412 - DNA, 230 bp, Zea mays
  Coding DNA Sequence Number=SeqID_1009
tcggctcgaggaggtgtttgaatgcgctagagctaactgtgtctataaattagttagacatccaaacaccgttatcgtatagtttaactattacctattttaaagtaaattagttaatagtaagctatctatttgttagctagctaattttactagtaattttttagctaactaactattagctctagtgcattcaaacaccctctaaactttttcatggctttaatcca

SEQ ID NO: 15413 - DNA, 230 bp, Zea mays
  Coding DNA Sequence Number=SeqID_1010
aatcccaaccttcagggatcaaaggtctggaggggcccatttacaacccaacttatgaaacgtttgttcatgggcccttgccatgtcacatgaacgtcagttcaagataacccggttatccgccaagacatacataagctacaggttttttcaaccgaggcccgggttccgggccccccgagaaggggcccaactgctgcaaggggcctggttgggccaacacttcgggt

SEQ ID NO: 15414 - DNA, 504 bp, Zea mays
  Coding DNA Sequence Number=SeqID_1011
aaaagtatattctccacgcacgacatttttagaataattgttttttttctcgacctgtgaattaaaggaaatgcccccattaaagccaatgcaaattaaaataacgcacacagataaacactgatctattcattccaagaaaaccgaggccgaggccatacagtctggggcgcatcgcatctttaacatcttacacgggtcgtaagagatttaattttattcggctgctgcagaggaagcatgccgcacaaactgaagatggccgcacgaccattgaggagctcagatctggcccaagatcacctccgcaccagaaaccttaaagagggacggtgcttcctcaacattgaaagacttgggctataccatcgtcaacaaaggcggtccacctgttgagaacgggacatccgccaagcaggggaaaggtctattttcaagtacaagccttcggggcgtactgccataaaagtcacccatagaactcaaatggattctgtagcgtct

SEQ ID NO: 15415 - DNA, 397 bp, Zea mays
  Coding DNA Sequence Number=SeqID_1012
tggacttgcacactaccatcgcaagcgagctcggtgcgggcggattacccgattgcctgccatgattctggcgagccactcgcctctgctcgggcactccagcgaatcgcttgagttggggactggtcacttctacttctaccgacggggggctgcaaccggtcgccgcatgtgacatggcagcgtcaccgcccgaggggccctccgctcactccgcctgattacggtccggagcactgctcaaggccattatcggaaagggaattctgcagctgcgcaggcagcattgctaggcagacgtgctctgaaaacaagcagtatgctccaggagacgataccctacagcactgggaccagtcacgagcgcctgagaacttacagaacttacaggcgaggt

SEQ ID NO: 15416 - DNA, 340 bp, Zea mays
  Coding DNA Sequence Number=SeqID_1013
acgcgttcgcattgacgcgtggtcaccggccgatgcaccagcatctgcacggagcatgacgtgccggtggtggccttcacgtgcaaggccaaggacgaaacccagctggccttcacgctgtcgctggccctggggcggctcggctggatcgtgtcgcagtacacgatggcggccaatctggagcacatggccgtgctcctggtcgcgggccgggaggacttgcggcgcccgctggtcgagaggttcctgtcccacgttcggatggcgctggaggagctcgaccacgccggccagggcgggcccgtgcccaggatgcggctaaccattgagctcgggcctt

SEQ ID NO: 15417 - DNA, 327 bp, Zea mays
  Coding DNA Sequence Number=SeqID_1014
tattgtgtatgcaccctttgacagctatggacgatgggctgctgatcttagctgacgtgatcagggacccttggttgctgttgagggtcgtggctctacttgttacgctctcctgactgcacatgcaagaggtgtggtgattgtgcaacctgggctggatggggacacagggcactgtgtttggcttcatcttagacccgacgagttacctgtttaggggcgcgagaaaagggctgctacatgtgtgcggcccaacaatgaaactacagtggtggttgacgaaccttgagagctacagttaggatgactgcttagtgggtatccaag

SEQ ID NO: 15418 - DNA, 361 bp, Zea mays
  Coding DNA Sequence Number=SeqID_1015
tttaactcggtggttgccagaacgaagaacgtgatcgtctcaggcgactccactccacaaccgcattgtgttgacctggagaactcagtcaagacttttgttgtccagatcgcaaagaccatatccatgattggcgcagagggacggttcggtgagctctcgatgttcgaccggcggctcctgtcctcaccagagtcggccaagttcgcctatgagtggcaagatattgcactgctctacatggaccaactttaaatactgctcctcttcaggtagctaggaacttgcgaattatattaaggccggcctgacctcactctctagcaagattcagatgttctaatgttcaatgctctaccat

SEQ ID NO: 15419 - DNA, 344 bp, Zea mays
  Coding DNA Sequence Number=SeqID_1016
actttcacagtgacgacaatgtcatgggagaggccgggcttgatgacccatacctgtgaagtcgcaagcagatgtagccatcaagtgcttttgatgaggatgagtagttccggatggtagacgatgccggagatgatgatgaagaggaatattcattgagtaccagtgaggatctaggggagccacagcggcataaaaagcttgtaactaggcgccggtgaggtacgatgctaagatcagctggctggatcctatcaggtcttaaacgctgaaagtgctgttctactgctcgcatgaactattggcaatgtgattcttcggacatggatacagagcctcgaaag

SEQ ID NO: 15420 - DNA, 360 bp, Zea mays
  Coding DNA Sequence Number=SeqID_1017
gtctagctgagctcgactcgattctggccttcgcggaatggacggctagccttgggtgaccaagtgggctagctctttggggtccacgaagctgacgactgtgggcatctgtgtggcgaaggttggtcacattgcaaccactgctgacgagaagacgaagtcgcggaaggagacttacaggagttccaggactacgacgagttttaggtgtgggctggccgatccccccaatcagctgcctgtgaaggtcctatcttatactgcgttgaacttagcactgtcatttacctgtctagttggtgactatgcggatggctctgactctgcgacgtaatcaggctatactctgttatgtcatta

SEQ ID NO: 15421 - DNA, 138 bp, Zea mays
  Coding DNA Sequence Number=SeqID_1018
tagctcattgttttgccgcactaccaggaccagcagcaattgttgttgggagtggcttggctctgtcatccacagctgttgtcttgcaagtacttccttgaaaccacacttgtttatcaaactctggcctttaagcat

SEQ ID NO: 15422 - DNA, 489 bp, Zea mays
  Coding DNA Sequence Number=SeqID_1019
ttcggctcgagttcttctccaggcacatttcttttccaaaggttgccatggccatcaggccggttcttttctcctgcttgccaccatggctgcagagacagacacgcttgccgtggcgccagtctctgcaacggacctgccatccggtgtcgcatccatcacgtccaacatcccaaacccatggtcggccttgcagaacctcacggtctgccacttgcgcgagcagcagcacggcctcatcaaggtcaaggactacctatcccgcttcggctacctgccccacgagtcgtccgggtcgttcaacgacctcttcgacgccgacctgggggaggccatcaacgtgggccaccgcaacttcggcctgggcatcacgggcgtgatggacgcgtccaccgtggcgcacatgatggctcacgcggcgcggcgtcgccgacatcatcaacggtacgtccaccatagggcggcgggtagcccctttgatctttgtag

SEQ ID NO: 15423 - DNA, 592 bp, Zea mays
  Coding DNA Sequence Number=SeqID_1020
gatcgtgaccgtatcgtcgaggcccgcgaggagttgcagcgtatgctcaacgaagatgagctccgtgatgctcttctccttgttttcgccaacaagcaggacttgccgaatgcaatgagcattgccgaaatcacccaacaacttggtctccagagcttgacccgccgtgcctggtacatccaatcaacttgcgctaccactggtgacggtctgtacgaaggtttggaatggctcgccgagactctacgaaagactggacgtgattaattaatgattggatgagagtgagactccggtggccctttgcatctgtttctctctctagttgtgcctgtgtcgtgtgtcttagggaaatggacgagttgttgaaaataaatattactttcagactgaaaaatggtcttgaggccccctccttcaaaacacgaagcaaagtgaaagagtcggtcagttctgtgatggctttggcagaattacaaaagacttctttgctagggtccatattcgtgttctcttctataagacgactctttgtaatttttacctcttgtctgtgttttcattttgttttcttctcttgtttcttaccgct

SEQ ID NO: 15424 - DNA, 165 bp, Zea mays
  Coding DNA Sequence Number=SeqID_1021
tgatgttgcacatttgtctcttagattatgccttcgtgcagagacccttgtcagttctgtgtgcaacatgggctgtagcccagtcatgcatcaagttgcaccacatttggatcgaacgctcgcgttcttcctggcaccgttgttgtggtcctccgcatcccataa

SEQ ID NO: 15425 - DNA, 198 bp, Zea mays
  Coding DNA Sequence Number=SeqID_1022
gctcgagccggaggtccgactgcaagcgcgttagcccgtagacccatggccatggccgccgccaccgttttagcgtttactgcccgtggcgctagggctcggtaagcccctctgtgccgtcagctacgcgctgtcgctccgggccgtcgcgggcgcgccctgtcgttggtcggccagggccaggatggcagtggacac

SEQ ID NO: 15426 - DNA, 319 bp, Zea mays
  Coding DNA Sequence Number=SeqID_1023
caactttttgtttcaccatggagatctccatgagtgcctcagaactgtagcgcagagtcctcagttccaaggctcccaggaaggccgttggactgtactgccaggaaagcgatttagacctgtgactggatagcaaccgttattagcatctgcaatgagcacgggagcacttttacatggtactcatgccgtgccattgactagagtaacagtaccctcgtgctgtgggttcttctgtggcatccccctcctgcaagttgctggtaacctccctatcctttgtaccttgggcccattcagcttccgagtttgtgtgtct

SEQ ID NO: 15427 - DNA, 330 bp, Zea mays
  Coding DNA Sequence Number=SeqID_1024
gtcatgtcacccaaggaatccaaagttgacccccttccgagggtccctcgtcataatattgtccagccagtgaactttgccaccaggaaaaacctcaaagcattctgtaaagtagtgcaacaaacttgtccagtaggatctttcatcaaaccaactgctggggaaacgcctggctatgcttcagaggtcattttccccgacgggccattcataaatggaagcccaagcgacctgtcatgtgatgggcccttgaaagatccatatcccgtcttttgccagggaggaacacattggacccagtgggcccttgtccttggaatggtggatact

SEQ ID NO: 15428 - DNA, 287 bp, Zea mays
  Coding DNA Sequence Number=SeqID_1025
ttcctgtctgcgtgctacacgagatgctaggccacggctagcagtcctagtgcgggtacattgtgcatctgagtattacgagccgagcagtaaatgtcaagatactacacgttggggtccacatggggcagctcaggtcggtggtctcggcgcagcagacggagcacccggtccggcgcggtgacacaggcgtacaagggcaggcgccacatggtagctgtcgtcgacgtcgatctgttcaaggggatcgggctcaagttcctggcgatggatcacctgctcgtgca

SEQ ID NO: 15429 - DNA, 586 bp, Zea mays
  Coding DNA Sequence Number=SeqID_1026
gagcgctatcagaggactgttcatctctgaagcagattattatgacactaatggatgacgatatatcaaagcacctccaaatcattgaaagcagtctagaggaaggaggagaaaaggtatggataaaagaaacatcatgaaaccatggctctattgccatgagcagaggctaagtttcacgtatggtagggccatggagatgccactagttataccgccaggactctgagagtccatctgtttgttcatgcagtattacaaatgaagccatagctgtttgccttggtggccccacttcactgaggaatggagaatcgtaatataatatggaattaactacacttccaacaaaaggagtgtttgagcatttagcaaagcttgacaggttgtttgtaagtggttgtttgtgtctcagatcactgggtggcctacgtgctgctccatctctttcctttattaactgttgggattgtccttctttagagctagcacgtggagcagaactagttccgtcgaaccttgatagatacctcaacatccgtggctgcattctttcagctgattcattcattaacggcctgctgga

SEQ ID NO: 15430 - DNA, 461 bp, Zea mays
  Coding DNA Sequence Number=SeqID_1027
ttgatatattgcttgggctcccacacctccaaatggctggttggtcgggtatttataacctcccccataattctagccgttggacggaaagctgactgctttgtcgtcgggcgcaccaaacaatctggtgcacacatgacatgtctggtgccctgtccacgtcagtcgaccgttgaggtctgtagaagtcgatcattggatccgaccattgcccagactgtccagtgcacactggacaatccggtgctacagcctcgtcctattttaggaccaaataaccaaaaccacttgaaataccatttgtacatataaaattttaaatttgtggtgtttgttgtttgatatagttttcattgctttggtccctaaacttctccccctttggcatcaaccaccgaaaaggaagacattaaaagcatgtaggaagtaaataaaagcttgtcctcaaaagattactcccc

SEQ ID NO: 15431 - DNA, 379 bp, Zea mays
  Coding DNA Sequence Number=SeqID_1028
tgtatgcagacaggaatctccccttcttttattcaaaacggtttagttcaaaaatgaactacgacttgcaggcgacaaatatttaagaacggaaatagcactaacctaaggatacatgacctttgcgcgctcaacacaagaccaagtcactcaaacatgttcggtgtccaaaagacgagaacaaggttcctatttacatgctttcggttattcatcaccacagggagaatttgcgcatggtagaccaccataggaccctaagcttggtcagggaggctgcttcaggagtaaagaaagatcatgtaagggtcagtgagtctctgcatatctaagaggtacttgtcgtccttggtcttgtaaagctgttggtgcccctcaa

SEQ ID NO: 15432 - DNA, 130 bp, Zea mays
  Coding DNA Sequence Number=SeqID_1029
gggttatgaaagactgtgcatggcagggcatacaacggttaataatgatggcgcagcaaggactagcatgaacttgcatctgattggctttttgtacgatcacactcagtttaattcaaaggactagggt

SEQ ID NO: 15433 - DNA, 593 bp, Zea mays
  misc_feature (71)..(71): n is a, c, g, or t
  misc_feature (78)..(78): n is a, c, g, or t
  misc_feature (87)..(87): n is a, c, g, or t
  misc_feature (104)..(104): n is a, c, g, or t
  misc_feature (107)..(107): n is a, c, g, or t
  misc_feature (109)..(110): n is a, c, g, or t
  misc_feature (118)..(120): n is a, c, g, or t
  misc_feature (122)..(122): n is a, c, g, or t
  misc_feature (125)..(125): n is a, c, g, or t
  misc_feature (127)..(127): n is a, c, g, or t
  misc_feature (132)..(132): n is a, c, g, or t
  misc_feature (136)..(136): n is a, c, g, or t
  misc_feature (144)..(144): n is a, c, g, or t
  misc_feature (154)..(154): n is a, c, g, or t
  misc_feature (156)..(156): n is a, c, g, or t
  misc_feature (165)..(165): n is a, c, g, or t
  misc_feature (168)..(168): n is a, c, g, or t
  misc_feature (174)..(174): n is a, c, g, or t
  misc_feature (191)..(191): n is a, c, g, or t
  misc_feature (196)..(196): n is a, c, g, or t
  misc_feature (198)..(198): n is a, c, g, or t
  misc_feature (200)..(201): n is a, c, g, or t
  misc_feature (204)..(204): n is a, c, g, or t
  misc_feature (206)..(206): n is a, c, g, or t
  misc_feature (208)..(208): n is a, c, g, or t
  misc_feature (210)..(210): n is a, c, g, or t
  misc_feature (213)..(213): n is a, c, g, or t
  misc_feature (221)..(222): n is a, c, g, or t
  Coding DNA Sequence Number=SeqID_1030
gaacactatgaggagaatctcattaggggggttttgtttagtcggaggaaaagcatttgctcagcggtccntgtttgnggcctgtcnggactccccaaacattnttntnncggaagcnnnanctntnttttnggancctcctcnctcttacttntngcgtactanaantactcnctctctctttttttgtntgtanancnnacncntntntantttgtgtnnctagtaaatttcaaaacttgaaaatgcttctcaaattcttattcatttacctttgactatttgcaaaaggatttttgaaaagaatttacaaaaggatttgcaaaaacaaaacatgtggtgcaagcgtggtccaaaatgttataaatataaagaaacaatccatgcatatcttatgaaaatttattggttcaattctaagaaacctttgcacttacaattatgcaaactagttcaattatgcacttctatatttgctttggtttgtgttggcatcaatcaccaaaaagggggagattaaaagggaattaggcttacacctttttcctaattgattttggtgggtgaattatcatccacagataattggacta

SEQ ID NO: 15434 - DNA, 455 bp, Zea mays
  Coding DNA Sequence Number=SeqID_1031
aaagatgtgctgacattcagtagaaaaaaataaaagcttgggaatctccagtaaaatcctaaatcttccaaaggtccgaataattccgaaacagccttaggtaagtttatagagctcatgaagagaaacagattgtaagatatgtaggggagtactggcaaaggtcaacaattgtcttggtgctctctcgcagcaagctcaaaagaatttgtttcattttagtgtttttctttgggatgttcatgtacttgaattttgggtccagaggacatagcataagatgctctgcaactgtaccatgaattgaagtagtgaactggttgaatttcttgagaataacatgttatcaaattgcacggtacagtatgcgcaggttatgctcgcgaatttctggccggcaagtaaagtggtgagcaccagtagactagttagtatagagataaaggatggccatg

SEQ ID NO: 15435 - DNA, 347 bp, Zea mays
  Coding DNA Sequence Number=SeqID_1032
gatggaagccaaaccagtcattgcatttgtggagttggagaacgacggccagtccatggtggctatgcaggctcacaagggcttcaagatctcgccggagagcgccatggatatatcatatgccaaaaaatgagacccctcgcgtaaatccctgaacccaatacccataatattttccagttcccgccgtccgagaatcgagccacagtatctagtcgactttccggccatggatttagggcagcgcctgcttcatttacaagttagactctagccacttttgagacctgtgtttcggagctcagtgcctcattttgagactgcctagactcttgtcttagtcagtg

SEQ ID NO: 15436 - DNA, 163 bp, Zea mays
  Coding DNA Sequence Number=SeqID_1033
tgaacaaggccatgggtgcccccctttgcgggctcacctccccaaaggagatccggttcccgtttttagcaatgttaagtttgccaataataattagtggccccccatggtttttcggtcccaggaataggccccgcccctgcccgttggctggtttccaggg

SEQ ID NO: 15437 - DNA, 478 bp, Zea mays
  Coding DNA Sequence Number=SeqID_1034
tcaagtccgggcaggcggatgccaccctaaccccagaccatggagctccgggggttgaagcccaacttcgactggtggaagaaagatttcagtggccgaataagggggccaaagatgttcttgaccaagctcgggaacggcaacgagtcttcgcccaactccgtgaagcggaaatggtggggcaggttgaccccctccaagttttcgtgagtttgttatgtatcctgattggtaattcgtagatggcccggttttttcccccccggggtggttctagcttcctagggtttttattttccggggggtcgtgccttgtgaaagtcgagtgtgttgggctggagttgtgttccctggagggcgagttgtatagtttttccccaagggcttcctttgagggggggcaggggctactgaattgtgaggtaattccctgctgaagtagttgtcgaagcgggaagattgtgccatcgccccctat

SEQ ID NO: 15438 - DNA, 546 bp, Zea mays
  Coding DNA Sequence Number=SeqID_1035
gaaccgtacctggtgaggccttagcgtggggggcgggtcgtttggaggttgggatttctcaccggaggtgtgtcgccgccgcggagccacggagctaatgggtgggatcccctgctgcgccactagcaggaagccacaagctaggcattgtctgccattctactgattttgggggcatttagctaaagtgtggcagtgaatttcaatttcaattggcaacaaatagctaaagtgtggttgaacttgtgttgttgaacttgatctgtttctttttatgctaatgctatttggtttgtgaactcaacttatgtatgaacttattctatatttgaaattcttggctttttgtttcggtcacttttttttttacgaattataaattgtcgtataaattgggacagaggaggtacaaaacattctttttggggcaagaccgagactcacttgatagtgaaaattcaactaagccgtcttagttccagcatcttaagaaaatacaacatgctccgggcagttcaagtaccgtctttcaggaatctgcagcat

SEQ ID NO: 15439 - DNA, 387 bp, Zea mays
  Coding DNA Sequence Number=SeqID_1036
gatatgttccccatttcccttatcaagttttataccaccgggggggatttgttccatttgggccgcccaagaaagccgcaggaaaaaaaagtgttccaatccctgcccctttccctgggatggcaatgtggcagtggctgcctccgcccatggtgggcccaactcaagacccaaagctttggccgccaaatgtttaggggcagagctagctgccttggggtgttgactccccgggccgttttatgcattggggggcagatcaaagtgtcagttagtaggtccctggaaaggaggaatcaagtctcgcaactcgggtcatgtttatgctgtaccagttgcttccagcagtggtcatcaacttgttttgttttattgaagggtgaggca

SEQ ID NO: 15440 - DNA, 395 bp, Zea mays
  Coding DNA Sequence Number=SeqID_1037
tggatgagcaaacagcccgacaaccccgagtggggccccatccggtgggccgaaagcaactacatgggctacaactattgcgacgacggctgggggttcccccagggcctcccgcccgagtgcacccccagttaagctagctgattcccccggtttttgtacgctcgggggggtcccctgacgacacaccccttgttggtttgttcttgctggacatcaaacatctctaaaggcatgattcttgttctgttattgttaaatcgtgattccaaaacttgtaattgtaaaaaagtgtgtgggcccgggagtaaatccctgtagttttaatttgcttgtaaaaaaaaaaagggttttttttttttttacgcgggagctaaagattgggtcttttttgg

SEQ ID NO: 15441 - DNA, 482 bp, Zea mays
  Coding DNA Sequence Number=SeqID_1038
gctacagctgtttgagaggcgtgtccactaactaccttagccagagaattagaaccttgtttgattgaaaccccatccgcaacaaatgtttcccaaaatcatctagcttcctcggcctaaagaatatcttaccaagaccatataagcccatgccttagtaaattctcctgttaactagttaattgaacaaagcttatatataaatattagtcagttggtcatatgtgaagataacttgtgaattttctttgcccaactttttcagacgacccctcctaccctagcggtaccagaagatccccatgttgaaactccgatgcaccattgggtgggtcaattgtctgaaaatggtggggttagcccccaaaactcaaattttgaacggcctggtggtggtggcccccaaatattgtctgaaaatggtggggttagatcccccccccttaaggcagatcttcatttctttgcttgtagggacccgt

SEQ ID NO: 15442 - DNA, 578 bp, Zea mays
  Coding DNA Sequence Number=SeqID_1039
gaagcaatttcagcggcggcagcctgtaccaaggcaaccgtgacaccgtcgtccgtcggctcgtctcaggcccagccacctctggcggagttttcttcaactacagctccagcggcgatgggcccgacgtcgtctatggcgtcgccatgtgctacgccgacagccagtgggacgactgccagcagtgcctgcacagggcgctctcgtacgttttcacgcagtgcttgtacagcagaagcgcggcgatcatgtacagcgactgcgtcctgcgctactcccacgatgctttcttctccaacgagacggagtgggggcatgtgttcaacgtatggtctaccgcgttcgtcgacgacgcggccagatggaaccagacccggtggacgatgatgaaccagctcgccgcggaggccgcggtctcgatgccgcggttggcgacagggaacgcaacgtataaagacgacggcacggacatggtgtacgggctgctgcagtgcaggaacgacttgtcggcgggagaatgcagcaactgtctcagctcgcagctccagtatctgcttggaagtttccctaacagcgtt

SEQ ID NO: 15443 - DNA, 224 bp, Zea mays
  Coding DNA Sequence Number=SeqID_1040
tacgctcagcgtattcggtactcttgccattgctctatcactgactcctttcgctttgttgctttgctttctcgacccgtttcacctctctcaaaggcaagctttcagttatccactgaatttagggataacacttaaaacaacatgtgaccataaacgccaaaaaatcgtcattaaaccggataaaggacgtattgctgcatttttttcatagactccttccc

SEQ ID NO: 15444 - DNA, 278 bp, Zea mays
  Coding DNA Sequence Number=SeqID_1041
ggcagtaccgcccaagaaacgaaggggcagcagtggccaaacaggagcagaggcagcagcagcaagtaggaccaatgagacagccagctggtgtgagccgtaggcccctcgtgatacaacgccagaggtggcggagctgccggcccgctgcgcctagcggcgggcaccgtctcccaagggcagcgatggcagccacccaaccaacgtgggaggaccaagcctgcagcggtcaaccagccacccgatcattggtggtgcctccttaagagttcaatatg

SEQ ID NO: 15445 - DNA, 263 bp, Zea mays
  Coding DNA Sequence Number=SeqID_1042
gtttgtgatgcccttaaatgttttgggccgcacgcgcgctccccttatgtatccaacgagtatatagccttggccgacaggcccgggtaatcttgggaaatttcatcgtgatggggatagatcctgtattcttttgaaatttgcccgatattggatgtctgtttacggagagcgcacgtgcaaaacttgtatgttgtactcgcggatgaagctgaccctgtgattttggcgatgggtaaaaattggccatcgcgtctgtaact

SEQ ID NO: 15446 - DNA, 392 bp, Zea mays
  Coding DNA Sequence Number=SeqID_1043
ttcttgatcacgatgaggacagtgtaaaaagttgacaaattaacattgttggtggtaactggtagcagcgactctgttttattttcatgcagtgtatttcctaacaaggtactctccatattgtgtgggggacaaattaacataacgctacatcattgtgaaaaaacgaagaaaatgttcaggagttgctccaaggtcatttgaagaactgtcgggtagcgttcaggatggagcctgaaattttaaaatacttggcaagttatcttaaaagggaggggttggtccgtgatacaaggattaaggatgaggaaaagttaccatttttcttatacatgctcagccataatgcctcatttgaagatctaatagctagaatttgctcacagtggtga

SEQ ID NO: 15447 - DNA, 412 bp, Zea mays
  Coding DNA Sequence Number=SeqID_1044
attggtatttgtcgcccccaagctggttggtgatcccctcgaaaaggctgctataaagggcatagactgggtctccccatctgatgagaaggccatgtctaaaaggcctgggggtcctcctgtccagattgggcccagggccccttttgcttctcccttgaagagaatgtctgtttttgcccgtattcaggaaaggttttccgctttccttaagggggcccctgggcctacccaagagggattagtcgatttccccgcggcatatgtggggccatataagaaatccccccggccgggttcccgggtcttggctcttgcatccaaattgcttccctgagatgcctgttagtgaagctagaagtttggagggccttggaattgttgtaatatatgagcgctgccttccttcctt

SEQ ID NO: 15448 - DNA, 498 bp, Zea mays
  Coding DNA Sequence Number=SeqID_1045
gacgcgtacaagctttaccatctaagggcgattttttgctatgaaatccataaaactggggagacgatctagctttcctttacagggcccattttgcccatcttatgagtgagtatgtactataattaagcgtggcacattccattaacatcgccgccactgctaaaaccttcgagttacccaactaaattggcttgaagaacatcctactttttccctgtgggaaaatagtaaacaggcccaatcccacacgaccttcccaaccggtggccaaaactgaataggccattgggacgccccctgagtgaggctcacttaaattcattgggtgtggcgtgattcgcccattttgaccggtacaattggcagcgccctagtgcctccaatgatattcgcttacttcccttgcgtaggcggcacgtgtatcgggttctcctccccatctttaaatactgggttccttttatgggtccgatttatggctttaccggacctaga

SEQ ID NO: 15449 - DNA, 292 bp, Zea mays
  Coding DNA Sequence Number=SeqID_1046
tcgggaacctgttttgcacactaatactcacaagaaagatgtccagggccagcgcactgacggtcccttagaggcccaatagcatagggcttaaagggtacttggagaggatgacgagtggtcagaaccacatggactgcaccgccattgctcctgagatcctccctcagatcgggaaatgggggccatcatggcggtgctctgactactatgagctttgtgctgctactgacagtttggggtgagagaagatgactgggaagggggggcctgcagaggtgtacaacggaca

SEQ ID NO: 15450 - DNA, 537 bp, Zea mays
  Coding DNA Sequence Number=SeqID_1047
ttttgatcagatttctcccctgcttcctccatcctctcgcgtctctcgcactcccttcgtttcctctcctccttctgccccgtggacttacgatcctgcccctgcgtgggtcccaccatctcagttcgtactttgtgttcgggctctccttttcttttctttgttttccttcatctgctccgcagcgagaccaaaggagggttgcagaaagaaaaagctctgtgcctctccgtctgtcctgtcggacggctcagctccgcgctggcgtgtctggaggcgaagcgcacccgtcgatatgtcgctgagcgagaagctggaggccgcgcgtgtcgtcctcggcaagcgcaaggagcgcgagcgcgagctgctgcaggcccagccgctcccggtggcggctagagccgagccgtggaatccgggtccggctcgcgcggccccctccgccgccgacgccgccgccggcgaaaacaagctcctggccgggcacctggcccacgagttcctcgcgcacggaacgctcctgggtcggcggatcga

SEQ ID NO: 15451 - DNA, 453 bp, Zea mays
  Coding DNA Sequence Number=SeqID_1048
gcacgacagttctggtattccttgttaagcaggtctgggttgcctaacctttcaccagataatgctagttgcagccttgatgactggtggagcagggctgtggagaagattccccgtgatctccaatccggcttcaattctctagttattcttggcgcttggagcctttggcgtcatcgcaacgactgtgtgttcaatgggaggtcgccgtgcctggcgagtgctctcaccctcgctggcgatgagctcaggatgtggtgtagtgccggggcgagagggctcaacctgctttcaactcttatgtttatgcttgacccagggggatagtctagtggcttgttcagagtggttgtgtgcggttgctgtgttgcgtcttgtgtcgtgttgtgtcatgtgtgtgtgtcgtgtcaggtgtgtgtcgggttgtggtgtgttgtaccttcttctacctat

SEQ ID NO: 15452 - DNA, 530 bp, Zea mays
  Coding DNA Sequence Number=SeqID_1049
cacgttcggagtagcgcgtcgtgccgcaggccgatggaattgcaccgtaaataaaggttgataagctgtgaggttgaagctagagacgccgctgttttaagtttcttcaaggacaagggaacattaatgtcacctaaagtactttcctcgatggaggttgaagctggttttgctggcgatggcgtcggttcaaataatggaccacaagacatgtggtcacttggcgagatagatccaaaaagagcaaggttcccgtgctgcattgtctggactcctcttcctgtagtttcatggcttgctccttacatagggcatgtcggaatctgtcaggaggacggggctgtcttggattttgctggttcgaatttggtgagcgtggataattttgcttatggttcagttgccagatacctccagcttgacagaaagaagtgctgccttcccgttaatcttgcagcacacgtatgcaagcagtcctacaaccattcagaattaggagcagcgatttcatgggacgatgctttgcgatc

SEQ ID NO: 15453 - DNA, 224 bp, Zea mays
  Coding DNA Sequence Number=SeqID_1050
ggtacaacttcttggggcgcaactcccgcggcccggacgtcgcgttgcgcgtccccccggcgtcgttgttggaggtcggcatggtgtacgtgctttgacgaggctaaaacaatgccccttttttttatgaacatttgatccagtaatcccgcctgttttcagtcttcccagtaacataatgagcccgttctgtatagcttaccctttttcacctgttcggactg

SEQ ID NO: 15454 - DNA, 325 bp, Zea mays
  Coding DNA Sequence Number=SeqID_1051
cctttgatttcattttgaccccacaggggtttgtgtctgttgacaaaaaagccccgatcacccaaggccttatcagcaatttaatgtttggccctgtcccgggggccataaaagtttgggctcagctggggccccctgttgacatctcagtggccgctgatgcaaatttggggggcccaaagctttgccagttttaataagcttgtatggatccgcaggtggggctgcaatgggtagcttgtaaaaacttaaaatgcctgggcttttgaacttttaaattgggcctgtattgctcgggcttgagggcccaaaaagtaaactcttg

SEQ ID NO: 15455 - DNA, 318 bp, Zea mays
  Coding DNA Sequence Number=SeqID_1052
tcttttctcccaagcccaagaagcagaacgcccctgcgaagctcacccccaagtttgtgatgcgcaaggagttccgcaaaatggccaaggttgtgaaaaaccaggttagtgtcaatttttacaggcctgttttgaccaagccagctcttgttaggttaagctcggtgtcccccagcctccaggttgccaagtccggtgtcaaaaaaaaaaacaggcagtcctaagcgctaagtttgtgttttgtcagggggcatgttggtgcttgtagtcccagcttatatttatttatgttcccccagtttagacttgttagaattg

SEQ ID NO: 15456 - DNA, 575 bp, Zea mays
  Coding DNA Sequence Number=SeqID_1053
gagcacccaacaatttcaagctgaaataatggtacggaaaaggaaatcaaagtacgagtggccccaatcatgcttcacctaactggaaaaacacaactgatggagatgcactaattacaccaagaaagaggtgctgtagatagcgaaaatacgagttcataggtctaggatatgctatcctgcttatatcagtgcttgcaatggtaatattataggtttatggaacgttattagacgaccacttgtgtaatgattcttggaggtgttctctttttcttgaaacgcgaaacaataactcttcttgttgcctgttgatattctatgtattgagcgagatgctatgttggatggctcggattgcttttgcgcctcaacttatctctcttttctagagatattctagtgcagttcctaagggacagtgctgaccttaaaaaattcaatggttcttccaggtactctcagcgaagctcaggtctacaaggcactatcttttaaaaatctcagccatcagccgattgcacctcccaagccacttatgctcaaccttcagatcgagatttttcatcaccacc

SEQ ID NO: 15457 - DNA, 455 bp, Zea mays
  Coding DNA Sequence Number=SeqID_1054
agaatagggctcaggtgctcaggcccctccaatgggtgcacgttctgtcagacggtcacctccaggagctgccgatcccgatgccgcagcgaagccatcctaggacaggcaggctgccatggttgatggtcctcttttctcccattcgtgggaatatccccctttgcgaagatttgtcgcccgctagttcattttcttcttctcagccaccttttaaaaagaccgaagagagtataaaatgggctaaggagcccatggcagatgattgcatatgtctcagcattagagggcagggaggtcaagcttctacattccatttcactcaaggaatatataatgtacgtttaggactgttaggttgtaaatcgtcacagtgtctatgtaatgcttcttcttggcatgccacactatatagtactaatattgatcctttcactggcaaaaaataccctatt

SEQ ID NO: 15458 - DNA, 478 bp, Zea mays
  Coding DNA Sequence Number=SeqID_1055
gatcatgaatgaacccttgccgactcagagaaccctgccagtttacctccagcaacgatggcttctgcaagtgatcaacggagcaatcaagggaatgaagataattctagcataggtgaaggtcatccaataacttcccgtaacccagagaaaggccagagctctgataccccagctgaatgaagcccccgctgataaaccctttcttgcgtcaatggtcccagcccattgctgggagcattatcgatgcgttcgtcataaaattagatttggacagttgtggcgcttgtgctgtgatcatggtggttcgtgtatgtatatgcactgtatatatataggtttgtgctaatactactgctgcggcctgtatatttggccagttgccgacttgtcaccggttgtggtcagtagtaacgttacctctggtaactgatgagtggtaactgtgtttgttaccacgtagtttgggagcgaagaa

SEQ ID NO: 15459 - DNA, 352 bp, Zea mays
  Coding DNA Sequence Number=SeqID_1056
aaaggcggtgaatgagctgtatacatcatccaatcaaatggggttaaaaacagatgtgacggattatcatattgatcaagtatccaatttagttgagtgtaaatcagatgaattctgtctggatgaaaaacaagaagtgtccgagaaagtcaaacatgcgaagcgacttagtgatgagcggaattcacttcaagatccaaacttcagagggatcaataggcaactagaccgtggctggagaggaagtacggatattaccatccaaggaggcgatgacgtattcaaagagaattacgtcacgcaaccgggtacctttgatgagtgctatccaacagatatgtacggacaaccg

SEQ ID NO: 15460 - DNA, 252 bp, Zea mays
  Coding DNA Sequence Number=SeqID_1057
ttttttgaactgaagaacacctaataataaccaatcccaacacaatcaattcatacagctaccgtcagtacgagaatgcacaacaacttaaaatcagcaaacatacagcaacaccaagcaaacgaacaacaatccagggtacatcatcctgtgctggttgtactgatcggctccttgagctgatttttattcttttctaggtcgactattattataataataaatgtgatcatgcattggaagtggtcgaca

SEQ ID NO: 15461 - DNA, 378 bp, Zea mays
  Coding DNA Sequence Number=SeqID_1058
agtgccagtcgctttgaccccagtggtgccagcagctcagccaggtggaccccctgctccggttacacggcgtggccgcgcttggccccccggtctctttgcaccagcccatcctcataccgttcaggtagctaggttcagcaagtcgcggttcgttctagcacacagcggcaatgtgtgcctttgcagccagcagtttccgggtccctccgctgccctcgtcggtgtcccccaattgatgccctttgtccctgtagtttagccgatgccctacagccttcgttccagtccaacacatcattgggggtgcctctattttagtgtcgagtctatcagccgtggttgccataagtacaagttttttggatgacgtaagtg

SEQ ID NO: 15462 - DNA, 514 bp, Zea mays
  Coding DNA Sequence Number=SeqID_1059
gcgcctttggtaaaaacatcccctgtgtcggccaatacagaagtgtagtgttcatttcctacaaagacagaagtgtagccttcaacccttttgtttgatgtggatttcggtgtaagagcgtatttgcaagagtacgtttggtctaggttagtatattaggaatacaattcccaagccgttgggcggtgccaaagtttaatactaaacgtttgggtctgtcgatgagaaaaaagggcgagtgggtgagaagatgctgccctccgcagaagtcgatcagaccggttcctaagggggtcgttgtattagagattaacctgagcccggtcagaaccggtttggtcgatttgggaacctggtagggccggtattttttgttatttgcagtctaactttctaaattaggtcgtattggtttgtgttggactgcgccacggaatcctttcaagtttatataaattttttgtattttttgtaatccttagtgttttttgtaatccttattggttttctaaat

SEQ ID NO: 15463 - DNA, 511 bp, Zea mays
  Coding DNA Sequence Number=SeqID_1060
acgcacacacgccattacattcaaaccaaacgctacacacgccacagcacatgcgtcctgacgtctgcctccaccgcaatggtcctgtttaggtatcggccgtgacatgctcttggtccacgaccacgtttttagtccaaattcttatggctgtttaattccttttctcatggtagtataaatgccaggtcctgctctgtggtttgcttggcatccctccattccttttcctcagtctcccatgcacacaagaagtcttgctgtccttaagtggcaggttagtgaaattcaaactggtctatgtggtttgctgatgtaatcagtttccctcatacatttccatctcttaagtttagttggtaagcaaaaagatggttgatactgccaaggagagcgtaggaagaagtgctaccagtttggaaatctatggcaagatggaagaagttttcatcgaaatggatagcgaacggaacatgagtcttttgactctctgtttgttagtacttgactt

SEQ ID NO: 15464 - DNA, 535 bp, Zea mays
  Coding DNA Sequence Number=SeqID_1061
acttaccaccttctgatcaagatgttgtgtgaggcgaaccggcttgaattaacgctgcagatgcttcaggagatgagaaacagtggttttgagccagatcttgcaaccagcaccatgctgatacattttctttgccgacgccatcagtttgaggaggcttttgcggagttcgagcaggtgtttgagagagggatggtgccccagtatatcacgtaccggatgcttatgagagagctaaagcggcttggtctagtcaaactggcacagaagttggcagatctaatgcgctcagttccacattccacaaagttacctggcggttacagggataaggaaggagatgatgctatagagaagaagaaatcaatattactgaaagcccaggccgtttcagacgttctgaaggattgcaaggatcccaagaaactgcgcgagctcaaagatcctgaagaaactgacgtccaaattgcagacaggattgtagccaacattaggagaagagtatacggagacatctcaaggatagtgccatctg

SEQ ID NO: 15465 - DNA, 539 bp, Zea mays
  Coding DNA Sequence Number=SeqID_1062
acacaacaaaaacatcgccatcagatagaccagtgttgaatgctgaatccccatgggagccttttttggcgcctctctgcggattggaacagatttagagggtggaacagatttagagggtgtttgatttttatggactaatttttagtttctctattttattctattttagactctaaattgacaaatacggaaactaaaatatagattttaggttctgtatttggtaatttagtattcagtaatttagagactaaaatgaaataacatgaagaagctaagcattagtacttagaatccatacactgccttaaagtacgtgctggaactgtgaatggttcgtatactaaagcctggattagcccttttaggagattctgcgtttggatgggagttgggaggactgaaaattgtatcatagtgcagcaaatcttggttgtaggattgagctatcctgcatgccatacttgtggcgcttcttcagcgaccgccatgctgtgatctggttacaattgaattaatggtgagctcttttttaa

SEQ ID NO: 15466 - DNA, 492 bp, Zea mays
  Coding DNA Sequence Number=SeqID_1063
agattgctactcctaggacgagcctttgcgcgagcagctgtacagctacatgaagcagcagcaatctctgaatcaggactccgttggccccagaggacaaggctcgggcccccgtggaggtgccctcccccgcccttgaggaggccaagattgcggagccgatcaaagcagagctccagaatttgaggggaaccggcggtcccgccctttcttgcggcagcatccagattgaaggtccatgagggcgggcgccagtgacccaaaaaaaagcttttggtaatggtgcctcctgcttgcagtccctggctgcaggcttgaccggggcgaataaagagcgggtttttaatacctgtacccccgattgttgtgatttctaattaaccaagtgggggtgtatccccatgcttgtcctacccctgtaggtatgtaaaaaaaccggccccctggccggggtttttgtaaccccctgctaattccttagaaggccctttt

SEQ ID NO: 15467 - DNA, 358 bp, Zea mays
  Coding DNA Sequence Number=SeqID_1064
aacaatgcagccctacgtgtctctcaccaggtcaggtgtcccatatcatgacgacggcgatgacagccacgccgaacacgacggcgagccacctaccgaccggcgtgtcgacggcgacgggcctctggggccggtaccctttggagaggaggtggttgatgcagacgtagacgaatatgcccgtggcgaggcccatggagccggtgatgtatccagtcgccctcccggcctctgcgtgagtggcgtagaaaatgattcccacaacgtcgcttggtgggatgcatatggtatatatcacggctaagcccaaggaatatcagtgagtttggttgcctatttccagcccacggatcatgtt

SEQ ID NO: 15468 - DNA, 132 bp, Zea mays
  Coding DNA Sequence Number=SeqID_1065
ttagatcgtcgtcatactatagtacgctacctcctccaccccatcgatggacaaaagtactcctaaggtgctggtcatgcatctctgacgcggccaccgcttcgtcagtggctgtcctacctggctccaggt

SEQ ID NO: 15469 - DNA, 313 bp, Zea mays
  Coding DNA Sequence Number=SeqID_1066
tttggccctattgtttgttctttcatttacttcgatgaagccactgaagaagtgcgtcatcttgtccaagatgaacaagatcgaaggccccaacacagggagcttcgacaagaaggcctattcaacgagggtgcatggtatgatgattccaatcatgaggcctttactttgagatgatgcttctcctttggcaggagaactgtaggctacccctatgtcccccatcatacatgccacctcagctccccatgtatgatgggcactcacatccaaagcagtcttctgatgagccgtgacgccactatatcttcct

SEQ ID NO: 15470 - DNA, 315 bp, Zea mays
  Coding DNA Sequence Number=SeqID_1067
caaatccagcaaggtccctccagacccgctccctaagtcggcgagttcctccatctctggcgccagcccacaacagcaaagggcctcccatggtgtttgtttccccaacgctcgccccgtcaacagccgcgacgccagttcactagccacgtggacctcctttgcgtcatgccctcggcgtgctccacgtaatcccgcagcaagcagcaacagtgacgccctccgctgcgtcgcgctcgccagaacgggcctcacgtcgtcgctctacgcagcgtctgcgtgtcgtcgtcgaaacccgcggtcgtttaatcgcag

SEQ ID NO: 15471 - DNA, 328 bp, Zea mays
  Coding DNA Sequence Number=SeqID_1068
gagtacgtgcttatccattttcagtacacacgtatctttcggaaggacgtcggtatcccgggtgatgtacgggctattaattagtagatcaaaattttcctcaactgtcattaaaggcgccaacagagtacattgttcgtccattcagagatcagttgcacacacacgttcagactcagagacaggagggagcttattttgtttcggtctaacacggtggtactcacgccactgtaacagttcagtcacggtactcagccatgaacgcgtacatggaaagccttgaagcgggtgatcaccgcggggattttattcttcctggatctgg

SEQ ID NO: 15472 - DNA, 501 bp, Zea mays
  Coding DNA Sequence Number=SeqID_1069
gaatcccaattcgaacatttcgtcgaacacctggcgggcgtcatattggaccatgcttcttcatcaccaaatcctgggatttccccctcacatctcacacataagcacacacataatcacaatcaaccacaaaccacatgtatcaattaaggagataagtagcacaagacaaagggacctcaccgatgactatgaactgcacaagtcgacaacgaggcatccatggagggaggtgttgttgttccctatgccatgggagaggtcggctagggcaaccataggaagtaacaagggaaggggcgtgtctagggggatggctcggccacctgggagagctacaggcgaccatggaagggagccggggactaccggcattcatggtcaggggcggaagctgagggaagggcaagacgcgacggacgccggagctaggggaaaaagcaggggcgtcgagtggaggtgtggcggctggggaaggacacagggactaacggcggccat

SEQ ID NO: 15473 - DNA, 398 bp, Zea mays
  Coding DNA Sequence Number=SeqID_1070
ggcaaggtatgcgacgccgtcgcctccttcgccggcactgcccacggccgcgacgccacaacggtatcgcgcttcggatgtcatttctcgttgccggagtatcgacgaagggggttgttcgtttctgacaccagtgctgtacggtttgatatgcgggtgcagaaacaactgtgggaggtggaggatgtgagctatgagcagagccagatgctgctccaggagacggaggcggccgtgttgctgcttgacaacgctggtggggcaatggatttctcggggttggatacagttgcgctgccatgaagctggatgaaggctcatgtagtcgattaacaacacttacagaaaccaaatttagatgctgtcattaacaagtcactagtgaaatccatacaaga

SEQ ID NO: 15474 - DNA, 286 bp, Zea mays
  Coding DNA Sequence Number=SeqID_1071
caaggcgccccctgaaaaattgaatttttaaccgctggaaaagtttaaaaaaatttttggttggtgtatggacctgaagcttttgggggacaccaaagctcctgcggcctagacaaaatcgacttcggtcttttttgtagtagaatagcccgtagacccctcccgccccccccagggtgttgagttaaattccaaggtgccctgaatccccctaggcttttcccttccctgtgttggttcctggaaaccccgtccggtaaatccgggtttgcccaaaccaatggag

SEQ ID NO: 15475 - DNA, 303 bp, Zea mays
  Coding DNA Sequence Number=SeqID_1072
tcctgctcacagctttggcgctgtgtcaaccttcgtattctttgggcttctcccactgtggtaccgattcgagtccgaagatacctgttcacacattatactccaaaaacattgttaaatcatgtttttgaggaccttcggcaagccgaaggcccccaacaattttaaaaatatttttaatctaaatattaaacaaaatgacttatcgaaatgaaaaaagtcttctaaaaatttatagcttcagtttcacgattttctgaagcatctaatgacctgctccaccaacttttctgaagtgctcca

SEQ ID NO: 15476 - DNA, 365 bp, Zea mays
  Coding DNA Sequence Number=SeqID_1073
cagatagatctggacctcgtgtatggcggacgcagtagggggtgggtctcctgtgtggatatgcgggatcttccaggctactttactgaactgatacgatgcactcacgtggcgtctgtgcccctgtcccctggtgcctttgcgaacattggttgtgtccatgaggggtgggttccgataaaaggaaatgggtgggactggatccggcatcacatcttgcctgccatgaaaggctacgtggagactctggtctaacgagacccttaccgattccgctggccacttgtgacacgatttgtatatggtaacatcgatcacctactatctaatagattctgacttcccaccactatttcaccggatgg

SEQ ID NO: 15477 - DNA, 337 bp, Zea mays
  Coding DNA Sequence Number=SeqID_1074
acaggcgcaacttgtaacggacattcttggaacgctgttcagcgacacaacaaactcactgctgactgcctcaaatacacagatttccatagctggtgacccacagctgctgcattttgacgacaagcatcttgagtatgaccaatgcccaacatgttgactggacttaatcagtgaataggctgctaagggtgctctagagctggagggtcatcaggcggctcctgttgacctacaccggcaggcggaggctgtcgagatgaactatcctgcgcctgtgctggtggagctagcatacggcggggaggagccaattgtgtccggtggcgcatgctcc

SEQ ID NO: 15478 - DNA, 291 bp, Zea mays
  Coding DNA Sequence Number=SeqID_1075
tggactcgaggatgtcatggataaagtaggggctaacttaatcaacacacagcctggatgctgacggagatgcacacgtcaacgtgtatctataggagcacatgcctcccgaccacgcagaacctattccagccgcccagattgatgtcaaatgaagccaggccgggccgggccaacgctcgccagcagttaacctcgctcaccccgccggccacgagctagcctacgttaatgtggacgccctcagcaaggaggaagatcgcgacgcgggctaagtaaacaacggcgttg

SEQ ID NO: 15479 - DNA, 295 bp, Zea mays
  Coding DNA Sequence Number=SeqID_1076
attccagccaggaggcctggccatcctcaccaacgccgttgtttacttagcccgcgtcgcgatcttcctccttgctgagggcgtccacattaacgtaggctagctcgtggccggcggggtgagcgaggttaactgctggcgagcgttggcccggcccggcctggcttcatttgacatcaatctgggcggctggaataggttctgcgtggtcgggaggcatgtgctcctatagatacacgttgacgtgtgcatctccgtcagcatccaggctgtgtgttgattaagttagccccta

SEQ ID NO: 15480 - DNA, 478 bp, Zea mays
  Coding DNA Sequence Number=SeqID_1077
cagatttgaaaaacccaatcctgggggggttttgccttttttcaaaaagcgggatggggtgatggccccctcccctgagctgctgggcccccggatatttggcaaacccctcctccctgtttccccccccctgggtcccccgggggccacccgctccagattgtttattttttgctaacccccccccttcgttatgcaaaagcccactcttcccgttttacccccgtcgccccgggattcaaggggaaaaatgtcatatttcctgttgctcccagaatggcccgtccggctccggtttaacggcggcggcggctttttaccccccggcccctgctgttgttgggacggcccccccccccagtgggcccccccccccccccgcttggagctgggcctttttttataaggggcccgaaagagtttttggttgcgggtagcttttaagcccctctcgagtaaatgtcctattccacccctt

SEQ ID NO: 15481 - DNA, 557 bp, Zea mays
  Coding DNA Sequence Number=SeqID_1078
aaggaaccccctggctggactcaagggtgatcccagtgatgacttttccttccccagtttattcccagctcccataagggagcgtggcgaaagggtttttgaggaaaggttggcggctgacaatgctggtgacccagaggcctcgcctcgtggccatggccccgcggaagactgagaacttttttgtgaccatcagctcctcttataggagccatggctttgctccctccagcgtttatagctctgcccttttgttttttggagatggagctattcagttcccagcgaacgaataatacgatgttcttagtttcttttttttttcccgcttctttgtttgcgaggatttattggttaaattgtgtacaagccaattgttatggtccagcgaaaaaaaaaaaagaggatgatggcattcccagcgaggtgttgagattccgttgtacccaggcatttgcacccgattgtttggtcctggtcaaagttctgtagaagtcaaaaaacccggcccaaaaaaaaaaaaaaagaagggcttcgccaaaatcagatgttgagaa

SEQ ID NO: 15482 - DNA, 299 bp, Zea mays
  Coding DNA Sequence Number=SeqID_1079
caggttgggaattttgacgagcccgaaaatttgcaagttcttgtgatcaaatcgagcccccctgctaaaatatttttatatgatgattggagcatccctcatacacccgcgggtactgaaattccccttcgtttgggatgaggactgcttcgaacccccaaaagccgacctttgggtcccaagtgtttcccccaatttatctgcttcacccatgaccccgcgggggctgggctcccccaattctcagcccccgttgtaataaagccggggcccttttcatggaaaaattctgtattggg

SEQ ID NO: 15483 - DNA, 379 bp, Zea mays
  Coding DNA Sequence Number=SeqID_1080
tttaatgggagcgtttagaagtgacgcacatgttggcacttggagttatcctcccactatacttgattgcagtcactggtgtcttcctggagtccctgatgcttggaatgaacttgtgttttcgtatcttttgacaaatggttggcgaaacatgccgggctgaaatttatggcagcattgctcaatctacccccactttttgtattttgatatttgacattaccaggtatactagagaattaacatacttccgggacaagagacagctgcatctgctgtaggtacggtggttcactagacttctgcattcttttcttctttttgacttgtatatatacatggtcaagtatgcatggagagctgtacattttacaccaca

SEQ ID NO: 15484 - DNA, 315 bp, Zea mays
  Coding DNA Sequence Number=SeqID_1081
gcgggggtacatggcagtatcacacgggattttgttgttcagtacgctacggttattacgggggccccccggggtgggggtgtgtgtgtgtcgaacgaagcccggtacgaagcaaccagtgactgtcgcgtgaacgtgtccggtccgggctgcaagtaacgtgggctaaaaaaagtgtgcgccgggtggtaatggtggtggggcccggtgccagtgcgcgcggtgccccatgcctgccgcggctgcagcttgttgtgtcttgtgttggttaggttcctgttcctttcggtcaatcaattctcacgcatgccagtt

SEQ ID NO: 15485 - DNA, 236 bp, Zea mays
  Coding DNA Sequence Number=SeqID_1082
taccccctgtggcattttatgtggggcaacaagcagtttttcaagggtgaggttcatccgtggaacaacggcgaggaacaggcgcagccccagctggcgggggccggcgaagtgaccagtccacctgcccagggttcccagtttggctacagcaaatgcgagatgagcaatccgggatcctgccctccgtggtgggccgccctgattgccggccaactcttagtccgcaaggactg

SEQ ID NO: 15486 - DNA, 465 bp, Zea mays
  Coding DNA Sequence Number=SeqID_1083
gtgcaacttacgcaaacgcgacctaacgaatcgaatcaaattcgccgtctacctcgtcggcgtcggcgcaccggcctcgagcccagtcccccgtccgagtccgatcagccaccggagatgcagcacgggagcggcgactacacctcctccgccccctccggccactactaccagcaccaattggtctagatggaattcgcatgcttgatccgagtacaagcaggaccctgaggatttatccactcgtttcactgacaagatgggaggttttggatgcaactatatttgcattctgggcgaagacaatagtggatattgaaccaaagagaattaggctgaagtcaagcagttatacttcaaatactatgcttgacactgtaacagcagcaacagtgcagtttaaggagataggtgcagatgcaagaagcagaggagcaatagaaactggcaaacccttggtacaat

SEQ ID NO: 15487 - DNA, 432 bp, Zea mays
  Coding DNA Sequence Number=SeqID_1084
gcatcagtctgcatcatgacgcatgtggcgtcaatgcacgggatcctctcctggcagaggtgcaatcgatggtgtatgatcacacagagatgaacaagcagatgcatgtgaagaatgagggaagcatcaagctagcttgcgacgaagctcatcgtcaggcagaacaagtacaatttaagaccgtgtgctatttaagtatatggtggcaaataatgggatgcttgcgccgcagcggtgcaacagtggggcgtttcagacccagctaatggcaagctcttggtgttaggtatctacgttagctccgtacgtgtcttcggagtcgatcaactatcatagtatagtgaagacgtgagcgtctctccagttccctttccataccacgtggtactgtgacatgtcgtgccttagctgtcatgttagccacgtactata

SEQ ID NO: 15488 - DNA, 413 bp, Zea mays
  Coding DNA Sequence Number=SeqID_1085
ggcatctctggattgaaattcttgggtgtcgcagggaacacagaactccgttgcgtttgtgctattatcaggaattacaggcagaggggagaaaatgaggaaaaagaattatctatagcaggagcaccgcaccaccaaggggactcaggctcagccagcgagggcgtcggcaccggcgcacgatctcgaggatctccccggggatcttggcctggcgctgccggttggaggcgatgcgagagggtcttgcggagctcgctggcgctgccggtgccactctttatgcccatcatacgcttgttcagttccttttctagcactactgctttaattcgctgctatgcacatccagctacatggacctttacttacgcagaatcacacctgcttcccaatctctctgttctctactg

SEQ ID NO: 15489 - DNA, 465 bp, Zea mays
  Coding DNA Sequence Number=SeqID_1086
ttgagcggccgcagtgacaggtacctgctctacgatagcagtggttaatgatgcatgtcagtatgatgtcactaagatatgcagctcttgtgtgtggatcgttattatccgccgctcttctaatcattagatttcgaaagaatttcgatttcttttcaataaaggaaaatgtttttcttccaccatttttctttagtgagattgaatatttatatccaaagagtagtgctttcgaggcacctcttttcccgtatttccttaattatttctaataactctttactccgcgttcgtaattatgaagcatatgtgtctggtctttacggtcattataatgtgcgtcgtgtatttgctgtgaatcagtataggcataatgaggcatgggagatcgtattgttcttcgggatctcatgaatcagtagtaggttggaacgtcagcgaaatctccacaagggttggatcgga

SEQ ID NO: 15490 - DNA, 123 bp, Zea mays
  Coding DNA Sequence Number=SeqID_1087
aaacagtggcccaccctgatgggcaaagggcccccccctgtagcggccctttaagcgcggggggggggggggttccccccagggggaccgttacattggccagcgccttagcgcccgctcttt

SEQ ID NO: 15491 - DNA, 541 bp, Zea mays
  Coding DNA Sequence Number=SeqID_1088
atcagggccttggatgtgtgcggaaggcggccttcagggcggtcgttcggacaggggcaagcttttttttgttttgttgttgtttttggagtccttcttgtcgccgcgacggctgccaggaccggccgtgactgctgggatcaagtcgagagggctcagatgctcagccactgccaggatttccttgacgaggtgtccgatgccggcaggtgctccagggatgtaaggggaagcagcggacgaggcggcatgagaggaagctggctcttggagcaatgctgtgatcagctcaccgagatggatcacgactgcatgtgcgaggggctaaaggcgattgtgcacgaacaagtacggctcagcccccgatccttcttcggtggtcgtctgggcacacaggaggagggcggtgagtgcgcccggatgcttccccagctttgcggaatgggaaggacctgctaccagctccgcgccccctatcgcgcattgtcgccgccggccatgtctctcttgcataacaagctctctacaatcgcaactacct

SEQ ID NO: 15492 - DNA, 578 bp, Zea mays
  Coding DNA Sequence Number=SeqID_1089
gaggatctatctcaacctcatgcgacacatcacttccttcgagcagttgacacaacttaagcatgtacactgctgagtctggacgacaactatgtgcattacctagccacctacaagcgtctagaaactagccatcacaaacctgcaactgccttgcatacagagcttctaaatcctgctggcattgctgtcagagactccacattgtactgccatgaaagcatccaaagcatggcgtgtctatgccgctatatgccactaattatgtgagacggaaagaactaagactagagcacggaacagattgaaacatgatgcaaagaccactgcataaacgtatggtgcccgtgacaacttttcagcctgtctactgctatatcatgtgagaaagtgagagttaaactggtctggtcataggcaccttcaaacgctcactatcataagctgtggtggtatctggcgaatgaatgcatggtgcatctccagcatctaagaattctggacagagagagccagagaaaaatacgcatggccaattggaatctcaagatgtcattgggactacaggttccctggat

SEQ ID NO: 15493 - DNA, 464 bp, Zea mays
  Coding DNA Sequence Number=SeqID_1090
actcgtccggtatcacagcagagtgcgtggcagcagagcattggcgctgaaccctgctgcgagccctgcgctagaggacttctctcgagaccgctgcgcccgccgtggcaccggctttgaccaagctgaccttccgtctcctgttcattcgcctgaccagtccacgcacacgggcgaggactggggacaggacggcggatgaccagctgggacgacagctggggagacactttcccatctactatggcctatgctacggcccccacttcggcgctcacttgcagggtggctctgtgcaaatcactggctaaaaccagctattcaacctcctattcaacgtcgagtggcttaacggctggatgctggtctccaacctggtgatcaccggtgggttaaacgagggggccatctactgtggcatctacgggggcaccatggtgaccggcgtgataccaagaatgata

SEQ ID NO: 15494 - DNA, 321 bp, Zea mays
  Coding DNA Sequence Number=SeqID_1091
gagaaatttgttacctatacctagggggctaggtaggcggtccgtcatgatttcatcccacgaagtggggggggcatcatcgatctttctacaaacatacagcaaaatgctacacctctctcgccctatgggttatgggaaacattacaaggggttcaaagggttcattctatctatcacatactcccatgcatgcgcttgaaactacctaccacttgttagcttggattagtcagcttcttggaactggttgccctggtcggttcttggtcaggcttagctggttcagttcggtcagggcccctggaaccagcctattgg

SEQ ID NO: 15495 - DNA, 426 bp, Zea mays
  Coding DNA Sequence Number=SeqID_1092
tttgtaagcctgttgttggcgtggcttgtgttcgtcaacccatagcaattgttgggcttgtgtagactagatggtcgcaaaattgcagtatgatggattccctttccctcttataagagtttcttgaccatggggtgcctcaatcttggttatgctggagggctgtgctgatgcaactgatgggttatggtgtgcctaaatcgtggctatgctgacggaatcgattggtgaagatttcgttctaaatggaccaggtgtgactgcccaggtgttccttctacttgtacgttgcttttttgacggccctgcccatggacagttggtcataagtttctttttgatggccctgtatatattgttggcccattttatctcttgcccgttgcagtagaagttcgagggtatgagaaccccagtttcaaagtt

SEQ ID NO: 15496 - DNA, 224 bp, Zea mays
  Coding DNA Sequence Number=SeqID_1093
aaacgaagagtgggccaaatatttggtgtgtggagttggatggccaaggctagattcgttggggttgcagtacccctattcctttttctttgagaacatattcttttgtccaattagaatctgcaattttttttaaggttaccagtgaacaactgggaacctgagatcagttttcccatgtagttctcaattggtcgggtctgaaattttctcctgggacccat

SEQ ID NO: 15497 - DNA, 378 bp, Zea mays
  Coding DNA Sequence Number=SeqID_1094
aaagcagggcgccaaagcaagcaagaaggagagccctagctccaaaaaggccaaaactgatggtcgggagggagaggaaccagtgaagtctgaggttgaggatgatgatgaccaggatggcaatgaggatgaaaatgagtaaatagtaggatggggaccagcagctttgcaattgggtgtttgcttcttgtttagcctccaatgtgctgttccttttgctgttatatatgctgtatgctgtaagaaaaatctgtacatgatggacccttagggctatggcatgctggagtgcccgtttaactagaggagctggatactcttgccacccttgtcagcatgtgtaaactgttgtttttccttgtttttatcgacataatt

SEQ ID NO: 15498 - DNA, 366 bp, Zea mays
  Coding DNA Sequence Number=SeqID_1095
cacgcgtgggtgctcccggaagagatgggcatgcagaagcttgttttatctggcagcgcagaggggaagcgtgaggcgatcaggcagctgtgcttctcgcttgatcactaccgccgtgggtgccagcagcttcggcagctcctgcaggaccacaggaggcccgtggtgatggcgacatgagtgagttgcgtacccttcctggatgttgaaaggatgtcggatctctgaaggtggcttctcagtggtatgctgtctgacgatgtaatttgtgctgtctccttcccctcttcctacacaatctggcgtaaagcttgtgctctgtggttacttgaactgtccggttgctcgtgatctggggcgtgtaat

SEQ ID NO: 15499 - DNA, 337 bp, Zea mays
  Coding DNA Sequence Number=SeqID_1096
tgccgtccggaaactcatgacattgaatttcgacctcgcactgccattaaaactcaagcaccggttgactttgtattggagtggaccgaacaacaagttccagattacccagaaactgcagaagtatggcgaatgtcttttgatggttcgttaaagctgcaggtgtaacacccctggtgtttaaataccgctcgacaacgagtatggatttaagcccgtaatatcagtggataaaacatatgctaaattttaatcatcttctatcgcgattttaatatcgcatctgtttctgtctatttagactcctaaaattttcgcgaatttcggaacgcaattg

SEQ ID NO: 15500 - DNA, 451 bp, Zea mays
  Coding DNA Sequence Number=SeqID_1097
gtagtttttggtgccgaatttacataaaaaatttttttggcgaagctttttttagaatttgtccggaaaacttcggcccccctgtttatgccccccctgggcctttttaaataaaaagggaatggatttatgggggtgggggggtccccccttttaaaggcgcccattatgggtgggcttcccccctggggaagaaacttttcccccccatcgtaatgtaatggggggggattttcgaatgccaaagcccaaagtcacccctggcttggaaaaacgtagggggtgccttaaatccccgtgggccccttttttgggccttccagaaccccaaaaagtttgtcctcccccggcctggccccccttttaagggggtttgtggggcccttccccaacgctcatccccaatgggggaacggggtttttttttgaaattgttttccacccagggttg

SEQ ID NO: 15501 - DNA, 427 bp, Zea mays
  Coding DNA Sequence Number=SeqID_1098
ttaatcccgatcgacgccgaaagggccggccggcaccacccagccccgaaccccgacgccggggcggccccctggtgaaagcaccgcagggtcccacgccgtcgcccgtgcccgagctgtcaccaagagtttgctcccgagggtgggtcagggccctgggcactttcccgcgtgaaaagaaggagggagcggcccccacgcagggagcaagggaaaaaaaaaaagagaatgcctgccctgcatgcatggctgccccaggcaatttcgtcctaaaatgtcttactgtgatttaggaaatgaaaaatcaagctaagctggaatcatatattactacttccgttttcgtcttgttgggttgtgccgatttacaagaaccttttacttgccggtgatttttggaaatcgagaagttcatcatatttcctcc

SEQ ID NO: 15502 - DNA, 440 bp, Zea mays
  Coding DNA Sequence Number=SeqID_1099
tgtttccgccgtgcgcagttttcggggctccctatcccccgcgggattgggtgcctacatgccgcggcccggtgtcaggctctctctcacatctttctggcggccacaagaaagtgccgtgccaaacacgccggggccggtctcagccaaatcccctcaaagccacggtgccgggacgcggtcaaacgccggcgggccctcattcatccgccctcgcctgtgacgcgccgcccgccgggaattatgtttctagcaccatctcctcagaagttgtgttcgccagctcgctcgttctataatcaagaccttgttgattcccttccctccatatattccttcacacacaccaatataatgttgtgtgccatatatgaatttttatatatatatgaatactatattacccaccggtacaaaacacaacttattgcccaagccaa

SEQ ID NO: 15503 - DNA, 515 bp, Zea mays
  Coding DNA Sequence Number=SeqID_1100
atcttgtcctttctttgcgacaccagtacgcgcaacagttatcatctacccaccacctatcccttagtgactagagagtgtgatttgtagtgttcagttgagctcttgcgcttggatcgcttcttttctttgccattctttcttgtgatcaaacactccattgtaatcaaggcaagaggcaccaattgtgtggtggcccttgcgggaagtttgattcccaagtgatttgagaagagaagctcactcggtccgagggaccgtttgagagagggaaagggttgaaaaagacccggcctttgtggcctcctcaacggggagtaggtttgcgagaaccgaacctcggtaaaacaaatccgtgtgtctcacttcttatttgcttgagatttgttttccaccctctctcgcggactcgtttttatttctaacgctaacccggcttgtagttgtgtttatatttgtaaatttcagtttcgccctattcacccccctctaggcgactatcacaaggtatcacc

SEQ ID NO: 15504 - DNA, 511 bp, Zea mays
  Coding DNA Sequence Number=SeqID_1101
aaacctcaggtggatcgctacaagttggccaatggacaccacatcatacttctggcagaaggtcgtttagttaatcttggatgtgccatgggtcatccttcatttgtgatgagcaactccttcaccaatcaaaccttagcccagattgaattgtggaccaaacctggacagtatagtgttggtgttcacatgctaccaaagaaacttgatgagcaagtcgctgcccttcacttagaccacttgggagttaagctgaccaagctcacagctgaccaagctgcttacttgggcattcctgctgagggaccctacaagcctgatcactacaggtattaaatactgtcaaaatacacctctgcatttttcaacattgccatacaaacatcaatttgtcaacataccatgtgaaattaattttaaccagacatcaccctgtgaatatttgttgtgatacaatcttttttaattttacttctgttactttttactaccaaactggttttgcactttg

SEQ ID NO: 15505 - DNA, 498 bp, Zea mays
  Coding DNA Sequence Number=SeqID_1102
gccttgctaagcttcgtcgagaactcatcactcctaagggtggcggcggcggggggccaggagaaggttttgatgtggccaagacaggtgatgctcgaattgggtttgtgggttttccatctgtggggaagtcaactctgcttagtaacctggcaggggtgtattctgaggtggcagcctatgaattcactactctgaccactgtgcctggtgtcatcagatacaaaggtgccaagatccagctcctggatctcccgggtatcattgaaggtgccaaggatgggaaaggtagaggtcgtcaagtcattgcagtggcccgaacctgtaacttgatcttgattgttctggatgtcctgaaacccttgggacataagaagataattgaaaatgagctggaaggccttggcattcgcttgaacagcaaaccccccaacattggctttaagaagaaagacaagggaggcattaacctcacagccacttgtcctcagagtgaac

SEQ ID NO: 15506 - DNA, 506 bp, Zea mays
  Coding DNA Sequence Number=SeqID_1103
gccacctggccttgggttaagacgactcccactcccacaacaagggggggttgtaaattggctttgaccgggtggagggaatagagcttcccccgggggccccggccccggcggttgttaaaaaacaggtaaggttcgcggtggctccccccagaagccccggtgtggacaaaaccgtgttggagaaactgcccaaattgttcaaggcgcccgaggccggcccggggttcatcttgggcccctcgcacgtaaaaaccaagcccgggtggtcaatactcaaaaggttgcccgtgggggtgggttacaactttttgcgagggaactcccccggcccgaacgtggttttgggggtgcccccggggtccttgctcaaggtgggaatggtgtacgtcctgtaaccaaaacgtggcggtgatgggggactgcgatttttgggtccggttttcgcggggtgaactggggatctctcccccctgcaaaaaaaaattcctattatgcccatctcg

SEQ ID NO: 15507 - DNA, 355 bp, Zea mays
  Coding DNA Sequence Number=SeqID_1104
atttctcgtacaacaactcgattaaacaggaagtgatttggaactgtggaagttctgcccccgcttgcaggactcttgtttactggtcccttctgacggagcacggccgggtcgtctcaggggcccgcccgtccgtgcagactacgttcttggcggttgatagtttcccgctggcgattgttcgccgcgtcagttcatgtacgtatgtatgtgtgtatgctactctgcggtggcgaatgctttttctgatgcctctgtcgttgtgtgttcatcaccgtcgtgtgcgattgttctttgggttgtctttgcctcaataaccctgcttcattctccagtattctatagatgagtgcta

SEQ ID NO: 15508 - DNA, 323 bp, Zea mays
  Coding DNA Sequence Number=SeqID_1105
taaccaaagacgtcatatgctccttaaattttaagaggacatctggtccttagattgtaaaatctcatggcgtatgtttagagggtatcagatggggtggttcaagcagacctgacttctcgtgttcctgtgcaccaatgtagtcgtcctgggtgtcgtgcacgccactggagatggaccttacatcccatcttcccatccatttgttttaagagctgctggtggtagagctaatggtgatggatccaagaagacagagaacatgtgatcgacctaaggcagtttcagctccagagaagaaggtccattactcatgcaaatgc

SEQ ID NO: 15509 - DNA, 472 bp, Zea mays
  Coding DNA Sequence Number=SeqID_1106
ctaattttatgcgtggttcctcttcttatgtttctcatgtcttccttcatttttatccactgtttgccttcagggaagactaatttaaaaaaaaagatgatattggtactgaaataccatgcactgcccgtcatctattttttcatgttcaaagtattaagaagcataagcaactactccgcaagctatatcatttacgcactattaggctcatcgatccgctaatggatggtccaagtgatatttttgatggcatcctacggaaccaaacaaaactgcgtgtattgtctctgtcattttacagcagcagcaagttgccagaatctattggtgagctgaagcgcctccggtatttgtgttgagtttgtgatccaaattcttaagaagccggccggggtggcgagcgaagcggaggcccgtcgccgggaggcttgggccggcgttttagggaaccacaaatataaatccttct

SEQ ID NO: 15510 - DNA, 236 bp, Zea mays
  Coding DNA Sequence Number=SeqID_1107
atggcgcagcgcctctgatccttcatcctcgcaccgcagcagccgagctcgccccacctcccctcactgcgcagcccctcgacgaaacgccgctgttcctgcagccccgacaccttccctggcttcctcgctgctagcgctgcgcgcgtgccacgtgttcggcgatctatccaagtggggtgttgagcagtgagcagcacgccgtcgacgcccgtcgtgtgctcgctgttttgcgc

SEQ ID NO: 15511 - DNA, 323 bp, Zea mays
  Coding DNA Sequence Number=SeqID_1108
tttccacagggcaacagaatatgaggtatttatcagcacttcaccagtgcctgcggcttgccagcaaagaaattgcagccggcgggttgacatgatacagtaaacagtaacgaacacacaactgcaacccacctgccttcagaaattttgttataccgccattatgtacataataaaaaaccagttcagctccggcacttttattggcacgtctgccgcgctaaattataaggtcctcaggtttcatctgtccagtgtaccagtgcagtgcgcagtatgggtggcatgcaacggccgtttcgccagcccggattcagatgaga

SEQ ID NO: 15512 - DNA, 538 bp, Zea mays
  Coding DNA Sequence Number=SeqID_1109
tagatctgagcctcccgtgaccgaggccgcgggtagacaggcatacgatggccgatgagcctccaccgccgccgctagcgaggaagagcgcgccggcgcagccctggtcgcacgtcgagaccacgcacctcatcgacgcgtacgaggagcgctggacggcgctgcgccgcggccagctcaaggctcaccagtgggaggaggtggcggccgaggttgccgcccgctgcgccgccacccctggggtcgtcgcccagcgcaagacgggcacccagtgccgccacaagctcgagaagctccgcaagcgctaccgcaccgagggcgcccgccccgtcacctcgctctggccctacttccgccgcatggatcgcctcgaacgggggccactcgccgtcgcgtcttccgcctacccggccgcgactggttctccgcctgccgccgacggcgacgaacaaggagaggaggaagactacgaggtggaggaacacgaagcggaataataagacatgcacgacgcaaacgagcaggatgaaaaactccc

SEQ ID NO: 15513 - DNA, 533 bp, Zea mays
  Coding DNA Sequence Number=SeqID_1110
gccacctccgagagcctggatgtgatggcgtcacagaagagaccctcccagaggcacggatccaagtacctggccacagcaagtaccatggaccatgccaggcatggcttcctcccaaggcacagagacacgggcatccttgactccatcgggcgcttctttggcggtgacaggggtgcgcccaagcggggctctggcaaggacgcacaccacccggcgagaactgcccactatggctccctgccccagaagtcccagcatggccggccccaagacgaaaaccccgtagtgcatttcttcaagaacattgtgacaccacgcacacctcctccatcgcaaggaaaggggcgaggactgtccctcagcagatttagctggggagccgagggccagaagccgggatttggctacggaggccgcgctccagctcacaaggggctcaagggcaccgacgcccagggcacgctttccaaaatcttcaaactgggaggaagagatagtcgttccgggtcacccatggctagacgctgaag

SEQ ID NO: 15514 - DNA, 312 bp, Zea mays
  Coding DNA Sequence Number=SeqID_1111
atccgcccgactgccgaggaaaggtctggttggtcaaggtcccggccgggatatccaacaaccagcagtgcaacaagcaagatttacctgcccatcgatcatatcgtcaactggtccggcagttcgcgacaccatgagctccacggagtgcggcggcggcggcggcggcgccaagacgtcgtggcctgaagtggtcgggctgagcgtggaggacgccaagaaggtgatcctcaaggacaagtcggacgccgccatcgtggtgatgcccgccgattccgcggtgaccgtgttttatccccctatccgagtccg

SEQ ID NO: 15515 - DNA, 326 bp, Zea mays
  Coding DNA Sequence Number=SeqID_1112
atggacgctctcatttctcggcgcacggcccagcttccgtcaaaatgtctactgggcacggaatcctgtgcaagctcagcttggagggtgatcactctacacccccaagtgcatatgggtctgtcaaagcctacaccaactttgatgctgagcgcgatgctttgagcattgaaacagccatcaagaccagaggtgtggatgacgtcaccattgtcaacattttgaccaaccgcagcaatgcacagagacaggatattgccttcgcctaccatagaaggaccaaaaaggaactttcatcaacactgaagtcagccttatctggccac

SEQ ID NO: 15516 - DNA, 348 bp, Zea mays
  Coding DNA Sequence Number=SeqID_1113
cctgtggaaattttgctggtggccccacttacaatggaacaactggtggattccaaactatcccagttattgatccggattggggggaaccggtttcagagataacaaatttcattgagcttgaacctgaaaatgaagttatctcttacgatactgattctgggtacaatggcatggattagtattcaagtgaaggggaacagggtattattagggggggttctttcaggtccttcatattccaggggggaaattggtgccgattaccctggatggtgctcaatctccgccgatccaggagaaaggaggaaaaatctggggcttgacctggttccttcatcgggccgg

SEQ ID NO: 15517 - DNA, 465 bp, Zea mays
  Coding DNA Sequence Number=SeqID_1114
gtaaatttgtgctttgtgtttctatttgacgtaaatctgcttaatcttgttcaaatctgacattaactattgtttgttggcatatacaggatcaaaacggaaaaaagcaattattgcaggcacgctgtcgtcccttctattcttgtgtctagtcattctcacattcttctctgcttacaaatacgggatgctgccattcaaatcgaaggacgaaccaaggatcgagtcctttctacagaagaacgggaacctgcatccaaaaagatacacctacgcagatgtgaaaagaatgacaagatccttcaccgagaagctaggccaaggtgggttcggagccgtgtacagaggcagcctccacgatggccgccaggtagcagtcaagatgctaaaggacaccaaaggcgatggcgaggaattcatgaacgaggtggccagtatcagcaggacttgtcatgtcaacatcgt

SEQ ID NO: 15518 - DNA, 570 bp, Zea mays
  Coding DNA Sequence Number=SeqID_1115
aaacatctcacacacaatcacataacaatatttaaatacatagtctcatcaattacatcacaaaagtctcatccatagtcataagacacatctcatccagtcataataagagacaatatctcatacatagtcataataaaagtctcaagtatcacaacacataacatggaagctcacgatcgtcgatcgccatcggggtatagcgacgagtgatggtcgatacctccactagcgaagagggcttcgacaaagtctaaccctgtcttctcgttcctgatgttcggtagcttgagatgtaggtgtaggtggaggtgaagaccaaggataatgtacgagaggtggtggtgctggtggtattggcaccaggacgtgtatcccttgggcctgtgctagttccagtggcgtatcaaaagcaaagaagttgcgcagcatgcttgttggcaacaaacaccatccttatattagacaggtaaattgtgccttttgtcttcacattaccaccaggagctctaaggatgtatacacctgcggcgagcttttgtggtatccagttaaattgtatgctcagct

SEQ ID NO: 15519 - DNA, 162 bp, Zea mays
  Coding DNA Sequence Number=SeqID_1116
tgaccaggtctgaagacccccgcgtctctcgtccggacactgcccagattagcagagccttccacccgtggcagttcgtttgtgtagccaaccccagggaaccggacatccaatactcgtaactggtgaccagcaatcaacctcgtgattaatagcaaacat

SEQ ID NO: 15520 - DNA, 439 bp, Zea mays
  Coding DNA Sequence Number=SeqID_1117
aaatccaagccactgatcaaacagtcagcattttctttcttaatcacataataccctattggcaagagcacaacaatgatccaattggaaaaacaaacacacaaaagaagagaggaaatccagacaggaatatttgttcggaattgcctacatgagagtacaaattacacaattgatactctaaacttctctgatataaacagagtaagtttgacaacgataaacagagaaaatatctattgtgcccgcgtactctgcgttgttaccactgcttgcctttgtgtccagcttttgataaattagaaattcttaattgcctttttcctaattattttttgagaagcttttaaagcacttttcacctttgggaaatgacaattattgtttgtgtcacatcaatctcttactaaattttataattttctctttccctctaaca

SEQ ID NO: 15521 - DNA, 294 bp, Zea mays
  Coding DNA Sequence Number=SeqID_1118
gcctgcgtcatattttttctattgtggcgcctactaaaaataatctgctcgccgttgtacaacaacgtgacggctgaaacaaccccggcaccacacatattaatcgtgtagcacatcatccttttttcagctggtgtcataataacgaggagggcaccgatcgtcgttcttaacaacagttgagcatgcttgatggatgatgcgacccgcgctgcagcgcatcattcaccgcggctggtgtggtgtctacccgcatgaccactactatagttagcagcctactagccgctcctt

SEQ ID NO: 15522 - DNA, 363 bp, Zea mays
  Coding DNA Sequence Number=SeqID_1119
gttggtacatgattagtccaaatcatgatttacacaactaaccactgttatcatgtcagatggaagattgaacgccacttcatatcttagctttcatgagtagtatgcatctattgggatttcatatacaagattagatgctgaggcatacaacactataccacgtgtagcgtaatgacaaaagagttggtcatactcatggcccttcccttttgaatgtgcttatatatgtgctttcacgcaaactgtatgaatacatagtgttagtctacagcataatgtcctcacatactcgtccaacaacaaggaatcgctttgagatgaggagccacaagaaggggatcgatctctgcaggacaccat

SEQ ID NO: 15523 - DNA, 292 bp, Zea mays
  Coding DNA Sequence Number=SeqID_1120
aagctcgccggttgctactttttcatgtgcgccgggaccgcagccaaggtggatctgctcaaatgcaagctgggattcgaccattctttcaactacaaagaggaacctgacctgaaatcggcgctgaagaggcacttccctgacggcatcgacatctacttcgagaacgtgggcggtgagatgctggaggcggcgctggccaacatgaacccctacggccgggtggcgctcatcggcgtcattttcgagtacactggcggcgcgcggcgcgcggtgctcgacctgcttgagg

SEQ ID NO: 15524 - DNA, 534 bp, Zea mays
  Coding DNA Sequence Number=SeqID_1121
aacccttgaggttgaatcatccgacaccatcgacaatgtgaaggcgaagatccaagacaaggaaggaatcccaccggaccagcagcgattgattttcgccgggaagcagctcgaagacggccgtaccctcgccgactacaacatccagaaggaatcgacgcttcacctcgtcctccgtctccgtggtggtgctaagaagaggaagaagaagccctacaccaagccgaagaagatcaagcacaagcacaagaaggtcaagctcgctgttcttcagttctacaaggtcgatggttctggtaaggttcagcgtttgaggaaggagtgccctaacgcaacctgtggtgctgggactttcatggcgagtcatttcgatcgccactactgtgggtagtgtggtctcacctacgtttaccagaaagaaggagctcaggcctgatctgctgctccatctctatcattttgaattgaatactgctttttttttggaatttggaagttgtttttggatgttgtggatcttatgttgaacttgtt

SEQ ID NO: 15525 - DNA, 591 bp, Zea mays
  misc_feature (229)..(229): n is a, c, g, or t
  misc_feature (405)..(405): n is a, c, g, or t
  misc_feature (549)..(550): n is a, c, g, or t
  misc_feature (558)..(559): n is a, c, g, or t
  Coding DNA Sequence Number=SeqID_1122
attcgctcagcggtacgggcacggtgctgcgctcatcgtggcgacgccattgatggtgatcttcagccccgtgctgttgccgctgccatcacggcagcgctgctcacggtaggcatcgtttcgtcgggagtggtcggcgtggctgcggtggctgtgctggcgtgggtgtaccgctaccttcagaccacgaccttcgtcgtcgggtcagcagccgctacatcgtcaaggnactgggcgcagctagcactcgtctggagcagacacgctgcgctactgaaataaaaaaaaaagcggtaggtacccctccggtttctttattattatgttgcatgtttagttacatattatgtcacgtgtttcgattaaaaaatgaacttagctgggaataactgagaactgggacgngtaaatatagctttttcatttacactgtacatgtaccggtaatcattatgtttgcagcaggtaataaatgtgtatatatatatttgcagctaataaaagcgaagagacaagatcagacccctccctacgcaataaaaaaaaaannaaaaaggnngctggcctctcgaagcctgaattctcgaggct

SEQ ID NO: 15526 - DNA, 169 bp, Zea mays
  Coding DNA Sequence Number=SeqID_1123
gccacgcgaaccctaactgatctaatcccgcatgatgcccacaaagtccagcaccttgaccctatcctcgttatgtttaacccggactctacggtgctagagcttgtcggaagcacttcggtaccagcaaagggagcagctggttatattaatgacactgcacaccccg

SEQ ID NO: 15527 - DNA, 427 bp, Zea mays
  Coding DNA Sequence Number=SeqID_1124
gggcacgatatcctctggattccggccatgtgtgcttcaggtcggggctaatgccgctcgattggtggtagcgcctcccaacatccccgcacgtataggctcacctcaccgttcggtggcccaatcggtcaatcgaccgcggacaccaccaggagaggctcgttggcttcgatgccacagggagggtggtccccgtcggcgtcgtccaaagtcaggttcaaggcgcaggcgcacgagtggcgcgacacggctgctcctgatccggtgatgggttcccggttcctggacgactccttcaattgggaattccgacgacattcacgggggatttaaggacgagcgggggcgagcgaggatggaagggggcgcggcgtgggagagataatggaaggcagacaagggacgccattcacgacggctggaagtg

SEQ ID NO: 15528 - DNA, 371 bp, Zea mays
  Coding DNA Sequence Number=SeqID_1125
atatgggcaaggtacatgcacgttcagaaaagattacaagctttcacctaacacaacagttggtgataaaggaagccgctcgattgtttcggcggcgttatacaaagcaaaccacagtaatgcgttttcgcagaacttgtcacaacaacactagaaagatctaaaaagattggccaatgatatgaaaggacttaaatattttagggctcagacaaagaaggctaatttccatgtcagaccaaggccgcagggaccggatcaaatgctgtcccacatgcgatcaccaacctgactcgcctccataggggcaagaactcaaggaactctttgtggcattggccatatccaaaggctgtttccaacaagggcaa

SEQ ID NO: 15529 - DNA, 249 bp, Zea mays
  Coding DNA Sequence Number=SeqID_1126
ggatggcatcgaatgtgtgcttctggtgaataaggtaaagactgccagggtcttctcttctctggccaacagcccgcagatgagccccgcgtccacccagtgctgagtatcagcgtggtacgcttaggggtcccagttcctttagtgagacagaataaagcgagcagtttttttttgggtctgttttatgatggcagatctcttttgagatatgtacatgtccatgcagactttgtccccctaggttgg

SEQ ID NO: 15530 - DNA, 381 bp, Zea mays
  Coding DNA Sequence Number=SeqID_1127
ccaatttctcgtcggcgtgggaacatcaccgcggatctgcagagcacgtggaccgatgtctcctcaccatcattctctgctataagctaatcgcttgtacgtgcccctaccagtccccgagagctccgtgtccatggactcgccaccgctaaacagagagtagggggaaagcgccgccgcgaaggcgtggccggccacatcgagcgggaccttggtgactgggagggtggccgagatgggtgctggtgaagggactcgcgcacgcggggcgccgtgggagtagtggagattgttcgccggaggtgtgaaactacgccaagttaccctccgtcgtgaacccgctcggccatcgcttaaccctccgcgcgaggtttcaagtca

SEQ ID NO: 15531 - DNA, 482 bp, Zea mays
  Coding DNA Sequence Number=SeqID_1128
aggtcattagcaaattttaggtccacacctgtgcccctttggggcccttgacccgcttgtgtgtttcggtcccaccccgctcgctgctgcccttttcggtgtcgagtttgcctcctaggtttcactcccgcccatttcacccccagaggatcgtcatagcaacaaccagccccctaactatatcttctaagatatgtaaacatccacttttagtgatgctaacaaaagtataccataacaattagtgtttttctaagatatgtaaacagccccggtaaggtggagcaggagcgaggagggatatagcggcagcggcgtctggtccaaatctccccccttagataaaaccttctggaaaaaactatgctttgctcccctttttaccattcaaggcctgctttatttttcttttatcgcccaaatctcccaactttttaggttctttttttttgtaaaatataacaagctgatttaatcttgca

SEQ ID NO: 15532 - DNA, 333 bp, Zea mays
  Coding DNA Sequence Number=SeqID_1129
acgcggccgctcaagtcgatgtattctctgatatccagcctctgatcagagcggttcttgatggggggaaggggtgcatttttgcctatggtcaaactggttcaggaaagacttacacaatgagtgggccaggcacatcaaaagaagactggggtggtaactatcgagctgtaaatgacttgcgtgatatctctctaaggaggaggaatgctggctcatatgaggggggagtgcagatggttgagatttacaacgaacaagtgcgggatcgtttatcaaatgatattgcacaaaaaagacttggaattgggaggacatctcagcctaacggac

SEQ ID NO: 15533 - DNA, 343 bp, Zea mays
  Coding DNA Sequence Number=SeqID_1130
tacacggtggctgatgattcgtactgggaggacacacatctctatatagtcgggtttgtacagcggtgtgctgatgattcgtgcctgggggaccacagaaaaggggatcctatatactcagggcagttgagggaaaaatatccaccgccctttcttgatgagctttacactttgtttggtcgaaccacacgcaacaagggcaatttgattagtgctggaggtgtccgtgagcccccgcgaacctttggcagccaggatactcctgatgacggtgtgggttgctccaatattagatcatcgtctaaaaggccaatcagggaagccacaatggatagccatccta

SEQ ID NO: 15534 - DNA, 184 bp, Zea mays
  Coding DNA Sequence Number=SeqID_1131
acgagtaggaagttgatcgtgcggggccccgcgtccagatcgtccgcggtcaccggctggttctcgcaggacctgggcaatgtccacgcggtgtcctgttacaagtcctccacggcgagggcgagggcgatgccttctcacgaggtggacgtacacggcttcgcattcaacagttccgtaattt

SEQ ID NO: 15535 - DNA, 323 bp, Zea mays
  Coding DNA Sequence Number=SeqID_1132
aaaactgaacatcggatgctagctggactactgcacccgataaagatacctaaatggaagtgggaagaaatcggcgtggatatcattgtcgggttgcctcgcaccccgaaagggtatgatttgatatgggtgattgtgcataggctaaccaaagtagctcacttcattctggtcaagactacttacaagggatctctgtcggcagagttatacatgacatcggattgtgtgtttacacggtgtaccaaagaagatcgtttctgatcgaggctcacaaattacctcaagattttggagaagctttcatgaaaatgtggatacga

SEQ ID NO: 15536 - DNA, 415 bp, Zea mays
  Coding DNA Sequence Number=SeqID_1133
aaaatatttgccatctatccactcggtattgtgctataatgatgttaatttaatctggttggagatggcaaattatgtgcctgcaggagctgggccagtggactccgattctactgaaccgtttttctgttgagtttatgatctaaattctacatataaaggctggtttcccccgaaccccccttccaaactagttgaatggttgataaactgtctatttggctatactccgtgttgagtttgtgatctaaattctacatataaatgccgtgttggcgtcgctacactccggcccgaggggcggagccctccgcagtatatattattgaccctaattagggtttgttgtgcgtcgtcattatttactcctcttgtaagccaccgtctacagacgacattctgtaaacactccata

SEQ ID NO: 15537 - DNA, 93 bp, Zea mays
  Coding DNA Sequence Number=SeqID_1134
ccatatgacccattccattgtggagccgactcactcacaggcaggcaggcaggagcagtatctatcccttctgctggcctcagctcctcatat

SEQ ID NO: 15538 - DNA, 366 bp, Zea mays
  Coding DNA Sequence Number=SeqID_1135
attcacagccatggatatccactgatgcactgggcagcttgggctttagcatgatgtttacatggcgagctctaccacaccgtcttcgactacggcaagctgagggttggcttcgcagagtcggcctaaggatatggtttggcgcctcgtccagaggcgaacgcatgcgccgagagagaagcttagcttgtttttaacttgtgtctttatgcggccggcgatgtgtgtatatatgctactacatgtttagtgatgctttcagagaccagagacaacgcccatctgttttaacctggcgcaagaatatttctggatgtattggtcatcacgcttcggcctcttgtactgaattgttgccgtgcaccc

SEQ ID NO: 15539 - DNA, 301 bp, Zea mays
  Coding DNA Sequence Number=SeqID_1136
caactattttgatcactttcctggtgaagcgtactttatttgcattcttatgtacgttttatacataatagtctctgcttttttcattggatcgggtggatttaatcagctgacaggccgattcaatacttctcatttgccctaccggtatgctcattatttcggtcattactcactttctcttttgacattaacattggcttgctctcgtgtttgggtgcgttttgacaaggtaacatttgttttggcacacaaactctacacaaactttattatgttcactttaaaactcactcggtca

SEQ ID NO: 15540 - DNA, 300 bp, Zea mays
  Coding DNA Sequence Number=SeqID_1137
ataacatcgttgttcaatgtgaaaggaaaagttggacttgttactggaggaggaagaggaattgggtttatgattgtacaaggatttgttgaaaatggtgcaacagtaatcatatcttccagaaacgcaaaagaatgcaacaagattgcggaagatcttatcaatagaggacctgggaacatgttatgcaattccagcagatttggctaaaatggaagaatgcgtgagacttgcataagaaatcgcgaaagaagaatcatatttgtacattttagtcaataatagtggtgcaggatggcg

SEQ ID NO: 15541 - DNA, 419 bp, Zea mays
  Coding DNA Sequence Number=SeqID_1138
ggtggttaagctgctcgtccgtctggcgacgcggagctgtggacggcggcggtgggagcagacgccttgttcgttctgctggcttggggcatttgtttcatctcttgattgcagcgaagcaaagagcgccaccagcgatttgtctttttctctcgttttggatcccatttcccctcacgtccttccttggcggcgacgggtcttggtccgtgggaaagaaggatgatgggaggagcgtcgaggccacgcacacaccatgaaccaaccacacattagggcaggcatgaatcaccggcatcttttgcgtttttgttttctgtacatggcgtttggggctgggattactactggggatgggatcgttcatgatacacccgttatgatgtggtcgtgagacaaatgaccagggcgtcttggga

SEQ ID NO: 15542 - DNA, 140 bp, Zea mays
  Coding DNA Sequence Number=SeqID_1139
atccaggccctgaaacattccaaaggaaagtgcttataataaaccttgattacttgatgagcatgctggggtcacggttcaacatcaatattccaagactacagaccccgaataggggatattcctttgaatctgcctgc

SEQ ID NO: 15543 - DNA, 397 bp, Zea mays
  Coding DNA Sequence Number=SeqID_1140
tgatgcgggcgaacctgcatatgcaggggacgccagccattctccgatggatgctagcggtggaggtgatgatgattgatttgaagatgcaacggctgcggtggcctaggtagcgcatattcgtagactacaggtatgcagaaggagtcggtttgcttgtgaagacgtagtgttttctgaagcttgaaaaaaaagggaacacggagattttgatatggatgcagactgtggagaaggcgataattgattgtaagaccaaaagaattgattttcctagaacgaccaatgacgcaaactactggtatataccaggaaaaagaattctagggtagacgtagtgattgctgagggttgaaaaaaaatggaagcgatgattcttttctcttatctaattatg

SEQ ID NO: 15544 - DNA, 450 bp, Zea mays
  Coding DNA Sequence Number=SeqID_1141
tcccggtagtcattgacctgggatgcaggtttagtagggctagaggcagggagagattgagtcccaggcgcatgctagcgtcttccgcccctgttcttttttttcgttgtctatttctttccaattcataattttcccatttaataatttaatattccaatgcctgtgtcataatttatgccccaaataataaaaaatgcaatttgaacatattccaaaaatgagaaggaattcatttatttataaattttatttggtgttgtataatattcttttcgttcctctttttcctattttcctttcaatttcaagatttaaggattcaaactcctattttgaacttcaaatttccaaatatcaaaattcctactaatgtgaatatgtactctattgtttagaatatgattatttattattattatttttattccctggcatttatttatttat

SEQ ID NO: 15545 - DNA, 349 bp, Zea mays
  Coding DNA Sequence Number=SeqID_1142
ggattgggaggctaaaacagaactaaactagaactactcctagggccttaggttaaaacgagagatagactggttattgactccactgccgatgtatcaatcggcatgtatccctctatatctatagaggaggtgggctggacccgtctcaaacaaatctcgtgagttaattacgcgaatctagccaacaactgtaccatgatactcggaaccctaactgactccgggctgcgcggaccatccgtgctcaccagtgcggaccgttcgcacggtcaatttgcgttccaacagttccgcgacacataaatgtctgaatcgtggccgggattttctttagggcacttacttg

SEQ ID NO: 15546 - DNA, 244 bp, Zea mays
  Coding DNA Sequence Number=SeqID_1143
aacgcccctgcgtacgttcctccatggcggcgggtcagcgcaggcatcttctgcccatggcgctcggcacccaaccagcaggaacatcgccctccgtcctctctgtttcccttgagctcaagcgcaggaagtctgtcgcctccctctgcgctgtgcagcagcgccggtctacagcagcagcctcgacatcccctctacgtcgcgccctcggcgtgctcgatgtaatgccgcagcagcgacgccc

SEQ ID NO: 15547 - DNA, 268 bp, Zea mays
  Coding DNA Sequence Number=SeqID_1144
agaattggcgctgacttatctcaagaacattggggggggcagaatataccgggccgcgctgtacaaactttcatgattttctggtttactggaatgccttataccactgcttattcagcatagcacaccttttgcacgattattcctaatttattggtaattcagccatcaagcatatatgctatcatttacctttgcactaattggcagggtgacatcaaagttgctccaggatctcttgcttatgaagaatcagttaacaagccac

SEQ ID NO: 15548 - DNA, 269 bp, Zea mays
  Coding DNA Sequence Number=SeqID_1145
atgacaccccgctgctgaaggacatcgccgccataatagattagagagtataaaaggtggaagggcatcaatagtaaaatgattgtgtggcacataaaagggcgcgttcgcactccacaccccccccatacatgagagtatataatttaaaatttcaatggactttagactctagtatatgtcatgtgcggacgtacctacaccaggcgcaggcgcgccaacgacgtgcgccgggccaaagagcgtgcgatacgcgtgggcggttaggc

SEQ ID NO: 15549 - DNA, 314 bp, Zea mays
  Coding DNA Sequence Number=SeqID_1146
gtgcatcgttaaggtggcaccacggccttggtagttgaagccactatccgtaggataggattctctcgctcgatcgctggatttcttcagtctgtcacgctgtacagcacatagcacagcaacgttgcttatatattatggattatttcgttcccatatccaccggatctggggacagctggatacagtgtacaggtacatctaaactacgtggcactgcatggtacatagaattcgttttcttttttcccttgggagccgaggcttcaatgaatctaagaaggcccgagctggaattcagtttattgtctatt

SEQ ID NO: 15550 - DNA, 498 bp, Zea mays
  Coding DNA Sequence Number=SeqID_1147
tatgaaggccatccttgccatcgctctttgcctcatcttcgttgccgccgcttcggctcacgtcaccgttgtcggtgctcgtggacccggaatcaacagccctgggtacatcaagtccaactccatggatccatgcggaaatggaacttacgatatgaccaaggccatcaacgtcactgctaatgacatcttccccgttacctgggctctcttcgtcaaccacaacatccctccagccgtcgccggatccatcaacttctactggggactcgaaggaaacgccgtcatcgaccccgttccagtcaccacccaaccagccaacacctactacaccacctacttcgtcgtccctgatgtcttcgacgttgccaccctccaaatcgaatacaacaccaacggtgctgctgagaactacttccaatgcattgacttcttcatcgccccctcagcgtaaaaaagtactctgctatcctcctgttacgtgggaatttgctttgc

SEQ ID NO: 15551 - DNA, 304 bp, Zea mays
  Coding DNA Sequence Number=SeqID_1148
actgtccagagctgtgtgcgctgtcttcctgtgtttgtgatgaccacagccaccaagttcaccacaccatagccagaacattctagggagttgctggcctgtatgaagcttgttccgtaatcatctcagagctcccagcagaaggagtgtaaattaaagatgaagtggtcgtggaagaggagtttgctccagtgcatgttcatcaagtggatggagctatctaactggttattgggtagaagatctagaacctcttcattgcaataaggtgatgagaagtactcgagccgttcctgaggctgga

SEQ ID NO: 15552 - DNA, 495 bp, Zea mays
  Coding DNA Sequence Number=SeqID_1149
gtcggcgcctacgtcttctacgaggccatatacaaccgcgactacttcggcgcggccgcagctgcggtggggacggacggcggcggcgcaatcacaggaatcatcgccctgtgcgtcgtgctcaagccgccccgccatcatcgcccctcgcgcaccttcgttcggcaaccttccatatcgctccgcatccgtgctccccctcacgcaataccaggaaaccctccattaccgcctctcacccaacatcctctgctagcccccgccgcactcgcctcccgaattcggccgccacggctcctgccccagcccacctccctacagcagctgcagttccctccggcctccagtggtctgtcacgccgcctcctcgtccagatccgtccgtggtccgcccctccggcctcgcccagctccaaagctccctcatgctcgcgggcacgcggcctcgccctggggccaggccctgggtcgccgtctccggcatctgggttgagg

SEQ ID NO: 15553 - DNA, 356 bp, Zea mays
  Coding DNA Sequence Number=SeqID_1150
gtgagcgagacctggcctggcgcagtggaggaggcgcagctgctgctcgccctgatcgatgtcaaggtcgtgtcgcgggtgctccgggtggggaagctgagcagggagcagctgccgtggcgcgaggagaagctgagcaaggtgggcctcacggagaaccggctgcgccgcgacgggtccccgatcctcttcccctgttgaccgacgcagcatgtcatgccgcgccagagagctgccttgccattcactttgtttaccttctgagataagtacatgccttcaagcctaattgatgatgcacataccaaaccaaagttgatcactgagttgagtttagtttatacagtgcagcatgg

SEQ ID NO: 15554 - DNA, 555 bp, Zea mays
  Coding DNA Sequence Number=SeqID_1151
tggaggctgaccgacacgccgaagatgtatccgaggacaagacatcgaagatgacgagagctttggatcaggaagccgaggtggtggcggtcgcatcaaaggaggagaaggggcagcaagacgaaccgagagctgctctctcggatgtgaaatgtgatgacccaaagggggaggagaaggtgcagcaagaggaaccaaaagccgtggtcttggatgtgaaatgtgatggcccagagcaggaggaagttgtccagtttttggaaggggacaacaaagtggaggaagtggaggagggtgaggaagttgattcttctgatgcaaccacagggtctgcagctgttttgggtaacagctgcaatgatcctaacgtggaggaagtggtggctgtcatggaggaacagttcacagagccccatgaaggaattgtgaaagagcaggaccctatcagtgttgatagatctgcttcagtggaagtcatggatgattcaccattcctaggtgtgattgagaagaaacacgatgcctcatttgaagattgtgaggacttggctgact

SEQ ID NO: 15555 - DNA, 580 bp, Zea mays
  Coding DNA Sequence Number=SeqID_1152
tcactaccaggagctcaatacaaatgaggggagtgtaccatctataccgtcgtgattcaaaattgtgcatattgtcatccatctgttacaaattacaggtcgttttagtttttctagatacatagttttcttatacacctagctacatacatagcaaaagctaaaatgatttgtaggcaccatgtagtcctttcatttggtcggtttgttttgctataaatctgccattagaaattggcagggaattccaacacagatttgtgctcgaccgacttttgtagtgtgtcgacgcttgaagaaggacctaatgtgagcttttacacacttgatgaacagcttgagctcttgagcaaggtgggggcatttttgtacccactggtcgtagttttgttggctattactaatcgtgtgcagatggccccattcacctctaccaacaggtgttgaatgcaggggatgacatgattggtgttgagttcttagaagaagattatggtggcaaggttctatttgtttgaagttgcttcaccattccccaaagcgcaatgcagctaagcctttttgtcttttgcagattcga

SEQ ID NO: 15556 - DNA, 375 bp, Zea mays
  Coding DNA Sequence Number=SeqID_1153
catctacggccggttccgggatggcgacgggcgcctgccggtggaccggcagcaggaggaggagagggagaagggcgacagcggccaacggtaggtaggaagggatgatgaggcagaggagagagcgggagtggaggaggccagctcgcattgttgacttggtcagccgccaatgcggtgtcttgattccactggcgggtttgactggtgtctcagttttctacggctatcgcagctggcgtgggagctaatggtacggcctacgtggtgaggtcacgttagacgaagtgcacagcatcagcggcgcggtgctgcttgctacgccttagtgtacaaagctacaaaagcattacaaaattatacggaaggcggtcg

SEQ ID NO: 15557 - DNA, 573 bp, Zea mays
  Coding DNA Sequence Number=SeqID_1154
atgagcgccgtgttgtcgaattgttgaggaactcccaggacaagcgtgcccgcaagctcgcgaagaagaggctcggtacaattggccgcgccaaggccaaggtcgacgagatgcagaaggtcatcgccgaagccagacgggctggtcactagaggagttcaacttttttctcaaaacaaaaagaaaaagccatatcttccttttctagtccttgtctctgtttctttttaacgtgcttccgaacgaaaacacactttttttttgtcaaaaaaaccctggcgcaaatgtagtaattttacgcatacttttattctcctcttcacttcccttccactgagatgtcatttgttggccatgcccgatctcctcctcatgaaacaacctcattgaatcgactgcgatgaggggtgttctcattttcttttttatttcaccgaaattacgggccttcagatgatatggcgggctggggagaggagaaggggattgaaatggaatggacggggattgttgaaggatatgatgggttgtgatatccaagtttctctgatcgatcatgttctcatacacaaa

SEQ ID NO: 15558 - DNA, 221 bp, Zea mays
  Coding DNA Sequence Number=SeqID_1155
gggttatgcacctggtagctgcagtccaaggcctcaaacgaatgttgagagagacttcttgaagaaatattgggccaggtggaaagcggatcatgtaggtcgttgccgggctatgcctcacataaaaacctcttactcgttacagcggccaaaacatggcatggcttctgcttacctcagcacatttaagcaaagctgcttggcgcgcgctacagaacatc

SEQ ID NO: 15559 - DNA, 586 bp, Zea mays
  Coding DNA Sequence Number=SeqID_1156
tattcggatgaaccttaacatttcatgcaaagatgttgcaggacagaattgcttcgatgaaaatagtgcaactgtcctctgggctggtgttcttagcgatattcacctggaagttccaccgttgcaagaggtggtacatcctttttccatgtacttcctcgtaccgggtgactacacgatccaagctgcttctgttataatcgatcccacagacgttcttcgtgctcgcgcaaaggcagagtcaccagatgaacctatactatgtcgcggatccccgttccgtatcccgggcagtcggtacagagtataggcagttcttttgagttaatgtagaggcctcattttgcaccgtgacatttgtaggtgtgaaatttcttgtacaagtgttccctggccccctgcccgcatgcgatttgtttttatagccttttcgaaggcttcgttgtaacttgtaacagccatgtcatgtacagtgtacagatagtacgtgtggtatatatattaaattatcactatctatcttagatctaatgtcactagttgttttttatattttataaagaacaccgtctgtgatttaatctgt

SEQ ID NO: 15560 - DNA, 544 bp, Zea mays
  Coding DNA Sequence Number=SeqID_1157
acacccaagtcgatcatctgcgaaaatggattcctccaaggcccccgtcaagctcgtcaaggtcacccgtgtcctgggcagaaccggttctcgtggtggtgtcacccaggtgcgcgtcgagttcatggacgacaccactcgctccatcatccggaacgtcaagggccctgtccgtgaggaggacatcctggttctcctcgagtccgagcgcgaggcccgccgcctgagataaagaaggggttgttgggggatgttgagtggagggagagaatgatgggaatagcgttcagctaccttgtcggcctgtttggctcgacagccgcaacgacctgcggctagaggaggggtggaaaatatcagggatgggcgttcggtagaacggtactgcgatcattgctctccacgaattccatgcggcgctgaggctgcgccaactttctccgcatacggtggtgctacggcttgggttttaggtgactttgggcgtccagtcgaagcgcaaattccacctcgttcagcagcggcagttctccatcagcaggaa

SEQ ID NO: 15561 - DNA, 253 bp, Zea mays
  Coding DNA Sequence Number=SeqID_1158
ggttatccgtatagagggagcgtctcatagcaggagggacgatcttccccactccgaatttatttctaaccctaaccccaagtgtagcgcgtgttcaaaggctataatcttcagattttgtctattcacccccctaggcgactctcaaaactccatgtgttatattatatgtgtataaacatataaaccgcacgggaggggtggcgaccaaggcccctgcctgcccccttggttcccccctgctcgtgcggtt

SEQ ID NO: 15562 - DNA, 354 bp, Zea mays
  Coding DNA Sequence Number=SeqID_1159
cagacgttgtaaaagttcggccattatattttattttggtgcccgcaaacaaaaatatatctgttgaatgtcagaggtagtaagtttggtacctttaaaacggccgcccccaattgcttgttggcttcctgtatggttcaaggtctctgttttttatattttttttcgttctttttatttattgtattttttattaattttttggggagggatcaactcattctattcaataagccaaataaaaaacagagcgagaagagaatggactagcccgttcctcagaccacacaccctattagtgtttagaccagcgacgacggatccatcggggcactcgggattaaaccggctaag

SEQ ID NO: 15563 - DNA, 208 bp, Zea mays
  misc_feature (35)..(35): n is a, c, g, or t
  Coding DNA Sequence Number=SeqID_1160
gaatatcttaataacgctctttgtaatatttattngggccgcacccattaaaatacatctatcagccccatatggcctttaggtagcaaattctaatcctggaccataattttcgccacacacattactgctagatgttgttatcgttattatggacatatttaatttgagaggcagacctgctgtaccccatgacccctatatatat

SEQ ID NO: 15564 - DNA, 244 bp, Zea mays
  Coding DNA Sequence Number=SeqID_1161
ccttcttttaactcttgcgtttatggttgatcccgagtttttctactcttgaaatctcactatcattccattaatagatagattgaagaaggtacaacacacccacacacacgccgcaaacaacataccaacggacgcaccacacccctcacaggacacaacataccaaccaacgcaacaccactaccacacttaaccactccgcacatgatacaggactatccccccggatcaagcataaacg

SEQ ID NO: 15565 - DNA, 498 bp, Zea mays
  Coding DNA Sequence Number=SeqID_1162
agaggttgctcatcgacgtagatgaaggaaacactggctccaaggatgccgcggatagcgttgctgcccctagctgctgtgtacaacttctttcagaaggatatatgatacatgttcatgtccacaagctcgatacagattggtctagagcagacttaacaagatcctcgccatcgtgcaatcaacatgtcattgatcgattcgttgttcacctgaaggctttcgataggtttgagaacacatctgatgctcaatctgcggcaacccttattattgatagcaagcctagcaagggtctgcacaagttcttgcagaaacattgtgagggtgaaagattacctggtgttaattctgacagagttgaaaacttgaaatggcaagaccagaaccctgaagttgaagtgttggcaagaaactcagataggtggatgaacgttttgctaactgagatttctaatcatacggaaacaattgaagccgacatggagtacaacacaa

SEQ ID NO: 15566 - DNA, 547 bp, Zea mays
  Coding DNA Sequence Number=SeqID_1163
aagcgtatccagctggtgatatcgttgctacatccccatagcgtgtagcatgccttgcaagccccacatattaccttgcggcgagcatcccttttgccgcttcacacatctttgctgccttcgatcggacgcgtgggcaatcattgtttttggcgccaaaatttgctccctaactggaattggcgcgtccattgccatagctggtgttgctatgtactcttacattaaggctaagattcaagaggggaaaaggaaaaagagcgcatgcctgccgtgcataatattttcgagaccttcctcgtgactacaacatcggcgccaatctcgggcctccttctatatcttgttttgttttcatcttgagtccggcggtccccggtttgttcccagtctggtgattaaaagtctgcaaattctgtttgtggaattggcagcgatacaaatttggcttctttaagtaaatccggttgccggtacacagcggtattaattcacctgtaactgaatggaataccgtgatgcaaagggcacaacactctgcctgact

SEQ ID NO: 15567 - DNA, 492 bp, Zea mays
  Coding DNA Sequence Number=SeqID_1164
caactcagaatattacctcaactcaaaaaggactgggccgggcgctcccattcacacggtagggaatgtgcacatgtaatgaatatagatacaaccttcacccttactctactaactaaaaaagtgagacccagataatacttacatggcatctccagcgccaccagtctgtatagttgcccccaatattcgtcattatccttttgaagggaggtgctggcattatctcatattagaaagacgactgctgcggcccaagcactcgagttcagtcatgggcccactttcatccccatgattttatgtccctggatcatttccatttcaagttggatcggggtattctggcccttgatcaggacctttttggaccttaaggaggaaggaactaagccatccgaaggacggccttccagcaaccacagcaaaagggaaccaaattggttgagggagcctgagcctgcaggggtacttccagctcgctgagggttt

SEQ ID NO: 15568 - DNA, 452 bp, Zea mays
  Coding DNA Sequence Number=SeqID_1165
gggcatacattcaattcgagttataagaagatcaataggtgagcactggtgaccagcaatatattgctgcccgtggttgccaagtttaggacagtgccttgagtccacgcctcctgatgatctatggccccatctcgtcatgaaaatacgttcctcgaagcatgcgtccacttcacgacccacgagtcatcatactcctggaaccgtctcgatctccaccgatttgtcttaccatcatactactccgggagaaaacggggatccgcttcctagtagaatgatcctcgaataagtctactcaggatgccccataagaatggccatggtcccttctaactgagttaaaccgggcgcaataagaggagaccagccgtcgcttgtgctctgttgattggggttgaaggcgagtgtccttgggagggtgccggccactcctcattgggtgcgttaaa

SEQ ID NO: 15569 - DNA, 393 bp, Zea mays
  Coding DNA Sequence Number=SeqID_1166
cccacttgtcaccattctgtaataaagaatttatttccgcttagcaagatacactaaaattaaacgcgggtacggaaattaaattaacatgataatgataaatcttatcctaacataaacatgcaactctttaaagactaacctttcatttgtatccactagctgtctgctcgaccaagatctctttttttggacttggaattgatattgtccatccctccaaaggaagggcaatggtcattctctctctctctgcgttatcaacatttgaatgcaaaaaaagcatgttctttgttgattgccatcactgtcttaggctacacaagatcattttttgatattttgattggattcttctattggattttttttacgagggatgaaacttgggat

SEQ ID NO: 15570 - DNA, 505 bp, Zea mays
  Coding DNA Sequence Number=SeqID_1167
atgcaacccaaacgtcccctaagagcatctccaccaatgtctcaaaaaagtccccccaaattgaaatatggggctctacccaggaaaatctactccaccagtcccctatttcataaatttttgtttaaaaactatagggcaaacaaaatgggtttttaggcatcactaaactatctcaaatcgaatagggctctaagaaaagtgcctcaattcaacaaattttgtcaaaaaactatagggccccctctcaagtgcctcaaatatactaccccgtagtgggctgccctatatttggggctttactgttggagcggggtgttttgtttatgccctaaattctataaaatttacttattttaaaattatagggcatttttataggtcccgttgttggagtgctctaaaagcccccccccgaactttaaaaggaattgctcagctaaccttaaaaatggtattttagcttttttttaaaaaaatgtaaggccaggatgagatgagctaa

SEQ ID NO: 15571 - DNA, 580 bp, Zea mays
  Coding DNA Sequence Number=SeqID_1168
gcatcgccgtcgtgtcgaggcagcacgtccgcccggacgccgcgtcggcgcaggcggtcggtgacctcgcgctgtccgtctccgacctgcccatgctgtcgtgccactacatccagaaggggctcttcttcccggcgcccgacctgcccatgccctcgctcgtgctgctgctccggtcgtcgctgtcccgggcgctcgccgccgtcccgcccctcgccggccgcctcgtcacgctgcccgacgacgacggccgcgtcgtcgtccgctgcaacgacggcgccggcgtggacttcctgcacgccgtcgcgcccggcctgtcgctcgacgacttcctcgtccctggcgccgacgtgccgaccaagctcaccaaggacctgttccccatggacatggaccggaccgtcagctacgagggccaccgtcgcccgctcgcgtcgttccaggtcaccgtgctcggcgacggcgccgtcttcatcggcatcgtcgccaaccacgccgtcgtggacggcaccttcttctggcacttcttcaacacctgggcggccatctgccgcggcgactcgcccaccaggctgccgga

SEQ ID NO: 15572 - DNA, 253 bp, Zea mays
  Coding DNA Sequence Number=SeqID_1169
taccgcctgcgggttccgggccgcaacccacgcgtccgcccactgcgctagatgtctcctggccgagataaagaagaatcatccactgagacttctggatttatagaatcctccaataatgttgcagatatgcttcctgatcttaatctgaaccattttacttctacggcttcaactcacttcaaaccattctgttagtattgagcccccgggggcgcctgcgggtgcggccgaagccatacagaatgatctg

SEQ ID NO: 15573 - DNA, 493 bp, Zea mays
  Coding DNA Sequence Number=SeqID_1170
catagtttgataattgggtgtgtgcaagagtcaaatttaggttcatattgtttacgccccctgccatttagctaaacgcacattggtatgcggtgaatttcagaccagaaggtagatttcttcaaggggaacaatgtggtgtaacttgatcagcacaaccactttactgaaggtgtccggatcatgatgcagacaacaacaactggtgtactcattaccactttgatggtaatcgaaatggggacaaacacaattgaaggaaaaatatccaaagacaaaaggagtgagtttttacttcttcagattccaccaatcagaataagaactagacatcatagagaccaacttttgagattttccttacgatactatgttcgtttggtcatttgttctttgaaagaattaattagaaaagagagaattgattttattgggatccaagagaccaataaaaaatcctttgatgattcttggctgcagtctattagtggta

SEQ ID NO: 15574 - DNA, 504 bp, Zea mays
  Coding DNA Sequence Number=SeqID_1171
gagaagctcatacacctacatcgggctccgttctaggacccaggccatcctcgccgccgtcaacaagctcgcctccgagctctccttctatcagtgaaaggtgttccgcgtcactgagcacgctggggtcacgctcgccagcctaccgacggtcgcgtcctctcgcgcttcctctgcaacgagtgcatcaaccactccttcgtctacgaggcgccgctccccgtctccaggctcgctgacaagctgcaggcgtggctccatcttcccagaccctttcatggaaccaattttcataaaatttctgactcccgggctactttaagacccggtgaacttgctgtcgggaaagtccagctactgtggtttctgtggcgagcctctgcagttcgtcctccaggtgttttctttgtgtgcaatgaagttgccacagtcgactgcttattgtttggatatcgacttggtcacagttaggcttggttgtgtttagatttatgcaccaactga

SEQ ID NO: 15575 - DNA, 580 bp, Zea mays
  Coding DNA Sequence Number=SeqID_1172
gacacaatggcatccaagggtctgttgccaaacgcattcacgtacaacaccgtgatgacagcctatgggaatgttgggaaggtggatgaggcgctcgctctgtttgaccagatgaagaagaccgggttcgtgccgaacgtgaacacgtacaatcttgtccttggcatgcttggcaagaagtcaaggttcacggtgatgctagagatgcttggagagatgtcgaggagcggatgcacaccgaaccgggtaacatggaacacaatgcttgcagtctgtgggaagcgtggcatggaggactacgtcacccgggttctggaggggatgaggtcttgcggggttgaactgagccgagacacctacaacaccctgatagctgcgtacggccggtgtggctcgaggactaatgccttcaagatgtacaacgagatgaccagcgctggattcaccccctgcatcaccacgtacaacgcgttgctgaacgtgctgtcgcggcagggcgactggtccaccgcccagtcgatcgtaagcaaaatgaggaccaaggggttcaagccgaacgagcagtcgtattcgctgctgc

SEQ ID NO: 15576 - DNA, 353 bp, Zea mays
  Coding DNA Sequence Number=SeqID_1173
tcagttagaaatcgttcggacccaccaatccagcagaaacgaaccaggcctaagtaggtactacgaagtacagctcgttactggggtggtggtgctgctcccagcaagccagcaacagcgccgccgcgaccaccaccaccatagcgcagataaaaaaccgagccgtgctccgacgacggttcgtctctcttctcttggcgatcccagtcaccttcggacgatgttcagcagcgtcgtcgcatcggcgttcttcgcacggcggcggaggaggatctcgtgcgctgtcagaacaacaacgccggctgctgctgctgctgctgcttgtggcgaacttcaggtcttcggccagcgag

SEQ ID NO: 15577 - DNA, 380 bp, Zea mays
  Coding DNA Sequence Number=SeqID_1174
tcgtcctcgtcaagtcctcgaagtccgccgaactgcgattcctcggcgaccgcctcggaggtgtcaccgaatgatcgcgctcctgatcgccggcgccgtgtcgctggtgttcacactgctgctcacgccgctgttcatcaagctgttccaccgcctcggctggggacagttcatccgcgacgacttttcgcagtcgcaccacaccaagcgcggaacggcgacgatgggcggcatcgacctcatcatcggcgcggtgctcggctacttcgtgggccacctggtcgagcgtgactcgatcacgctctccggcctgctcgtcctgttcctcatggtcggcctcggcttcgtcggctgcatcgacgacttcctcaaggtgcgtc

SEQ ID NO: 15578 - DNA, 134 bp, Zea mays
  Coding DNA Sequence Number=SeqID_1175
ggtggtgacgtccaacgtccagttacagctctgtattttaacagcaagactcacggttttgcaaaagagattattacagtatacaatgccactggccatgaactgtgcggctacccctccaaaatagggttgag

SEQ ID NO: 15579 - DNA, 282 bp, Zea mays
  Coding DNA Sequence Number=SeqID_1176
gcagttgtggctaatgcctgcgacagggtctgtcagaacttcctcggccagaccgagagatgcctcaaccgcctccccccgagccatgcagacgactccgtctctcaagaacccacggatgcccggttgctgagcacgctctgcttagtggctgatatctacgctacagccctgcatacggacacgcgcgtagctggatctgacgacaccctagtaagtaagatgcaccctggtggcagaacatatggtgcatccacgcccacacaaggatccactgacgga

SEQ ID NO: 15580 - DNA, 241 bp, Zea mays
  Coding DNA Sequence Number=SeqID_1177
ttcttgcgcctgtcgtcgttcttcttcgcttgcgcgccgaccttccctgatgtcgccgcatagcctgttgtcgttcctggcgctgctccgtgtggtgggtttttcgcacgtcgtctaagtgctcgcgctcggcctgcgctgtgtggcggcgccgttttatgttgctctcggcgatccgtttgccgccatctccatctccggcccgctggcgcgcatgaccgtcgaccgcattactgaactc

SEQ ID NO: 15581 - DNA, 403 bp, Zea mays
  Coding DNA Sequence Number=SeqID_1178
tgatcggcacgatcctgttcctggcgtggatcgtcctgctgaccgtgtcgacgtcgaacggcgtcaacgtggcggacggtctcgacggcctggcgacgggctccagcatcctggcgatcggctcgtacgtcatcatcggcttctggcagtcgaaccagctgtgcggcagcgcccggctcgacgcgagcaccgagcacgcatgatacaccgtcacgaacccgctcgacctcgcggtcgtcgcggcggcggtctacggagggctgatcggcttcctctggtacaacacctcgccggcgcagatcttcctcggcgacaccggttcgctcgggctcgacggcgcgctggccggcctcgccatcctcagccgcaccgagctcctgctcatcctcatcggtggcctgtt

SEQ ID NO: 15582 - DNA, 570 bp, Zea mays
  misc_feature (377)..(377): n is a, c, g, or t
  Coding DNA Sequence Number=SeqID_1179
aactgacggcaccacgcagaactgtttcatggccgcgctgctgcttatcgatgatcaccctttagttgaagtcgcgctggaagcggcctgcctcaacgcccctattccattacagctctacgccgccggtgacgaagctcaggcgcgccagctgctgcaacagcatcatattgacctgattgtgctggatatcggcctgccggatagcgatggtctggagctgttgcgccgtctgcgcgcgcgccatccgcagtgtccggtgctgatttactcggcccagcagagccgccacacgctgctcagcgccgcctcgctcggcgcggccggttatgtggtgaagagtcaaagcatggcgcagttgctgagcgcgattctgncggtgctgggcggccagcaggcgtttccgccgctgccggagcgcattgcgctaccgctcaccgagaaagagcagcagattgtggcgctgctggtgcgcgggctgtcgaatattcagattggcgaacagctgcacatcagcaacataaccgtcagcacccacaagaaaaatatcctcgagaagaccggcgtgca

SEQ ID NO: 15583 - DNA, 271 bp, Zea mays
  Coding DNA Sequence Number=SeqID_1180
aaaaatattcgtcatgccgctttccgtaaaagctggcaggcacgccatttaacgccggtcgcactggcggtcaccgccgtgtttatgctggcaggctgcgaacagagcgatgaaacggtttcgatgtaccagaacgccgatgattgtgcgaaagccaatccgggccagagcgcccagtgcaccaccgcttacaacaacgcgctgaaagaggctgagcgcaccgcgccaaaatacgccacgcgtgaagattgcgtcgcggaattcggtgaaa

SEQ ID NO: 15584 - DNA, 331 bp, Zea mays
  Coding DNA Sequence Number=SeqID_1181
tgcagcgaagtcgtccacgtcgtctaaattatttatgccgttgtttaagcagtgtgaagctatattgaagaagattatggaaatgaagtaatgtattcaatgttccggttgatgttgagaagctgcaaattcatgattattttgacgatgtcaagaccccaatggatcttggtacagtccacaagaagctccaatctggctcatgcacaagtccatctgattttgctgcggatgccatgctgacctttaacaacgctatggcttataatccttgggggcatgccgtgcacgacagcacgacacggacattcagttggaacaagatgtttga

SEQ ID NO: 15585 - DNA, 546 bp, Zea mays
  Coding DNA Sequence Number=SeqID_1182
tacaaagttgcgaaatctggatctcggatttaatcatttgcgttcgatttcatccttgagtgaggtttccagtcgaatcgtaaaacttgttgtgagaaataatgctttaactacagtaaacgggattgaaaatctcaagtcactcatggggcttgatctctcttacaatatcatctcaattttctcagaattggaaatcctcggcactctacctctgttgcaaaacctctggttggaaggcaacccaatctgctgtgcccggtggtatcgagcacatgtgttcagtttttttcgtaatccagagaatttgaagctagatgataaaggtatgaacacacaagaatactgggaaaagcaagtattgtttgcatgcaggcaaaatcaacctgctggttatggattttattttcctgcaattgatgatcatgaagatgaagacatattgaatttgaagatgagaaaattttcccgacttgtgagcatagtggaggaagagagaaatctctgtgatggtgtagagcagccgtccacccactgtgatagtga

SEQ ID NO: 15586 - DNA, 275 bp, Zea mays
  Coding DNA Sequence Number=SeqID_1183
aacatggataacacaccttcgacgctgcacgcggcgcgctggcgcggcctcggcggctggaacttttactttctgatcaaatttggtctgttgtggtacggctatctcaacttccatgcactgagtaatctggtgtttctggcatggttgctgtttccgctgccgtcagcgcggctgcatcgtctgcgccagtggatttcgctgccgattggcttcgcgctgttctggcacgatacctggctgccgggtctgaactcgctgctcagccagggcag

SEQ ID NO: 15587 - DNA, 349 bp, Zea mays
  Coding DNA Sequence Number=SeqID_1184
tggcgtttggtctgctctggctcgtgtggattctttatacgacgttgagccttggggtcggcggtctttcgctgtcgctcttcacgcaatcgacgccgcctcccaataccgatggcggcgggttggccaacgccatcgtcggcacgttgatgctcgtcggcgccgccacggtcgtcggtacgccgatcggggtgctggccggcgtctatttggccgagtacggcggtaaggggtggctcgcctcgacgacgcgcttcatcaacgacatcctgctgtcggcgccttcgatcgtcgtcggtttgttcgcctatgcggtggtcgtggccaagatgggccacttctcgggctg

SEQ ID NO: 15588 - DNA, 212 bp, Zea mays
  Coding DNA Sequence Number=SeqID_1185
tctgaccccgatcggtacggtgtcgacaccagcgcgccggtagcgacgtcggagaccgtcgcccaggactcgcccaccgaacgcaccgatctgctgaaggtccccaccagcgcttcccgccgggtgcgggcccggattgcgcgtcgcatcaccgctcaacgcggtgccctgagcccggtgctcgaaccactggtggcggtgcaccggcagta

SEQ ID NO: 15589 - DNA, 598 bp, Zea mays
  Coding DNA Sequence Number=SeqID_1186
gatcgtgcgcggttacagcgatgttcccgaagcagcgcaacggctgctgggacgcagtggtgaattttctaccgatttcaaagaaggtccaatcctggcacaaagctggtatgtgctggagagcatccgcaccacccttgaaagcgccggtgggcagatgagtgatgttttcaaactggtgcagtactttcgcaatctggaccatttcccgcactacagccgggtgcgcaagcagttcttcccggacgaaccgccggtgtcaacggtggtgcaggtcagtgaaatgctgccgagcccggacgtactaattgaagttgaagccacggcgtgctggaccgacatcgccacactggataataaagccaacacggtgattgtgttaccgaccggcgccatcgaacagcacggtccccatctgccgtgtgccgtcgacagcgtcatttcatcgggcgtggtcgggcatgccctggcacgtttacccgcggatatcccggcttatgccattccgccgatcacctatggcaaatccgatgagcacctgcactttcccggcacgctgacgctgaccggggaaaccttgttacataccattctggag

SEQ ID NO: 15590 - DNA, 402 bp, Zea mays
  Coding DNA Sequence Number=SeqID_1187
gctggatacgagactattatgatgaactccaatcctgagacagtctctactgactatgataccagtgatcgtttgtactttgagccactgacagttgaggatgtatcaaatgtccttgatttagagcgcccagatggtataattgtgcaatttggagggcagactccattaaagcttgcgctgcctatccaacagtacatagaggagaacaaaatggtgtctgcttcaggcactggtaatgtgaagatatggggaacatcaccagattccattgatgctgctgaggacagaaaaagatttaatgcaattcttgaggagcttggaattgaacagccaaagggagggattgcaagaagtgagtctgatgcattggcaattgcctcagaaataggctaccctgtt

SEQ ID NO: 15591 - DNA, 130 bp, Zea mays
  Coding DNA Sequence Number=SeqID_1188
ttcgaagtacgccactgcccgtgctgaaaatacccgccagcggaatcgaactggcggggctaaaggtggtcatcctcgacgacgtgcttgccaccggtggaaccctggccgcggcgtgtcgcttgctgca

SEQ ID NO: 15592 - DNA, 411 bp, Zea mays
  Coding DNA Sequence Number=SeqID_1189
gaaatacgcctgaatgcctttgatatgaactgtgtcggtcaccagtcgcccggactctgggcccatccccgtgaccgctcctggcagtataaagatctggaatactgggttgatttggcgcgcctgctggagcgcggcaagtttgacggcctgttcattgccgatgtgctcggcatttacgatgtgctgaacggcaacggtgacgcggcgatacgccaggccactcaggtgccggtgaacgatccgctggcgttgattacgccgatggcgctggtcacagagcacctcggtttcggcttaaccgcctcgctgtcgtttgagcatccttatccgttcgcgcgccgtttgtcgacgctggaccatctgaccaaaggccgcattggctggaacatcgaaacatcctatctggag

SEQ ID NO: 15593 - DNA, 237 bp, Zea mays
  Coding DNA Sequence Number=SeqID_1190
tagaggaccccctgatcttcttggatggagagcgacccgaacagaccctctcgacacgccgaccagcccgcccagcattgctcacttttccccagtaccctcctggcggcggggcggggcggggcggggctggcctgggctcgcaaacagcccgcaactctactgcgctcaggctagcagcgtcctacacccgaacggcgttctctgaaaagaagcttccctttcagggcgtgcgcc

SEQ ID NO: 15594 - DNA, 507 bp, Zea mays
  Coding DNA Sequence Number=SeqID_1191
gcttgacgagcgctccctgaatgagcctcattgctgacattcggacacagataccgcttgcccgaaggtcccttcaccctccgaaattcagctcgacgacctatgctgcacacattgctagacccatctggcatactaggagaggactatatatatgccgttttgcaagggggccaactcagaccacttcggctagcatgccaagacctattttctgtgaatgtacctacacaggatgtaacagctccccccacagagtatgatgaggcttctagccgtgtggattttatagaccatacatgacaaggatattcgacgaggcgctactatgggtcctgaggaagggataccttctgtgcgcccacaacagatgtgaaaggtgagctttcagtgccattctcatcaccatatcttgcctgtaaagctgagtgcgctttgcactgggaagagacatacaacataacttcatgctgacattggttatctggttcgtacactacccatgga

SEQ ID NO: 15595 - DNA, 582 bp, Zea mays
  Coding DNA Sequence Number=SeqID_1192
gtgcaatgcgcatatcctggaaaatatcggcggtgagtggctggcagggacggtcgccggcacttactatgccaacggctggggcgcggccgctgattttcccggcatcgtactggatgagcacggcgcgcgcgtgccgggttatctgttcatctcggaccggctggcgctgcactggccgatgctggatgagtttgaagatggctacgaccgggtgccggttgaggtcaccacgaccgacggccagcagcggacggcgtggatttatcagctgcaaccacagcaggatgaacgccagtttgtgtcgcccggcgggcagcagtggatcgatcagtctgcgctgcgcgcctcgcatcaaaaccagtggcaacagctggagtccgggctgctcagcctgcaaaccgtaccggattttgccatcaaccagcgcgccttagtgctgcaaacgccgcacggcaatatcctgtgggattgcatcgcgcatctggatgacgccaccgtcacgctgctgcgtgcgctcggcggcctgcacgccatcgccatctcccatccccactattacagcaccatgcaggactgggc

SEQ ID NO: 15596 - DNA, 435 bp, Zea mays
  misc_feature (46)..(46): n is a, c, g, or t
  Coding DNA Sequence Number=SeqID_1193
gcgccgttgtatatcatgccgggcacgcacgccaagtgggtgcagnagtaactttatcgcgtcatcgatttccgcaccgagatgaccggcgagctgcaccatttattgctgaagcagtcgctgattggcgccggtttacccgcgcaggaagccagtccggacgcgttccgggacggtttgcagattggcagccacgacccatcaattctggcgcgcctgtttgaagtgcgtgccagccacgtgctcggcgcgcgcgatcggcgccatatcagtgattttctctctggcctgttaatcggccatgaagtggcgcagatgacgcatcagttaacgcatagccgccagccgattgtcattatcgccggcagcgcgctggcacagcgttatcagcaggcgctggcctttatcggaacagattcagtcacgctggagggc

SEQ ID NO: 15597 - DNA, 351 bp, Zea mays
  Coding DNA Sequence Number=SeqID_1194
ctagaggcggcaagaccgccacgttccagtgtctcacgttttcagacctgggtgagtggggcttgaccggtcagtcacgaatggaagacaagagagcccggattatccagcaaagacgagacagcaggatgtgccggcacgtcggcgccacaaatcccggacacacaaaaccacgcgggataggaataaagatcggacgatcacgtcgaatggctgggcctggaagaagtgcgaagaaaaagaagaaagttgctatccggattattgtcatagttgttgtggttgtagcagttctggtcgtcatcggcattatttctggtattgttttccgtaagaagtgcaagcggccga

SEQ ID NO: 15598 - DNA, 531 bp, Zea mays
  Coding DNA Sequence Number=SeqID_1195
caagggtcgtttgttgctgagcaacactgtgccggtgcgcagtcagggacgcattatcggcgcggtctgcaccttcagggacaagaccgaaatcagccagctgatgcagcgtctgaccggcatggtaaactatgttgatgccctgcgtgagcgctcgcacgagttcatgaataagctgcatgtgatcctcggcctgctgcacatgaaaaattatgcgcaggtagaagcctatattctgaagaccgctaataactatcagacggaaatcggcttcctgctggagaagatcaaatcaccggtgattgccggttttctgctcagcaaaattaaccgcgcctctgattgcggccatcgtctgaccatcagcgatgccagttacctgccggacagcggcaacgagcagcagatggcggcgctgatcaccgtggtcggcaacctggtggagaatgcgctggatgcgatgagtgagcagaccgagggcgaaatccacgtcatgctgcactatcagaacggctggctgacctgtgaagt

SEQ ID NO: 15599 - DNA, 399 bp, Zea mays
  misc_feature (55)..(55): n is a, c, g, or t
  Coding DNA Sequence Number=SeqID_1196
ttgcttgtgctcatgagggtggatccgtgtttgtccgagtaccgggccgggctcnctgggcggtatcctctttatatggttctttgcaatctgggagtatttcagcatgttcagtttgggcttcatcaggtagctccagtctgtggcgtaatagacgagccacggatagctagtcttctagttgggtgccctgccctgtgtatggcaggatctctccgagactgttaataagcaagtcgtgcccttatgcgtcaaggatagctttggttttgttctggcaggatggacagtatcgcccttattaggcagaatgccctccgcagtaggttatcctcctacccctagctgaggaaggggttcttcgcgagaaagctttacgtctaccacatagggctctat

SEQ ID NO: 15600 - DNA, 471 bp, Zea mays
  misc_feature (50)..(50): n is a, c, g, or t
  misc_feature (232)..(232): n is a, c, g, or t
  Coding DNA Sequence Number=SeqID_1197
taaaggattcccctgaagccagcaactggtgaaatggttatgctgttggnttaggagacttaaaagaagattaacacggccacccccaaagatggaagccataatggttcagccaaaagaattcctaattaccagcctgccgtcaataagcctagttcctaataagaactgaatggaaacatcaagggtagcctaagaagtggttcggcccctacccaggtccaggctggtntggccttcttcaccctttcttcccagagaagttaagaaaggttttctggaggctttttttggttgggttggttaaggaattcccaaaaagggtgttaaaaaccaaaaggaccttgcaggttgtggggcaaaataagggggccaaaaccttttgggttagggccattagggttttggttggaaagcgcacccttaaggcgttaaagaaggttccggtggtcttcaaagccttttccaagg

SEQ ID NO: 15601 - DNA, 450 bp, Zea mays
  Coding DNA Sequence Number=SeqID_1198
tcctccaaaggaacgcggctccttaccagcaatggaacaaagctggatggagaatgactttgacaagttgagagaagaaggcttcagacgatcaaactactacgagctacaggaggaaattcgaaccaatggcaaagaagttaaaagctttgaaaaaaaattagatgaatggataactagaataaccaatgcagggaagtccttaaaggacctgatggagctgaaaaccaaggcacgagagctacatgacaaatgcggaagcctcagtagctgatgcgatcaactggaagaaagggtatcagtgatggaagacgaaatgaatgaaatgaagcaagaacgaggagtttagagaaaaaagaataaaaagaaacaaacaaagcctccaagaaatatgggactgtgtgcaaaggccgaacctatgtctgattagaaaacctacagtggcaggga

SEQ ID NO: 15602 - DNA, 592 bp, Zea mays
  Coding DNA Sequence Number=SeqID_1199
aaatcacccagtatgcgcgccagctggcgatgcagcctgagctgattaccgccagcagcatcagcgcgctggatgcggtaggcctgactgaacccgatatcgttacgctcaaccagctagtaggctacgtcagctatcaggcgcgcgtggtcgccgcgcttcaggcgatgatgggcctgccggtgcgctggatccctggcgtcacgccgcccaccgacgccgatgcggtgctgttcagtcaggctgctgcctggcagcacgccctcaagccggttgagctgcgctatgccagcgctgaccagctggcggcggtgaccttttgtcagggtatggccggactcgacgacgctgtctggctgctggtgcacgatgcccaggcgctgtatggctgggcgacgctgcgtcagcggcttgaggcttatggtggggaagaggaacagctggcgcaggcagtcagcgcgcgcgtactgggctgccgacgccagttcgcgcagctggcgaacggctggcgcacgcgtttgctacacgatgtggatcaggccagcgatgacagcctgacgcaacaaagtaaaagcgctgagcgcccagctga

SEQ ID NO: 15603 - DNA, 589 bp, Zea mays
  Coding DNA Sequence Number=SeqID_1200
cggtgcgccaggatttgaacctgctggagaagggcggctttctgcgccgcgtgcacggttccgccgtggcgccggaaagtgatgacgtaggcgcgcgcatgcaaacccgctttgcggtgaaaaaacgcctggcggagtacgccgccgggctggttaatcccggcgaaacggtgtttattgaaggcggcagcaccaatgcgctgctggcgcgagagctcagccatcggcaggacatcaccatcatcaccgtcagccattacatcgccggactgctgcgtgagcagggcggcgatgtgattatcctcggcgggctgtttcagaaaagcagtgagtcggtggtcgggccgttaacgcggctgtgcattcagcacctcaactttcataaggcgtttattggcattgacggctgggatgaggcgaccggtttcaccagccgcgacatgctgcgctgcgatgtggtgaacgccatcatggaaaagcccacccacaccgtcgcgctcaccgactcctccaaatttggtcagattcatccctatgcgctggcgccgctacagccgtttaagcaggtgatcaccgacacggaactcgc

SEQ ID NO: 15604 - DNA, 236 bp, Zea mays
  misc_feature (151)..(151): n is a, c, g, or t
  Coding DNA Sequence Number=SeqID_1201
ggatctgccagcactctacctggcgctagaacgaatcgtgcccgcatatctgacggtgatggtggtgccggtgtgtcagctgcagctgatggtaatcctctggccacagcttaactggccggtgtgcccgtcagatcgtctgctggcaacncggtctcaggtgatcctacagtgatgtccgccacggttctgcatcagaagggtcccgctctgtttcgcttcctgcatgcgcctgt

SEQ ID NO: 15605 - DNA, 330 bp, Zea mays
  Coding DNA Sequence Number=SeqID_1202
agggtgatttgcaccgatttctcgtcggcgcactgatcgccatcggcctgagcgcctgtcaggcgccaccccagagcagtacgccgcgcggtgcggtgaacctgccggagccggacgtgcgcctggcggattatctggccaccgattgccagaatgtctggcagattgaagcaccggcggccatgagcaatccactttactggcagcgcgctatcgactgcggtgagcggctgtcggcggccgaagcgcgggcggaagcgcggcgctggccggtacagaactgggcgcgcgcctttaagcagggcatcctgctggcgaacggcaacgtga

SEQ ID NO: 15606 - DNA, 282 bp, Zea mays
  Coding DNA Sequence Number=SeqID_1203
agggcggcatagtctggctggtaggggccggaccgggggatgtggatctactgacagtcaaggcgctgcgcctgctgcaacgtgcggatgtcgtggtctatgatcgcctggtcagcgaagcggtgatggcggaagtcgccagcagtgcactctgtatcgacgtgggtaaacagccgggtcatcacggcctgaagcagactcagattaatcaactgctggtggccctggctgccagcgggcgcaatgtcgtgcgtttataaggagacgatccctttatctttg

SEQ ID NO: 15607 - DNA, 140 bp, Zea mays
  Coding DNA Sequence Number=SeqID_1204
tttggtaaggtttttgtaggatgtgaaggaagtggttataatgaggggcaagtgagtttacattttgttgggattttatatttgattggtttttatgaagttgtaatgggagttagtggttgctatatgagaatagttaa

SEQ ID NO: 15608 - DNA, 330 bp, Zea mays
  Coding DNA Sequence Number=SeqID_1205
gaaccggccgattagccagtgcgatcccaccgcgcatgccgagattatggcgctgcgtcagggcggcaaagtgattgataattaccggctgctcgacaccaccttatacgtgacgctggagccgtgcgtgatgtgtgcgggtgccatggtgcacagccggattacccgtctggtctatggcgcgaaggatgagaaaactggcgccgccggttcgctgctggatgtgatcggccatccgggcatgaatcatcagattgagattgcgcatggcgtgctggccgaggagtgcgccacgctgctgagcgacttcttccgtatgcgccgcgaaca

SEQ ID NO: 15609 - DNA, 600 bp, Zea mays
  Coding DNA Sequence Number=SeqID_1206
ggcgatgcgctgttcgcacaggaaagtatcttcgacgatcgcacccccagcacgctatcggcgcagcagaatgccgccgcgcagccgcaggtcgagagtgccaccgagctcgatccgctcagcctgtttggcagccagagcagcagcgacgtgcgcaaccacgacgatccgctcggcctgatgatgggcaatgcggttccgctggcgcagccggagatcgcgccggcacagacggttcaaccgcagcctgtcgcccagccggaaacgcccagtgaaccctcgccgaagacggcaccggtcgagctggcggatctcagcagttcgccactgtttgatgacaccgaaacccaggccacgtcgccgctgatcgaaccgcaggcggagcagccggagacggtcgcgccgcagatggattacggcggcattacgctgcccacgccgcaggcggtgcaacgtgtaccgtcgccgacgccgaaagggcggctgcgtatcgatccggtggcttcaagccatcagaacgcggcacccgccagccaggcgacagccagccacagcagcggcgacgcgctgaaaggcgaactgctggatgcactgctggaa

SEQ ID NO: 15610 - DNA, 457 bp, Zea mays
  Coding DNA Sequence Number=SeqID_1207
taccattggcgtctccacagacgtgtcgtatcaggcgggagggctagctcggacaggcggcccgcaggacggctactactccgcgtggatggcgccggagcagatcttctgcgagggcaagggcagcaggatgccgcagatggcgatgtgcagcagcagcaagagacccagagccacgtcctcctcctattcttactggtgaacaacccaacaggagacgaccgtgtcagagccgtcagccgtctgtctgtattattatttcgttcatgcatatgcctcggctggtscagtgcattattcttaccgctagtctgcctgctaactgaagttgtttcgtgctcaactgcccgcgtgcattttttttccgcctgtggaacgaggaggatcagacatcagtgtatgcttgcgagcgtttgcgcttttttgaggcgctagagaatgaatacctccgcgcctt

SEQ ID NO: 15611 - DNA, 345 bp, Zea mays
  Coding DNA Sequence Number=SeqID_1208
ctaagcggacgtgccagcaagaaaagaggagcccactgcggctccttttttatgcgctaccgcgcagcggcccatcgccctcacgttttgctggtcgcggttcttgcggaaagctgctacactgccgctcttacgcatggtagtttgtgcccttttcacacgcaggccttgaggctgcgtcatatcccccctgaaaactacatcgcgcagcgcgatcagggcggttcggagtaatacacctgcatgtcttttgactctctcggcttgaatgccgatattttgcgtgcggtagcagaacagggctaccgtgaaccgacgccaatccagcgtcaggcgattcccgtg

SEQ ID NO: 15612 - DNA, 522 bp, Zea mays
  Coding DNA Sequence Number=SeqID_1209
acaaagcggcagtcagcgtggtgatgacgctggtggagaacctgcgtggcgagcacggtgatgtggtggtggcgtttgtgccggatgaagagatcggcctgcgcggcgccaaggcgctggacctggagacgcgctttaacgtcgatttcgcctggaccattgactgctgcgagctgggcgaagtggtgtatgagtgcttcaacggcgcctccgctgaaattaccttcaccggcgtgccggcgcatcccatgtcgggcaaaggcgtgctggtgaatcccctgctgatggcgcacgacttcatcgcccgcttcgaccggcttgccacgcccgagcataccgccgggcgcgaaggctatatctggttcaatgatatgcaggccaatgccagccaggcggtattgaaagcgtcgattcgcgatttcgatttaaaggggtttgatgcgaagaagcagcagctggtggaagtcgccgatcagatcgccgcgcactatcccactggtcacgtcgcgctgaagatcaatg

SEQ ID NO: 15613 - DNA, 450 bp, Zea mays
  Coding DNA Sequence Number=SeqID_1210
ggtacgatcagcacaaagccgactattcacagccgcagcgcaaccgttacagcatcattcagaccaaaaccgaagccgatgccaacgcggtgctggatgcgctgaaaaagggcgaggatttcgccacgctggcgaagagcaaatccatcgacccaatctctgcgcgtaaaggcggcgacatgggctggctggagccgaacaccacgccggatgagctgaaaaacgccaacctgacgcagaaaggccagctgtctggcgtgatcaagtcctcagtaggtttcctggtggtgcgtctggacgatatccagccagagcaggttaaaccgctggcggaggtgcacgacgcggtggcggataaagtgaagcaggaaaaagccgtcgacgccttctataagatgcagcagaaggtgagcgaagccgccagcaacgacaacgaatctctggcgggcg

SEQ ID NO: 15614 - DNA, 364 bp, Zea mays
  Coding DNA Sequence Number=SeqID_1211
gtgtctggcatcatatgctgtgcatgtatgccgacaaggccaagaccgccatgatcgtagtcgtatctagcgatggcaccgcggacatactggtcgtcaagcaccgcagcacagttcccatcgtctctgttgtggtagccgtgctaatcatggaatctatatgggtcctcatcagctggtagggcacagctaggcacagcctgatctatagaggcgtcattcccatcctctgggagggctccaggaagggtatggattcagagtcaaccgaggtgcatcttgtagtatgcgctcaagtcgtccgtgcataagcaactttgcaagtctggtgatgccattgtggatctcgtattgtaacggcgtt

SEQ ID NO: 15615 - DNA, 98 bp, Zea mays
  Coding DNA Sequence Number=SeqID_1212
gacattacacaggtgctcaaaatgttcttggaaacaaggggactgaaattgcaaaggttgtctcgggaagcttacatcgacgaactgatgcggaggcg

SEQ ID NO: 15616 - DNA, 270 bp, Zea mays
  Coding DNA Sequence Number=SeqID_1213
ggtccggccacctatgtggcgcctgcttcgccgcatacgccgcgctggttaaccggcctttttgattcgctggcgattcgcgtcagcgatcatccgcaggtccaggcgctgtgtcgcggatttggcaagccgctggtctcaaccagcgcgaatttaaccggtcagccgccgtgccgcagcgccgccgaagtggcagagcagtttggctcgcagttcccggtgttgcaggcggccaccggcggtcgcctgaatccttctgaaatccgcgat

SEQ ID NO: 15617 - DNA, 538 bp, Zea mays
  Coding DNA Sequence Number=SeqID_1214
gatctggtgattgatgccgccgataacttcgcggtgacttaccaactgtctgatgcctgtttccaggcgggcataccgctgatcagcgcctcggtgctgggtcgtcagggctatgctggcggtttttgcggcggcgcaccgagttatcgtgcgctgtttccgcagctgcctgcttccgcagctaactgcaacaccgccggcgtgatagggccagccgtggcggcgctgggggcgatgcaggcgcagatggcgctcagcatactgctcggcctgcaaccctcaccgctcggttgcatggtcaactgtgacttcgtcagctggcactttcgttcgttccgctttgatgcggcacaggaaccggcccagcccggcgtgccgtttattgatgctcacctgttacagcccggagactgcattgtggagctgcgcagctgcgaagaggcgcccgccagcgtggccgatcgggttgagcgcgtattgccgcacgaactggacgcctggcagccaccggcggatcgccgcatcgtactggtgtgtg

SEQ ID NO: 15618 - DNA, 157 bp, Zea mays
  Coding DNA Sequence Number=SeqID_1215
gtcggcaggtggaaggacggatcactgatgatgcggcggaaggagacgcaggcaatggaggcataggcgaggtttgcgggggaggcaacgcggaggaagatctagatggaggagaggaggcggtggaaaaaattacagtgaccaagatgaaagacaa

SEQ ID NO: 15619 - DNA, 357 bp, Zea mays
  Coding DNA Sequence Number=SeqID_1216
catttttcccggcatgtgctgttacttcactgaaactagaagatgcattcgatacgaatagagtgaagtgtgttgtggataatctgggctacgtgatattttttaagagggctgattccattcaataaatcagggaacgtcaatccaaaaaatccatatcttcttcatcttggaatcgcaggctttcattcaagatttttgaagatctatctagaacttccaccaatagtccaataccattacaaatggaagaggatctagagcaactgaaagttcttgaaaacagctatcggatgaaggtgctcaaagtggacaaagattcccatggtgtggatgcacatgagcacaatgagaaaa

SEQ ID NO: 15620 - DNA, 376 bp, Zea mays
  Coding DNA Sequence Number=SeqID_1217
atgacccagagatctccggatgcatttgatggcttgatgttacagctgctgctgaaggcatcccaagacatcaggtttgtgtgtgaagaagctgacagggcacttggcttaatggttggttccatgacccctcttccactgtttcagaaaatgagggtatatgggagtcacaaaaaccttagggtcagggctaaggatgctgtttctctctccagatgtgtctccaagatggggcttcaagaaatggagcagtttgggttggttgaactgattgaagtggcagctgatttactgaatgatagacttccagaggcaagagatgcagcgcgtagtgttgcaacttcaatgtatgaagcactgacaaaggactcggaag

SEQ ID NO: 15621 - DNA, 326 bp, Zea mays
  Coding DNA Sequence Number=SeqID_1218
ggacgacgagcactaggccgcaccgcaggcaagttggcgcgctccggcggtcgccgtcgcgcgcgggccctggaccgacttggccacgtctggacccagcgagcgtcgtcgcgcgattagcgttattattgctgacccggctggctgctctcgctcgcccccatcttgttggggacggggacggtcgtcgcgtggaaaattcagcggcggccgcgacgagcccggtcatcagtcagcgacgtaattctggtacccgccaggccgccaccaattctccgcgcccgccacaccgacggccggcgtccagcttgccgtgtgtgtgcagt

SEQ ID NO: 15622 - DNA, 262 bp, Zea mays
  Coding DNA Sequence Number=SeqID_1219
atgtcttacacgttcctcgtgccacaaaagaatctagtctcagttagccgcgggggctgggaagcccggcggcgcgccggccgcgggggacatgcccgccaggggcgcggcgagggccgccctgtaggagagaggaaggggaaggggagggaaagggtcgccggagaagggagggggcggcggtcggccggccatggagaggcggcggcggcggctggaggggtggggtgggagcggcggcggctggaggacctagagctct

SEQ ID NO: 15623 - DNA, 394 bp, Zea mays
  Coding DNA Sequence Number=SeqID_1220
tggtcggcaggctgagcacgtcacccctactctgctttgctcacgacggacatgcatatggtgcatttgctgcccgccggtgaagccgaagatgaggagaagcttcgtgtcctcgatctggcctgtggcactggcaggcacaggacggtgtctgctggcctcgtctcgtctcgtcttgtctcgtgggaaacatgcaattaagcagcagcgcatgtcgcgtgaatcgtggacgagagcgaggtccatcatcaatcatcggcttgggaagatccccagcgcgctgaacttcccaactcatgattcacggtcagccccggcgtgcgagatgtggacttcacacgagcaacgcatcctgattaatgactgcacacaggccacattactacgggcttca

SEQ ID NO: 15624 - DNA, 508 bp, Zea mays
  Coding DNA Sequence Number=SeqID_1221
gcgcgcatgtcacgatcatctatatcaaggatatggaggattcgggcgaggcaaaggaagccgccctttccatgatcgcccagggagtagatgtgttgaccggtaaactcaacgcggccgaggccgggcttgtggaagccgcgaaggagcgccacgtctatgtgacaggccgcggctacgaccagacgaagatcgcgccagatctcgtactgaccaatattctggaagactggccggcgatgatcggtcatgcggcggaggaggtgaaggccggcaagctcttcggcaccttcgtgcaatacggctataacaccgccccggtgacgggcgcgaccttgggctataagccgggcgagacctttaaccccgtggtgccggcatccgtgcagaaggagatgaccgccatgggcaaagccttcgcggagggcaagctctcgatcatgcgcggcatcgtgcgcagcttcggcacgctgcgcgcgaatgacggcatcagccttgacgttcataa

SEQ ID NO: 15625 - DNA, 340 bp, Zea mays
  Coding DNA Sequence Number=SeqID_1222
tattctggcaggttttgagcagtgcgaagaacgtttacattgtcggcccaatccgctctggagttggttttgatattctgcaagtgaatgatttgcatgttgagagcaagaacattacggtctcagaagtgtaagttcggtacattgtgtagtatccgtcaccgatcgtttagcaagatgcaggcacgtcataagattgaactagatagccgcagacatcaatagtggtaaaaccactttcacactagcctctatacagttatctgcggatgagggttgatctagctaggccggcgacatcgcatgggcgtgaccagatatttacgattcggcgtgctgt

SEQ ID NO: 15626 - DNA, 362 bp, Zea mays
  Coding DNA Sequence Number=SeqID_1223
gcagagttactgctcgagccggcattcgctgtagagctgcgtcattgccgagcacggcggtgacatggagcgcgactacgcctacaccatcggccgcgcgatgggcgatctgcaaagcgctgactgggtgggcgcggagtgcgcgcgccgcgtgctgtcacgtctttcgccacgtaagctgccgaccatgaaagcgccggtgctgtttgcgccggaagtggccactggcctgttcggccatatggtgggcatgatcagcggcagcagcgtttaccgcaaatccgccttcctgctcgacgcgctgggccagcacattctgctgtggtggctcgcgattgaagacaagcagcacctggtgaaag

SEQ ID NO: 15627 - DNA, 196 bp, Zea mays
  Coding DNA Sequence Number=SeqID_1224
aagattttatgccattctggaggagctttcaattgcaccgcccaagggggggattgccaggaggtagttttatgccttggccattgccttagaaggaggttaccctggtggggcccgtcctttatttgtttttggggggcgggccatggagattgtggtccacgaacaaaaactggtcaaggtccttgccaccggg

SEQ ID NO: 15628 - DNA, 341 bp, Zea mays
  Coding DNA Sequence Number=SeqID_1225
gcgccgagtggcacaacttcataaaactgcttaagcgctaccgcacgcgccagccgatcaacggcgtgatcatgaccatcagcgtggccgacctgctgaccgattccgctgaggcacgtcacgcccaggccagcgcgctgcgcagccgcatggttgagctgcatcagcaaaccggcattcacttcccggtgtatgtgatggtcaccaaaaccgacctgctgaaagggtttataagcttttacggcaacctgagtaaaccgcagcgcgatgccatctggggcttcaccttcccgtgggaaccgggcaagccgcacaaagatgactggtaccgcagctttagc

SEQ ID NO: 15629 - DNA, 391 bp, Zea mays
  Coding DNA Sequence Number=SeqID_1226
tcatccgcatcgcattagccggaatactgggcggactgattggcctggagcgccagatgcgcgctaaagaagcgggcctgcgtacccacattctggtcggtattggcagcgccatgttcatgctggtgtcaaaatatggctttgccgatatgctgactaacgaccatgtggcgctggatcccagccgtattgcggcgcaggtggtcagcggcatgggcttccttggcgctggcaccatcatcatacaaaagcagattgtgaaaggcctgacgaccgccgccggcctgtgggtgaccgccgcgattggcctggtgatcggtagcggcatgtatgaaatcggtatttacggcacggtgctggcgctggtggtactggaaacgttccgccgtat

SEQ ID NO: 15630 - DNA, 516 bp, Zea mays
  Coding DNA Sequence Number=SeqID_1227
gaacccagctgccatttgttgttgcttgtctggcctgcttgttgcggaagctcccggtccctgcgtagcttggtgttcaacgtaccgctacggtggtggtggtgatggatgcagtatggtaggcaacttggaaggatgtgtttttataaggggggtgtcgcgcccagcgcatgatttggtagagcccgcgcacgggcgggttggcatggttgtcatgccgctgccatccaggcctgactggtcgatgggaaccttacggaaggatcctgccttggcactggggggcatgcgtcttcctaatgagagagtggcgctcgcccacgtgtggcttgtccaagtgcctccagtcggcgtttgtcggtgcctggggtcccgcgccctccgcttggtgcgccgccggccggcccatcttgcgcacagctcacgccgggctacgggacattctgttcaatgtcagtcatgtccgccgtgcccgtcggtgtcgcggcacccgtgcaccagaggtccagagtcctg

SEQ ID NO: 15631 - DNA, 491 bp, Zea mays
  Coding DNA Sequence Number=SeqID_1228
gccggcatcaaatatcgcatcaatcagcgcctggtgcgcggcctcgactactacaaccgcaccgtgttcgaatgggtgaccagcagcctcggctcgcagggcaccgtgtgcggtggcggtcgctatgatggtctggtggagcaactgggcggccgcgcgacgccggcggtcggttttgccatggggctcgagcgtctggtgctgctggtgcaggcggtgaatccggaatttgaaccgacgcgcattgttgatgtctatgttatcgcttcggggcagggcgtgcagtccgccgcgatgcaactggcggaaaaactgcgtgatgccgacccggcgctgaagctgatgaccaacttcggcggcggtaacttcaagaagcagtttgcccgtgcagacaagtggggcgcacgcattgcgctggtgctgggcgaagacgaagtgaaagcgggccaggtggttattaaagacctgcgcaccggcgatcagcagacgct

SEQ ID NO: 15632 - DNA, 429 bp, Zea mays
  Coding DNA Sequence Number=SeqID_1229
atcgcctcaccgagaggcttgacaatgcggccgctcatgaactcgctaatccttgtgattagtcgagactcccactcggggaggccttataaatcgtgaaaggtccgatatagtcggtcagaggccactatcttgtcggctttccaaatggacagcattcctgcttttttcatttgtttggctttttttactttttttttttttttttttttttttttttgcaagcaagttgttaaattcacaaggagagcgacagattatccaaacatttgacttgctacccagcagcaacatcattgatcgttgtgggaagaaaaggaaggagagccaccagaaaagtgacgtgcggcctgtgcaaggatgctgtgataaatttaaaaaggagaacctcatttgaaagacttggatttccaaggttgttgttcatta

SEQ ID NO: 15633 - DNA, 373 bp, Zea mays
  Coding DNA Sequence Number=SeqID_1230
gaagttcaaggtgatcgcatcgcaaagcggcgacttcacgctcgccggcggcaagcaggtgatggaagcgttcgcgaaaacctacggcaagcagatcaacgtcgtctacgcgcacaacgacgacatggcgctcggtgcgatccaggcgatggaagaggccggcatcaagcccggcaaggacgtgagcgtcgtgtcgttcgatgcgacgaagggcggcttccaggcgatggtggccggcaagatcaacgtcgacgtcgaatgcagcccgctgctcggcccgcagctgatgaccgcggtgaaggacgtggtcgccggcaagcagctgccgaagcggatcgtcacgaacgagacggtgttcccgatgaacgtcgcc

SEQ ID NO: 15634 - DNA, 325 bp, Zea mays
  Coding DNA Sequence Number=SeqID_1231
tgcagcagcggcgtgagcggttgcagcgcgagcaggcggagcgcgccaacgccgctaaaagccagtttcttgccaccgccagccacgagctgcgcacgccgatgcaggcgattctgggtctgctggagctggagcagcagcagcatccgagcgcgcggctcgatttaatgcacagcagcgcccggtcgctgatgacgctgctgaacgatttgcaggatcatgcgcgcattgagaatcacagcttccgcctgacgccgcgcccgctcgatctcacgctatggctacagcagcaacagcagttttaccacccgctgatgcgcgatgg

SEQ ID NO: 15635 - DNA, 507 bp, Zea mays
  Coding DNA Sequence Number=SeqID_1232
gcacttcgtccactacgcgcaattgccgaacctcgcgttcttcgcgaacagcggcttcccgtttacccgtttcgccgatctgtcgcagacggccgtcgtcgtgcccgaccggccgtcgccgcaggagctcgaagcgtacctgacgatgctcggccacatggggcagtggaccggcttcccggcattgcgcgtgcaggtcgcgcggcccggcgacgtcgccgcgctcgcaggccgcaaggacctgctcgtgatcgacggctcgcccgcgtcgccgctgctgtcgcgctggcgcacggcgctgccgctggcgatcgaccggcagggcggcaccggcgcgacgcgcgtcgcgttctcggtgaaggagcgctggcgcaacggcgtcggcatggccgacggcggcgcgcatatcgaacagacgggccagctcgcggcgctcgccggtttcgagctgccgggcagtcacggccgcagcgtcgtcgcgctgacggcgaccgaccagtcgcgact

SEQ ID NO: 15636 - DNA, 367 bp, Zea mays
  Coding DNA Sequence Number=SeqID_1233
tgcaggacatcaagcccggttcgttcgtgggtaccgccgcgacgactggggtcgacggcaagctcacggccacggaagtactggtgtttcccgaagccgcacgcggcacgggtgaaggacattacgcttgggatctcggatcgaacagcacgatgaccaacgccaatgtggatcaggtcgtgcaaggcacgagcggccgcgatttgaaactctcgtacaagggaggatcgaatgccgtgacggtgccggagaacgtgccggtcgtgaccttcgcgccggcgacgcgggatgatctgaagtcgggcaagcaagtgttcgtggtggcgagccctgccggttcggactataaagcccaacgcatcgtcgt

SEQ ID NO: 15637 - DNA, 382 bp, Zea mays
  Coding DNA Sequence Number=SeqID_1234
gaggagtgcccgatttgcttctttttctacccgagtctgaatagatccaggtgctgcggcaaagggatctgcactgaatgcttcttacagctgatgccatccgaggcttcaaaacttgtccactgccctttctgcaaaactaaggcctatgcaattgaataccaaggcgctcaaatgacaagcggcaaggaaatcaaacaagagggagaaccgaacgtcaatgagaccaaaccgagtgtgtacatttgaaatytcagattaccggcgaaattgctcggccttakwattagctagtccaattttacacttccgcaagttttytgacctgccgacaagttttttttttcttttctggrctgccatgatgactcatcctgactga

SEQ ID NO: 15638 - DNA, 459 bp, Zea mays
  misc_feature (47)..(48): n is a, c, g, or t
  misc_feature (50)..(65): n is a, c, g, or t
  misc_feature (68)..(72): n is a, c, g, or t
  misc_feature (74)..(74): n is a, c, g, or t
  misc_feature (77)..(78): n is a, c, g, or t
  misc_feature (83)..(84): n is a, c, g, or t
  Coding DNA Sequence Number=SeqID_1235
ctctgtacccctgctgggtgaaaattcattagcattgagaaaatcannannnnnnnnnnnnnnnnaannnnngnaanngactnnaaattcttgtatggtcttgtctcgggaatgcaaaacaaattcacagaaaaagttccaaacagttatgtcttttgaatatctttcttcttctgcctcactatgtcatggtgcaagtcattctgctctctggattcctcttgatctggtgctggaggattccatggatggctatcaagttagtgcaacaagttctattgaaacaattagtggtttgataaagaccctgcgagcaataaatggcacctcttggcatgacacttttttaggcctttggttagcaactcttcgtcttgttcagagggaaagagatcccattgatggcccaatgcctcatcttgatactcgcttatgcatgctcttgtgtatcatacctct

SEQ ID NO: 15639 - DNA, 214 bp, Zea mays
  Coding DNA Sequence Number=SeqID_1236
catcacgcgccgaagcttggacgagtggcccagggccggctccgacgacgtctgcgagtggcccaaccccaccacgcccggcgcgtccaaggcgggcggcgggccctcctccgccaggccaggggaggggctccggctcgacctctcctcgctccgctcgcagggacgcaaggaccagatcgccttttttgacaaggagtgctccaaggtcgcc

SEQ ID NO: 15640 - DNA, 205 bp, Zea mays
  Coding DNA Sequence Number=SeqID_1237
tcgtcgacggatggctgcgcccccggcgacgacggcgatggggacgacatcgctgcctgccggtgcgccaagaagctcgggcagcctgtggcgctggctcggcaagaggcggcgtctgctgcgtcgccggctggtggtgcgcaccgcgtcgccgcgcaccggaggttcatgttcggcgggttccgccggcggctgctcatgcgga

SEQ ID NO: 15641 - DNA, 350 bp, Zea mays
  Coding DNA Sequence Number=SeqID_1238
cacgctcattatcacgctgatcattatggtgctggtctcggcctacttctcgggttcagagaccggcatgatgacgctcaaccgctacaaactgcgccacaaagccaaaagcggcaaccgcagcgcgcgtcgcgttgagaaactgctgcgtcgccccgaccgtctgattagcctggtgctgatcggtaacaacctcgtgaatattctcgcctcggcgctcggcaccattgtcggtatgcgcctgtacggcgatgccggcgtggccatcgccaccggcgtgctgaccttcgtggtgctggtgtttgccgaagtgctgcccaaaaccgttgcggcgctctatccggaaaaag

SEQ ID NO: 15642 - DNA, 511 bp, Zea mays
  Coding DNA Sequence Number=SeqID_1239
gaggcgtgtacgtgcaagtccaagtcgtcgtcgcggccagtgatgagagtgacgaccgacgagcggagggagggagggagcacggcgaggcgagccggtcgagacagccgcactggggtctctcggtcggagttcgtaccgacagccaggcacatgatcgatgaagcacaagacaagactagaactagaagcgctgctccagttccagttccatcttcgacgacgggcggcagcggcggggacagaccgagcacgcatgcagggagagaagagaacacgcacgccattggtgtgcagcagcactactatcactatgcggccgttgacttccgctccagtccgttcatctccctgccctcgggtcggctgcctactcacccgctcgtcagactagaggattccagccggccgggacccgtgcttacgtccagctcggtctacagtccacggagacgaacagtagaggtagagacgacgactacgactacgactacgacctctcttgtccgga

SEQ ID NO: 15643 - DNA, 387 bp, Zea mays
  Coding DNA Sequence Number=SeqID_1240
tgcactccagccaggtctccagaggcggcgacaacacagcagccgccatttcgtcgatggggaagagaggggtcctggagctggcccagcgcatgatggcggatttctactcggctgtgtctggtcccgtcacccagccgtcgagcagcatcgacgagtggtacggcagcgccggcgccaggaggaccgacaccgccgtgcgcatggtgacctcgaagaaagccggcaccgtggccgaccttgtgctgagcgccagcaccacggtgtggctgccgaacactccgccgcagctcgtgttccgttacctccgcgacgaccagcgccgtggcgactgggacgccttcttcgccagtggcgcagcggtgacggagctctgctctgtgccca

SEQ ID NO: 15644 - DNA, 256 bp, Zea mays
  Coding DNA Sequence Number=SeqID_1241
aaggtgggcaatggctgcccaagccttcctttggtatacatacccttgttgcaatgaacaagtcccaatcacttgatgaacatggatttctgactgctgctgctggaaaaacacaccagttggggtttggtgaccctggtgcaatattcccaaaaaccagcctggggatggcaaaactttattaaatacttaagccattggttgaagaattcctggttcaacttccaaataataagcctggagcaatatattggat

SEQ ID NO: 15645 - DNA, 176 bp, Zea mays
  Coding DNA Sequence Number=SeqID_1242
caagatgacgtaacaggtagactactccgtatagtgaagctgatggacgaatctgaagagggacagactgaacaagagccaacacaaaaggctgatcgccaagtggtcgccacctaacaagacactaacgttacgagtcacttttattgtgattggtgctaagtcccgatgggctc

SEQ ID NO: 15646 - DNA, 520 bp, Zea mays
  Coding DNA Sequence Number=SeqID_1243
ttgagcagatgctgaccccgaaatccgggcgattctggctttcggccgccaccggcacgctgagcgtgacggatacgcctgacgtgcttaaccgcatcggtcgctatatcgagtatcagaacaaggttctgagccgtcaggtacagctcaatatccagattgtcagcgtcagccagacacgcaacgagcagctgggccttgactgggggctggtttataaatcccttcataactttggcgccagcctgacagggtcaatggccaatgcctctacgtcagccgccagtgccggtatctcaatcctggatacggccacaggtaatgcggctaaattctccggatcaagcctgcttatcaaagccctttccgagcagggtaatgtcagcatggcactgaaccagattgaccctaccgccaacctgacgccggtggcgtatcagctttcaagccagaaaggcatcctgtccagttccagcacaaccgcaacggcgaacgtgggcgtcacctcatcgatgacaaa

SEQ ID NO: 15647 - DNA, 427 bp, Zea mays
  Coding DNA Sequence Number=SeqID_1244
gagcaggttacccagttttctccttcaattcttaaatctgagggagtgcctgtgtatcgcacagttcagcattctggggaattcgttattacctttccaagggcatatcatgctggcttcaattgtggcttcaactgtgcagaggcagtgaatgtggctcctattgattggttaatgcatggacaaagtgctgtcgagctttacaggttacaatgccgcaagacatccctgtcacatgacaagctgttgtttgggtcagcactggaatctgtacgagcccttgcagagctagctcttggaaaggaaactccaaaaaatttgaaatggggaagtgtctgtgggaaagatggagatcttaccaaggcagttagggcaaggataaagatggaagaagaaaggctggactgtcttccaactcatcttaagt

SEQ ID NO: 15648 - DNA, 225 bp, Zea mays
  Coding DNA Sequence Number=SeqID_1245
attcgccaggaaaccaaaactgcagcggaaaccaggcgccagcagccgcaagctccgccgttcgcccacgcgcccagccagccggccgttcttcttccaccgttccaccagcgcccagcggccccgccgttcgcccagtgccagcggccccgccgtcgaggccacaggccaggagcctagcccaggacccagccaccgagcgtccattggtgagcgcaaggtgtt

SEQ ID NO: 15649 - DNA, 415 bp, Zea mays
  Coding DNA Sequence Number=SeqID_1246
atccgttcgcgctggtcgaagcggcacgcattttgtgcgccgacggcttcctggtgtttccctacaccacggaggatctgatagtcggtgaaaaactgctggccgctggctgtgaactgctgatgccgtggggcgcgcccatcggctccggccagggattgcgaaatattgacgggctgcgggcgatgcgtgcctggttcagcgatattccactgatcattgatgctggcatcggcgcgccgtcacaggcagcgcaggcgatggagatgggcttcgatgccatcctgctcaataccgctgtggcgaaagcgggcgatccggtggcgatggcgcgcgcgttcagccaggcgatcgccgccgggcagggcgcgcgcgaggccgggctgatggagaagcgtgatatggccgtggcctc

SEQ ID NO: 15650 - DNA, 220 bp, Zea mays
  Coding DNA Sequence Number=SeqID_1247
ctcttaatctcagggtcgagctggtgcgttgcgaacgcggccgttggggacgcgcggctgcaggccgcactggactacgcgtgcggccacggcgctgactgcagcaccatccagcccggtgccacgtgcttcgaacctaacactaaggtcgcgcacgcctcgcatgcgttcaacagctactaccagcgaaatggccgagccagcgggacctgcgacttcg

SEQ ID NO: 15651 - DNA, 273 bp, Zea mays
  Coding DNA Sequence Number=SeqID_1248
tcaggccggtctgttatcggagcgccgcgccactacgcactgggtacatgcccagagtctgcaactgctgcacccgacgacgcggatagaagaagaccgcatctttattattgacgatcacatctggacctcggcgggactcaccgccggactggatatggcgctgggaatggtggagaaagatctcggtgccgaagtggcacgcagtgtggcacacctgctggtcatgcatcaccgccgctccggcggacagacgcagcactctgagatgct

SEQ ID NO: 15652 - DNA, 592 bp, Zea mays
  misc_feature (528)..(528): n is a, c, g, or t
  misc_feature (537)..(537): n is a, c, g, or t
  Coding DNA Sequence Number=SeqID_1249
caagttgtttggtcagcgtaaagattataataccaaacatcgtgttctattaacggggaccccagtccagaataatcttgatgagcttttcatgcttatgcacttccttgagggtgaaagttttgggagtataactgatctccaagaagagttcaaggatataaaccaagacaagcaaattgagaagcttcatggaatgctgaagccacatcttcttcgaagattcaagaaggatgttatgaaagaacttcctccaaaaaaggaattgattctacgagttgaattgacaagaaaacagaaggagtactataagccaattctcaccaagaattatgatgtgttagcccgtcgtaatgggggacatacatctctaataaacgttgtaatggagttgcgcaaactctgttgccatggattcatgattgatgaacctgatcttgaacctgccaatccagaagaaggtttaaagacgcttctatattcatcaggtaagatgcagctgctgcacaagatgatggagaaactganagacaaggncatagatctctaatttattcacagttccatcacatgttggacttgctggaggact

SEQ ID NO: 15653 - DNA, 239 bp, Zea mays
  Coding DNA Sequence Number=SeqID_1250
aagtcaacctgcaggcttccaacctgggccctgcccgtgtttttacaccgtggggacgggaaaacccctggggtaccccaactaaatggccttgaaaacatccctttttccacatgtggtaatatcgaagaggcccgacccattcgcctttccaaacagttcgccaccctgattggcaatgtggccttgatccggattttcttctttcacccttttgtccggattttaacaccgattat

SEQ ID NO: 15654 - DNA, 190 bp, Zea mays
  Coding DNA Sequence Number=SeqID_1251
gggattgcgtgcttgtgctctcccgtcttttcacttgcaggggccttggtagccgactgccgatgccgttttcatgggccagctcggtgccggcggggacaacctgtccgccgctgacctacgggtggtcagcagagggcagggccatgagcgagcgtggagccggggtcactgatcgcaacgtgctcga

SEQ ID NO: 15655 - DNA, 112 bp, Zea mays
  Coding DNA Sequence Number=SeqID_1252
gggcagctgtgcagatctcagttagtgttggacaagtttttcttcaactggtgctatgcctagcacttatatcatcatttcagactagatcccttcttgtatggccacaaat

SEQ ID NO: 15656 - DNA, 99 bp, Zea mays
  Coding DNA Sequence Number=SeqID_1253
tgttgacaagcactggtgggcaatatcatgttcttctgagaatcgccgatggacaaggtaccccaagtgtggatacacactcttggcaagtgagtgcac

SEQ ID NO: 15657 - DNA, 281 bp, Zea mays
  Coding DNA Sequence Number=SeqID_1254
tgcagccgggcgacctgatctataccggcacgcccgaaggcgtcggcgcggtcgtgaagggtgacgtgatgcgcggcggcgtggacggcatcggcgaattcgcgcaactgtcatacgactacgtgccggtgcatttgctgcgcgacggcggcgagcagttgaagcccgaataccggtgcatgaatcaggacggcatcgtgccgacgctggtcgacgacgacgcgcacgtgatccagcagtcgctcgcgatcatcgagtatctggacgaaacgcatcccgag

SEQ ID NO: 15658 - DNA, 544 bp, Zea mays
  Coding DNA Sequence Number=SeqID_1255
ggtgcgcagctctctgaggaacacggcggctggcagaccgtggcgccgtctgcgcagccgtttgcacaggatgaacgtccgccggccgcactcagcaaacaggatctggcgcagctgaaacaggcctttgtcgatagcgccctgcgcgcggtacgcatcggcattcagctggtcgaactgcatgctgcgcacggctatttgctgcaccagtttctgtcgccgctcagcaaccagcgtgacgatgaatatggcggctcattagagaaccgtctgcgtttcccgcttgaggtgtttaaggcactgcgtgctgcgctgccggcggaaatcccggttggagtgcggctgtcggccaccgactggatcgagggcggctgggataatcagcaatcgattgttttcagccagcagctcgaagccgcaggctgcgcctacattcacgtctccagcgggggcctggcaccgcagcagcaaatcagcgtcggtccaggttatcagttgccgttcgctcgcgagattcgccagcaggtctagattccggtgattg

SEQ ID NO: 15659 - DNA, 347 bp, Zea mays
  misc_feature (269)..(269): n is a, c, g, or t
  Coding DNA Sequence Number=SeqID_1256
atcaccaatcagtcagtcacagctcacagcaaacaccgcgaagccgcccccgctcccaaacccgaccgagcaaagcgcaaagccccccaaccgcggatcaatccgcagcatcgatggcgcccaaggcggagaaaaagccggcggcgaagaagcccgcggaggaggagcccgcgaccgagaaggcggagaaggctcccggcaggggcggcttcgcggtgtttgctgtgagcagtgagggacaattagttgttatcgtttgagttggaatntattgtttggtttgcaattttctcaaggtgaactttgtaatcggttaggatgtgttgtggaccattatcttatcctac

SEQ ID NO: 15660 - DNA, 343 bp, Zea mays
  Coding DNA Sequence Number=SeqID_1257
cccgaggaggatttgcacgagatctgcccgcacgccggcggcacacggagctggccggccacggcctacaatccgaagaccaagatcatctacgtgcccctggtcgagtcctgcatggtcttctcccggaccgggcgcgacgccaaggccatcgccgaaggcggctcggacctgcgctggatcgtcaaggcgcgcccggactccgacggcaacatcgggcgggtgcaggcgatcaacctggagacccgtaagacggtgtggacccgccgcgcccgggcgctggagagcgcggggctcctcgacaccggcggggggctggtgttggagggcaagcgagaccgta

SEQ ID NO: 15661 - DNA, 203 bp, Zea mays
  Coding DNA Sequence Number=SeqID_1258
aactcctcgtcctgatgctcgcctacttccgcttcctagctgacagcgactgcgacagggaggagatgcttgccctcgcttgtggcctgccaacctacatccaatcgctcccggcccgcacgcccgtcagcatcctcaagatgacgtgggtctcgtattcggtgagctgtctgatggcggaggaggcgtcagccgagagccgc

SEQ ID NO: 15662 - DNA, 218 bp, Zea mays
  Coding DNA Sequence Number=SeqID_1259
cctcctgctggaacagggatgggcagcaaccttgctgatgatgaatgatcaccctctcagactcatcagatcgtgaacgggcaggtgcagcttctgagagttcatcatttgacaaggtgctgtgccacctcctctttcgttataagttcggaatcaaaaggagatcccgccagcaggaaggaggccctgccctgctagatctctctcatggagaagga

SEQ ID NO: 15663 - DNA, 436 bp, Zea mays
  Coding DNA Sequence Number=SeqID_1260
agccgagcgctgtcaaggcgacgcaataactctagcggcgtgggcgacggccagggctggatgagcggcatcgactacaccgactggaccagcggcaagacgttcgcagtcggagacaaactacgtgactacgggagccagtacaacactgtgacggaagtgagcaagagcgcctactacgcctgctccgggcgcgacgcgctcagcgacgacgacaccagcggctggaccgtcgtcgcgctcacggcgcccggcacgcgctacttcatctgcggcgccccgggtcactgcggcaacggcatgaagctcaccgtcacggtcgccgccgcggccgccaccaccaccccggagacgtccacgtctacgcccgccgcaacgacgacgcccaccacgaccaacgctgacacgcccaacgctgacacgcctccggagacgt

SEQ ID NO: 15664 - DNA, 327 bp, Zea mays
  Coding DNA Sequence Number=SeqID_1261
tgcagccgcgccactggttgcgtgctgcgccggatggcagcgcgatcgcctttttgcaggctgacgagcagggcattgtgcagctgtggacggtttcacccaacggtggcgcggcgcgtcagatcacctcactgcgcagcagcattcagtctgctttcagctggcagccggacggcgcagccatcgcctttatctgtgataacagcgtgatgcgttgtgagatagccagcggacagtgacgcgccttaccgcgcgcagcgcgcaaccgccgggcggcgacgcggtggtgtggtcgccggacgggaagcagatcgcctacatgcgcga

SEQ ID NO: 15665 - DNA, 553 bp, Zea mays
  Coding DNA Sequence Number=SeqID_1262
tcgatctgtagtatgcacaccagcaacctcctgagatggcaacgcctcatcagagtccttgaccaccacattgccactattcgtctcttgttccttcaacacaacggtagcaccgacgcctttcacctctggttcctgtatctcaggcactacaggtgtttcgttgaccaccaacacttcatcaacccttggctcagattcaagcaccggatgcaccttggtcacctccaaagcctccaccacctctggttcctgcaccaccatagcgtgcacctcctcctctacctcatccaccatgccctcacgttccggcgacgtccgcctcgacggcaccatcaccacatcaaccatcatgctactccttgacgggacagatgtagctagcaacaccctatacatgtccagatggatcgggcttaccgggtggtccaaaaccgtgctcgcacatctataccagcggcacataggcgtccacggagacgaatcacctttggtttggagcagagctgcgagtgtgcgactggcgaccgaacgcttgcgcttcaatagaaga

SEQ ID NO: 15666 - DNA, 218 bp, Zea mays
  Coding DNA Sequence Number=SeqID_1263
tgcgggcttgctatctcggcactagcccgttgtgtacagcgtaaatactggaatatcccaggagataccctgttatttgccttgcaacacatcccgctttcgacagctgcattaataccaaataggatcgacccgatcggccctaccatcaattgacccagctgtatggctaacggcgcctgatgctggattgtgtccttactcatctgttctggatt

SEQ ID NO: 15667 - DNA, 238 bp, Zea mays
  Coding DNA Sequence Number=SeqID_1264
cacactatggaaggatcaagctatgatcggggtttatatgctcgttgttttgaggagttgtttgatttagccaatttagatgcaacatctacttctcgatataaattctgtgttacagtttgtgagctatataacgaacagacaagggatctacttttggaggcagggaaaagcgcgcctaaactctgcttgggatcacctgaatgtttcattgaactggtgcaggaaaacgttgata

SEQ ID NO: 15668 - DNA, 319 bp, Zea mays
  Coding DNA Sequence Number=SeqID_1265
ggcgagttgtcgacgcatctgcgtaccgatacccggcggccgctcgcgtcgcagccggcttaccgacatacggcgccgtacgcgtctttaaagcccatcgtcgacgacacccaccgcctgctcaacgcggtgttggtgcgcagcgcgcagagcatcgcgctgaaggatttgagccatggcatgcacgacgcggtagtcgatcccgccgatatgcgcggatttactgcgctcgtgttggccgtgcatgccgcgatgccgcctgacgtactgcaacagcagtttctcgcgcaagccaaggtcgggccgtccgacaagctgc

SEQ ID NO: 15669 - DNA, 174 bp, Zea mays
  Coding DNA Sequence Number=SeqID_1266
attcaaccgtatacatggaatgaggaaccgactatgattgaatcctacaataataagagaacaattggctgatctggtggcgaaggagaggatgaacacgatgttgtctggttttggttgcaaaaggattaaccgcatgagtgcccagtttactcacaatactttgtgctcaag

SEQ ID NO: 15670 - DNA, 177 bp, Zea mays
  Coding DNA Sequence Number=SeqID_1267
ttgttgttttgctttgtcgagcgttatacctctttcaaaggcaagctttcaattatccactcaatttagggataacatttaaaactatacgtgaccataaagccaacaaaactgcattaaacctgataaaatgacgtattgctccactttttctcatagactgcttctccctcttta

SEQ ID NO: 15671 - DNA, 185 bp, Zea mays
  Coding DNA Sequence Number=SeqID_1268
gggaccctccggtcggagtcctcatcttcctcaccatggccatcgttgcttcgtcaaaatccaccgccgcggaaaccggatctcgccagcgaattcgacacgcggccattgtccagccatcctccggcggctttggattccacagcaagagcaccggtggctgcgcgaatcgtattcctgggacc

SEQ ID NO: 15672 - DNA, 498 bp, Zea mays
  Coding DNA Sequence Number=SeqID_1269
gcgaaccgggcctgagcgaaaccatgctgggcaaggccctcgccggccgccgcgacgacgccgtcatcggcaccaagttcggcctcgacatgaacggcgccaacggcaacgacttcggtgcccgcggctcccgccggtacatcatccgcgcagtggaggcctccctgcgccggctcggcaccgactggatcgacctctaccagttccacaccccggacccgcagacccccatcgaggagaccctcgacgcgctcaacgagctcgtggccagcggcaaggtccgctacatcggccattccaaccgcgccggctggcagatcgccgaggccgaatacgtggcccgcgcccgcggcggcgcccgcttcatctccagccagaaccactacaacctgctggaccgccgtgccgaacaggaagtcacccccgccgcggaggcctacggcctgggcgtcctgccctacttcccgctggccaatggcctgctgaccggcaagtacg

SEQ ID NO: 15673 - DNA, 154 bp, Zea mays
  Coding DNA Sequence Number=SeqID_1270
gtggataggtggtggtcgtctaagtgggacgtggcgcacaacgctagccaggaacgccgtatgatgatgcaaggtccctcccaccaccaaggcagtcatagcctaggcaaatatgcagaagcatggtcggcatcacatggtggctacccttgct

SEQ ID NO: 15674 - DNA, 369 bp, Zea mays
  Coding DNA Sequence Number=SeqID_1271
agtcataccggcgatctggaaatgattgtcgatgtggtgcgccattttgctaatgacgtggaatgggtgttttttggcatgtgcccgccaaagctgcggccttttattcatgaatatcaccacggcgtagaaattgagcgttatccggccaaactggcctcgcttaatctcgacctcgcgttagcgcctgtcgaagataactttttcaacacctgtaaaagtaatctgcgcctgatggaatatggtgcctgcggcattccggtgatttgcagtgatgtggcgtgttatcgcggtgatttaaccgtcacgcgcgtgaagaaccgccacaaagactgggtggacgctatcaatatgcatctgctggacccc

SEQ ID NO: 15675 - DNA, 292 bp, Zea mays
  Coding DNA Sequence Number=SeqID_1272
tagcacgtcggccagacagtttgcacctgcctgccacgtttcgagcccaggaacgtattggagtccagcgacggggactggcccatggggtgcgtcaccagctcccccataccatacgacgccgacccgtacttgaccggctctggctccggcaccggcctaggagttcgcttcgccatcctccagggcgtgaagcggcccagctcataggcataagcaaccacggggacaaagggccgctcataacatcgagctcgactattgctcgacggtgcgtcaacccaccgatgca

SEQ ID NO: 15676 - DNA, 242 bp, Zea mays
  Coding DNA Sequence Number=SeqID_1273
tattcatggtaatcgtgatcacgtcgtggtctctctaattgatggcatcaagattatcacgtccgttatgatacataccactgagccgagtggacagcactcatagccaaggcatgtacctgcatctgtgatgcatggtcacaccatgccggtccggatgagagctctgtcctacatctctacctcgctgtaccatgtcatatggctcggcactgtcatctcagatcctgcctgggcatggg

SEQ ID NO: 15677 - DNA, 244 bp, Zea mays
  Coding DNA Sequence Number=SeqID_1274
gaagacgataatgacgccaatgccttaagacggctttcattaggtgatgtaaaaaatgctagccaaggtgatgcgcaatccaaaagggaacttgttcagtgtagagtagctgttgtattgatgttacaaaaggggaaagttgaagtgcagcttttgcaagctatgtatagctcgcagctcctttcctttactgaaagttgcatctgtagccgtccaaacagccggctttaatccgcagcgagcc

SEQ ID NO: 15678 - DNA, 329 bp, Zea mays
  Coding DNA Sequence Number=SeqID_1275
tgcagcagttcatgctggcgcacacccggccccaggagatcgcgctgatgctgcgcgcgggcaacctgcccaacccggccgaccagtcccatcttcagctgacgacgatcatcccggcgttcgtgctctcggaactgcgctcggcgatgatcatcggcttcgtcatcttcatcccgttcgtgatcatcgacctggtcgtgtcgtcgtcactcatgtcgctcggcatgatgatgcttccgccggtgtcggtgtcgctgcccttcaagctgctgctgttcgtcctggtggacggctggggcctcatcgtcacctcgctcgtgcagagctat

SEQ ID NO: 15679 - DNA, 344 bp, Zea mays
  Coding DNA Sequence Number=SeqID_1276
cagcagggcctcaaggtttgcaccgcggagaacacgcaaggcccggggcaaaagccgccgcagggcaacgcggcacagaaccggatgagcaagcagaacaccgccagcaacaccgactggagcacgcaaccggccagcagcaagagaagcccacagcacagccccggcgcgggagacgccagggcgaacgcccccacccagcaccggaccgaagaagcgcagagccacgccgagcagaccgaaacccaccgggccaacaagaagccgaagaaaagcagcggcaagaggccccagcgcccagtcgcccacatcggcaaagacagagacaccaaccacgaagcgag

SEQ ID NO: 15680 - DNA, 298 bp, Zea mays
  Coding DNA Sequence Number=SeqID_1277
acgggcggcagaggcacctactactactcgtcatcaccggggcggccccgcggcgccggcaacggcaagaggccgtgacggcggtggcgcgccaagtgcgccggcatcgcacgggccgtcgggtccaggctccaaaggtctgtcgtccggaccgtcgacggtggccgccggcgcactacgccgccttcgtcctcatccgctcaccgcgggtggtgccaccaccaccatcaccgcggccgccagagcttcgcggccgtctacgtcgacgacctctacagccacagcctacagccggcag

SEQ ID NO: 15681 - DNA, 189 bp, Zea mays
  Coding DNA Sequence Number=SeqID_1278
ctgaagttgacttggaagcaagaaagatgcatgtggaagatgttgctgaacttgtcgagctcattccactgagaggaggattggtggggctgccaggagtgaatggtttgtctaccgaacaaaggaaaaggctccctatagcagttgaggttgttgcccacccatcccttataattatggacgaaccca

SEQ ID NO: 15682 - DNA, 218 bp, Zea mays
  Coding DNA Sequence Number=SeqID_1279
aagcctcgtgatggtatgtgtgcatttctcatttaaaaccatttcaattgtgattacgattcatttgataaccttattagttcgtgaacttaggggattacgtgattcgtcagaaaaaagaatgatagctacttttttctctataacaggatttttagtctctcgttacggcctcacacgttcctgggcaagcagaagcatggttagctcctacttat

SEQ ID NO: 15683 - DNA, 253 bp, Zea mays
  Coding DNA Sequence Number=SeqID_1280
tcgttcaggcgaggctttctccatctctccagtcctccaggttcctacgcgcgccattgcagtcagtggagggagtagcagtgaggactcctttctgtaacccgcatgcctttctggactcgctcttcgacctgccgtcaagcacgatggagcagatcgataccgggaaggtcgatcagtacctgcagcagctccccttgatggctgtcatagtatccgccaccgctcggcggcttgcgctgttcagcaccag

SEQ ID NO: 15684 - DNA, 182 bp, Zea mays
  Coding DNA Sequence Number=SeqID_1281
aaagaaggctctgatgtcctgaatttcgggttcgaacctctgggactgggcaaggaactggggtacctccagtggaactgatagaaggaactgatcatcggtcgtttcatgatgcagacagtgatgggcctcttcgtaggccacgcgaaagttggcattccgtagcactaggacgggcagga

SEQ ID NO: 15685 - DNA, 230 bp, Zea mays
  Coding DNA Sequence Number=SeqID_1282
tgcaggcattccaggagcaagggatacctaccaccccacaaatcctcgggcaggcaggcccaccgtgcaccacagtaccacacttgcagttgcagcatccccacagaattatgctagtgctttagggctgcagtaggatgattctctcttgttcctgattcaggttcagcattgttcaattttgggttatatacagggcttggattgaacgaagaggttcggcccaacat

SEQ ID NO: 15686 - DNA, 466 bp, Zea mays
  Coding DNA Sequence Number=SeqID_1283
gtgtgactgccgcagtgccactgccgcctgcctgcctgcctccatttttcccttttttcggtgggattttgccgggggatgtgtggatggcgttgggggctgccgcctgccactgtgcgacacgcaggcgcggccccgcgcgcagagaggtggatccaaggcggctgcggctccagactcgactcgactcggggacccggatctctagctctctgcctcgcgatcgcgattcaaggttaaaaaggggtgtgggtccagggttgcgcgacggacggctgctcttggtcgaggaagatatgggaacgggcccaccggccactgcatcaacggagcaaaggtgcaaggagccaaggacgagtcgtgttgctttcgcctgcctgcggatgctgatgcctctgctcggccctgctgaattctggaacaatctgcttagatctcaccgtgttcttgagcgtatccaggcaca

SEQ ID NO: 15687 - DNA, 196 bp, Zea mays
  Coding DNA Sequence Number=SeqID_1284
gcgcgctgcggtacttcgtcgaggtggttcgccagcagagtttcacggcagcggccgaccggctgttcgtcacgcagccgaccatcagcaagatggtgaaggcgctcgaggacgagatcggctcgccgctgctgctgcgcgacggccggcagatggtgctgaccgacgccgggcggatcgtgttccagcgcggcca

SEQ ID NO: 15688 - DNA, 176 bp, Zea mays
  Coding DNA Sequence Number=SeqID_1285
tatatcggtagtgggatcccgcgattcctaaaacagctcatgttatctgcccccgttggccaccatcgtacagcattttggcatcctgtggcgaaccagcgtggagcgcttggcgcagctctctcaagggcaggcggtgaagcgcattcacctgttgcccgtctcagtggagaaaa

SEQ ID NO: 15689 - DNA, 566 bp, Zea mays
  Coding DNA Sequence Number=SeqID_1286
tgccccatgaagctaggccattattattagatgaacatgcaaaacctggatggccagattggctcataaatgtggcaccagaggcagtgcgaggttggtttcctcggcgccaagattcatttgagaaattagacaaggttggacaaggaacttatagcagtgtctacaaagcccgagatcttaaaactgacaagtttgtcgcactaaaaaaggtgcgttttgtcaatgtggaccctgagagcgtgcgctttatggctagagagattcttattctacggaaactcaatcatccaaacatcatcaagttggaagggatcataacatcttctgtttcacgaagcctgtatcttgtatttgagtacatggaacatgatcttgttggtcttgctgcgactcctggccttaagtttactgagccacaggtcaaatgtttatttcagcagttacttagtggcctcgatcattgccatagcaatggagtggtgcatcgggacttaaagtgttccaacctcttgattgataacaatggtgttctgaagattgcggactttggtctagcaacaaca

SEQ ID NO: 15690 - DNA, 217 bp, Zea mays
  Coding DNA Sequence Number=SeqID_1287
atatctcacctagtctcctggtttaagaaggagaagttagtgcttaaccccaccgtcacgaatagtcctacaagttgggccgggccgtccagcacggccctaaagcacggcaggcttgcattgagcgtgctggcccatacccggcccgtaacactgtcgctgttcacggcgggcgagggcgagcccgtggccgtcaagtcggccgacgtcgcgactg

SEQ ID NO: 15691 - DNA, 566 bp, Zea mays
  Coding DNA Sequence Number=SeqID_1288
tgcagagcgcccacgggctgtacctcaacggcatcatgctgatcagctcggtcctggacctcgacaccgtggacttcgagtaccgcaacgaccgcgcgtacgtcgactacctgccgacgtatgccgcgacggcgcaccaccacggcaagcacggacgcaaggccctgcgcaccgtgctcgccgaggccgaggagtatgccgcgcgcgactacccgtgggcgctcgcccgcggctcccggctcaccgccgccgagcgcgcggagcacgtgcggcggatctcggagctgaccggcctgtcgccggagtacgtcgaccgggccgacctgcgcatcgagcacgtccacttcctcaccgagctgctccgcgaccggggcctggccgtcggccgcctcgacacgcggttcagcggccccctgcaccagggcaacgccgccacctgggacgccgacccctcgatggacgcgatcctcgggccgtactcggcagcgctcaaccactacctgcgccaggagctcggctaccggcaggacctcgcctacaccgccagctcgtcacgggcgtacaag

SEQ ID NO: 15692 - DNA, 289 bp, Zea mays
  Coding DNA Sequence Number=SeqID_1289
taatgactgtcaagcttttgtgaaagatttatacaatcgattatttttcatgtgctctgtggttcctgtctttctaggtatttggaggtgaatatgcaagctggcttcctgctggtcgggccctcctggttgcgggaaaacactaatagcaaaagcagtggcacatgagggcaggagccaattttattcatataaaggggcctgaggtattgaaccaatatggtggggaagaaggaatccgaaaggtaagaaaaaaatccattggggaaggtatacttccccaggccat

SEQ ID NO: 15693 - DNA, 441 bp, Zea mays
  Coding DNA Sequence Number=SeqID_1290
aatactgggccgttgcaaagcgcaatgcagctaaccttattcgtgttgtatttttttctccagtcccaggtaacttggtccctggatgtgtttattggggggagaatctgccggtttgaaatgtcatcatcccatgtttgttactgaaaatagaaaacaagcttccaatcgccctggaggatggtaagttatgcgggtcctatgttgtggacctgtgatttgcttattccactgttgcacagatgccgaacccatgcctaaaggatcaactgtccttgcactagtgagtcagatatgatcggacagatgcagctgcttataattggaaccctgcggcagtccaggaagttatgaactagcagtgggcggacagttttggataggatcgtcgtttccctaaacacgcaacctcttttttattgttgaggtctcgccgcggcc

SEQ ID NO: 15694 - DNA, 386 bp, Zea mays
  Coding DNA Sequence Number=SeqID_1291
tgcggagctatgatgggccacagaccacattcattctgcacgtggaccgagccaaccatgaggacatgcagggaggttacagcaccgcggacagagaggtggacctcagggactacattgtgcatggggacctgggcgtactgaggaacaccaacccccgcaacctgagccagggcaaggagatcaacgcccggaaccagatagcggcacccatacggctgcggaggacggccctcacaccaaagcacgatcgagcgaagaccccacacactgaagaaggaccggcgcatactggggctgacccaaggccagacaagggcaccaggctgggaggtcgctcgggcagcacaaccacacaggcacaggacaaggagccgggtccgcca

SEQ ID NO: 15695 - DNA, 269 bp, Zea mays
  Coding DNA Sequence Number=SeqID_1292
tctcagggccgctgacggctcgcagcgcgcggtgacctcgcgatacggcgcgcacggggtcggggtccttcgccgccaggaccggatgaccatgctggcgctggaccagcgcggctcgctgcgcacgatgcttgcccgcgaccggccggtaccgcaggtacccgatgcagagctgatctcattcaaggcgcaggcggtcgccgcgctggcgtccgatgcctcggcggtcctgctcgactcgacctatggtcgcgctgcgatggcagccc

SEQ ID NO: 15696 - DNA, 157 bp, Zea mays
  Coding DNA Sequence Number=SeqID_1293
gtatttacttcttatattccctgcgaggttttttatcctgaatacgcagcactaattcttgggcgtctgttataccaggatatttctccttctttacagatccagaaaattataaaacatagacagttaccactagttaaggctccgctattaaaat

SEQ ID NO: 15697 - DNA, 489 bp, Zea mays
  Coding DNA Sequence Number=SeqID_1294
gcagattttgttgggaacgacgcagaatcaaaatttcatttaccctaggagttcaggttggaaggaccttgaaatatttgcaagcccctatttttggctattgtctcagaaaggttgaaactgtcgactatacatgaaggctgagacaagctggcatggttgtagactatgttaaagattgatgagtgatgactgatgaggaaccaaacaaatgggcatataaagagcattttgtgctggaggcgatcttgctgcacttgtcattttgacaagcctgaaaggaagcaacccgcacaaaggctggcaacgaactgcactcagtgagctccctcaagtaatcaagcactgtcaccaacacaaccttctctcttgcagttatcaaagatggaagtgacgagtgttttagtagagaacggggtgaaccatgacatgtttaagttgggtctcagtaactttgcaactaactatgctgcctccaacagaaaggaa

SEQ ID NO: 15698 - DNA, 382 bp, Zea mays
  Coding DNA Sequence Number=SeqID_1295
tttgcattggccgtcgtgtgtcccacagcacgccgagctggaccgcgtgtagctagtcgatcgccgtctgaactctcaggagaccccttgttttgctagctaatagcatctcggtttccctctcttccatttgatttttttcttatttatttatgcttctatttcatctacctatcggtcagtggcggacccaggaattactgacagcctaggcgaaattattaagcagcatgcagcagcagtgcaaaagcctgagctgacagagaaatggactgtaattttttagacttcttacatgcactctcgtggcgtggcaggctggcagcccaggcgacggcctgtactgcctgggcactcggtccgccactgctatcggtggcat

SEQ ID NO: 15699 - DNA, 328 bp, Zea mays
  Coding DNA Sequence Number=SeqID_1296
atgcctgcagagtccgtaacgctgggcgtgcagattgcgctcggacgacttcggcaccggcttctagaagctcagctatctgcgttcgttcccgttcgataagatcaaactcgacaagtcatttatcaatgttatgggcgacagccgtgaggcgctggcgatcatccgtgcgattaccggcatgagccgcagcctggatattcagatcaccgctgagggcgtggagagtaatgagcagtttgtccgcctgcgcgaagagggctggacgctgttccagggctacctgtttggccggccacaggcgtcggagctcacactgaaggcgctg

SEQ ID NO: 15700 - DNA, 419 bp, Zea mays
  Coding DNA Sequence Number=SeqID_1297
tcccgctggcggacaagttcggaaaagcggcgctgcgcggcatcggcggcacgcgcaactgtgactggtggttcaccaacgaagcggtgctgctggataccgccggtcgctataccacccaggagagtcagcaggagcgcgacgccagcgagtggcatcattttctcgacctgctgcgtaaatatcgcggtcgtcagcccgtcaatggcgtgattgtcacgctcagcgtctccgatttactgacgcaatcgccggaagctcagcgcaatcaggcgatcgcactgcgtcagcggctgatggagctgcatgatcgccttggcattcgcttcccggtttatgtgctggtcaccaaaaccgacctgctcaaaggtttccgcagctatttcgctgcgctggataaaacccagcgcgagcaaatc

SEQ ID NO: 15701 - DNA, 414 bp, Zea mays
  Coding DNA Sequence Number=SeqID_1298
ttcgtaactgcctacacgctcacgactcgcctggtcgcttccggttgaagggccaggccgcaatggacgaacaggtcggcgccgccgggcggcagcaggttgggctgtccttagcacagatagaagagtttgcttttgtgcttttgagtcgtgcctcccatctccatcttgttggggggaaaatgtatctactattagtgggaacaattgcccttagcttggtaacaactcctctcattttcaaactaattcctgtggtaatgcaccttggcatccttatgtgttggttcccctcgaaaaacagtatgcagagtgaggtatcctttactaccctatttgctgtttttttattaaaaaaacttgacatatggacattgttggctggagcggtaaaggcgtaacgcctctgttcaa

SEQ ID NO: 15702 - DNA, 313 bp, Zea mays
  Coding DNA Sequence Number=SeqID_1299
aaacttaagggcaatccagattatgaacgatgctatagatggaccatgggaaaagggggaggggggattcagcccctaattggttactgacaaggatctatttttttcctctacactttaaactaacaatagggcctgaaaacaaggaaactactggtaagggggcatggaccacctgggttttccatggagctacatttttaaaaagcatgacatgtaaagcatccactcaatgaactcatttgacccttcttgctgaggtttggcccccttttgaaagttctggaaaaagctgaacctgaattgcgggtga

SEQ ID NO: 15703 - DNA, 482 bp, Zea mays
  Coding DNA Sequence Number=SeqID_1300
atgcctgcaggtttttgcccttgcgaggcaataaattccatggacttcatgatactagcaatttaatgattgcctctataatttttttgctccattttcaggtagatctggagcataatcaatataggtcatttcagggcttgacctgcttgatgcagatttcaacaagaacagaagactttattgtggacactcttaagctacgcatatacattggtctctatttgcaagagcctttcaaagatccaacaaagagaaaggtaatgcatggtgcaggtcgtgatataatatggcttcaacgagacttcagcatatatgtgtgcaacctttttgacacaggccaggcttcaaaggtcttacagatggaccgcaacagcttggaacatcttttgcaccatttctgtggagtgtctgcaaataaagagtatgtgattctgtttacctccttaactcttccagtttacaggttccatgtcatggga

SEQ ID NO: 15704 - DNA, 347 bp, Zea mays
  Coding DNA Sequence Number=SeqID_1301
gcggcagcggccagtatttgattcacggcaccaatgccgacttcggcattgggatgcgcgtcagctccggctgtattcgtttgcgcccggacgatatcgaagcgctgttcaacagcgtgccgcagggtacgcgcgtacaggtgattaaccagccgatcaaatttgccatcgagcccgacggcaaacgctacatcgaggtacaccagccgctgtcgcgtaatgaacaggacgatccgcagaccatgccaattgcgctgagcgcgccgctgaaagcctttataaagagtgcgaagagcgacagtgtgctgattaaggcggcgattgaacgtcgttcaggcatgccggtg

SEQ ID NO: 15705 - DNA, 157 bp, Zea mays
  Coding DNA Sequence Number=SeqID_1302
acgcgtgggcgcaaagtacgcctacctgtacacgatgcttaacaagcagagctgcacagggcagaatggcatgtggcattacagatggcaaatcgcacggacgagtcaaaatatgatgctctcccgcgaccctgacggtttgtgacttctaaaataa

SEQ ID NO: 15706 - DNA, 582 bp, Zea mays
  Coding DNA Sequence Number=SeqID_1303
agcctgcatctgtcagggctggccgcctcgctgctaccggcggtgccgatggtgatgatgggcgcggtggcgctgttcagcgccaggctgatgcagcgcgaggccttaaagcccttactgctggccgggttgacgctattgctgctggcactggcggcgcgcggcgtgatcgacagcggcagcgggctggtgctcagcgcgctgtttgccggcatcggcgtcggcgtggtgcagatggcgatgccgggactgattcgacagcgttttagccggcgcagcgcggcggtcaccgggctgtgggcaggcgcactgatgggcggcggcggactgggcgcggcgctgtcgccgtggctcagcgcgcagcttggcgtaccgctggcgctcagcggctgggcgctgccggtgctgctggctatcctgctgtggctacgggtgcgcgtgcctgccgcgccggatgccgcgcaggtaacgctgccgccgctgtggcgtaagccgcgcgcctggtcgctggcgctgagctttggcctggtcaacggcggctatgccacctgcgtggcctggctgccggatgcgtatcaccgg

SEQ ID NO: 15707 - DNA, 274 bp, Zea mays
  Coding DNA Sequence Number=SeqID_1304
tgacgacatgaagaagacaccctaagctctgtccgggggggagagggggctcctgctgtctggctagctgatgatgcacaagccaaacatactggtgatggactaaccgacttaccacctgcatatggagcggaactgatgactgaacatggcgctggagattacgaaggcacgctgattttcctctcgcacgacccgtgagatcgtcagtgtcgctggcgacgcacgtcatcgagatgaaaggcgatcgcatcgttgacttcaccggcaacta

SEQ ID NO: 15708 - DNA, 504 bp, Zea mays
  Coding DNA Sequence Number=SeqID_1305
acaagatctccaagcagtcgtcttccgcctctcccgctcccgttcccgcctccaccatgcgagcgccttccccgccgccgccggctccccgcccacctcctcctctcccgcagccgccgcaggcctcctccgtccctgccgaccacccgcctccccagcccccggtgtacaacatcgacaagtcggacttccgcgacgtcgtccagaagctcacaggctcgccgtcccacctcctgccgccgcagccagcgcccattcccgcccgcgcccccctcatggcgccgcctcctcctccgccgccgctaccgccgatggcgataccctccgcctccaccgcatccggccaccgccacgcacgggagagggagggacgccgcctctacgcgcgctggagagggatggggcgtcgtcgccgtcacgcgtggtggagagattggggcgccgccgtgtgcgggcagggaaggggcggtcttggtgagaggtgtggagcggaggagtttgttg

SEQ ID NO: 15709 - DNA, 204 bp, Zea mays
  Coding DNA Sequence Number=SeqID_1306
ctggctttattgcagacgcactatgtattgctcctttgctcattcaaggagcagttgcagcagcatgtacgtgttcatgcaatggaagcagtgatgggttgctgggagcttgaacaatctttacaaagcctaacaggtggatcacctgaactgaaattgtgagagcagctaatagaacagtgcgatggaaatcgtcaatgtcag

SEQ ID NO: 15710 - DNA, 191 bp, Zea mays
  Coding DNA Sequence Number=SeqID_1307
ctgccgggaggaagagtcgatcactaagggcttggacgttcttattttgacaaactgcaggggctacaggactaatgcatttaatcttctggcggggatatgggcaggaatcaacggatactttatcacgggcccatgaacggacccctttggctaatctaatttggaggacagataagcccgaggctctt

SEQ ID NO: 15711 - DNA, 175 bp, Zea mays
  Coding DNA Sequence Number=SeqID_1308
tcatcgccctcaccggaggcatcgcctcgggcaagtcgaccatcgccgcgcgtctggccgagcacggtgccgtgatcgtcgacgcggatcagatcgtgcgcgacgtgcaggggccgggatcgccggtgctggcggcgatcgccgcggagttcggccaggatgtcatccgcaccga

SEQ ID NO: 15712 - DNA, 469 bp, Zea mays
  Coding DNA Sequence Number=SeqID_1309
atgctgatcatctggcgggcggccgacgaccctggttaccgggccgagcagatcacccgcttcatggcactcgcccggcagaccggccgaatcgccctcctggaggcgatcacccgaccggctgcgggtgaccggttccccaccgccgccgcgcacggcgcggccgtgatcgcggccgcgcgggaactgaccgcctaccagccggacgtatacaaggccgaggttccggcctacctgcccggtcagctcgagctggtggaggcatactcccgccgcctctccgagcagattgcccagccctgggtcgtcctgtccaacggggtgcgagcagaggacttcgcggacggcgtgcgccgcgcggtaaccggtggcgccagcggattcctggccggccgggccatctgggaggacgccgcccgcagcggcaacccggccgaggcgctgaggtcgatatcggtgccgcggctgc

SEQ ID NO: 15713 - DNA, 452 bp, Zea mays
  Coding DNA Sequence Number=SeqID_1310
gtggatcgcttcgatatccgcatcaccggcaccggcagccatgctgccaaaccgcatcagggcaacgatccgatcgttatcgcggcacagattgtctccgcggcgcaaacgctgattagccgtaacgccccctccgctgacaacgcggtggtgtcgatcacccagctgcacagcggcagcacctggaacgtcattccggacagcgcctggctggaaggcacggtgcgcaccttctctcagtccacgcgtgagcgactggagcagcgcttccgcgaaatcgtgctcggcctcggtgcggcttttgccgcagaggttgagtttaactggcacgccggtccgcctgcggtggtgaatgatgcgcactgggcggattttgctctgcaacaggccaccgccagcggacttgaggcgcgcgtggtggaagccagcccgatcggcgaagattttgcttt

SEQ ID NO: 15714 - DNA, 237 bp, Zea mays
  misc_feature (167)..(167): n is a, c, g, or t
  Coding DNA Sequence Number=SeqID_1311
tgtgccgtctgcgtcctcaaaggtctatctttcaaccgcgttttttctttccggtggaccagacacccccaaaaacacaccccccctttctttacaaaaaaccaaccttaccggaccaacacaaccccgggaccaatttttttaacggggcactcttggatgggatnctgggaacggatactaaacccctttttccccgccgcgaaacatcatccaattggcccattgggccttttt

SEQ ID NO: 15715 - DNA, 325 bp, Zea mays
  Coding DNA Sequence Number=SeqID_1312
tataaaacactctatacgcgccgcgaaacacgattacgcaccagacagaatcatagacactattggtagcacgactagcgccacgaaaagcaactaccaatgtaggagtgaaaaccagacgtgctccaaacggatcaacacgcgcagctcctgctggaatacgacctaaacctggaagagaactagccatccgctggctataagaagcatgccaaaatcgttcgcgtcctagcacggctacaaaattaagccccgaatcaggagacgctgccaaagggaggggggagcgccttgccgcgcaacggaagcggctcataaacatggc

SEQ ID NO: 15716 - DNA, 326 bp, Zea mays
  Coding DNA Sequence Number=SeqID_1313
gctgctggaaatcttcccgccggcgctgctcggccgcctggtgacaatcccctactacccgctcagcgacgccatgctcaaggccatcacccgcctgcaactggagcgcatccgcaagcgcgtggaaggcacgcacaaggtcggcttcgcctacgacgaaggggtggtggaactgatcgtttcgcgctgtaccgaaacagaaagcggtggccgcatgatcgacgccatcctcaccaacggcctgctgccggacatgagccgcgagttccttacccgcatgctcgaaggcaagccgctggccagcgtgcgcatcagccgccgcgaaa

SEQ ID NO: 15717 - DNA, 418 bp, Zea mays
  Coding DNA Sequence Number=SeqID_1314
cgaaccggcggatttctggagcacgccggcgattgccggttacggtaaaattcactttgttaacacgccggattacaacccggccaacacgcccgggctgagcaataagattgtgtttcagatcaaccgcagcgaaggggatatccatcagccgaacctcggccttgagcgcgtggcacgcgtcaccaacctctattacgcggctggcgtaccgctgaatcagctcaactttgtggtgtcaatcaacagcgatgcggtgccggcagcgctcaataacgatcaattccgtaaagcgtacggcagcgataaccctaacctgaagctgattgatgagctgaagaaagccggggtgaaagtgaccatttgcgaccagtcggtggccttccatcagctggagcgcgactggattgacacccgc

SEQ ID NO: 15718 - DNA, 121 bp, Zea mays
  Coding DNA Sequence Number=SeqID_1315
ctggtaccccagtgcgagggcttgataattgggctcatgaccattaagcgttccagggcctgcttttcactgacacggcgaacgtcgcaggcgcgcacacgatcggcgtggcccactgcaa

SEQ ID NO: 15719 - DNA, 347 bp, Zea mays
  Coding DNA Sequence Number=SeqID_1316
acaacctcatctccatcaacatgagcgagtgtcaggaagcccacactgtttccacccttaaaggcgcaccgccgggctacgtgggctatggcgaagcggcgtgctgactgaaacggtgcggcgtcgtccctacagcgtggtgctgctggatcagattgagaaggcgcacccggatgtgctcgagctgttcctccaggtgttcgataaaggctggatggaggatggccaagggctccacatagacttccgtaacaccatcattatcctgacctccaacgtcggtacgcagctgagcagtccgatgtgcgccgatccggagatgatgccggatccggaagcgctgagca

SEQ ID NO: 15720 - DNA, 388 bp, Zea mays
  Coding DNA Sequence Number=SeqID_1317
gagttgagccgttttttcgagagctcggctcgttgcatgagcgagccgcagcgagccggaccgtttccatccctagtggcaaccccagcggccagggctcttaggaggctaaggacagcctgcgagagggcgaagaggaccctctcctacgtcttcgaaaccacgattcagatcgactgtttgtgcgaggacattgacatctacgcaaccatcactcgtggcaagttcgaggatctcaacatggaggataaaatggacgtgtggtcagttcactatgtcatccttgttgttggatcctctaggatcccaagggtccagcagcttctccaggagcgcttcaatgggaaggagcaatgcaagagcatcgaccctgattaggcaactgtcc

SEQ ID NO: 15721 - DNA, 440 bp, Zea mays
  Coding DNA Sequence Number=SeqID_1318
aatgctgctggatcatgatggcgcggcgcaggggagcgatccgctggacccggatcgcaaatttggcaccgtgggcgcggtggcgctcgatttgcagggtaatctggcggccgccacctccaccggcggcatgaccaacaagcaggcgggccgcgtcggcgattcaccgctggcgggcgccggctgctatgccaacaacgccaccgtggcggtctcctgtaccggtaccggcgaagtgtttattcgtacgctggcggcttacgatgtctcagcgcagatggaatatggcggtcgttcgctgcaacaggccaccgccagtgtaattcatgacaaagtgcaggagctggagggcagcggcgggctgattgccgttgatgcccacggcaacgtggcgctgccgtttaacagcgaaggcatgtaccgcggattcgcttatgtgg

SEQ ID NO: 15722 - DNA, 504 bp, Zea mays
  Coding DNA Sequence Number=SeqID_1319
atagatactatgacgcgcatgccgcggtcgtagcttccgggatttcggctcggagctcatggttagaactgcctttaccgtcactgggtctattcaggggtggtatcatcgccggaacatgccacagcgcttaaatgaataggaccatcattgctcgcagggattatcttcacttcggcaagaaggaccagaggtatgagaagagccactccaccatccctgcgcacattgcaccatgcttccgtgtcaaggaaggagatcatgtgatcattggccagtgcaggccagcgtcgaactactgtaaggttcaatgttgtcgatgttattcctgcaggttcgaagagtggaccactcgaagaacgctttcactgccgcttaggatcatgaccagtccatcatccatggcccgcaccagctgtgcgttataacgttctgatgctgcctattagccttttcccccgtgactactatatgctgtactcggaattgcactggatctacatc

SEQ ID NO: 15723 - DNA, 319 bp, Zea mays
  Coding DNA Sequence Number=SeqID_1320
cagacccgtggactatcatcatataaagcacaatggcgtaccaacaaaccccgtcaaatgattgcaggctgcgtatgcctcctgggcttactaggtgaaccactccctccaccataaactccgactgttcaacagctcctatagtttctcttccttaccccatagcctgtcaccagcgttgaaccaagcctgggaaaacccagttcttcatccctacacgatccaacatgcggtgacggatggcatcttatctttatcaccactgataataccacaatcatgacgcctattacatgaatttcctttggtgcatggacag

SEQ ID NO: 15724 - DNA, 311 bp, Zea mays
  Coding DNA Sequence Number=SeqID_1321
atggcggctgacacacagctgaactcgttcggtgtgtccctgacacaccagctggcagagcgggggacgtgttctcgtgtgatgggtggcgcgccgatccgtcacgacgatgtccagatggccgatggcgccccagacgatttcgccttcgggagcggcggcggcagcggcaacgctgggtcgcctagctggtcttgtgaaggcgtgggagggggagtggatacacgaggatccacgaccacgaggagtgcgcctcggacgatcatgagctggagctcacccttgcttgggacctcaagactcgtgcagca

SEQ ID NO: 15725 - DNA, 508 bp, Zea mays
  Coding DNA Sequence Number=SeqID_1322
gccatcgccgacaattactacgcgaccaacccgtcgggagcgatccgcgcctacgacgtgcgcaccggcgcgatcgtgtggaagttcgacgccggcaagcccgacgacaccgcgccgctcaaaccgggcgagctctacgagccgaactcggcggtggcctggacccagctctcggccgacgagggtttgggccaggtctacgtgccgttcggcaaccgctcgcccgaccaggtcggcgtgtcccggtccaagacggacgaggccttcatcgacgccctggcggccctcgacctcaagaccggccggctgatctggaagttccagaccgcgtatcatgacctgtgggaccgagataacccgtcccagccggtgctgctgaccctgccgcacaagggtgaagcggtgccggcgatcctgatcccgaccaagatcggcaacatctgggtcctggatcgccgcacgggcgagccgatcgtgccggtggagcagatgaaggtctccacccaga

SEQ ID NO: 15726 - DNA, 379 bp, Zea mays
  Coding DNA Sequence Number=SeqID_1323
ggcaggtcgatgaacgtatctactcaggttgcagaacaacgtaaagtgttggaacaggctgtcgcgcaggcgctggaactggcgcaagccagcaccgacggagcagaagtggcggtcaccaaaaccaccggaatcggtgtcagtacccgctacggcgaagtggaaaacgtcgaattcaacagcgatggcgcgcttggcatcaccgtctatcaccaaaaccgcaaaggcagtgcttcctcgaccgatctcagcccggacgcgattaagcgcaccgtgcaggcggcgatcgatatcgcgcgcgtatacctcgcccgatccctgtgctgcgccggccgagcgcgatctgctggcgtttgaggcgccggatcttgatctctat

SEQ ID NO: 15727 - DNA, 273 bp, Zea mays
  Coding DNA Sequence Number=SeqID_1324
agcagcccgatttcgctttgccgttcggcccgcagccggcgcgttttatctggctgatgctggcgataggttagttctgctcatggctggcggcgctgtgctggaatgccagcagtcagcgtttgccaacggtagtgatggggccgctcatcgtattcgaaacgctctctggcctgctgtggacctttatttaccgccagagctggccaccgctgctcaccagcatcggtatcggctgtctgattgttggcgtgatctatgccatgcgcatta

SEQ ID NO: 15728 - DNA, 522 bp, Zea mays
  Coding DNA Sequence Number=SeqID_1325
ccacacggcactgagtacgagggtggaggacaggagaaggtttggtttccctcgtagccaccttgccaaggccgcagagagtgggggaggtttccctcgtcaccacctcgccgaggctgcggggctgctggtcaggtcctgactgctctgcctacacggaggcctaggtacttcattttcgccatcctcgattactataagcttgatggggaaatttggggtattgaggtattccgacttctgaaattgcatcacaagagtcaagggatcaactgaaaaacatcctaagccaagtgctctatgttgcctgacacaacgagagatggatgtgttgttcatggcaagtgtagcgacatgggtgatgagctccctcctcgccaagctcgctgagctgctcagggaggactacaagatgtagaaggcatgaggtgtgaggtcgtgttcctcaaggacgagatgagcagcatgaacgcgctgctggagaggctagccagctcggatgcgcttgatccgcagaccaag

SEQ ID NO: 15729 - DNA, 344 bp, Zea mays
  Coding DNA Sequence Number=SeqID_1326
atgcgcggcgtgacgctctcatggctgctggcagcgctgctggcgctgccgctaacgggccaggccgccagcggcgcgtggcaggccagcgccagcggcccgagccttggcgtgcgcggcaactggctgctgtcgccggcgcttaaagcgccctcggcggctccagggactatttcggtggtgaactggcgctacacgctgagccgacctgcgccatccggtctggtggtgcggctgtgcgccagtcagcgctgcgtggagctggacggcgcaagcggcagcacgcgcggcctcgccaacgtggcagccgatgaaacgctgcatctggctttcggatttcaggg

SEQ ID NO: 15730 - DNA, 384 bp, Zea mays
  Coding DNA Sequence Number=SeqID_1327
gatcaacgggtcgaacaggtccactacgaagccatcgtgatcggacacgccgatggcccgggtccagtcgctggcgctggctgcatcgtcttccacctgcaccggtgcatccagatccgcgcggccgtattgcatgcgcaggaaacgcagccgcgccggcaggttgagcaaggcgtgatccaggacctggaaggtgggtacggtgcggcccggattgccgctgccggccttggtgtaaccctggatcggaccgaagttctcggtgtacaggaacgagtagcgatcgttcgcgggcaccgaatccaccgcgtcccacagtgccggcttgacgatgttgccgccgagtttgagcaggttctggtcatcgtcgtagcgaccggcgac

SEQ ID NO: 15731 - DNA, 463 bp, Zea mays
  Coding DNA Sequence Number=SeqID_1328
gaaccgcgcggcgtcagttatctggcgctgctcggcgtcgcgctgcctgccaccatgctggccattttctgtgccgccgtgatcaccaacttcctcggcaaagagctcaaagaagatgacgtctatcaggcgcgcctggcgaaaggtgaagtgacactgcgcggtgagcaggtttatcacatcaagccgggtgccagacgcgcggtgctgctgttcctgatcggtattgcggcggtggtgctgtacgcgacggcaatcagcgacagcgtgggcctgatcagcaatccggtgctgccgcgtaacgaagccattgtggtgtttatgctgacggttgctacgctgatttgcctgacctgcaaagtggaaaccggtgaaatcctcagtgccagcacgtttaaatccggcatgagcgcctgtatctgcgtaatgggcgtcgcctggctgggcgatacctttgtcaagg

SEQ ID NO: 15732 - DNA, 209 bp, Zea mays
  Coding DNA Sequence Number=SeqID_1329
tggtggtggatttatttgctggaattggatactttgttcttccgtttcttgtgaaggctaatggcaagctattttatgcatgcgaatggaatccacatgctctggaggctctttggcgcaatgtattatacttgaaggagataaccgggtgactgcacccgaagtatgtgctggacaaatttcgcgaggggccacgctttcatcagatg

SEQ ID NO: 15733 - DNA, 221 bp, Zea mays
  Coding DNA Sequence Number=SeqID_1330
atgaaacctgcgcttcgtttagccggtgcattgctgttgtcctgtttcggactgtctgcacctgcgtttgctacggaataccccctgccagccgctgatagccgtttgattggcgaaaacaccctgaccaccgtcccggatgacaaacggccgctggagagcattgccgcgcgttataagataggcatgctcggcatgctggaagccaacccgggcgtcga

SEQ ID NO: 15734 - DNA, 294 bp, Zea mays
  Coding DNA Sequence Number=SeqID_1331
tccgagaacgccaagcgcgaagcgggaggagaccatgtcacggtggcgcgccgccgcctacagcatctccgcagctgccgcgtcccgcaactctgcggcggaggccggcgccctctccagggccttggcgaaggctccctcgccgccttcgcttcctctccaaaccctcacgagaaactttgccaagtccgctgccgccgccacggccacgtcgcccggccctggcgcttcctctccgcccgctgggccgaggcccgaggatctgatcaatgatttcaagtcgcctagtcgcct

SEQ ID NO: 15735 - DNA, 547 bp, Zea mays
  Coding DNA Sequence Number=SeqID_1332
tgcggaggtccgaattaacaatttcccggggcccggcgggttttacaaactgctggtgggcttggggaaaaatcccctggtggtgttcacccccaacttttatatccggcctttggggagaaacaattccgccccctttttgcccccaagctgggggggcgatataaaacgtggaaaaagggggcctcgcgccaaccccaaatttcccccctcttttccccacaaacaatttgtggggcccacccctcttggaaattggggccagatatgggcaccaattgttgcacacacgcggtcttacatctctttttggtttaaaaaaataatcgcggcgcaataaatgttttgtggaataaaaaccacgcttcttcttttttattatactacccattcgggcgccgaaatacgggggaataaatcccccttttattatactcccaagataaaactagccccccacaataatagggggtggagggtggtgtctcccccgcttggcggagcaaaataaggatcctcacttatataaaacgacatgggcgccatc

SEQ ID NO: 15736 - DNA, 229 bp, Zea mays
  Coding DNA Sequence Number=SeqID_1333
ggcgagtgggaggagcaccgcgtcgacggcacgtggagcacgcactcgctgtcgggcctgcgctgcggcacgctgtaccacgtgtacgtgacggcgtccaaccgcgtgggctcgggctcggccagcaagccgctggacctgcgcacgcgcggcggcgtgcccgccaaggcggccgccctggtccggcccaacgtcacctcgctgctgctgcgcctcgacgagtggcccg

SEQ ID NO: 15737 - DNA, 490 bp, Zea mays
  Coding DNA Sequence Number=SeqID_1334
atcgtactggtacatcgacacgcacgcgggcgcaggcgtgtattcgctgcgcgacggctacgcggccaaaacaggcgagttcgacaccggcatcggtccactgtggagcgacaagaacctgcccgaagcgctgggcgattacatcgacgaagtgcgcgcgctgaacgacgacggcgagctccgctactatccgggctccccgtatctcgcgtggcgatcgatgcgcgaacaggatcgtatgcgtctgttcgaaatgcacacgaccgaaatcgacgtgttgcgtcacaactttcgcgacgcggggcgccgcgcgatgatcttcgccggcgacggattcgaaggcatcaaggcactgctgccgccgccgccgcgacgcgcgctggtgctgatcgatccgtcgtacgaggacaagaaggactacgcccgtaccgtgacgtgcgtgacggaatgcctgaaacgtttcgcgaccggctgttatgcgatctggtat

SEQ ID NO: 15738 - DNA, 427 bp, Zea mays
  Coding DNA Sequence Number=SeqID_1335
ttattgtttctgacagcatgggcccgcgatcctgcaccgcgtggtcttgctgccgccggccttcgtccctcctccggcggcccacccgcgcagcttccggagcagcctcggccgcccgatgctccacccgccgccgcagtccctcccgcgcccgccggccgccgccgcgaaccccatgcacggtgccgacggcggcgccgtctccacgctgcggcgcggggccgacccggacccggacgacgacgacacggactcggccttgcatagctccacctggttgctcggcggcaccgacgccaccatcgtctcccccttcttcttcttctccttcttcttctcaccctcctcctccggcgccacgccgtctcgaacatcttcgtcgtcgccgccgtggccgccaccgtaggtggtgctgccaggaccgagc

SEQ ID NO: 15739 - DNA, 553 bp, Zea mays
  Coding DNA Sequence Number=SeqID_1336
ggctgatgccggacatggcgcatctgcccttcttcgcgctgggtggggcgctgggcttcgccgcctggcgggccgcgcgccaggcgcgcgaggccgccgccgaacccgcggccgcgaccgccgccaagggcggcaaggccgaagccaagccggacgcgctggcggatgtcaccggcgtcgatccgctgggcatgagcatcggctttgccctggcgcctttggtggcggctggcgaaggcaagctgctcggccgcctgaccgccgtgcgccagcgctatggccgcgccatgggatttttgatccccgcagtgcatatcagggattcctcggacctgccgccgaatgcctaccgcttcacattgcgcggggcagcgattggcggcggcgaggcctggcccaatcaatggctggcgattgaaggcaatctggtcatcgacaggctgaaaatcggccggcatgtgaaagaccccgccttcggccagccggcggtgtggattccgcaaaccgccatcgcccaggccgaggagcttggctacacggtggtggatgcctc

SEQ ID NO: 15740 - DNA, 505 bp, Zea mays
  Coding DNA Sequence Number=SeqID_1337
gtacccctgtgcagttgctacaagagattgaagaggaccggccggagacgcccacgtcggatgctggtgagatggacgacgccttgtacgataagctgaagcgtgcgctcatggaagccgagagcctcaagcacgaggcgtacgaagagactcgccggcgtcagatggccgagcgcgagctcgctgaagcgtccaggatggtcgtcgtgacgaaacttcaccacttccttcctgccgacgaagcagagagatcgaaccagagagaggcgaggcaccggaaggaggtggaggagatggtggcgagagagcgcgcggccattgagcaggacaggcgagagctcgacgacatcctggagaagatacggaaggtcgacgaccggagcgccgagctggagcttcagatcacgagctcggagcgcacgatgaacgacctcgaagccagactgtcggaatcgtacaacctcctccacacactccggcaaggagatccctggtcgactgcgac

SEQ ID NO: 15741 - DNA, 229 bp, Zea mays
  Coding DNA Sequence Number=SeqID_1338
gagcgaagccgcttttaattttcagacgctgaatcccgacgttatccttgatgcgctctgggatgcaggtctgcgggtcgagtccggcttaaccgccctgaacagctacgaaaaccgcgtgtatcagtttagcgatgaggataagcgacgctatgtcgctaagttctatcgtccgcaatgctggagcgccgcgcagatcgctgaagagcatcgctttgctcaggatctg

SEQ ID NO: 15742 - DNA, 302 bp, Zea mays
  Coding DNA Sequence Number=SeqID_1339
gatgacgatcgtatggaagcactgcgcgcttatgtgccgcaggcaaaacaggaagactggaagctggtcacggccggtcagcgcgtgcaaatcatcaaaaatgatgagaaagagggcggcgtgctgcgtctcggtaccgaagtggtcacctcggccgacggctcgatctctgcgctgctgggcgcgtcaccgggcgcctccaccgcagcaccgattatgctggagctgatggcgaaagtgttcccggagcagatgcgctcgccagagtggcaaaccaaaatccgcgcggtaatcccgtcgtg

SEQ ID NO: 15743 - DNA, 505 bp, Zea mays
  Coding DNA Sequence Number=SeqID_1340
gattgttaactgcaaagtcgctcatgtccaatgtcaaggtaagtcacggtcaatatcactcgcccactcatatgtatggcgattatacttaagcatagatacgctgggagcttcaattacttctgccaaatctagtcaaatcgatgtgatggttccaagtagtgacgctcatggtgattgggtagagcatgcattgcctcaacagtacatccatagtttcaaggatgggcagttcaccacttcaccagtttcacactcaggagcgtgaatacaattgttactgctgctgtttttgaagtctgtaaacagatttgggtcttgcagcactggactcggtctgcgattgttgttttttgttgcccttgctcagtctggcagtgtgtaatgcctgcatgcacgtggttcctttcatgttggtgcttttgtgtggcaacaaacctaccaaacttggtatgtaggtctttaagtgatagatctctccgaccccacagctcaataaattctg

SEQ ID NO: 15744 - DNA, 353 bp, Zea mays
  Coding DNA Sequence Number=SeqID_1341
aacgtgctgcgccagatcctgcatccggacgggctcgcgtcgcggatcgtcaataggcacgaatggcgtgcgcatatcctgcatcggctgcaacggcagatcgatgcaagcggcgaccgcacgctgcatacgctgcgcgacgaactggccgcgtaccccgcgccggccggccagcccgacgatccgccggcgcgcaccgactacgcggatatcgcggtgccgttgcggctgagtacggcggccggcgagctgacgttcttcagtacgacgacggtgttcggcacgccggtcgacgtcacgctgtcggagctcgcgatcgaggcgttttttccggcgaaccaggagacggccga

SEQ ID NO: 15745 - DNA, 182 bp, Zea mays
  Coding DNA Sequence Number=SeqID_1342
gtcaggtgcctggagtctaaggtcacggcggtgtcctttgatcacagccgcctgaaacaggaggtgaagtacgctcatggactagcactcggggaggtcgggcacctgctcgtagtgcctccggagggtctcgcaagacaggctgatcgtcccgaggagcttcgtctacaggtcgaagcgga

SEQ ID NO: 15746 - DNA, 227 bp, Zea mays
  Coding DNA Sequence Number=SeqID_1343
tgtctgcacgatgataaagcccatgatatcgcgcacctgcgccgcgtctggatgagcgcggcccgcattatgcaaaacaccaatgccgatccgctggtggtgctgaccgcctgctatttccacgatgtggtgaacctgccgaaaaaccatccggagcgccatctggcttcgacttacgcggcggaagagacgcgccgcattctgcaacagggattttccggacttcc

SEQ ID NO: 15747 - DNA, 237 bp, Zea mays
  misc_feature (31)..(31): n is a, c, g, or t
  Coding DNA Sequence Number=SeqID_1344
gaagagatccagcgccactatggcccgcgcnctgacctgcaactggtaccgtgcaagtacgatgcgctgcgcggcgccgatgccctggtgatcgtctccgaatggcaggattaccgtgtactcaacatggtcaaggtgccgcaacaactggccgaccgggtggtgttcgacgcccgcaacctgttcgaacccgagcacatgcccgctgccggcatgacttactacggcatcggccgt

SEQ ID NO: 15748 - DNA, 171 bp, Zea mays
  Coding DNA Sequence Number=SeqID_1345
atccggtataccccatgggttgcactttccatctgccctcggcctggtgtgtgggaatatgtgagggtcaatgtcatcaagctcgctgttgaggagctgaaggtccctgagtacctgcagttcaaggaacaacttatggaagaaggcccttgttcaagcaatttggctttg

SEQ ID NO: 15749 - DNA, 345 bp, Zea mays
  Coding DNA Sequence Number=SeqID_1346
tcaacgaccagcaattccgggtcaatttcaatctcagcaatgcgctgcttgatgcgctgctggccctgattgagaagcaactggctcacgattcgatagaggagagcgacgacgatgaggctgctacgccgctgctgagcggcggctatttccagctgtttacggagacagtaccgccagatgtgaagagactgtatactgagtcggcggagaaggactatccctcgcttgctcagacagcgcatcgcctgaaaggcgtgtttgccatgctcaatttactgccgggtaaacagctttgtgaagagttagaacagcacattaaactgtgcgacgatttaaccatta

SEQ ID NO: 15750 - DNA, 564 bp, Zea mays
  Coding DNA Sequence Number=SeqID_1347
gaacaggcgctgtttttcagcaaatccctgtccgacggcagtgataatccgctgtatcgcaccatgatcccgcgcaacggcgcgatggagcggcgtagctgctgccagcgctatcgcattccggacgtcgaacgctgcgctttcccgccttatggcagcttttacgctctgtttttaccggagaaaaaaatgagcctggagtcggtacggcacttctttgccgaacacgcaccggatatcgacatcatcgagatgccggaaagcactgccaccgtagaactggccgcacgcgtacatggcgtggcgccggggcaaatcgccaaaaccctgtcgctgaaagtgaaagagagcgtggtgctgattgtcacgcgcggcgacgcccggctggataaccgcaagctgaaggcggcgctcggggcaaaagcgcgcatgctgagcgtggatgaggtggtgaactggaccggccatccggtcggcggcgtgtgcccgttcgggctggaaaatccactgaccgtctattgcgatgtgtcgctgcgcagtttcgatgaagtgttacctgcggcc

SEQ ID NO: 15751 - DNA, 421 bp, Zea mays
  Coding DNA Sequence Number=SeqID_1348
ggattacatctacttccctgtggatcgaagacgttataataatactaaccctgatttaagaggatggttacgaccacctttgacgtgatgacaacctatatctagtaagggaaataaatgaaacaataccttttcccgaccatccaccatcctctttgtgaacgttgacttttaaggcgactctcttggtagttagggtagaaggcgtctcctatgcgacaatctaggagtccttggttaccttcacctatatagagtcctaggtaacctctccctaggttccagacacctctttaccctcctcctctctcttctcgtcgtttatgaagacttcctcgtctcgattagttgcatacacagtcacctcctcccgccctacgggacctggacgtccgtgttactaactctcggcgaccagtgt

SEQ ID NO: 15752 - DNA, 520 bp, Zea mays
  Coding DNA Sequence Number=SeqID_1349
gatgtcgatcaaactaacggcggcaaccaggcaagaacgagatgttcaacgtcgcgaacccggctgagatcaggctgttccagcggatggcgttcggcaaccaagatttcccgacggatttcagccagtccagctggaacaacagccagagcaaaggtcttgatgcctctgggtcaaggcccttgtaatcctccccctcggcgtcgtcgtaaatttcgtagatctaaccagctaggggggttcgtgatgattttttttttacctcggggaattctttttgagtgggtcaatagtgattggtcttttgccatccctgttttttaccccctaacatagatcatggggtgaaatctgcttgcttgtgcaaaaactcgttgccttattaaaaaagacttctggggttagtccctattagttagaaatgctggatcgattttttttcccttagattttgcagaagtcctgtaatcagccgttgcttttgaaaccgggggtttggcaagaaactttttattcgagt

SEQ ID NO: 15753 - DNA, 380 bp, Zea mays
  Coding DNA Sequence Number=SeqID_1350
acaaactcgagtgcctcgctgggcaggccagggagtacgtcaacgagtcgcatgcctacgtgcacgtcaagaacgccgccgaggcgcacgtcagtgtgctcgaggcgccggtgggcggcggtacgtatgcgccgcgcacaccctgcaccgcggcgagctccgccgcatcctcgtcggactcttcccagagtaccctattccggcggcaagcacaacgcatcaagatataccgaagaggggttacaagtttacgaaccaaccaccattgctgtgtttgttgaaggacctaggcatcaagttcacaccagtgcatattgaataccctgaatggagcagtgagatccctgcaagaaaagggtttcctccagaagatcactgca

SEQ ID NO: 15754 - DNA, 105 bp, Zea mays
  Coding DNA Sequence Number=SeqID_1351
gcatcggcttgcacataacaatctgtggaggcgtagccagagatgtcgacgtatgattgaactgacacagggctgataccatatgacttgctgttgtgcagtcgg

SEQ ID NO: 15755 - DNA, 307 bp, Zea mays
  Coding DNA Sequence Number=SeqID_1352
ggtggtagcattggcctgcatcgacgccagggtacaccaccatgtttgccacttcactcccggtgccaccggctttgatcagcgaggttcgggccggttgctccagccaggaagttggcctccagttcttcagtcgacaccccctgctcctcggccagcttggcaaagaaatcactcaccctctccgaggcggtggtggcccccgggcaggcaccgaattcactggtcacccccgggtaccagccaggcgtcttcggccaacccgcgcgacaccgccagcaacgcagtcttggtcatgccgtaatga

SEQ ID NO: 15756 - DNA, 353 bp, Zea mays
  Coding DNA Sequence Number=SeqID_1353
tgcagactacgctggacgacgatatttacgccatcggcgactgcgcctcctgcgcgctgccaggcggcggattcgtgccgccgcgcgcgcagtcggcgcaccagatggcgtcgcgagcactggaaaacatcctcgcccagcgcaaaggcaagccgctcaaagcctacgtgtataaagatcacggctcgctggtgtcgctatcccgctttagcaccgtcggcagtctgatggggaatctgatgcgcggctcgatgatggtggaagggcgcattgcgcgttttgtctacatctccttgtatcgtatgcaccagattgcgctccatggatacttcaagaccggtctgatgatgctg

SEQ ID NO: 15757 - DNA, 546 bp, Zea mays
  Coding DNA Sequence Number=SeqID_1354
agcacgaaatcacggcgggcgtcaaagcggcgattggccgggcgcgggataaaggtgtgtcgatcgtgctggccaccggacgcccgtttgttggtgtggagcgctacctgatggagctggatctgcgtcagccggggcagtattgcatcagcaacaacggcgcactggcgcacagcgcggacagcggtgaggtggtggctgagaagacgcttggctttgatgactatctctacctggagcagctggcgcgcgaccttggggtacattttcaggcgttcgacaaatccttcctctacacgccaaataaagacatcagtgaatacaccattcacgaagccagcctgaccggcattccggtgcgctatcgcgccgtagaagagatggacccggcgacgcgcttcccgaaactgatgatgatcgataaaccggagctactggataaagccatcgccgccttaccggcgcgcgcccgcgacagttataccattctgaaaagtgcaccttactatctcgaaatccttaatccgctggtcaacaaaggctacg

SEQ ID NO: 15758 - DNA, 241 bp, Zea mays
  Coding DNA Sequence Number=SeqID_1355
ctgcagtccttagttcctcttgtgaagaggccagagcaccacagctctgagaaatggtatgccctgctgtaaagaaaccacatgggcggagatggtcagacgtacgcgatgctcgacaagacgatctgtgcactgtcaaacgtgttcataggatcatcagggtccaccttcacgcaggacatcttccggctggggagggggggctggggatcagtgtcgcgctgtgacacgagtacctctg

SEQ ID NO: 15759 - DNA, 272 bp, Zea mays
  Coding DNA Sequence Number=SeqID_1356
gcagggcaaggcattactgcccgatgcaggccgctatgtgctgacctgcggcagcagcctgctggccagctatgccgtggagcaaattgccacgctgagcggcaaaccggtgcgggtgctggcgggaggcaatgcagcctggcgcgccgccggtctgcccaccgagcagggcgagcagcgcctgctctcgccgcccatcgatcgttatcgccgcccgtacgaaggcaccgatattgaaccggacgtgatgcaggcctatctcgactgggaat

SEQ ID NO: 15760 - DNA, 176 bp, Zea mays
  Coding DNA Sequence Number=SeqID_1357
gccggcaatcagtgctgccagcacgctgcggcggagagtggcaaacatagtggttgtccttttttgcctctctttgccgatctcaaaaaccgtccggtgctggtggtcggcggtggcgaaatcgctgcgcgtaaaattgagctgctgcggcgtgccggtgcgcacgtgcgggtagc

SEQ ID NO: 15761 - DNA, 316 bp, Zea mays
  Coding DNA Sequence Number=SeqID_1358
atggcgttgctgacctcgtttattaccgtgattgttggccacgccctgacgccgggcgaggatcagttatccctgctcagccagaccgacagcagcgcctcatcgctgtttgaaatcgtccagaacatgtcaccggatcagcaacgcattctgctgcgcgcctctgccgccggcacttttgctgccctgattggcaacacgctgctattgggcggcatgctgtgcctgctgccgatggtatccagtggacagcgcgtcagcgcgctgcgcgcgattggcgcctctgcgccgctgctgccgaaactgctggtgcaga

SEQ ID NO: 15762 - DNA, 206 bp, Zea mays
  Coding DNA Sequence Number=SeqID_1359
atctagcagatggtatataccctgactggtctttctttgttatgagaatccgtaatccatacgatgtgaggacgcaacactttgccaccattcaggagtccgctagaaaagatattgaacgagcttttggtgtgctccagaagcgatgggctatagttcaaggcataaaccggggctggcggcggagacggccaatttcctgagcc

SEQ ID NO: 15763 - DNA, 455 bp, Zea mays
  Coding DNA Sequence Number=SeqID_1360
gttaggcttattatccatgctagaaaagttctcgcagctacctttgatcgcacagggcgttatgttattactggttctgatgaccgccttgttaaaatatgggcgatggaaacagcgttctgcctggctagctgccggggccatgaaggtgatattaccgatcttgcagtgagttccaataattctgtggtagcatcttcatctaatgatttcattattagagtgtggcgtatgcctgatggaatgccagtctcagtgctcaaggggcatacaggggcagttactgctattgcatttagtccaaggccaggtgctgctttccagctgttgtcgtcatcagatgatgggacatgcaggatttgggatgccagatactctcaacaacctccaagactgtatacaccaaagcccccagatgttgcccctggtaagagtggtgatgcatcttccagcgc

SEQ ID NO: 15764 - DNA, 75 bp, Zea mays
  Coding DNA Sequence Number=SeqID_1361
gaaaagaagatgtcccttgagccctctcaactattctggatactcttatagtggtgccattagtgaaatatgttt

SEQ ID NO: 15765 - DNA, 525 bp, Zea mays
  Coding DNA Sequence Number=SeqID_1362
catgcctgcaggtaactgtacaaacagagtctgaacgccagcttgataagattaggaggaaagaggaaagacgtagcaagcgcagtgcagacagtggcaataatgatattggtgttgatgatttttcatcccttcttttggcaagtgaacggaaggaggcatttgatgacgtgattggtagtggagaagggtcagacagttttacagtaacttcccttcctcaaggaaccacaaggaaacacatgaagggttatgaagaagtgaagattccaccaactccaacagcatcactgaaacccaatgagaagctgattaaaaacattgcattttttcttgaaaagcgcaggagaactgtgccccatttatatattaggaggaaagaaaaaaggtctaagaagacccaaaatacaagacactccttacggaggccagaagcaaccatacagatcatcgaggccccaagagtgatgagggagttcagtcctctcttagccattccagtaacaacagcagatgtcctttccc

SEQ ID NO: 15766 - DNA, 405 bp, Zea mays
  Coding DNA Sequence Number=SeqID_1363
aaagacgcagaagccaagagacccccagagcaagcatttaatttgcaccccccggaggggaagggccaaggagggagaggaagcaaagccccgaaaagccggcccaacaaaccacacaggccccaagaaaagaccgaggacagagccagccaacgggacaacaaaagcaacaagactgtgcacgccaaccgggagcaccgcgccaagggcaaacccacccaaagacctcggaaacaaagagcacaaaaagaagggggcgagcacaagaacaatacgacacaaaagaaaggcacggagaaaacaaacgaagagcacccaaagacacgcactcacgacgagggggaaacacaccacgaaagaacaacacgagccaggcaagcggaggccgacaagccaacaaacaga

SEQ ID NO: 15767 - DNA, 136 bp, Zea mays
  Coding DNA Sequence Number=SeqID_1364
gcagcacatcaataacatcctcagtccagccactccgctcttctagaacaccatgtacgacgcctgtcgtcagggtagtgacggtgtgcgtgaagacccgctcagcctcagggaggggtgctcactcctgccgtat

SEQ ID NO: 15768 - DNA, 171 bp, Zea mays
  Coding DNA Sequence Number=SeqID_1365
tgcaggcagaaggtttccctcaaacctacctcggcctccccctctcctgggagattgtgcttgggtgcaagttcgtcggtggtctggaggtgagagatctcgagctattcaacacatgtctccaccttaaacttattcatcgcctccacacctcgtcatgttcgtcttggg

SEQ ID NO: 15769 - DNA, 580 bp, Zea mays
  Coding DNA Sequence Number=SeqID_1366
agcaagatgcgccagtgatctacatgggcaccttcagtaaaacgctctatcccgcactgcgtctcggctatctggtggtgccgaaagcgctggcgcagccgctgcgcgtggcggcggccgaactctatcgcggcggccatctgctggtgcagcgcgcgctggcggaattcatccagaaaggccactacatgacgcacatccgccgcatgcgcaaactctacagtcagcgccggcactttatgatgacgctgattgaacgctacctgggcgcggcattcatgccggtggtcaatcatgaagccgggctgcatctggtgctgaatctgcccccgggctgtgatgatgtggcgattgccgcgctggcgctgcgacgcggcgtgaaggtgcggccgctgtcgcaatactatatgcatccgcaggagcgacgcggtctgctgctcggttacgcctgcgtggatgagcgccagtgccaggatgcgtttggtgtgctcaaagcctgcctggtggaagcgggcatcgccgggcggggatagccccggcgtgtgccttacgcccggccaatgctgtccagttgcgcaac

SEQ ID NO: 15770 - DNA, 277 bp, Zea mays
  Coding DNA Sequence Number=SeqID_1367
atcctgctcggctgtgcgttacagatgctgctggcgagcgtggcgctggagctgctattgcactggatggcgtctgtgcggttgccgctgacggtggtgggatgcagctatctgctgtggctgtcgtggaaaatcttccgcgccggtgcgccgcagctgcgcgaacgtccgcgtccgatgaccctgctgggcggcgtgtgtttccaggcggtgaatcccaaagcctggctgatggtcaccaacgtggcgctgatgtacgccaacagcaacggtgtgc

SEQ ID NO: 15771 - DNA, 235 bp, Zea mays
  Coding DNA Sequence Number=SeqID_1368
atgagccacgacaccggcgccggcgtggagaccctctcgctggacctgctggcccacgcgctagcggccgtgcgcgacccgcgggaccgcaagtcgtgccgcctcgccagccgcgccttcgcgcgcgccgaggccgcgtcccgccgcgccgcgcgggtgctgcgccgggacgcgctgccgcgggcgctgcgcgccttcccggcgctgtcctcgctcgacctctccgcgtgcgcgg

SEQ ID NO: 15772 - DNA, 489 bp, Zea mays
  misc_feature (105)..(105): n is a, c, g, or t
  Coding DNA Sequence Number=SeqID_1369
tgcagcccgactatgaccttaatattatgcggcccgaacaggggctgaccgagatcaccagccgcattttgcagggcatgaaaaccgtcctggcggacttccagnccagacgtcagtggctggtacacaggagataccactactacctttgccgccagcctggccgcgttttaccatcagattccggtgggccacgttgaggcgggtctgcggaccggtaacctgatgtcaccgtggccggaggaggccaaccgcaccctgaccggtcatctcgccagctatcacttcacgccgacagaaaattcgcggcaaaacctgctgcgcgaaaatctgcccgacgcgcgcattttcgtcaccggcaatacggtgatcgatgcgctgctgtgggtacgcgatcgcgtgctggatgatgccgatctcaacgctcgcctggcggcgcgttacccgttccttgaggccggtaaaaagctgattctggttaccggccat

SEQ ID NO: 15773 - DNA, 395 bp, Zea mays
  Coding DNA Sequence Number=SeqID_1370
caagcgtaaagttccgttccagaagtccggccccaagttcaagaccccccgcccggtgttggcgttcaaggttaagaacaagtccaccttcgccaagcccggtgccttcgaaaagatggcccgaccggtgtccgcccgggtcgatcccgccggtccgaaggcccaggccgaaccggtccccgatccccgttccggaccaagcccgggtgcccgccctttcaataaggcatgccaagcccgccaccgcaaaacggtgccgaagaaggcgttcaacgtacggggaccgccaaaaattgccttcccagacgacaaggatccgggtcatgggctgttcctcaaaacccgatcgaaaggcagcacgatgaccctcatccagttcctcaacgtaatccggc

SEQ ID NO: 15774 - DNA, 531 bp, Zea mays
  Coding DNA Sequence Number=SeqID_1371
gaacagattgtcagccagcagcagacgctggcgcagcgcgcagcggacgccgaaagcgccttccggcaggcattgctgctcagtgatttcgctgacgaaagcgccctgcgcgccgcgctgctggcggaagatgaggtgcagacgctgcgccagcggctgcaaacgctggagcagcagcatcagcagcacaccgcgctgcatgccagactggcgcagcggctgagcgatcatcagcagcagcgcccggccgcgctcagcgatgccgatgctggctccatcgccgcccggctggagcagctgcgcgtggcgctgcgtgacaacgcacgccagcagggggaagcgcagcagcagctgcacagcgatacccggcagcgtcagcagcagcaaacgctgctggcgcagatcgccgctgacgaagcggaactggcacagctaagccgcctcaacgatctgatcgggtcggccaaaggcgacaagttcctccgctttgctcagggcttaaccctcgatcatctggtgtggctggcaaac

SEQ ID NO: 15775 - DNA, 150 bp, Zea mays
  Coding DNA Sequence Number=SeqID_1372
ggacatctataggtacgtggctccttgcagagttcccgacccgcacgcacgcaccttttttttttcacagccgacatgagtcttccattccaccctctgttctttgccgtcgatacggtctgctgataagcaggctgcttgctcgccccg

SEQ ID NO: 15776 - DNA, 254 bp, Zea mays
  Coding DNA Sequence Number=SeqID_1373
gcggtggtctcgacggtcaggtgctcgacccggacaccctcgcctacaccgtctccacgttcgcgcagctcggctacctcggcatcgccctgctcacggtcgtgttcctggtgcggaccgacgggggacgccgtgccgtccgggcagcgttcgtcgtcgggacggtgttgagctccctccgtagtgcgatcgtcgcggtcggagccgacgggctcgagtggctgttcgacaagaaacacgaccgtgccctacag

SEQ ID NO: 15777 - DNA, 505 bp, Zea mays
  Coding DNA Sequence Number=SeqID_1374
gatggctatcgtgccgatctggcgcgcaccgaaacgcgcattaagcaggcgcgcgagggcttcaaaatttatatggatcgcaaaatgaagacgccggctgacctggcgctcgacggtccgctcaccaccagcttcaatgcctatattgataaaggcctgaagccgatgatcgagtcggcgaaacagggcagctttgaagggattgtcgcgcaggagaccgatgtcacgcgcaagctggatgatgcctataatgccgtgctgctgaaggcgattaagatccgcaccgagcgcgccgaagcgattaacgccgaagcggcgcatcagtcgcgcgtcggttttatcgcgatggctgcggcttttgccgccgcgctgctgctggtgctgctcactttcgtgttcctgcgccgcgtggtgatcaatccgctgcgcctgtcggtgggtcgcattgagcgcatcgcgcagggcgatctcaccgcccccgagcaggcctatggtcgcaacgaaa

SEQ ID NO: 15778 - DNA, 354 bp, Zea mays
  Coding DNA Sequence Number=SeqID_1375
gacgctgttgtttttgacgttaaaggggcacctggggatgctgcgtttcgggaccgatagcttggttgccctgccagtcagcgatgccccgtttaagggccaaatctttctttggctaagtacctgggccgccgccattttcgcctccgaactgatgctatgcctgccggtgatgatggtgctgctgtgtatcaacctgacactcggtgtgctcaaccgctttacgccacagttgtcgatctttgtggtgggttttccgctcacgctgaccagcggcctggtggcgctgtgggtgatcactggcgctatcggtccgtggtttgaggcgctgatgggcgagaactttgcccggct

SEQ ID NO: 15779 - DNA, 424 bp, Zea mays
  Coding DNA Sequence Number=SeqID_1376
gatgaaatcgacacgctcaaccgcgaagagcggcgcgataatctgccgcgttttagctttaacttcctgaaaacccatccggggctgtggggcgtgatgtacctgtgctacggcctgtgcgtggcgctgattttctcgactgagatgctcggctggccggccttctggttcgccacggtgttcgtgctggtgatgagttttctgatgctgctggacatcaacccgaaataccgcttcgaggacatcgatacgctggatctgcgcgtgtgctacaacggcgagtggtattacgtgcagccggtctcacagcaggcgctggacaagattctggagaatccgggcacgcccgagcgcgtacgcagcggcatcgatcgcctgatgcagcagaaaggagaagtggatttttatgatgtctactacctga

SEQ ID NO: 15780 - DNA, 509 bp, Zea mays
  Coding DNA Sequence Number=SeqID_1377
ggacatgatcatacacctacaataattttagaggaagtggcttcacacgatctatggacgtggcagtttttttggtctacctagatctcttaatgacattattgttctccgttgatcaccattatttgcaaagctatcaaaagaagctctacaagtgaattttagtataaatagccataactattcaatgggatactaccttgtagatgtcatatttccatcttaggctatattggtcaagaccattctagaaccatgagacagtaagaatatatattgtgcaacggcacaagaagaaaatgaaaggatgtggagtgaattcgtatggtttcacaatctcgtttcgagggccatctcgtctttgggtgaataaacattgaatgacataatgataactttgtataatcatgcatagcatgattgttgaagacagggaaatgtggatccatatgaatgttttgagaatgggaggaaacaatgtagaaccatcccacaagcataatgtagat

SEQ ID NO: 15781 - DNA, 353 bp, Zea mays
  Coding DNA Sequence Number=SeqID_1378
ggcgcgtcgattgataagcaggatcacgccgccaacccgtgcggtcagattggtgaaaccgtcgatttagatgaggcggtgcaggtggcgctggcgtatgcgcgcgagcacggcgatacgctggtggtggtcaccgccgatcacgcgcacagcagccagatcgtcgaaaacggcactaaagcgccaggtctgactcaggcgctcaacaccaaagatggcgcggtgatgaccatcagctacggtaactcggaagaggattcccaggagcacaccggcacccagttgcgcatcgcggcctacggtccgcacgcggcgaatgtggtcggcctcaccgatcagaccgacctgttctt

SEQ ID NO: 15782 - DNA, 541 bp, Zea mays
  Coding DNA Sequence Number=SeqID_1379
atgcaggcgcacaggcaacctcggtgctgcgcggcggcgccgacagagtgcggctggtgccgcacagcgtcgacagggcaccactggaggcgaacaggcatctggtgctgctggagctcatcgacacgtcctcccccgccgagcgctcggggctggatcttgtggccgtcctggacgtcagcgggagcatgtggggcgacaagctcgataagctcaagaccgccatgaagttcgtcatcagcaagctcggctccatggaccgcctctccatcgtctccttctccaacgacgctgcgaggctgtgcccgctgcgctccatgactggtgacaccaaggaagagatggtgaagggcatcgtcgaaaagaagctacatgccggcggcggcaccaacatgagggccggcctcgagactggcctcagggtcctcgccggccgccagctcagcagtggccgcgtcgccagcatcatcctcatgtccgacggccaggatagccttcacgaacctagggctgtcgataccagcggagtggcagtctacac

SEQ ID NO: 15783 - DNA, 276 bp, Zea mays
  Coding DNA Sequence Number=SeqID_1380
gcaaggtccttttgtgttgatgacaacgacttggaagatggtaagtcctcaaaagaaagggaaagctctgcacagttactcaggctcccaaagattcagaatcaggctctcctatctggtctggcttactgtgtatcatcatgcagcatgattttagtcaacaaatttgttttatctggctatgctttcaatgcgccagtatttttgatgttataccaggtatactactggtgcttactttccatttctcatgcaacacagttgtgtgcctgcctt

SEQ ID NO: 15784 - DNA, 494 bp, Zea mays
  Coding DNA Sequence Number=SeqID_1381
agctggtacttcctcattgccggtatcgtcatgttactgtcggcgattcagttctttcgccgtaaatcctcggcggttacgctgttcattctggtcttcgccggcacgttgatctgggcgctgtacgatgctggctggcagttctggccgctggtgtcgcgcctgatggtgccggccggcctgatggtgctggcgtttattacctggccggcgctgcgtaagcgtgaaggcaaggcctcgctggcgaagctttcgtatgcgctgtcagcggtgattgccgttggtatggtggtcacctttgtccagatgttccagccgcatccgaccgtggccttcaccggcaagcaactgccgctgatcccggtagataaaagcaaaccgcagcaggactggagcagctacggccgtacgccgcagggtgaccgttttgccgctatcgaccagattacccgcgacaacgtgaaagacttgcaggttgcctggacgtttcatac

SEQ ID NO: 15785 - DNA, 185 bp, Zea mays
  Coding DNA Sequence Number=SeqID_1382
ggtttgggcgtgtgtacaaatgtactctccagaacatgacgttggcaataaaggcgttgaaatctgatggtttacaggggcaatcacattttgagcaagaggtaggccaactctcgcagatgatgcacactatagtgtatgctctactatcacacgcatacaaactgtaacgattgcatatatat

SEQ ID NO: 15786 - DNA, 424 bp, Zea mays
  Coding DNA Sequence Number=SeqID_1383
gtctgacggctggaatattgcgctactgggcgcgacaggcgcagtagggaacgctgtactggaactgctggcggaacgccagttcccggttggtgagttatatctgctcgcgagtgaaaacagcgccggtgaaaacgtgcgttttgatggccgctcgctgcgcgtgcaggatgcggcggaatttgactggtctcaggcgcagctggcgttctttaccgccggtcgcgaggcgtcggcgcgttatgccgaagaagccgccagccagggttgcctggtaatcgacagcagcgacctgttcgcgctggagccggacgtgccgctggtggtgccggatgtcaatccacaggtgctggcggattaccgtaatcgcaacatcattaccgtggccgatgcgctggtgagccagctgttaagcgccatcaaa

SEQ ID NO: 15787 - DNA, 526 bp, Zea mays
  Coding DNA Sequence Number=SeqID_1384
agatcgtgaaaggtccgtcctcggcgctctacgggcagtccggccctggcggactcgtcgtcgaggacagcaagctgccgctcgatcgcgacttctatggcgcagtctcgggaacctacggcaattacgatctctatcgcatcgatgccgacatcggcggcaagatttccgatagcgcgcaatggcggctctacggcagcgccaacggtgcgaacgcacagcagacttacggccggcgcgaacggcagaccgtgtcgggcgccatcacgctgggttcgggcagcaccaccagcctgaccgttctcgccgcctattcgcacgacccgcgcaacggcaattacggcgtgtttccggcgctcggcacgctgatccccaatcccgccggccagatttcgacgagcttctatggcggcgagcctgatgacttcttcaagcgcgagcaactgggcctgacctacatcttccgtcacgatttcggcggaggctggtcgttccgtgcgctcgggcgctatcagcacatcagcag

SEQ ID NO: 15788 - DNA, 319 bp, Zea mays
  Coding DNA Sequence Number=SeqID_1385
gagtttgggatctaaaatgaatggagtgatgcatctatccgtcatgtcatatgaattggggctacatttcttttcaattttcattcaagagtttctatctgcttccatgccctttttttgagacctcgaaacatgaaatggacaaattccttctcttaggaacacatacaagaaaaaggataatggtagccccccattaactaatttatgaatttcatagtaatagaaatccatgtcctacccagacagaatttcgaacttgctatcctcttgcctaataggcaaaggacctctatagaaagactaattcatttggatc

SEQ ID NO: 15789 - DNA, 234 bp, Zea mays
  Coding DNA Sequence Number=SeqID_1386
tgccttgtaccgtttatgacagtgactctcaagacacgggaggatcaccggaagcagttctagcttgaggaggcgcgcaaggtggggcttgcgcctgcgtaggtcgatgatgatgggaactacatcaatccccatatcccccagtacatgtcctcggccccatggtatcctaatgctgagaatccgagtttgaagcatcatcgtaagtgtaagtcagatccgacctacaccgag

SEQ ID NO: 15790 - DNA, 323 bp, Zea mays
  Coding DNA Sequence Number=SeqID_1387
ttacaatgccggtgcgggcccagcgccggcggccagcgcggatgagtacactcccctgaccatcttcgacgtggtcacgtacaagatgcagatggccatcatctacgccttcccgccgccggccccatcgacggcggccatcgagaacggcctggccgcggtgctggccgagtaccgcgcattcgcggggcagctgggcgaggccccagacggcacgcccgcggtgctgctcaacgaccgcggcgcgcgcctcgtggaggcggccgtggacgcggacctcgtggacatggcgcccgccaagcccacaccaaagctgctccggc

SEQ ID NO: 15791 - DNA, 380 bp, Zea mays
  Coding DNA Sequence Number=SeqID_1388
aagggccagacccaaagaccgactgaagaggggcctgaacgaacaagataccgccactgcgggcaacggacccggggacagagccacacgcgcgccaggggtggaggagccacgaaccggcgcggcgcacgcaaaaaccgaccaaggcgagcgccacggcatccaaaaggaaagggacaaggggaacaaggacggcaccacggaagtgggagggaccaagaaaccaaaattgggagcacacgcacaagactacaggggaggggcggacgagcgtacacacggcgcactcgattacaccagagaggaggaagacgtaaacgcacaaacagggaggcgcgggagagaccgccttgccgttggcgccgaagcaatctacaacg

SEQ ID NO: 15792 - DNA, 247 bp, Zea mays
  Coding DNA Sequence Number=SeqID_1389
ggaggctgccaacgaacacaagcgtgagacacagcgagtgaggcgacccaccagcggcaagcccctgccggaccaaaagcagaccctcagcataaagagacaaaggctatcctccaacaacacgcgcgacagcaaggcgcccagagagagagagaggccggacgaaagcgctgccgctaagcgcggggaggacgagcagcacgcccacgcccaccagcaactgagcctagggctcaggcggagtaaa

SEQ ID NO: 15793 - DNA, 405 bp, Zea mays
  Coding DNA Sequence Number=SeqID_1390
accagtaccagggaagaggcgcgctcagggagggggagcagccgcgcacccagggagcaggcgagcagcagccacgcccagggagcagcagccgcgcgcagggagcagccgcgcgccccaggcgagcagcagccgcgagcaggcgagcagcagccacgcccagggagcagcagccgcgcgcagggagagggagcagccgcgcgcagggggagagagcagccgcgcgccccaggcgagcagcagccgcgcgcagggagcagcagcggcgcgcagggagcagccgcgcgcagggggagagagcagccgcgcgcacaggagcagtcgcacgcgcacaggggaagttgccgcgcgcgcacagggggaagttgccgcgcgccaaaagcccaaagcacgcgccaatttggg

SEQ ID NO: 15794 - DNA, 324 bp, Zea mays
  Coding DNA Sequence Number=SeqID_1391
aggttaacattgtgctcaccgcgctcaccatcggtgcggccaccactatcatggcgaccaccggtgtgctggacagacgctttatcggtccggtaatgggcaaatgggcggaagtgctgggcggcgtggtactgatcagcattggctgcaccatctaagcgctccgccagaaaccctcgataatcgcggtcagggatcgacctgtggttatcacccggcgccgttcccctctgcgcacctcgcttttccgtctggcttttgataaccaggcaagaaaaagttatggcatcgtgcaacccgacggcgtgatcgatctcagtgcgc

SEQ ID NO: 15795 - DNA, 516 bp, Zea mays
  Coding DNA Sequence Number=SeqID_1392
tgaaggacgagcaggcgccctccgtgtcgctctacgagacggtgaaccgcaagtgcatgtgggcgtgcgtagaagacgacgccgcgaacagagcctgcttctacgagagcatggacgccgacacccgcctcgtcatgcaggccgtgatccgcaagtgccctgccgtcttcgacgacggcctcacgtcgctcgtcgacgtcggcggcgcccggggcacggccgcggcggccgtcgtcgccgccttcccgcacatccagaagtgcaccgtcatggacctcccccacatcgtcgccgaggctcccgccggcaccggactgtgcttccacggcggcgacatgtttgagcacatcccgtcggctgatgcagttatgctcaagaatatgaggttgttcacggtctctactgactccacggtgagtttggcggtcggctggctgttgacgaggatctggaaggcgacggtgagcagcgagccgcctgtcttgtgctcggcgccgacactgcttgggccatcag

SEQ ID NO: 15796 - DNA, 429 bp, Zea mays
  Coding DNA Sequence Number=SeqID_1393
ctctgtctggtaaaggtggaaggcaacgatcggaacggatcggtagtcatcggagtcatcaacaccgcgagctgcgccaagagtaggcatcatcggttggagagaagtttcgttcgcctggcgttgccgcacgggagcgggttcaggatgaacagtaggatatcgttgagcagcgcacggatcatatccccctcgtactgcccgcacccactgtcgtcgccaccgccatcttcgtcaccgccgctggctatattcgacgcacaaagggtttcgaacggtcgccggtttccacagtatatgcaaagcaccgcccggaattcctcccaaatgtcacacatcgtcaattcaacgccgctgcctcgaaaccacctccacatcggttgtgttggatctttcccggggttcgagatctccgtgttggtcgccgat

SEQ ID NO: 15797 - DNA, 183 bp, Zea mays
  Coding DNA Sequence Number=SeqID_1394
gtcaagaacttctcggaggagatcaagccggcggtggcgccggaagacggcgggggcgcggcgcacagtcgctcggctgggtacaggcacagcggggtacaaggccacggggcgcgtgccgcccgcgctcgccccgccgtcgccgcgcgtcgccgtgcttgttttctgctggctcttcggcgg

SEQ ID NO: 15798 - DNA, 540 bp, Zea mays
  Coding DNA Sequence Number=SeqID_1395
tgctcgatatcgactgctcggtggggccgctgccgggcggcctcgtgctgccgctggccggatggcaggaggcgatccgcttcggctgctcgctggcgaccatgcgccgcttccgcgcgctgctggatgcgcaactgcccgaacgatacggcaccgtgttcaccggctcgggcgacttccatcacctgtcctggccactgatcgcacggctgaagcccgcgcagccaatccaggtggtggtgctggacaaccatcccgacaacatgcgttttccgttcggcgtgcactgcggctcctgggtgcgccgcgtggccgcgctgccgttcgtcgagcacgtgcacgtgctcggcatcacttcgtgcgacatcggcgcaggccacgcgtgggagaactacctgactccgctgctgcgcggaaaactgagctactggagcatgggcgtggataccggctggtcgcaccggctgggcatcgcccgcgcgttccgcggtttcgacacgcctgatgcgctggtcgatgccttcgtcgagcggcagcgca

SEQ ID NO: 15799 - DNA, 371 bp, Zea mays
  Coding DNA Sequence Number=SeqID_1396
acgcggcactgcgatagtcctaggcccccagccacgcgcccccgcccaggctcccaggcggcggccaggccccagccccgcgccctcgaccagtaggcagcagcccgctgccccgccgctgccatccctaggccagagatgtctcctccaaatatacgggcgacgtagatggggctcggtgggacgcaggacgagtctggaaggccccgcgacggatagaactctggggcgaggcactttccaggatgatttacaggccaaaggttcgtgtccagcttcgtcctccgcttgttcctatctcgaggggcctctggaggcacggggttctcgaggtacagcggagatgctccgtggatgacgtcttggcagaa

SEQ ID NO: 15800 - DNA, 450 bp, Zea mays
  Coding DNA Sequence Number=SeqID_1397
aaggccttgtgcacagttgggatcctcccatagtgattcttattttctttagatgtatcacaagaggaaatggtgataataaacagatacggagagatacttgttggtgttttgcatgaagttggatctaaggaccttgtagtgttgtgtcacagatttagatcatcaaaggaaggtagaattatgttaagtctcgctgatgcattaacatcagaaaatgtcagcatatgtgttttgattattctggtaatggagaaagcgaaggtacttttggataaggctactataacgaagtggacgttttatgtgatgcgatcctgcatttcaaaaacacaaacgtgacgcccatgctattgctggccacagtaaaggagaaaatgtggttatcctttatacatccatgtatcacgaattcacggtatatctaaagctattaacctttctggaagg

SEQ ID NO: 15801 - DNA, 473 bp, Zea mays
  misc_feature (402)..(402): n is a, c, g, or t
  Coding DNA Sequence Number=SeqID_1398
ggtcagcgtgccgtcgcggaacttcctgcgccagggggtgcccaccggcggcgtgatggacatggaccagaccggctcgaacctgttcctgccgacgatcgtcttcgcctcggttaccgacccgctggacacctccaccccgccggtggccggagtggacctgggctcgaccccggccgacgacgcggccaagttcttctacccggtctcggcctcaaccaacgacccgaacgccaccgcagactctttctacgactcctcgcccacgccgtccccggctccgaccaacgagaccgtgcccggcacccgacttccgtccggctacgtcgtccagccgtccggcggcgtcaaccgtccgttctatgaggaggtgactaccctgagtacgcttatttaccagcnccgcgtgatggcgatgatctcgatcagcgacgccaacggcaacaacgagcgtgtcatcgacatctccgagg

SEQ ID NO: 15802 - DNA, 586 bp, Zea mays
  Coding DNA Sequence Number=SeqID_1399
tgcaggcgatcaaacctggcctgatggactcactcagtatgatttttaccggccacacgctggccggtgacaccatgcagcagttgcagctgggagtggatggcgtgagccaggccacgccgctcgatacctttaaaaccggcctgcgcgccggacacagcgccgaacagctggtggcccagccgatttacggcggcgtactggccggcctcggctggcagtgggtcaatctcggctatctgctcggcggcatgctgctgctggcgaagaacgccattcgctggcatatcccgttcagctttctgctgtcgctggcgctgtgcgccacgctcggctggctgttcgcgccgcagtcgctgaactcaccgctggtgcatctgttctccggggcgaccatgctcggtgcgttctttattgccaccgatccggtcaccgcgtccaccaccaaccgtggccggctgatttacggtgcgctgattggcctgctggtgtggctgattcgcagcttcggtggctatccggatggcgtcgccttcgcggtgctgctcgccaacatctgcgtgccgctgattgactactacacgca

SEQ ID NO: 15803 - DNA, 167 bp, Zea mays
  Coding DNA Sequence Number=SeqID_1400
atgggccttttgctcgcccaccggggagggagggcggccgcaaacggcacctgcgacggacccggctggacgaacacgacggagactatggcggctaccccgcaggccacccgcaagcacaacaaggggggcccgggccgccggcaggacccataacccaactctca

SEQ ID NO: 15804 - DNA, 497 bp, Zea mays
  Coding DNA Sequence Number=SeqID_1401
ggatgaagtccgcaacttcccggtacagcgctggcgtaaaaacctggtgctggcgtgcggttcgctgctggtgctggtgatgctggtgagctggattccgctcagcatgccgatcaaacttagcctcgcctggttaaaagggactgagagcgtggaagtgaacagcgtcgataaactcactgccctgccgctgcacattggcgatagcctgaaagtgagcggcaccggcatgtgctcggttccgggcaattaccagagcaaccgcagctacggctacatgccgttcgactgctcggcgatttactggaacaacgctgcgccgctgccgctgccgcagtccgacatcatcgacaaagcctccgcgctgctggagaccaccacgcagcagctgcatccggaaaccaacaccgacccgaaacttaacccgcagctggcgtcggcgattcagaaatcaggcatgatcctgctggatgatttctccgatctggtgttgaaaa

SEQ ID NO: 15805 - DNA, 213 bp, Zea mays
  Coding DNA Sequence Number=SeqID_1402
gaaacagcacttatttgcaaccgggatacagatcaagtaccacattggtagcaacacagggggaaccatcgggagccatccaagggaacatagcattatacagggggtccaggcctaacgaggcaaaaaggagatctagttccaaaacaaaagaccgcctatgccggcacaaatcccaaaactggttagcttaggaaattcagatctcccggg

SEQ ID NO: 15806 - DNA, 178 bp, Zea mays
  Coding DNA Sequence Number=SeqID_1403
gacaggaaggtctccacgtcggccacagtgatgtcgtgcacgagtccgaagcgcgagtaggcgaagccgccgcccgccggtcgcacggattcctcggcgggcgggacgggcatcgagaccagcgagtcggtggcccaggaggcgttgcggtcggtcatcagttgcctcccgaggtcga

SEQ ID NO: 15807 - DNA, 338 bp, Zea mays
  Coding DNA Sequence Number=SeqID_1404
gcagtatttcatggctgttcgcggtcttgaaagacagttcaaggggttctcagtaagcatgtggcccgcgccaggtaacgaagaggagtacatgttgtttaaggcatcggccaaaggcgagacggtgccctctttcgtgttccaggacgtcattgggttaccagctgtccgcaacccagaaggattacaagtaagtaatgatgccgaaggccatagcatccgtctccctcatcatgcatgaggattggcgggccgtaataactttgtatttgcaagcacattgcctcccaagttacgcccatcaggacaacaccgcaagcgcggaagctgaattccca

SEQ ID NO: 15808 - DNA, 404 bp, Zea mays
  Coding DNA Sequence Number=SeqID_1405
ctgtccggctggcagatgactgaacgcttacagaatcatccgttaccgatggaggatgcggtacaggcttaccggttattcggcgatggcgcgcagcaggcgacgatggacattagcacccaccagacgacacagctggccagctggctgggccgctattttatcaacggtacgctgccgcccaatctggagcgctttggctatcagctcatcggcgcgcgcctgatggcgaatgagcatggcgcttcggcgctggtgctgtatcagaccgccagcggtacgcgcgttggctggtacatccgcccgcagaccgtgcggctggaaaagggatcgcgccaggcggacaacctggtggcgcaatactggagcgatcgccactataactatgcgctggtgagcccgat

SEQ ID NO: 15809 - DNA, 174 bp, Zea mays
  Coding DNA Sequence Number=SeqID_1406
tgccgaatacggtagcgagagtcctcggcgatgagctggagcctgtgtctccgcaccagcaggcgcaggagactcagtcggtggacgatcggcgcctgctgcgctcgcagtacctcgccgtaaagggccttatcagcgacgataagaatagaatggcgagtgcggactttgata

SEQ ID NO: 15810 - DNA, 483 bp, Zea mays
  Coding DNA Sequence Number=SeqID_1407
agggtcacgccagcgtccttgatcggggtcaggccttgggtttccacggcctgcggcaccacattgccgtgtgctcaggccgtgccggtcagcactgcactggcaagcagcccggcagccagcaagacaggccgtgtcgccatcttagaaacagcccgcaagcggccgaatgctgctttggtggccgcgccttactcccttggtagtagggcttgtggcgaagggccaaatgaggtgccctgcgggaattattcccggcaagggcgggacattttccgtatccggcgacgcccgtgccgtcccaccctgtgcaggccaaaacctccactgggaactgcaaccatgacaacaagaacgctacccgccctttcccctctggccccgagcgtgcgggccttgctgctggccggtagcctggccctgagcaacgcggccatagccgccaccgccccagccgcacctgccggcaggaacgtgacctgg

SEQ ID NO: 15811 - DNA, 265 bp, Zea mays
  Coding DNA Sequence Number=SeqID_1408
caggacgcggcgactaggaactctagccgggcgagctcgagcagagggccagaggcgcgcaggctgggaacacggcagggcgtacatcgcggggaagatgagtagaggaaaggagagatccgtgcgcagggaagcttcagggaggaacttgacggcggccatggcagagaaggagttcgacgaaaatgagcgcaccagccacggtgagcagaggctgcgcgcgacgggattttatccccgagctaaagcagcacggcgtgggaaa

SEQ ID NO: 15812 - DNA, 348 bp, Zea mays
  Coding DNA Sequence Number=SeqID_1409
cggataacggcatcagcggtgaagtgattgatatcgctttgcataccattaccatccgcaactgggacaatacgctgtcgcggatcccgaccaaaaatttcctgaccgaaacctacaccaactggcaggcgatgttctcttccggcgcgcggcgtatcatgcgcagctttcatctcgaccagacctcgattcgctttctcgatcagcaaatggtgcagcagatgagccagattcgcggcgtcagtgagcagctttcaatcctgatggatggccgcgatagcagcgtggtcggtgaccgctggtttgccgaaaacggcattaccaacctcacggtgttccgtcactatc

SEQ ID NO: 15813 - DNA, 255 bp, Zea mays
  Coding DNA Sequence Number=SeqID_1410
aagatggcagataaaccggcagtaaccattcactattgtacccaatgtaactggctgctgcgttcggcgtggatggcgcaggagctgctgcatacctttgccggcgatctcagcgcggtcacgctccagcccggcagcggcggcgtgttcgagattagcattgatggtcaggtaatttgggaacgcaaacaggaaggcggctttcccgatgcggcagcactgaagcagcgggtgcgcgatgtctgctggccggat

SEQ ID NO: 15814 - DNA, 171 bp, Zea mays
  Coding DNA Sequence Number=SeqID_1411
aggcacctactgctcatagcatgggccatctttgacgtgcgtgcgagtgagcgacgtgctgccctgcactgctccccggcgttggtctggtcagcgtatttatcggcggcgcccggcggtccggtagtgcagtactatatggcagcgacagccaccgatgggaacggcgcc

SEQ ID NO: 15815 - DNA, 279 bp, Zea mays
  Coding DNA Sequence Number=SeqID_1412
gcatcagggcagtgcgcgctaagctctcccagccgtggacagcaccctccctcggattccctgctcgccccagccttgggccatcgcgcagagcgccgtcgggcctcttgagcgcgctctccagtgcccaggcgtctcccctgctatatcctccccatggcgataagcatcagctccattcctacatggccatggcgcccccctgctctccccttggccgcggccctctctgcccgcgcgcaaagctgctggccagagcacggcatggccggatctctg

SEQ ID NO: 15816 - DNA, 474 bp, Zea mays
  Coding DNA Sequence Number=SeqID_1413
tcaggtttctccctaggccatcgatgccttgtcgtacgtcgtcgactaggtttgccccttttccttgcccttcttccgcattctgatgtcctccccgccaccctgcaccacctccctcagtcgccttccccattcgcaccttgtcagggatcaggttgtccacttcccagcctccctccccagtctacatcttcccctgcacacccattacaaacgagggagacaagtaccatggctttttctctcagggatcgattactggaaacgatgatcccactgattctgtcaacgacagactacccatctttcgatcgtcctttgctcgcacatgatcggcaacgggaaaccttgacctcgattttcagcaatcagcatgctaccttcccctaccttggcttgtactccggattacttcaagcccgaagcagacatagcagaccagggacttcccctatggccctaacaaatgcgtgt

SEQ ID NO: 15817 - DNA, 574 bp, Zea mays
  Coding DNA Sequence Number=SeqID_1414
aggtcaccgtgctcatggcaggcttgctcaaggacccggagatcgcccttgattcgcttgcagtatgcatgtccatatcaggatgggtgttcatggcgtcggtaggattcaacgcggctgctagcgtgagggtgagcaacgagctcggcgccgggcaccccaaggctgcatccttctccgtcaaggtcgtcacgattgtgtcgttcacggtggcgtcgactatagccgtcgtcctcatgtgcctccgcgactacctcagctacgtcttcaccaaaggggacgacgtcgcgcgcgccgtgtccgccatgaccccgctgctcgccgtcaccattgtgttcaacggaatccagcccgtcctgtctggtgtcgcggttggatgcgggtggcaatcgttcgtggcgtacgtgaacgtcgcgtgctactacggcgtcggcatccccctgggctgcgttctgggattctactttgatcttggtgccatggtaatgaagaagtcgcgtacatatcttccatttattatttacagtatacaaaaacctcacttattttatttctcttgcgtatatttcatagt

SEQ ID NO: 15818 - DNA, 458 bp, Zea mays
  Coding DNA Sequence Number=SeqID_1415
attgtgcaggctgactggctccgacgcggaggccgcgccatggagttgggagctggactccggtgaaagccatgtctatgcgcgtcaggatggccaaccgtgctacctagctaggccggtacccaaggggccctgagcattccgcaactaaagcgctggcactacgccgaggtcggctagggctggcacactcagttgttgcatagcgaggaaagcatccccgccggcgaggcattgaccttgcagttgcaacacttggtgcggcttgaccggtgtgaacaggcgccgctgatcgatgccgccaacggaggtcgtaccctggcgctgatcgaggcgatccgccaggcatcggaaactggccgggcctgtgctcccgagcacattgcctgacttgcctggtgacgataatgactgatcgaattgtctccctggcggacctgacggtactcgagctgcca

SEQ ID NO: 15819 - DNA, 461 bp, Zea mays
  Coding DNA Sequence Number=SeqID_1416
tgactattctctcagtgcatcagaccttggcaatcatttatttaactggacatgaacttctttcactgcaaactactatgtgaaatacaagcaccctgacatgcttgatcagtcatcttgcctgcaaggagacattccatgcattagaactgagggtttgccacttgctttacctgatttaaattcagctaatgtaattgtcttgaaagatgcgaccccttttgtttctatgcatggttctgatgctttgtaaccatgtcaaaccccaaggaagctaccaaacactggtgggaagtcaaatatactattggatgattctcaaaatcaaactcatgatgttgctcgatctcatgccatctctgccgatcctgaagctaccctaaaccccactaggaacacttgtggatggctataccctttgtttaccatatttttgatcactggctatctggtgagcttga

SEQ ID NO: 15820 - DNA, 462 bp, Zea mays
  Coding DNA Sequence Number=SeqID_1417
ttcgccggctcatggtggccactggccaggctgtcatcctgttctataaagcgagccgaggggaagagccggaaccctagcccagcaccgcagaggcgcagagacaggcgtcttcgtactcgcctatctccgcgactcaaagcttcttccatttcctaccgccgccgctgcagctccaccccattccgtcgacaccatgagggagtgcatctcgatccacatcggtcaagccggtatccaggtcggaggggggggctgggagctctactgcctcgagcatggcattcaggctgatgggcacatgcccggtgacaagaccattgggggtggtgatgacccgttcgcccccttcattggtggcgttgatcgccgggacgcgaaatcctcgcgctatcaagagcaggcattattgcggcggcatcggccgataagagagagggttgcgcatcatgagctgggcat

SEQ ID NO: 15821 - DNA, 414 bp, Zea mays
  Coding DNA Sequence Number=SeqID_1418
aaaaaaccacacatcggtgcacgatcgatgacgcagtgctctattatagagaaggaggccgttaacctgtccctggagaacctcaagacctaccccttgcgcaaggatggactggccaaccggacgctcaaactggtcggcggccactacaacttcgtgtcacgggagtacctcacatgggacaataagcagtcatcgcgaatgtatatatatacactacatgatgcatgttcgtattcagcatgcaggtacatacatatatatatagccggatcacccactgcaatgtgtgaatgtgcattgtgtaataagcaataccatatattctaccattctaccgctttttattttcttacgccgagcattcatgtactgtgtattttatgatgaccgccctgtgctagtcaaaagaca

SEQ ID NO: 15822 - DNA, 427 bp, Zea mays
  Coding DNA Sequence Number=SeqID_1419
acaatgacaagccacgaaacaccacccccgacagccagaggcacagacaaaaacggccccaccggcacccggcacccggaaccaaacaggctgaccaaccgcagcacccgaacaccgaacaccccacacgacacgcagaggcgaagcagacccacagcgaaggcccacggccaaaacgcacgccgaaccggccaagcccgccccggacggaccaaaccagcccagagaacaggagcagccgcggcagcatgcgacccccacgacacgcccgagcacccggcgggcacagaaagacaggaaacgcgcaaagacaggccggggaagccaagccagacaaggaagccgcgcccaaaccaaccaaatgcagaggccaggaatgttgagagcgacaaaccaggcaccccagtccggaggcaggcaacacagc

SEQ ID NO: 15823 - DNA, 204 bp, Zea mays
  Coding DNA Sequence Number=SeqID_1420
cggcgtgatagggtgcaagtgcctcttcgagctcggtgatccgcagcttccagtagtagaggatgtcaccgaggtagtggtatggcaccatcagctcgggtagaccgaccgcagcatgggcaagatggggctagagcttccagcaggtcatggtttcggcatcaatccaaatggcgcggcctgttcaagctcccggttggttgg

SEQ ID NO: 15824 - DNA, 170 bp, Zea mays
  Coding DNA Sequence Number=SeqID_1421
tattgtgttctctggcatggtccgagatttccagaataggaatgacatatttgttttcttattaaacacaaaagctgggggcttggtattaatgtgaccgctgctgatactgttatttttatgaaattgtttggaatccaacacaagccaagctagcaatggatagaaca

SEQ ID NO: 15825 - DNA, 544 bp, Zea mays
  Coding DNA Sequence Number=SeqID_1422
ggctcgcaggagacgcccacctcgtcgtcctctgccgggtgggaggcgcgcggcaggacggctcaccggatgaagagcgccagcgcgtgtggcgcggccgacgccgagctcggggagtacgtggcgtacaagggcgaggagcgcgccgcggacgccgcgacgcagaccgaggacggcggccgcggccacggccacagccacagccagaggcgcgtcctggctcccgccgcgcaggaggagctgagcagggcggagacgacgtcgccgccgacggcgtccacgagccccgagacgctggaggcgctcatcagggcggacgggcgcgttgtggcggccgtcagcggcagcggccgggccagggcgtcctccgtgctcatgcagctcatctcgtgcgggtccgtgtccgtgcgggacgcctcggtggtgccgcgcgcgcaggcgcaggcacaggcgcaccaccaccaccaccaccaccaccgcgcccgccgcccgcaccgcaaaccggcgtccgcggccgtcgacctgccgtcgtaccgcgccaaga

SEQ ID NO: 15826 - DNA, 324 bp, Zea mays
  Coding DNA Sequence Number=SeqID_1423
tcttggctttcgtcgccgctgttgtctgtctctccgtcgtcgctgtcgccttcagagcagatcgccgagtgtctccttgaggaggaaccgctcttcggtcccgcctgcaccacgagctgatcatcacgccgtcggctaggcggactgtcctcgacgtccgagactccatgcaactgcaagcgcgacagctccgcctcaagctcagcttccattcggtccatgtcacggcccccgtcaccattggaccgggacagggcgccaacctcttcatcctcgccgccagcacgggcgacggagcccttgacggcgctggcgcaatcggaa

SEQ ID NO: 15827 - DNA, 148 bp, Zea mays
  Coding DNA Sequence Number=SeqID_1424
ggactatcgggcacgcttcataacctgttatgaccgaagagtacggaacgacctggcttatccttttttagaatatgtctttgatgctgcttgggaggggctggggaagccgggctaaccgttttccttattattggggttattgtgc

SEQ ID NO: 15828 - DNA, 254 bp, Zea mays
  Coding DNA Sequence Number=SeqID_1425
ctcggcgggttcgtctctgtccccttcctcggccgcttcctcaccgtttccttcttccccgccgtggtgtcctcgggcgtggtgatcctgtcgatctttccgccggctcccgggctgcgtccgccggcgtgcgcggccgcgagccccggctgcgtgactgcgtacactacgcagctcggggtgctcttcctgggactgtcccccacagcgctccccccgggcgggctcgtgtcctgcgaaaagggctttgaaaa

SEQ ID NO: 15829 - DNA, 342 bp, Zea mays
  Coding DNA Sequence Number=SeqID_1426
atggcaaaccctagcaacgacaaagggggcggctcaccggcagcgcggacgaggaggagcaggacgaagcgagaccccagcggggacaaggtctacagcgtgccaccgcaggagttcgcggacaccgtgcagaggctcacgggcgcaggcaccagtcactcgtgccagcaccagcaggctgcgcgggcaccagtagctgccagcagcactgctcctcggcagcgctcgtcgtctgggtcgccgccagcaccagctccagcactgctactgtccgtgtcgtcgtcggcgccgagatccatgcaggaagcctacctggcgtggtgcgcctgcaacaagcgtggc

SEQ ID NO: 15830 - DNA, 293 bp, Zea mays
  Coding DNA Sequence Number=SeqID_1427
tgacgccttcatcggggtaggttacacgttggtgtcccccctcgcggagggcgccgcctggctgctggtgcgctgccaggcgttccgagtggtcgccctcgcaattgaagcggttgacctgcacgcccacgccggcgcgcacccgcgcctcggggtcgtcgaccacatcgccttccaccctgtgaccagcgcccgcctagaggacgtcaccgcgctcgccagggccgtggctccgtgacatcgtagacagtcttcaagtgccgacgtccctgttcggcgcagctcacaaagac

SEQ ID NO: 15831 - DNA, 258 bp, Zea mays
  Coding DNA Sequence Number=SeqID_1428
tcagatgcgggtgtctggccaaaccgagtggaccacgccaaccaacatctcgcacgcgcggagggcgaaagccgaaagggagggcacgagtgggcggtcgcgttggcagcgctgcgagcgcgacggtgcggggccggcgagctgcgcgcgcgaggccctggcggcgcggcggtgcgggggagggagagctgcgcgtggctgagcgcctgagcgagcagaagggagaagaagagtcgcgagtctgtcagacgggcccac

SEQ ID NO: 15832 - DNA, 572 bp, Zea mays
  Coding DNA Sequence Number=SeqID_1429
tggtgtcatcggactcgagcgacgacctcgggatacaacagatcagcaagttgtttgcatcactggggtacaatgcgatagcttcgcctgcattgctactcgtggacctcaccaactctaaggacccctccgacctcgccaccatccagcacctcgccgacacgctcgtcgacgacaacatgttcgaccgactcatccacaacctctcctggttctctatgatcggtcccgacgacgccgattccgtgcaccagatcctgggcatcctcctgcagcacagcccgccaatcaaaagcgtttcgaccagatcaatggagtcaacgccccgcttcagggacccaaagaaccccgatgaggaggagaagctcgagaacatcttccactatctctgcgacgtgctcatgcccctggagaacaaggagaagtttgtcaaggctgaaggtgttgagttcagcacgtcgtccgtgctggtgaccgaggaggacgaggttctcaatgccttgcccaacagcattatatttgttggtgtggtcgaagttgctgtacgacttgatttgtcgaccttccatgaa

SEQ ID NO: 15833 - DNA, 332 bp, Zea mays
  Coding DNA Sequence Number=SeqID_1430
gacccggggttttgcagcctcgagtgccggcaccagcccctcccgatcgaggagtggaaggaaaagtgggcgctcgccccccccccgacggcgccggggtccgacccggtggtgcccctgccgcccaacgggggggggtccgacaaaccaggcacgctcccccccgcctcctgattatgtcataagggaggggtccgaggcgatcgaagatccggttaagataacagctcgggccccgcccccccccccatcccaggcaaattatctatctttcaaaaaaaggaatatgcccagatccctcctgctatgttcatccgcgtgcccccaaaaaa

SEQ ID NO: 15834 - DNA, 109 bp, Zea mays
  Coding DNA Sequence Number=SeqID_1431
aggcaggagtgtatagtgcgcccacgcctggctgccgtgggctcgtgctgcctgctcggggccatctccgggaatacgctatacgtgaccaacttcgaggactcccgcg

SEQ ID NO: 15835 - DNA, 457 bp, Zea mays
  Coding DNA Sequence Number=SeqID_1432
ggccgagaaaactggccatcgaccgcgttaagcagctgttcggcgccgactacgccaacgtgcagccgcactccggttcgcaggccaaccaggcggtgtacttcgccctgctgcaaccgggcgacaccatcctgggcatgagcctggcccatggcggtcacctcacccacggcgccaaggtcaacctgtcgggcaagatcctcgatgccgtgcagtacggcgtgaacgacgacggcatcgtggacatggacgaggtcgagcgcctggcgctcgagcacaagccgaagatgatcgtggccggcttttccgcctattcgcaggtgatggactgggcgcgcttccgcgccattgccgacaaggtcggcgcgtatctgtttgtagacatggcgcacgtcgccggcctggtcgccgcgggcgtgtaccccagcccgctgccgcatgcgcatgtggttacctc

SEQ ID NO: 15836 - DNA, 350 bp, Zea mays
  Coding DNA Sequence Number=SeqID_1433
cagccgctgggtaaagtggcctcaagagagtgagctgtcacgtattgcgctggcgattcaagtgatcaccgcacagaaaatggaaactccggcgatgattttcgatgaagttgacgtcggtatcagtggtccgacggccgctgtcgttggccagatgctgcgccagctgggcgaatcgactcaggtgatgtgcgtaactcacctgccgcaagtggcgggctgtggtcatcagcacttcttcgtcagcaaagagaccgacggtgcgatgaccgaaacccacatgcagccgctggataagcgtgcgcgtttgcaggaactggcgcgcttgcttggcggcagcgaagtcacac

SEQ ID NO: 15837 - DNA, 278 bp, Zea mays
  Coding DNA Sequence Number=SeqID_1434
ctttgtggttctttatgttgtagcgaagttgatcaacactttggaaaagatcacctatttaagaaaagcataattcttataaaagactggtgttactatgaaagccggattcttggtgctcaccacggcctaatttccacgtatgccttggagactctagttctatacattttccatatcttccacaagtctttggatggtccattggctgtaagttatggcttaatttttctgctgcctttcctgcctatcttatatttccaatcatcatgatccct

SEQ ID NO: 15838 - DNA, 532 bp, Zea mays
  Coding DNA Sequence Number=SeqID_1435
cggcaaacctgaaggtgagcaggcaggggcggacgcgccaggaacaagagagcaggtgccagggacacgacagcagggaggagcaggaaggttgggcggccgagaaggagaagtcccagcaccatgggaagcatgggagctctggccggcgcagaagggcgacagcggccagcgccatggcgagcagaggagcagggaggaaggagctcgaagccgagctcgacattgggggcgagctcacggcggccatggcaacgggcagagggaggagcgccggcgaggtcggggaaagcagcgatgggaggacgcagacgtccacgccatggagatgcgggacttggcagaagcaaggagctaggtacacggcggtcggaaccaagaagcagggaacggagagggaccgagggaccggaatgcactggagatggccggcggccaagcagactcggcccggcagctcgacgaccagggccatggaggcgagcagggagattcactgggagaggatcatgaccggagtggatgaagccga

SEQ ID NO: 15839 - DNA, 210 bp, Zea mays
  Coding DNA Sequence Number=SeqID_1436
atcaatgatattgtccaaagccccaaagtacattgtcgaagctaggaaagggtctcgttttggacatgacacacttgttgatgtcatgcttaaggatggactttgggatgtatatacaaagactgcgccatgggaatgtgtgccaagctttgtgctaacaatgatgccctcacaagagaagaacaggccacatatcagtatttggcattt

SEQ ID NO: 15840 - DNA, 166 bp, Zea mays
  Coding DNA Sequence Number=SeqID_1437
aatgccagtatgaagattcttgcctggcatacctttcattatgtgagcgcaagtctagaggcgcatggcattcaccgtctaatcaagtccgtgagagacatccgtacatgtgggctggcaaatgtaaccgcgaccgtaattaacctccctgcatttgaggctcatg

SEQ ID NO: 15841 - DNA, 492 bp, Zea mays
  Coding DNA Sequence Number=SeqID_1438
ggtgaatttacccttcctttggctgcaaatgctgagccggttagggatttcgatgatggcttaacccgaggtctcgttcggtttcaaatcagtagatgggtgctattccaagtggggcagctccaaagctataaaacatgtccgcatacccttgctttgcattcaggcagcaaatgatccccttgctcctgagaggggtatccctcgcgatgccatcaaggcaaacccaaactgggtgttgattgtgcccccaagaggagggcccttgggatgggtggcaggtgaagaagctccccccggggctccttgggccgcccaagtggttatggggtttctgccccatgtagagaatcgtgaaccccttaccggggagggatctttcggggatgtccatgatcagattcaagtctaattctgtttgtcccttcttcccttggaggggtatgtttcccttgtcccctgttgttgggccccagaataataaccatgtaa

SEQ ID NO: 15842 - DNA, 170 bp, Zea mays
  Coding DNA Sequence Number=SeqID_1439
tatctcatccccaccaaatctggcactgcttgggacatctacggtggcagcagcagctgatccagaaggggacatgacagaggtcgatctgagggagcagcaggatggagggaaggagtggaggccgaggcagggtcccactgagggcaggctgcgcacacaagcaaaag

SEQ ID NO: 15843 - DNA, 550 bp, Zea mays
  Coding DNA Sequence Number=SeqID_1440
gcggcagcacattcccgcgcagacgtccatggcgcctagggctacgcctggggcgctgtctgcggccagagagttgctacgccaccctccaagctccacggcctcgctgggggccatgaagcagtgacacgacgacgtcgaccgcctgctcggcatggcgcactccggctcaaccaggtccaggcctcggtcgttccggcgtcaacatgaggcatcagcgtcagtgcgctcaccatcggtgagagccgcaccgactgaagatctgtgggcggaactcaaccacaggcgtgagggtgatgatgcccgcgtctctctggagagggcacgtgagcgccggcagaacgtcgaggtcgcaacctcaactacgacttcgctgcggtcgcaccacaaaccccaatgggcgcccagatccaagcgggtgtcccattggccggcgtgggctgcgccgcactagcggatcatctccgcgcaacaacctaggccatccaagttccggccacacctaccggagaagtccccggtacgacaaatccatcagaattattgcagg

SEQ ID NO: 15844 - DNA, 418 bp, Zea mays
  Coding DNA Sequence Number=SeqID_1441
gggcggcggacgacaccaccacgaaggagctggcggctgcaaccgcagcgccgtccgccagcccgatgggcggcgtcgggcattgccgccgcagctgccgagccttcccccgcgacggtgctgagctgggcggagtgttccgtcgacctcaagctcggcgggctaggtacccgagaatcagaggctccttgtatgacggcgacggcggcgcgcaggcccaggagcagcccccggccccggggacctgcgacctgtacaagggccgctgggtgtacgacgagtcccgcgcgccgctgtacaaggagtccgactgcagcttcctcacggagcaggtcacctgtatgcgcaacggccgacgcgacgacgactaccagaagtggcgctggcagcccgacggctgcgatctccccaggtacca

SEQ ID NO: 15845 - DNA, 203 bp, Zea mays
  Coding DNA Sequence Number=SeqID_1442
ggcatggtttttacaaaatcctctgatgaggtcccagagctgcacccccaattgcttgtgctgttgcactattcttcaacatcagatgccaacatgcccccggacgagttaccttcgcgcaaagcctctgtatctggtggctatccctctaaccttaccagatcccatgtatccttccgataaagcctcggcgcccgaatggc

SEQ ID NO: 15846 - DNA, 386 bp, Zea mays
  Coding DNA Sequence Number=SeqID_1443
gattaagcatctcggttaaccggacagcgatggatatgccttcatgctcgaaaatcgggagctgagccaaatgcctttatttgtactcgacggacgctgtgacgcacgtgataaaatataggcgctgaatgccgttgctgacgactatctgactaagccgattggcatctaagaactgatggcgcgcgtgctcgtggcgctgattcaacataagcgcagccagccggaaccgctggtgaaggattggcgaagtgagcggttatttcgccgcgcggcgcatggctgtgcagctggacaaggaggtgcatttgacacctaccgaatttcgcctgctcagactgctgctgaataacaccagcaaaatgctgagccaacaccagttgctt

SEQ ID NO: 15847 - DNA, 544 bp, Zea mays
  Coding DNA Sequence Number=SeqID_1444
agcgccttcgtcatggaaagcctcatggacgaactcgcgcacgccgccggccaggatccacttgagtaccgccgcgcgctgctcaagaaccatccgcgccatctcgccgcgctcaacctcgccgcggaaaaggccggctggggcgatgccctgcccgcgggccgcttccgcggcattgccgtgcatgaatcgttcggcagctatgtcgcgcacgtcgccgaagtgtcggtcgaccagggccaggtgaaagtgcatcgcgtcgtttgcgccatcgactgcggcctcgtcgtcaatcccgaatcgctggtggcgcagatggaatccggcatcgccttcggcctcggcgcggcactacagagcgagatcacgttccaggacggtcgcgtgcaacagtccaacttccacgactaccaggtactgcgcatgaaccagatgccggtggtcgaggtgcacatcgtgccgagcacggaaaagatgggcggcgccggcgaaccaggcctgccaccggtcgcgccggcggtggccaatgcggtattcgccgcca

SEQ ID NO: 15848 - DNA, 180 bp, Zea mays
  Coding DNA Sequence Number=SeqID_1445
gcaagcactaggaaagtcgctacccccagataaatgtttcatgtgctgatcgaaattttgcctataagttcactgatgagatgtatgatccttgggtcatgaaactgttcctgggatttgctcgtacttccgagttcaatggtcctagacaaccagttgctcttcatcctttgatacaag

SEQ ID NO: 15849 - DNA, 140 bp, Zea mays
  Coding DNA Sequence Number=SeqID_1446
agaaccccagattttatagcgacgcttcaaaactgccgttcatgcaaagggcattggtcagaacattctcgagctgcatgcacattacatgctctggaatgtgtgtaccgttcatttcatggcgcttttgttgtcacgaa

SEQ ID NO: 15850 - DNA, 401 bp, Zea mays
  Coding DNA Sequence Number=SeqID_1447
gcgtgcgcagcgtcagactgaaattgattacattaccggctacctgctgcggcgcgcccgcgcgcaggggattgcgctgccggaaaatacccgcctgtacgacctgattaaacgcaaggatgaagagaccgaagcagtcaccaccattgacctgctggtccgcgccggcctgaaggtgaccaccgccagcgtggagagcgacggcacgcgcgagattgtctgctcccgcggcgtacgcctgctggctgacgcaccgctggttgaagtggcggataacgattttgccgccatcgtcctgccgggcggcctcaaaggcgctgaaaccttccgcgacagcccgctgctggtggagacggtacgccagtgtcatctgttaggcaaaaattgtgggcggcgattct

SEQ ID NO: 15851 - DNA, 482 bp, Zea mays
  Coding DNA Sequence Number=SeqID_1448
tgggcttacggtctgtacgccttcgcaccgggccgcgccagtggcgatgagcgtctggtggcgggcgaaggggatcagttctgggattaccgcctgcaaaacattctgctggcggaaggggataaccgcgaaccttatctgccggagccggagcctgaaccgcagccggagcctgaaccgcaacccgatccagaaccacagccggaaccggaaaatccgcaggtgccgcagccagagccaaaaccggagccgggcaaggtgcgcgcggcggtgattccgcaggtgccggcctacatctcgctgcccgccgccttccacagcgtgacacacaacctgcaagcgctgttcagcagcagcgcgcagcaggcgggcgcagaggggcgtccggatctgtttgtgtccggctacaccggtgacgaccgctatcacagcgcgggcggctttatggattacggctacgatttccacagccgctatcaggg

SEQ ID NO: 15852 - DNA, 534 bp, Zea mays
  Coding DNA Sequence Number=SeqID_1449
tactcccttttcgatggtcaacgcgacatccttatcctgattgcccgcgtgctgctggtgatcctgttcgtcttgtctggctgggggcaagctgaccgggttcgaaggcacggtcggctacatgacttcactgggcgcccctgcccccatgctggcagcggcagttgccgtgctcatggagttcgtcgtcggcatcctgctgatcctcggtttctacacccgaccgctggccttcctgcttgcgcttttcgtactgggtacggcgctgctgggccacccgttctggaacatggtcgaccctgagcgcagcgccaacatgacccagttcctgaaaaacctcagcatcatgggtggcctgctgatgctggcagtgagcggcccagggctcatcgaaccaggctgggtgatcgcgctcctcgtcatcgagatcatccagcgtttcctcgtcctcctcgacctcatcctcggcgccctgggcatccgcttctggctccgaatcgtcgtagaggaattcgtggtcaagcaggtgatcgt

SEQ ID NO: 15853 - DNA, 272 bp, Zea mays
  Coding DNA Sequence Number=SeqID_1450
gcagttataggccttagagcccacagagccgtacctgcctgtacacaactatggatggatcttcagctgtcaaatcatatgcttggtggccgatacaaatgaccatagcgtatctattcacaaagagctcagcggaaacttgaccacctacccaatcaacgacggtattgtcaatataagtgcacgcacggatcagttctatatgaaggagatacatgtgtatgtccagacacggccagctgcccagttcagcctggccaagatggaacaga

SEQ ID NO: 15854 - DNA, 259 bp, Zea mays
  Coding DNA Sequence Number=SeqID_1451
cccgcactcggtggtgactactttttttttcggacgggcacctttgtcagtctcctgtgactcgatcagccttacaaatccatccctcccggggtggccaacttcccagccgccagccacccctctgctctctcctccatccgcgccgcatcaccgtgtcgcccctggatccgcgccgccggtcctcctcagccacgacaccgaacgtcgccgacgctctcctctcccgctcccccgcgccgctcgattccggcaggga

SEQ ID NO: 15855 - DNA, 381 bp, Zea mays
  Coding DNA Sequence Number=SeqID_1452
tgtgctcggcgctttggttgctgtccgcgttcgggctcgcgtcgccggcggactcctccctgccggaatcgagcggcgcgggggagcgggagaggagagcgtcggcgacgttcggtgtcgtggctgaggaggaccggcggcgcggatccaggggcgacacggtgatgcggcgcggatggaggagagagcagaggggtggctggcggctgggaagttggccaccccgggagggatggatttgtaaggctgatcgagtcacaggagactgacaaaggtgcccgtccgaaaaaaaaagtagtcaccaccgagtgcggggagcttccagtggtctaagcgttactcatctgttgcccgtttcccttctgacggatgaggaaaccc

SEQ ID NO: 15856 - DNA, 441 bp, Zea mays
  Coding DNA Sequence Number=SeqID_1453
gccacgcttaatgtactgggccgatccacgctggccggcgacatcaacctgagcggcaccgcttccagcctgattgccgatatcgcgcagtacgtcagcacgctgggcgagctggcttccaccatcagcgccaatatcagtggccagggcagcgtgattaaaagcggtgacgggcggctgacgctgagcggtgacgtcagcaaccagcaaggcgtggaggtgcagcagggcgagctggaagtgagcggcaagctgcacacgccgctgaacatggccgccggcacgctgctctccggcggcggcgtcatcaatcatgccagcctcgccgataacgtcacgctggcaccgggctggaacaatgcgccggacagctggtcgaccatgcgccttggcgatctgcaccacgggcgctacacggcgctggtgctgaactccgcgttc

SEQ ID NO: 15857 - DNA, 593 bp, Zea mays
  Coding DNA Sequence Number=SeqID_1454
gcagttctggaacgtcatcagcgcgccgcgggtgattgccgcgctcaagctgagtttcggcaccgccctgttcgccgccatcatcaacggtgtgatcggtaccctgctggcatgggtgctggtgcgctacaccttccctgggcgcaagatcatcgatgcgatgatcgacctgccgttcgccctgcccacggccgtagccggtatcgccctgaccgccctgtacgcaccctcgggctgggttggccagttcgccaccgacctgggcttcaagatcgcctacaccccgctgggtatcaccctggcgctgaccttcgtcaccctgccgttcgtggtgcggacggtgcagccggtactggccgacattccgcgtgaagtggaggaggccgccgcctgcctgggcgccaagccgctgcaagtgttccgccacgtgctggcgccagcgttgctgcctgcctggctgacaggctttgccctggccttcgcccgtggcgtgggcgagtatggttcggtgatcttcattgccggcaacatgccgatgaagaccgagatcttgccgctgctgatcatggtcaagctcgaccagtacgactaca

SEQ ID NO: 15858 - DNA, 349 bp, Zea mays
  Coding DNA Sequence Number=SeqID_1455
tcaggtctacagagataacgaggatctccgcttgatacttcctgaggaagaggatgctgacatggccaacggcgagatggtgctcatgatcatagacactgtggtcgtcgtcgcgcgccacaggacgagggtcgtcgctgacgtgctgctgcacgacgtcgtggcgtcgtgccggcaagtgctggagcctcacgggcccatctggggcatgatggtgatgacgtgtgcgtccatgacaggccctagcgagtgcgggagtagggtggtgatggacggaacctggccagtggccacaaccacgagcaagagcaccggggccatggagtccgcactagccatcgtggagaag

SEQ ID NO: 15859 - DNA, 329 bp, Zea mays
  Coding DNA Sequence Number=SeqID_1456
gacgggcctcactgtcctggccaaggggtcgatcaacgcaacctgcaacgcgacgttcaacggcacgatctcctcgacgggcatcgtcaacatcacgtcgacgacgtttacgggcgccgcgacgtgcggcctgatcagcggcagcgcgaccagcgcatcgccttggacgggccaggccgacagtacgacgcagctgtcgatcaacaacgcgaaggtgaccgtttcgctgctcggcgcctgcgggccgagcaaggtcgtgacgacgtggagcgatccgaactcgtcactgacgttcaacaacgcggtgctgacaccggactgcacggtca

SEQ ID NO: 15860 - DNA, 171 bp, Zea mays
  Coding DNA Sequence Number=SeqID_1457
taccctgtgttcatgttgaaggttctaaaagtgcctgagctagggaatggaaatgaggaattgtggacttttgttatatatgcaggagaagaccacacaaacacacaaactcttgtggcctttcttggacttcttagtactttggtatgcattatagatactgctcttttc

SEQ ID NO: 15861 - DNA, 518 bp, Zea mays
  Coding DNA Sequence Number=SeqID_1458
ttcactatggatagcgaccgctggattacggaaggtctgcgcctctacttttccgggcagatgataagctgcctgacgctcacctcgccggatgacccgatccctaccggacgcgggcgtaacgtggtgatcagcgaactgcattttgccagtaaaaatctggaagagacgctgcgtagtctgctgctgatacagctcaaaacaccgggcgtcgagctggtgattctcaccgacatcagcgatgaagccgtgctgaattacgtggcccgccacctgaaaaaagcgcggatgctgagtaaaaaatgcccgctggcgacactggtcagtgcggtgctgacgccggaaaacgttgccgccgtcgccgcaccgcacggcaacgccgatgtgctgaccgagcgcgagttcacgctgctgcgctggctggcgggtccgcgccgcatgacggagatcgggcatgcgctgcacctcagcaataagaccatcagccactacaagaacaccatctcacgcaagctggg

SEQ ID NO: 15862 - DNA, 515 bp, Zea mays
  Coding DNA Sequence Number=SeqID_1459
aaaaatgatgggtcctcccatgggcccccgtttattttgtccttgtgcccgtatacttcgatctgttaaaatctattggttgtgtgccctgtgtctgttgtttgggtatctatactgttattttgagacatggttgacttgaaaaaaaaaaaaaaaaaaaaaaaaaaaaaaaaaaaaaaaagaaaaaaaaaaaaaaaaaaaaaaaaaaaaaaaaaaaaaaaaaaaaaaaaaaagaaaaaaaaaaaaaaaaataaaaaaaaaaaactaaaggaaaaaaaaaaaaaaacaaaaaataggggtcctcttggcccgaacccgtttggggggaaaaatagaaatccgggggcggtttcaataggatcccagccggaaccaaatgtgggaaaaactgggggacataattgatcccgggaaaaaaattaattgcgtaaagttccccgcccattttcaagggggaaaaaaaatgggaaaccctggggggcccaatggggcaacccaccccaaataattgggtg

SEQ ID NO: 15863 - DNA, 159 bp, Zea mays
  Coding DNA Sequence Number=SeqID_1460
gtcatgtttataagttcccccaaaggaaaaaaatagcaaacataaatctgggaagaagaggcgggggggcaagatgcagagctcccttcagtccaaacagcggtcaacgaaggggacgaggcagctcctcgggcatgcaaaccacaagcccatctcaag

SEQ ID NO: 15864 - DNA, 160 bp, Zea mays
  Coding DNA Sequence Number=SeqID_1461
tgcagtgtatacttgttacacttctgttctgtcacaaatgatctgggatgatgctagttagctcctattcatgtctgatcgcagttgaagcggaaagatcagaagacccttgaaaaattgagggctgagagaaaagccaagaacggatgagcttaaagag

SEQ ID NO: 15865 - DNA, 136 bp, Zea mays
  Coding DNA Sequence Number=SeqID_1462
gggtataaaggaatctgctctcttcatatacccatattgctggatagtaatactcattcatatacttactatacgtttttccgagcgcgggaaggactttttaacaggcatctttccgaaacaccttgcagttcta

SEQ ID NO: 15866 - DNA, 190 bp, Zea mays
  Coding DNA Sequence Number=SeqID_1463
gcacatcaagaatctccgagcagggccccattcagttgttcccactcctttaccataccatactccatagcccatacacaggggcacgtagggcccagcaccaacccgggccgaccgtactcctaagcccgcgtccccctccgccattggaaagctcccccaaaaggcgaggatgcatgacaaagctaat

SEQ ID NO: 15867 - DNA, 421 bp, Zea mays
  Coding DNA Sequence Number=SeqID_1464
taagcagttggtcagccaaggccatgtgttagatgtttttgcatctgctctcgatcaggttggactagctgagatgaaggttgctattgagagaacaggtggccttgttgtcttatctgaaagttttggacattcagtattcaaggattctttcaaacgcatttttgagggaggtgaacagtctctaggcctttcattcaatggtacaattgaaataaactattcgaaagatattaaagtccaaggtattattggaccatgcacatctttggagaagaaaggagccgtgtgtgctgacacaattgttggtcaaggaaatacaacagcatggaaaatgtgtgggctcgatagaaatacttctctgacagtattttttgatgtctcaccgagtgaacggtcgagccaaccaggacaccaaaat

SEQ ID NO: 15868 - DNA, 557 bp, Zea mays
  Coding DNA Sequence Number=SeqID_1465
gatagcctaaagagcgtttcccgctggcgtggcgcaatctgtatcagcaatacaccagcgataagggcatcacgtcaagctactccatggcgatttcccgccaggagagcgcgtggaacctgaaagcgcgctcaccggttggcgccagtggcctaatgcaggtaataccgggcaccgccagccataccgtgaaaatgtacaacactccgggttacgttaacagcagtcagctgctcgatccgcagaccaatattcagattggtacgcagtatctggagtatgtgtatcagcagtttggtcagaaccgcatcttgtcttctgccgcatataatgccggcccggggcgggtgagcagctggttgaataccagcggcggcaaactggatgcggtggcgtttatcgaaaccattcccttctcggaaacccgtggctacgtgaaaaacgtgctggcctacgatgcctattaccgctacttcatgggcaagccggataagattctcgccgacggcgagtggaatcgccgtaacagactgtgttatgcttcagtactcgttaat

SEQ ID NO: 15869 - DNA, 308 bp, Zea mays
  Coding DNA Sequence Number=SeqID_1466
ttttttcaccccatcataattcataatccattacttgcccttgcagaaaacacagcttctaccctacccatagccatgcaaggcaaggcaactggggggggggcgttgactccatggaaagctgccttaaaacatgtagctccatgggacactagtagtatagtacaataactaactaatactagggggaatcaattaatccttaaggcttatttataccgggaccgattcctgatcacgtaggtggcagctgtaattaatcggtaagtggtgaggggatggacgatgatcacgggaggcttgctttt

SEQ ID NO: 15870 - DNA, 387 bp, Zea mays
  Coding DNA Sequence Number=SeqID_1467
ggcaggtgaagtcggtctccagctgcttcttgggcttcgccgtcagcttattggaggtcctcgacttcctcttccccatcgctaactcgctggtgctggtggtggtggtgctgctgctggtgatgacgacgacgacggatctcgagcgacgatggactcgagagggtgaagcgcagcgcgctgcagatggtgcgtgcgatgaagggtcccacgtgtccaaacaaatcccatctggaatccacggtggagagcgtcaaggactccatcccatcgacgccgttcgtgcagagctatccaaggtctccaagttactggagcgaggcgcgctcgaggacggttggcaccagatcagcatcctcggctctcaacagatcagcatccaatggg

SEQ ID NO: 15871 - DNA, 194 bp, Zea mays
  Coding DNA Sequence Number=SeqID_1468
tgccgactctcgcagagatgacgctggatgagtttctggtcagggccaaagtcatagccaaagaggcagtggaggagagactgagctgcatgaagttgatgcacatggtgtagaccaagagctcaagaaccatctcctgaagaaatacagtggctatctaagctcgctcaagcaagaactatcaaagaaggaag

SEQ ID NO: 15872 - DNA, 285 bp, Zea mays
  Coding DNA Sequence Number=SeqID_1469
gggtgactcttgtaacacgccacgccagccgtcagaagcgcacgacacggccggaccagcaaccccggcgagtgtcggtcgggcactcgggcatgtcagaactcctgcctacagctagccttcctgacgagtacgagcacgattgctccgtggaattcccgcgggcccaggaggggttccgatccctgccgtccgtcccacgcgcccccctacttcgcctgcaggtcacgggtccctggatccgcagcgatgcggacaaggctgcggtggaaggcacgagaacat

SEQ ID NO: 15873 - DNA, 488 bp, Zea mays
  Coding DNA Sequence Number=SeqID_1470
tgtgctgcgacctgattggcttccagaccgggcaggatatgaataactttctgctgtggctggagagcgagtttcgcgctgaacgcttaggcaggaaccgtctgcgcgtgcacggtcacattatcactaccggcgtgtttccggtcgggatcgatctggctgaggttcaggcgttacttgagagcaacagctgccagtatatggagcagcagagccgcgaacatttgccggccaacacggtgctgagcggtggtcatctcgatgacagcgcaggtctgccgtatcgcatcagcgcgctggaagtgctgctgcgccatcatcccgactatgcgggcaacatgatgttattgcagctggcttctgctgccagcggacacccgcaccggcagcaggcgatcagccacaatctggaaaatctgtgcggtgaggttaatggcgtgcatggtatgctcaactggtatccggtcagctatctcaaccacgattat

SEQ ID NO: 15874 - DNA, 164 bp, Zea mays
  Coding DNA Sequence Number=SeqID_1471
tgccgactctcgcagagatgacgctggatgagtttctggtcagggccaaaaaccctgctaatgtttcaggtactgatgggaaagcatcatgcatggcagcttatatggtctgcaacaacattttcaactccatcatgaagcttgttgggacatgccctgctgta

SEQ ID NO: 15875 - DNA, 254 bp, Zea mays
  Coding DNA Sequence Number=SeqID_1472
tagatcatagaacccgagcgcacatatggttcaagtaagtaagacatgtggtagaagtaaaatccagcgcactatggtcgcgaacttcctgacgaaggacgtcagtaagaattcgaatccaggagagcgcctagagcggcggtccacacaaaaagtccacggcgccccctcggagacggtggagtcccccgccggatcacaagaacgagttgcccaccacgcaggtcaccctggccccgaaatcagaagcgcgg

SEQ ID NO: 15876 - DNA, 321 bp, Zea mays
  Coding DNA Sequence Number=SeqID_1473
gagcgagaaaattcctgtaggtatcagtgcctgcctgctcggggatagcgtccgattcgatggcggccacaagcgttttgcctttgcaactgacgagctcgcgccatttgtgcgcttcgaacctgtctgcccggaaatggccatcggtctgccgacgccgcgcccggcgctgcggctggtcaaacagagcgacgatcagatccacctgtgtttcagtaaagacggcggggaagagctgaccgacgacatggcccgctggtctgcggagcgcgttaaatcgctgcaccatctgtgcggctacatcctgtgtgccaaatcgaa

SEQ ID NO: 15877 - DNA, 256 bp, Zea mays
  Coding DNA Sequence Number=SeqID_1474
tccctttgtggaatgagtatggcagctggggcttgctcatactgggttcaagctccatgtccggtttaccgctggtctgtgcaatgctgagactgctaggagagcgaccgtgctttggatatggagccttggctaaaggtagcaacgggctgtttcaccctggtggggcgccatatattacgtaaccggggatgtttttgctctccgttctgagcgtatcagcatggacaggtagctaccccgtgcctccataatg

SEQ ID NO: 15878 - DNA, 596 bp, Zea mays
  Coding DNA Sequence Number=SeqID_1475
agcggaatcgttgtgaccattgcctgcctgcataccgccgccagtaatattgctatttttgatgacgccgcgcagtcgctcggcattccgcctcagcaaatcagccatctggtgatgccacatctgctggcagaagcagagctcagcggtggcatgacgccggcccagcagcagcgtctggagcagctgttactcagcctgacgccgtggttcgacgcgatactgattacctgctctaccttaggtgccgcagcagacagcttgcgcgatccacaacagcgctgtgcggtttatcgcactgaccgtatgctggcggacgaagtgcatcgccgtggcgcacccgcgctggtgctgtgtgccgcggagtctacgctgcacagtacgcgccagctgttttgcccggagagtctggcacctgaccagcgtccgcaagtcaggcttatcccggatgcctgggccgcattcaaagctggccggctggacgactattacacgctgatcgccgatgccgtcactgagggacagcagcagggcggggttcaggtggcgttagcgcaggtgtcgctggccggggccgaatggattgtcctgtgcca

SEQ ID NO: 15879 - DNA, 371 bp, Zea mays
  Coding DNA Sequence Number=SeqID_1476
agtacaaggctcgagcttattgagaaaactatagatgctgcgaatcattgctgtgacaccaagccatgatggagaactaatacgagtgactgtgccaccattgacatctgatctcagacaggaattatccgagacacccgccgggtctgcccggcgatggcgaggttgctataaggaacataagaagagatgcactcaaagcttacgataaactacagaaggaacagaagctttctgaggacaatgtgaaagatttgtcagctgacctacaaaaagtcacggacgagtacatgaaaaagatcgattccatccagaagcagaaggaacaggaactgatgaaaatctagatcttcaacaagctgagctgactg

SEQ ID NO: 15880 - DNA, 98 bp, Zea mays
  Coding DNA Sequence Number=SeqID_1477
ccgcagcgcgcgactcaactagagtctatttggtttcgtacctaagacgctacactctatctaaacatctagaagaggggggttgctcacatgccaaa

SEQ ID NO: 15881 - DNA, 342 bp, Zea mays
  Coding DNA Sequence Number=SeqID_1478
gaagcaggttcccatatattttggatttgaggtccttagtgcttcggcaatattttcaggcaaaaaaaaataatgttccttttttgcaaccggtggaagatatcattaggaataaaggaggtactggccgaaatggaaaattggctgcggaggttaattaattttacattgaataagggcccagatccttgatccagtttccagccatggcagaatttaatgccggactggacggcaaggggtcaaggggaaaaaacgaaataaaaagcccaagccagggcaattgtttggtaagggttcttggggacctttggaaccaaccaccagctctggtttgggttt

SEQ ID NO: 15882 - DNA, 478 bp, Zea mays
  Coding DNA Sequence Number=SeqID_1479
tatttcagttcccttgatcttctattagagcgtttatgcttagagggtacacggaggcaggctaaatactctgttcatgcacttgctgccattacaaaagatgatggtcttatgtcactatctgttctttacaagaggcttgtggatttgttggaagagaagaaagtgaatataccatctatcttgcaatctttgggttgtatagcccagatagcgatgccaatttttgaaacccgaaaagaagagataataagtttcataactaaaaaaattcttgagtgcaacgatgttcgaaattcttctaataaatctgaatggggtgatagcacagagaattgtttgctaaagatttatggcatcaaaacattggtgaagagctatctaccttgcaaagatgctcatgcacagccaggaatagagaagttaattgatattctgaagaatattcttacttacggtgacgtatctccaaatatgg

SEQ ID NO: 15883 - DNA, 298 bp, Zea mays
  Coding DNA Sequence Number=SeqID_1480
gggtctcaaccaccacggtttcgcatgtcatcaacaaaacgcgttttgtcgcggaagagacgcgtaacgccgtatgggaagcgattaaagcgttgcactactcaccgagcgcggtggcccgcagcctgaaggtgaatcacaccaagacgctgggcctgctggcgacctccagcgaagcgccctacttcgccgaaattattgaagccgtggaaaatcactgctttgagcgtggttacacgctaattctcggcaacgcgcacaacgatctgcaaaaacagagagcctatttgtcaatgat

SEQ ID NO: 15884 - DNA, 288 bp, Zea mays
  Coding DNA Sequence Number=SeqID_1481
tcgacctgcagtggtttagtgtggtacgcctacaaagatctggtgaagtttaaatttccccgcaccgccaatgagatgtatcacctgcgcgacgccgcgccgatcaagcgcgagatgctggagaaaggcgatctggtgttcttccgcatcaacaaccgcggcaccgccgaccatgtcggggtttatctgggcaatggtaaattcattcagtctccgcgcaccggtaaggacattcagattagcgcgctgggcgaggattactggcagaagcattacgttggcgcacgc

SEQ ID NO: 15885 - DNA, 467 bp, Zea mays
  Coding DNA Sequence Number=SeqID_1482
cgagtgcatcagaagaggccatcaagcaggtctttgcgttccaagggcctttgcgtcagatcactgtccttctgccatggccctgtggatgcgcctcctgcccctgctggcgctgctggccctctggggacctgacccagccgcagcctttgtgaaccaacacctgtgcggctcacacctggtggaagctctctacctagtgtgcggggaacgaggcttcttctacacacccaagacccgccgggaggcagaggacctgcaggtggggcaggtggagctgggcgggggccctggtgcaggcagcctgcagcccttggccctggaggggtccctgcagaagcgtggcattgtgcaacagatgctgtaccagcatctgctccctctaccagctggagaactactgcaactagacgcagcccgcaggcagccccacacccgccgcctcctgcaccgagagagatggaata

SEQ ID NO: 15886 - DNA, 152 bp, Zea mays
  Coding DNA Sequence Number=SeqID_1483
gccctctcgccagcttcatcgcctccctcgccataaccacccatgccgcacctcacccagcaactgtcaccacagatcatggggggaccggcgcataaaccccacgcggtcaccccctgctcacccctcatttcactacacgtccccttccc

SEQ ID NO: 15887 - DNA, 418 bp, Zea mays
  Coding DNA Sequence Number=SeqID_1484
actggatcatcgctcaggcgcatgggcgtggatgacggcgtagatgactgtcacagcggccggattcaccgtattgacgaataggcgatccatcgacagctggataacaatgccattgagctgctgggtaccggtggcgcgtcttgtgtgaccaggcgaaagcttgaacctgacctcgaaagaggtggcgacgcagctggcgatcaagctgaaagccgagaagatgatctgtttctgctccgaacagggcgtaaccgatcgcgaaggctccatcatttacgagctgatcccgaccgaggcgcaaactcgtattgatgaaatggagagcgacggtgatcttctgttcggtaccgtgcagctttctgagtggtacgagtaaagcctgccgtagaggagtgcgccgcaaacatctgattag

SEQ ID NO: 15888 - DNA, 549 bp, Zea mays
  Coding DNA Sequence Number=SeqID_1485
aaatctcactggtattccggttctctgcgccagagcaggaatgcctgcggaagattcacgcggtcccattacaagccaccgaggccgagcttctgccgttacagcactggccagtggtaccgggggcatgtctttacatgagctgatgcagtggtcaggtcactcatacgcacagtcgacaatgcattatatccgcatgacgtccgactcagctggcagcatcgttcgtaaaagcagacagggtcgctcatatgatcagcgtgctgattgaccaccatccggaagccgcgagtctgaccgggccctcaacgtactatgatctgggtgactcatactgcacgaaccccttctggagcagctgtcagcaccggatggcctgcatcggttgcgattttaacctgctcaaacagagcgcgcgcggactgatactggaaagcaaagcctctgtcagacgttaccttgaggaagttccgctcacacccgatgagagagccatcgtggaacaggacgcagagaaaattgaacaggctcttaaaaggttgtccctca

SEQ ID NO: 15889 - DNA, 290 bp, Zea mays
  Coding DNA Sequence Number=SeqID_1486
gcgtattccgcatcagggcaaagtgcgcggcgtgtgtgccgggctggccgagtacctggacattccggtgcggctgctgcgtgtgattgtggtgctgtcactgtttttcggtctgtttatgttcaccgtgaccgcctattttattcttggctacgtgctggatgaaaaaccgctggatgcaccctctgagcgcacaccaacggcgcgcgaactgctggatgagctggagagcacgctcaccgcggatgagcgtaacgtacgcgatatcgagcgttacgtgacctcagaaa

SEQ ID NO: 15890 - DNA, 285 bp, Zea mays
  Coding DNA Sequence Number=SeqID_1487
tgcaagctcagccttcagggaaagtctcaaatggctcaggaggaatcggcaaggctgggagaatctatggaacagagacctgagggaacccgggcagtagctgcggagctgcgccgagaaaatgaggacaaggtcctagcccacataacaccaggcgagggatctggccggaaaaatgtagaaagacatgaaggcacggcttcagacagaactaaacagctgccgttggaccgacatatcgatcccaacaaaagtgaaaaagggaccgaaacacatgtaaattat

SEQ ID NO: 15891 - DNA, 175 bp, Zea mays
  Coding DNA Sequence Number=SeqID_1488
aagtccaaagtcgtacaagtacactgaacatgatacgagaggctgacggaacttaccttttgtttatacctccaagcaccagttgcattgctgtcttggttgtcggtatttcaagaaaagcagataagggcacttttcaatgaaggtttcagcaggggcctcctgagtccagata

SEQ ID NO: 15892 - DNA, 563 bp, Zea mays
  Coding DNA Sequence Number=SeqID_1489
agcgcatcactctggacgatattgcgactctcgcaggggtcaccaagatgacggtgagccgctatctgcgcacgccggaaaaggtcagggcggaaacggcggcgaaaatcgccagcgtcatggccgaaatcggctacgtcgccgaacaggaaaacaccgcggcgtcgcggcacccgccgccgcgcataggcgtgctgatcccctcattcaataatcaaatctttgccgatctgctgcccggtatcgaatcggtcaccagtgcccacggctatcaaacgatggtggtcatctacgactacaatccgcagcgcaaagagaagcagattgccacggtactggcttttaacgtgcagggattgattctcaccgagtcggtgcacaccgtgcgtgcggaaaagtacctcaacgcggccaccattccggttgctgaagtgatgggactgagcgagacgcgcgggcgcattaacgtcggctttgataatcaccgcgccggttaccacatgaccgccatgctgctggccagcggtaaacggcgggtgatttattttggctcgatgtccgat

SEQ ID NO: 15893 - DNA, 568 bp, Zea mays
  Coding DNA Sequence Number=SeqID_1490
gtacatgcgctcttgtggcctgctgcgtctgcgtggaggccaccgtctccagtacgagacgttccatggcgcaggcactttcccctgcagggcagcagcgcctcgcaagctcaggagggccttattgcccttgcgcaggaatttaacccaggacgaccataaggatgatggcgacgatgacgacgataacgataaggacgttggtgtggtttatgatgaagcttatttgggccgcgtgcttgccaagattcatgaactcggaggtgttagaacgacaaacgctccaccaccagcgccatggttcctccccgtgagatcttggcagctgcacagctgccttgttgggcccaccctggacatggatcgtgtctcaagcatacttgatcgtggcccgtgcgtggggagcatctggctgtgcccctggtggtcgctctttgacgcctccatcgacgacaactgggtctaccgaggctgtggccgtagccgtaccgatatgtccctgagtgccctgatgttcggcgaggaaaatgtgggtatgcacgctgttgtttgctgtgcgtaccgcata

SEQ ID NO: 15894 - DNA, 338 bp, Zea mays
  Coding DNA Sequence Number=SeqID_1491
gacgccgagctggtgtccgcacgggcggcactcgacgccgccggcatcgacgcgacgctgcccgccgacggctccgcggccggcgacgacgtccgcagcctcttcgcctgggtgctgcgcgaaggggtcacgaacgtcgtcttttacgccgccgccagcaccgtccgggtgacgctcgcccgcacggccctgacgatcgaggacgacggcacgggcgcgaccgccggcagcgcagcgagcgtcgacggccggttcagcgtcaccggcggcaacggcctccgcgggctgcgcgaacgggcggacgccgtcggcgcgacgatcaccaccggcccgagcga

SEQ ID NO: 15895 - DNA, 164 bp, Zea mays
  Coding DNA Sequence Number=SeqID_1492
catcaagaaggcgatcagaacgatcgacgatatggagagctatcacctcgagacggagataaacaaggccacggtgacagggaaggttaccccggaggaagttgtcaaggctctccacaagatcgatccgacctaccactaccagcttgatcatgctccacgcg

SEQ ID NO: 15896 - DNA, 118 bp, Zea mays
  Coding DNA Sequence Number=SeqID_1493
ctggccttatgctcaggcgccggcacggcaactgtatgtacggcgaggttctatgccagctccttcgtacggaacaagggcttgtgcgcgtaccagatgccgccgatacgtacgcggg

SEQ ID NO: 15897 - DNA, 355 bp, Zea mays
  Coding DNA Sequence Number=SeqID_1494
tgcagtgtgtggcttgctacgcattttgtcgagcacctagcaagcaccaacgtcactgcgcagcagcacgcaagcatggaggtgagtgctgcacgcagggggaaacacatcaggggtgccatgggaagggaggagccgagctgctgcaatccatggaaaaagaaggggcacaactagggcagtcgctcccggtgctggcgcccaggacaggaggctcgtcgatctgcgctgcggctggaaaggggcgccatgggggaaaagaagagctcctgcgtcgaacagagagcagggggaaatggggcgttgggcagaggagggtgctggtcctgggcgtttcctggtcgcgggcagggaa

SEQ ID NO: 15898 - DNA, 478 bp, Zea mays
  Coding DNA Sequence Number=SeqID_1495
tggacgcctgcacgatgatgcgatccgcgaaaactttatggggcgcgtctatgcgctgcatgagttcaacgaaatgtggcgcagcgggctgacgcgtcacaagctgattgccttccacagtcgctacaaactactgctgctgtcgcatgcgcaggatgagtaccgcgaaatggggcggtttgtcgcagcgatggaacagtgggagtcactggatgcgtacgcctttgaataccgtaaccgtctgatgcacctgatgtcgcaccaggcgtcgcgtcgtaatcacaccaatgtgctgatgcatgtacagggctatttccggccgaagctgagttcgccgcagcgtcaggagctggcacagctgattgatcgttaccgtcgcggtgtgcagccgttgctggcccccatcaccatgctgaaacattacatggcagagtttccgcacccgtggctggcgcagcagcgttatttcgatccctac

SEQ ID NO: 15899 - DNA, 397 bp, Zea mays
  Coding DNA Sequence Number=SeqID_1496
gagtgtccccaccaatcagtgcagcggccggcacaaggtcctcgcaagcactggtcggtgcgggggccaccaaggggccctcgccaacatcggatggcggcgccagctcccctccagccccctccttcgcacccgacgcctcgggcagcgtgctctctaagcccccgaggtcgtcgacctcctcatcatgtgtcatcagctccatcgcccggtcggacctctcccggacattatcgcgaccgtgagggccccacatcctatcataaagtgccccggccgaacgcttcagcatcaggtccacaacttcgaagtgcctgcatccctcgcaggacaaggcattcacggacccgtcgcaggtgatgagcgaggcaaaagacatgaggttcgtcacaaccgt

SEQ ID NO: 15900 - DNA, 584 bp, Zea mays
  Coding DNA Sequence Number=SeqID_1497
aagtacaacaccatgccggacgagcgcgtcgagatcagtgaatttcttgatatggacgaaccgtggatggtgctgcgccagctggatgccgcgccgtgccgcgcgcagtcaccgcagctggcgattgacgcgtaccgtgatgaagacgatccgtggctggcggtggcgcaaagcctgacgcggcgcggctatcagcgggcgcggctgggcgcggattatgcatcctacggcatgacggtgcatagctggcagcagctggcgcgccatctgcccggggtgcgctggtgtgatgtcagcggcatcagcgaccggttgcgcagcgttaaatttcaggctgaaatcgccagcttacaccaggccgccagcattgccgatgccacgctggcccagctgggtgcgcaggtgcagggcggctggcgtgtgcgtgatgtcgccgcgctggcggcggcacaatttctgcgactcggtgctgacagcggtgaaaccggaccgattgttatcgccagcggcgacagcggatttttgcatgccagcggccatgagcagcgtctgcaagcgggcgatgtgctgcacgttgagctgat

SEQ ID NO: 15901 - DNA, 193 bp, Zea mays
  Coding DNA Sequence Number=SeqID_1498
gctcatgcgcatctttgtggagaagtactcatcgccgcatctgaacagagtagctttgattgccgagctatgtgcggcagaaccaagcttgccaaaattacgtcgagatggtccctatggtgcccctgcgcaggattttagaaactacgacgttctacttctcgtcggactcagaatcggtgcaacaccgctc

SEQ ID NO: 15902 - DNA, 499 bp, Zea mays
  Coding DNA Sequence Number=SeqID_1499
ctgacggcagcctatgagcccggatccacgatgaaagcgatcgtggcgtcggcgctcatccaggagggcaaggcgacgccgacctccggcgtcaccgttccgtactcacgcacgttcccctggggcggccggatctcggacgccgagctccaccccaccgagaagctcacgatgaccggcgtgctcgcgcagtcctccaacgtcgggatcaccgagctcggcgaccagctcagtgcgcagacgcggttcgactacatgaagaagttcgggctcttccaacagaacccggacattcagttcccgggccagccgtcgtggccgaatcagaccagtccgaactgggacccgcagacgaacgagaactcgatgttcggtcagggcatcgcagcgaccgcgctccaggtcgcgaatgtgtatcagacgctcgccaacgtcggtgtccgcatcccgctgcatttcgtcaagggctgcaccaagcccgacggcaccgttatcgatg

SEQ ID NO: 15903 - DNA, 196 bp, Zea mays
  Coding DNA Sequence Number=SeqID_1500
gttctttacccctcgcgtaatgcgaagttgcaggccggaggaacagcccaacgggaactctgccgttggcattttcatcgcggtcgcggcgtggcggcggggttggtcggggggaggcgacggtcggtggctgagggcccgcgccacgcgcctcgggcggaggcgtcacccgtcgcgccaagtgaagcaggcttca

SEQ ID NO: 15904 - DNA, 538 bp, Zea mays
  Coding DNA Sequence Number=SeqID_1501
gaagttgatccccagtactcagatggattgctcagcccatccaaaaggcccgtggaggtttatatggcccaccaagattcaaggtggtttatatccaaggaggcaattgtatttgcccttggttttttaggcaccaaccagggtggccctgagccaccgttgtttaagcctcgtcgaaaaagattcgtccccaaaaaggccgcttcaggttgagtttagtggatttgccaccaatgttggacggattttgcttttgttcccctatgccaaaggggggtctcccccaattatggtaaatgagaaaaactccaaccgtcacccagcccagcccgtggtcaataggcgaaggcatcaaagggggttgtcctgggaagcgttggtcaaaaggagccctttcctattttttaattcaagggcaggggtttctttattttttggtaagaaaaaaaggttggtttctggtattgctgaggcaaaaagccccgtttagtggtagttcggtaagtttgttaaggccctggctttaccatgagatgga

SEQ ID NO: 15905 - DNA, 405 bp, Zea mays
  Coding DNA Sequence Number=SeqID_1502
ttaccaagtgctcggcgaaaggccagaacaagaatcatcaccgtttatgcggagttctagttaatatggagagattccaagaattgtggatagaagaaaaggtgaagcttcgttctatactcgtcagctgtttgatcgaagacttcaatcgaagactgtcgccattcttgcaaatattgaatcaagttaataatggtatgtgaattaaccacgtgatgcggagaaccagaactgagtcgaccacaagatatcgctacgcgtgagcttctccacaagatggtgctgatgaacggaactgaaggtggacagataaaacaagtatcagaacaaaagctgatcgtcaagtggaaatcgtctaacaaacactaacgtagtgtttattccaggttacgagtcaattgattg

SEQ ID NO: 15906 - DNA, 353 bp, Zea mays
  Coding DNA Sequence Number=SeqID_1503
ctcgccggcggctttgtcctggctgcactcccagcgaaacctacgagcggcaccgcatacaatgcggcgccgcgctcaagccacaccttgtcgggcaccaccggggggcagaacccatacgcggcgcgcgcggacctaccacgcctcggcgccacactacactacaactacacgggtgccaccaacacagtggccgtcgcgttccgatcgccgcaggccaagggcgactacaggtgggtggcacgggggatcaacccgagcgggcctgccggcatggtcaggacacaggccctggtcgcgtgccagcgctccgacagcagcctcgtcgggtacccaacgctggtcgacagcta

SEQ ID NO: 15907 - DNA, 143 bp, Zea mays
  Coding DNA Sequence Number=SeqID_1504
agcaggacgcaggacagaagccagtgccgggcaccgaagaggacggaggacgacaacaacaagaaacaggacctaaacagcccgaaacgatacaaaaacgcggcaggaagggacaatggggacaggcagcgcgcggaggaaac

SEQ ID NO: 15908 - DNA, 288 bp, Zea mays
  Coding DNA Sequence Number=SeqID_1505
aatatctcgcgccacctgggtcatgacgaggtgacaaacgacgacaaccctaccctactgctggccttggtgccggtcatgcacaaacagggaaaagatctggacctcgaatgcgtgcacgggcatgagaaggtttccaacacccaatccgtgggggtgcttaccaccactgatgaagcgccgggcgaggtcctccccgacggctaccacccagtcatcccgaggccactgctaacggttctccgacacagcgatgcgcccttcatggaaaacgattcccctgactac

SEQ ID NO: 15909 - DNA, 227 bp, Zea mays
  Coding DNA Sequence Number=SeqID_1506
caggagcgaacgaccacgagcgagtcagtgggcgtggttggcgtcaggttaggatcgtctgttcggaattggggggtgcgtccgtgcgtgttgcggttgcggaagtccgtacctctcgcctggcccggcccccatggacattttctacaggtttcttggatctgccgaaacggtggtttccgggcctgaaacggcaaccgcttcctgacgtcgacacgagtacacga

SEQ ID NO: 15910 - DNA, 272 bp, Zea mays
  Coding DNA Sequence Number=SeqID_1507
ggcactggccagaagggcacaagaccgccgaccgccggcgcgccagcggcgacgaccgcgccgcgctcggccgccccgtcgccagcgccgcggccgaggaccgccgctccttccgggcgctctgctcgccggcgtgccgcgacgcctgccccaacgtcgtcgacctgtgcgccaccctcgccgccgcagaaggtatgtcgctgccggcgctgtgcgaggcgcagaacaaggctgggaaccggcgcatgatggctgggatggccccagtcgcc

SEQ ID NO: 15911 - DNA, 315 bp, Zea mays
  Coding DNA Sequence Number=SeqID_1508
gtggaacgcgaagaacggccagctcggcctcgtggtcggcgccacgttcccgaacgagatcgagatcgtgcgcgggatcgtcggcgacatgccgctgctgatccccggcatcggcgcgcagggcggcgacgtgcaggcgaccgtccgcgcgggccgcaccgaggatggcaccgggatgatgatcaactcgcggcgcgatcctgtaccagcacgggaggacttcgcgaagccggggctcgccggaaaacccgacacgatcaacgcctgtgtcgtcgacgacctatcgatcttcgttgatacatcgccggcgaccgg

SEQ ID NO: 15912 - DNA, 120 bp, Zea mays
  Coding DNA Sequence Number=SeqID_1509
gatacagcgccctggatcggcggcaaaggagctcgtgaagaacacgctcaacgccggcgcgtacacagactacgacatcggcaaggatggaggactcaacctcatacaggaaaccgacca

SEQ ID NO: 15913 - DNA, 216 bp, Zea mays
  Coding DNA Sequence Number=SeqID_1510
tggtttagagacaaattggtctggtaaaccaagaacctgctctttttgcacaacaatcctcgagatatactgtatggaaagccatatgcaactattgcagaagttgaggttgcagcgactgcatccagatccaatgcacatagtttcatatctcttcttctgaatggttacaacacaatggtatgtctatattttttttcgacatacatgtaagtc

SEQ ID NO: 15914 - DNA, 254 bp, Zea mays
  Coding DNA Sequence Number=SeqID_1511
aagttcacctgggacctgtatgaccggctgcggcgctacgaggatgagcggctggttgtcgaatttggctatgacgcgttaggccgccgggtgtacaaggactcgcgctcgaagtaccgcaaacgggtacaggctgggccggtctggaacgagaatgcgcggcgagcgctggatgacaagctgggctgtgatctgacgctgttcatctgggacggcgacaccctggcgttcgagcagcgcggtcgggatggcaa

SEQ ID NO: 15915 - DNA, 480 bp, Zea mays
  Coding DNA Sequence Number=SeqID_1512
aatcaggcggcggatacgctgtttttcaacgccgacgataccgccgagcgctacagcatgagcgagacgctgcgcggccagcacaacgtgtttctcacggccggcagcgtgttgcgttctaatcttgatcggccgatgctgaccatcaccgccgatacctgtggccgtcacgatacgctcggcggcgcctgctcgtgcgagagtaatacggtgcgttatgacctcgaaaagcgccacatgcactcctgccgcgacagctggatgctggcggtcgccgcgcatccggagtctggcctgacgcgccgcgatatcacgcacaacattaactttttcatgaatgtgccggtgacccacgacggcggcctgacatttgccgatggcatctccgcgccgggtaagtatgttgagatggtggcgcagatgaacattctggtgctgatctccaactgtccgcagctcaacaatccctgtaacggttac

SEQ ID NO: 15916 - DNA, 204 bp, Zea mays
  Coding DNA Sequence Number=SeqID_1513
ggataaggaaactttgagtgctcttacacccataaaattaagacaaaaagctgcaaaatttgctaaagcaacagtcgatgcacaaatgaaatctttcaagcggtatggtgtatgggccgattgggacaacccttacctaactctgtcaccggaatacgaagctgctcagttggaagtgtttgggcaaatggttatgaaaggata

SEQ ID NO: 15917 - DNA, 554 bp, Zea mays
  Coding DNA Sequence Number=SeqID_1514
actgccggcgtttgacagtatgtcggcgctggtggcggagctggaaaccccagactggctggcgtggcagaatccgtcggtgtgggtagtagcgattacgctggcgctggtggccagccttgaaaccctgctcagccaggaggcgctgaaaaaactgcgtccgcagcacccggcgccgtcaccgaataaagagatgttcgcgcagggcatcggtaacctgaccgccggcttgctcggggcgatgcccattaccgcggtgattgtgcgcagttcggtcaacgtcagcgtgggtgcccaaaccaaactgtcgattctgctgcacggcgtgctgctgctgatttgtggcttgtggttcagcgctctgcttaacgcgattccgctcgccagcctggcggcggtgctgctgtataccggctataagctggcaacgccgcgcctgttcgtcgaacagattcgcatgggcgcgcagcagtacgtgccgtttcttgccaccatcggcggcatcattgtgtttggtatgctggccgggattggcatcggtatcgcgacgcaga

SEQ ID NO: 15918 - DNA, 331 bp, Zea mays
  Coding DNA Sequence Number=SeqID_1515
gcgagcacgcggagctcccgcaatgctgtgatggttggggacaccgtagaggaggggtcctctccaagtctcgtgacgtgacgctcctcgatgaaggagacgacacgaaggaggggtccgtggggcggtcgtggtcgctggcgcggctccacgcgcggagggacttcttgcgcgtgacggcgttggtcaccgagcgtgcgttccagtcgctggatgcgctcctggtcttggagagggtgctcgccaagttcctcatcatgtatcctaactacgcgtccgcctcagatgtggaccgcctccgcgccgatgagtacctgcacttggacaaggt

SEQ ID NO: 15919 - DNA, 497 bp, Zea mays
  Coding DNA Sequence Number=SeqID_1516
ttcgctctttcgctgtagccaagaactcgttctcgtcctcgtcccgttccaaagatccagcagcaatgaagggcatgggcgcgacggagacggcgccggcgggcaaggcggctccggcctcgcacatgccgatgccgatgacacgcgtccttctcctgctctgcctcctcctcgtgctggcgctcgccgcgctcaccgaggcgctcgccgccgcctcgcgctgcgtcgcgcgccgcggcgcgggggcagaggcgggacgccgcgtcccgcgcgtcctcggccgcgctgctcgcggcggcgcacgcggccaggatgggcacggcgtacctcgtcatgctggccgtcatgtctttcaacggcggcgtgctgctcgccgccgtcgccggccactcgctcggcttcctcctcgcgcgaagcagggtcgtgcaccctggcggcggaggtgccgccgcagccgctggccgtgaccacgggctcggcggtggtgtcgtgggcgt

SEQ ID NO: 15920 - DNA, 479 bp, Zea mays
  Coding DNA Sequence Number=SeqID_1517
gagcggcatcggattcggcgagggcgcgcagcagcccctgccgcttcccccgtgcagggtccacccgtcagggcgtgtggggcccgcgcgcgctgtgggcggcccacacccacatggtagggtactgaggagggcgccccatgacccgttcctggccgcctacgtggcgtgcagcaagagcgccgctgaggcagtcgaccgcccccaccagaagcggagacagaagcaagggaggaggaggaaggagaaggaggaggaggaggcgacgggaaagaaatgcggcgaggtgctgtttcggggatgtggggtctggagcgggtgggcggcgggcgccaagtacgccggggcgatgtcgtgcaggtacggctgcgccgtcgccgggcaggacggagacgcagacgcagacgcggccaagaccaagaccaagtctgaggacgacgcgccagggggcccaacgctcgacctgtcgtggacgccgg

SEQ ID NO: 15921 - DNA, 208 bp, Zea mays
  Coding DNA Sequence Number=SeqID_1518
gacaatattcagtccaccaccagcccaacagctcgacttggagcaaagtggggtgaatacactaggaaccaggtaagaggggtagttatgaaccctgtggaccaccccatgggggtggtgaagggaaagcccccattggtagagaaaaaacccacaaccctttgaggggtgaagaagcatgtgaccattcaagaatcaggatcaagat

SEQ ID NO: 15922 - DNA, 277 bp, Zea mays
  Coding DNA Sequence Number=SeqID_1519
atgtttgtctcccaccttgaaaacaataaacttttgtgcaggaggatgttttgcttcccggggttgtccaaggtccctaggacaaggacaactataggtgggcctaataccttgagaggttccgtcacactgctgcggtcgctccatcacaagcacattctcaagctctacacctcatgggtcgacaacaagaagagggcggtcaatataatcactgagcttttcacgtccggcaacttgagagagtatgtaaatgtaacataacccctccttatat

SEQ ID NO: 15923 - DNA, 264 bp, Zea mays
  Coding DNA Sequence Number=SeqID_1520
gccaataagcacgagacccatgagtccggcacgaagctcactctttgggtccgattcgagctcagcacggcccagttctatgcgggcttaggccggcccgacacaaataagcgggctgggcccggacagaaaactaagcacgagaaggagacgctcctgcgcccaggttgcggaccatccggtcttgtgccgcggatcgtccgcgcctccgcagagggcgctgacaggcggtttgttccaatgtttgacgtccgcgcctccgca

SEQ ID NO: 15924 - DNA, 439 bp, Zea mays
  Coding DNA Sequence Number=SeqID_1521
attccaagccgatgccttttattttttattacagcccggccgcgctacggtcgctgctccggccgccgcccaccgacgagcgttgggcgaagcactccggggcggcggcgggggccggcggctgccttgaggctgttcaagatgttcaagctcctgcccgtgctcaccacgggctgcaaggtggccgtgatgctggggcggcgcaacaaccaccgggccctgctggccgaccacgcgccgacggtgacgctgttcgggcaccggcgcgggcggctgagcctggccatccacgaggacacgcgcgccccgcccgcgttctctcatcgagctgcccatgctggcgcccgcgctgcaccgggagatggccacggtcaccgtgcgcctggcgctcgagagcgacacgcgcggcggtgccgcagagcgcttgcgtcgccagccg

SEQ ID NO: 15925 - DNA, 565 bp, Zea mays
  Coding DNA Sequence Number=SeqID_1522
gaccaaaccgttgctttaccagtattctgccatgctgtttgaaaaaaccacgaaagaactgggctacaatcccttcccgggtcccgccgccatctgcactgaggcatataccaacccgtacggcgttgcgctcggcgtctgtaactattgtggtttttgtgagaaattcggttgctataactattctaaagcgtcgccacaaaccagcgttatccccgcccttaagcaatacgataactttgaattacgctgtaaatcacatgtgcttcgcgtcaataaagacaacacgggtaaactggccactggcgtaacctatattgatgaaaatggcagtgaagtcgaacaacccgccgcgatggttatcctcagcgccttccagttgcataatgtccggctgcttttgctgtctaaaatcggtaagccttataatcccgagacaggcgaaggcgtggttggcaggaattatgcctatcaaatgttaggcggcgcaaaactgttcttcaataaagagacctactttaaccattttgccgccaccggtgcgtcaggcgcctatattgataat

SEQ ID NO: 15926 - DNA, 195 bp, Zea mays
  Coding DNA Sequence Number=SeqID_1523
tcgcatctcatgcgcgacagaccggggttcccgcagcgcttcgccttggttgtccgtccgacgcagcacgtcctgtgcgggaccttctctatgctttgtgggggcgggtcctgctgtactcccttgcctaggcctctccgctgtcgccgagtgcgggcctggcccttctttagatccgggttcttttgttgttcg

SEQ ID NO: 15927 - DNA, 531 bp, Zea mays
  Coding DNA Sequence Number=SeqID_1524
gcttcaggctacacctcatcgataacccgcacgctgccggccggccattcctcgtagcggtgcgcatggaagatcccgccttaccgaccttgctgagctacgggcacggtgatgtggtattcggcgatgacgaaaactggcgcagcgggctgtcgccgtggcagctgaccgaagagggcgatcgctggtacgggcgcggcagcgccgacaacaaaggtcagcactgcgtcaatcttgcggcgctggagcaggtgtatcaggcgcgcggcggccgtctctgctttaactgcaaatggctgtttgagatgggcgaagagatcagctcgccggggctggcgcagctgtgtcagcagcaggcggaactgttgcaggctgacctgttcatagcctcagacggcccgcggctcaacgccgtgcggccgacgctgttcctcggttcgcgcggtgcggtaaatttccgcctgaccatcaacgcgcgtgacaatgcttatcactccggcaattggggcggactgctaagcaatcccggca

SEQ ID NO: 15928 - DNA, 256 bp, Zea mays
  Coding DNA Sequence Number=SeqID_1525
tgcagttgttattgtgtcaccgtctaaggtgatggcatcatatgctatcaggttacaattccagagtacaaacaatatagcagaatgcgaagctttgttgttgggactaaggaagctgaaagtaatgggtgtacgaagagcagtattaaaatcaggttttcatgttaccacaagccaggtggataaatcaagcaaggtgaaaagttctaatatagagaaatacctcaatatggttagaaggatggaatcttctttc

SEQ ID NO: 15929 - DNA, 296 bp, Zea mays
  Coding DNA Sequence Number=SeqID_1526
gaggagctgagcccgggctgcggcgcgtgggccgacgcgctggagttcctctactaccacaacctggtgcggatggcgttgctggagccgccgctttttttgtccccgggcctggagcagtactccgactggtgggcggctctttgccgaggggactgggcgctgggccactccttccccgacgggcagttggcgctccgggagaacgtcttctgcggcggcccctgcggcgcgtggcgaccccggtacgccgtctcggactgggccggcgagggcgccgactactcgaacgccga

SEQ ID NO: 15930 - DNA, 391 bp, Zea mays
  Coding DNA Sequence Number=SeqID_1527
gaagccgccgccattgaaggcgcatcgcgcggttactttttccgtcgcgtgcagtggccgctgctgctgccaaccacgttgtttgtgctgatcaacgcctcgatgaacgccttccgcattgtcgatcagtttctgggacatgccagccgcgtcggccatgacggtagtgctgctgctgcatcctctccgggcggttttgcgctcaacctgctgatttggctggccgtactgctgtggagcttgccgatgctggtggcgctgtggattgccattcatccggctgccggccaggggcacttttcgctgctggcgccgctgacgctggcgaacttcatcaatgcctggcacgcggcaccgtttgcccgctacttcctcaataccacgctgctgg

SEQ ID NO: 15931 - DNA, 173 bp, Zea mays
  Coding DNA Sequence Number=SeqID_1528
gcgcacgggccgtgaggccgccggggcacgggctcgggcagggcagggacgcgcgagggcgcggccgggggcacggccaggggtgcggccgagggcgcggccaggcgcgacagggcatggccaagggcgcggcagggcgcggccagggtgcgagcagggcgcgcggtcagggc

SEQ ID NO: 15932 - DNA, 400 bp, Zea mays
  Coding DNA Sequence Number=SeqID_1529
ggaactcgcagctgggactggaatccgagctggagcaccacgacgagcgcaggggtgcgacatggacacaggagcgcgcacaagggcagagggaagcgcgcgcaagagccaggcgcggtccggtcgagcaggacgcggccatggacagcaagcaaggaaacgggagggagaacttggctggagaagatgcaccggcagagggaccttggagatggccgacgcagcgagcagggaggaattggggaagggctgctcgcgcaggaaacaataagcttggggcgcgccagccatggcagggaccagggagctcgacgagcgctgggctgctggaagacggcaggaaggagaccccggccgggagcttggaggaaggactgaacgtacgcaggctgggcggcca

SEQ ID NO: 15933 - DNA, 486 bp, Zea mays
  Coding DNA Sequence Number=SeqID_1530
aaccggcagaatccgctcggctttaccctcagcgccgagcgcaaacagcagctggtggcgctgctgacgcgttatcaggtggcgatgatagaggacgacgtctacagcgacctgtatcacggccacgataagccgttgccggccagagcgttcgaccgcgagggttacgtgctgcactgcggcagcttttcgaaaaatctggtggcgggatttcgcgtgggctgggtcgcggcggggcgctatgcgcagcgcgtgcagcgcattcagatgatgagtacgctctcgaccagcgcgccgatgcagctggcactggcggattttctcagcacccgcagctacgatacgcatttgaaaaagctgcgtcagacgctggctaagcgcaaacagctggcacagcaggcgctgcgccgcgtgctgcccgccgaggcgcacatcagcgatacgcccggtggctactttttgtggattaccttgccggagcagatt

SEQ ID NO: 15934 - DNA, 343 bp, Zea mays
  Coding DNA Sequence Number=SeqID_1531
tgcagcgccaggtggttgctgatatgctgcgtgactgggacaagcgctatcctttccgcattgaaaccatgttcagcgccatgcagaacatcgtgccctcgcatatggctgatattaatctgtttgatttcaaaggcattaagcatggtgatgcggtggttgacggcggggacattggtttcgatcgcgaatcgctgccagcgcagccggtcggctggcaggctgacgaggacgatcagccggacctgagcgctcgcctcgacgcgcgtcgctccggcaacgcgccttttgtattagcggtgcggtggaggatcgctaatcggcggaaattcaggatcgtgcg

SEQ ID NO: 15935 - DNA, 339 bp, Zea mays
  misc_feature (66)..(66): n is a, c, g, or t
  Coding DNA Sequence Number=SeqID_1532
gaggcagactcggtgccataggctcctgcatgagttggggtctagggaaggataaggggcgccccntgcaaaaaggccacacggatgggcctaccggttccttagcaccaacacaacaattgtataccactggtcatcaacgctctgtgatttggagcccctgaacgcatcagaccgagccaccaattatgccatgcacctggaccgcccccctgcttttttgaagagcaacctccacaggctccatgtcctgtttcttaacacccgccaccactgcaaccgggggaagctgaaggcaaacaagtggcagaagtatctctttggaacgccgaacaacga

SEQ ID NO: 15936 - DNA, 232 bp, Zea mays
  Coding DNA Sequence Number=SeqID_1533
atgcgtaatttctgggaccgcaccggcggcctgtgggcctctggcgcgctgtacggcaagattgccagcgtgtttgcgtctaccggcaccggcggcggtcaggagcagactatcacctcggtgtggaccaccctggcacatcacggcatggtgattgtgcccatcggctacggcaccaaagagttgtttgatatttcgcaggtgcgtggcggtacgccgtatggcgcaacca

SEQ ID NO: 15937 - DNA, 386 bp, Zea mays
  Coding DNA Sequence Number=SeqID_1534
tctgatgacttagcaaatcatatcgcagacatacttgatttttttggactggattcggttatgtgcttacgtgtcactgcgggcgcatacattcttactctgtttgcagtatgcatttattccttattgcagacgacgtatagggagcgagtactaggacttattctcgcttcacctctatgtaaagctccctcatggtctgagtggttatataataaggtaatgtcaaacttactgcattattatggcatgtgcaatgtcctgaaggatattatgttgcagcgctactttggaaaggttactaaatggcttatgttatggtatgccaatgccatatttgcctaggtgcttaacactatgtgttcgaactttatggaggacgtgga

SEQ ID NO: 15938 - DNA, 164 bp, Zea mays
  Coding DNA Sequence Number=SeqID_1535
tgctggaaggaggatttcgacgcccagcgccaggcatggtatcagcagtacgcggctgcccaggctcgatggcaggcccacaaggctcaggtcgtcaaggcgccctaggccgagcccgcggcgggcaacagcttcggcggtgcgcagtcctcgttctcgagcga

SEQ ID NO: 15939 - DNA, 168 bp, Zea mays
  Coding DNA Sequence Number=SeqID_1536
atggacatgtcacgcgtgaaacacgctcccggcctcttgcacgagcacgacacgagcctgccgaagcaagctgccgaaacaaagaccagctacatgcagtgctgcagccggcctatcacgtccggcccgagagaggcccattatgttttcctttcaaacatagaggga

SEQ ID NO: 15940 - DNA, 447 bp, Zea mays
  Coding DNA Sequence Number=SeqID_1537
tcgtcctcgacaaatatgccctggtcgatcatgtgctgagcgacgtcgcacgccccgacgtgccgcactggacacgcatggactcgcacgtcctctcctggttgtataccgccatcaccatcgatctctatgacatcgtcacgacgtccgcgccaaccgcccgcactacctggctcgccctcgagcaacagtttgtgggcaacgtcgacaccgagttccgcaacctcaaccaaggtactctctccatcattgactattgccgcaagatgaagaccctggcggactctcttgttgagctcggcgagccggtgacggatcacgtactcacccttaacgtcctccgcggcctatacgagcggttcgagtacattcggtctttcctcaagcgccagcggcccctctccaagttcgtcgaggtctgctctgagctactcctcgaggaactct

SEQ ID NO: 15941 - DNA, 435 bp, Zea mays
  Coding DNA Sequence Number=SeqID_1538
gagcaacttgctggcgcccgaaggcgatgtcggccgcaaccagcgtccccaggaggaccaaacggagcaagagcagatcaaccagcacgtcaaggaggccctggaccgcgtgcagttgctgcacctcgccgtccgccgggcggacgaccatgcggaaagccagctcggccgctgcatcgcgaacctggagcagcgcgcggacgtgcacgcggcgctcctgcgcacgctccagcagtttcagaaggagggcggcaacctgccgaccctgcccgagcacgggatgtgccctatatgcatggcggccccggtggacaccgcgatgatgccgtgcgggcacacgctgtgcaaagcatgctacgcaaagatgaccgtccagaatcggtgccatgtgtgccgcggaacggcatccataatccacctgcaccaagtaaggcg

SEQ ID NO: 15942 - DNA, 167 bp, Zea mays
  Coding DNA Sequence Number=SeqID_1539
gacccgtggtgatagctctacagtcgacctgcagaagaagggatcaaggaacagcgaccagagaaaggctgcgtctgctgctgctcctacggctgctgatgctacgaacaagaggcccagggttagtgccttcttccgcttggatggcagtaagatcaatcctggat

SEQ ID NO: 15943 - DNA, 393 bp, Zea mays
  Coding DNA Sequence Number=SeqID_1540
gggctattaaggacaactcttattggattgtcgcttgcttctgggtgtaaacaaaaaattcccgcccaagctcgacgaggtggaggaggatgatatggaacctcgctccagcccccaaagaagaggaagaagtgaagttcttttcccgctttagttcccgtgcgttgagttctgcctggcttttggtcatatcctcgcatttcaactttcccataaagagttaagaaggatccacacgttcaccagcacgtgtgggcttgtaggacctttatgatttgaggcacttcagggccaactcttatgtcattgttgcttgcttttgtggagccccccccccaatatagataacataattcgacttgagtaataaaagcccccagattgaataggcct

SEQ ID NO: 15944 - DNA, 175 bp, Zea mays
  Coding DNA Sequence Number=SeqID_1541
gctattcacagggatactctaattgatgatgatgaaataggagacgggcaactatgtgttgtgtgcttaagaaaaaaaaggagggcagcttttattccatgtgggcatcttgtctgctgttctgaatgtgcattaaccatagagcgtacgcttcatcctctgtgccctatgtgtc

SEQ ID NO: 15945 - DNA, 292 bp, Zea mays
  Coding DNA Sequence Number=SeqID_1542
aaattctttggttcttacacagcacagggcagtcatttggcacgcctcggccgacaccgccgagatgcgccccgaaccacttgcatgcacgacagcacgaggctggccggcccctccccgtcgtgtcggcgtcgcccgcatcggtcggccggccggcctccgtcgcctgcaacgccacgtattttgccttgccaaaaatgcgccagtcccttcccatcgcaccagccaccaggaagtgagtgatgccgccgccgtgccattggctgcagtcgcagaggttctggtgctcctc

SEQ ID NO: 15946 - DNA, 163 bp, Zea mays
  Coding DNA Sequence Number=SeqID_1543
gagaaggcccgcagggtcgtctctacggactcgagctcggaccaggaccgtctcttctccggcgacagcacagcatgaataccgtcgttgctgtgaccaagacgatggcggccgagacgaataatagggacacggccaaagaaatggccagtgtgcgcggcgg

SEQ ID NO: 15947 - DNA, 273 bp, Zea mays
  Coding DNA Sequence Number=SeqID_1544
tcactcgtctgccttatcgtcagagccgccgagcgagcgagcagcagccagcagaagaagcttccccaccgttgccgccgcgcggggcccgacggcgccgctcggccgccccgacgacgaagacccggtgccgcacctgctccagcttcccccgcctcccagtcccaccctcgcggggacgacctcccctctgtggccgttcgcgggctccactcccaagacgacgacgacgtcggccgcgctgccgtcgtccccgcccgtgacagaggagga

SEQ ID NO: 15948 - DNA, 325 bp, Zea mays
  Coding DNA Sequence Number=SeqID_1545
acgcgcgggttgacgcgcatcacaaccgctgccggaacgcccgctgctccgcccggccaacacatcgcacgcggccggtgcgagtttttcccggttttgccgcgccgcccgagtgccccgggcggccccgataccagaatggccatcgaatgaccgctagtggaaccccgccgcgcgacgcccgagggcccacgcgcttccagaccatgttacgccagccgctcgcggccggcgtcgttgcgctgttcgccggtgccgcggtgtcgctcggcgtcgcgctgctggtgcgcgaacaatggcaaggcgccgtccagacgcgcttcga

SEQ ID NO: 15949 - DNA, 369 bp, Zea mays
  Coding DNA Sequence Number=SeqID_1546
aatctgggccttgtggtcgagtcgatcccctcgctggactgggccgatgaacgcggcaagccggcggcgctggtgtacatccgtgatgcggccagcaagtcgctggccagcgaggtggtaaccaagcaactcttcaacctgacccgcgccgaaaccgcgctggccatggaactggccaacggcctgtcgctggaggaggctgccgaggaactgaacatccgccgcaataccgcgcgggcgcacttgcgctcgatcttctccaagaccggggtgcgtcggcagaccgagctggtgcgcatcctgctcaacagcgtggtcgcccttggcaagcccaaggtagcgctgaaggcacccgagcgcctcaaggtg

SEQ ID NO: 15950 - DNA, 242 bp, Zea mays
  Coding DNA Sequence Number=SeqID_1547
gggccttacgacacaaatcaaaggacgtacgtcatcctgccgattgtttatcctcgagcccgcggcgtggaacggccttgctgggctgtcgtgccccacgccggaaaggacggagctggaataccacctggacccgtactcagaggacggcgggaccgatcacgtgggggacggaccaccagactgcgctcaccaggctcgcgggttgctggcacacgatcacagcccctaggtgcgagcgt

SEQ ID NO: 15951 - DNA, 197 bp, Zea mays
  Coding DNA Sequence Number=SeqID_1548
ccgagcttttctccgtcctggagtaagaaaagcggccgggcccccgcgcgcgcggcggctgcggcggaaatgggaccggcggcggacgaggaaaggaaaggcggttcgtgcgagggaggggcgcgcgacaacgcggggagcggcccagcgggggagtataataaacctaatcattgggcactcaaccgcggtcacgc

SEQ ID NO: 15952 - DNA, 371 bp, Zea mays
  Coding DNA Sequence Number=SeqID_1549
gatcaaggtaggcattcacggtttttgtcgtttcggacgtaacgtattccgcgccgcgctgggcagcagcgacatcgatattgtggcgattaacgatctcaccgacagcaaaacgctggcgcatctgctgaagcacgactctctgctgggtcggctgccggcagaagtcagcgctggcgacggcgagttgcgcattgatggcaaaccagtgcgggtgttcagcgagcgcgatccggccaatattcgctggcgtgacgtgggcgtggatattgtcatcgaagccaccggcttttttaccgagcgtgacaaggccgcggtgcatatcacgcaccgcggcgccaaacgcgtgatcatctctgcgccgggcaaaa

SEQ ID NO: 15953 - DNA, 282 bp, Zea mays
  Coding DNA Sequence Number=SeqID_1550
tatactctgcactgcttgccaggaggcttaactgttggcttgctttgcttcacaccaaggagactagccgcccagcatcccacgaccagcagggagcgcccgtggcgccgcaggcccgcagggtgctccggcctccagcctccgtgggctattggtggctgccggctagagcttgtgggatacgtagtggcggctgccggctagagctggagggagacgtaaatgcgtcgtggcgggctggtggcgagaaatttgccattatgaaagcccaccgttgccgcc

SEQ ID NO: 15954 - DNA, 310 bp, Zea mays
  Coding DNA Sequence Number=SeqID_1551
gcgcactcgggaccgttcttttttgtcgggctgcgttttgctaccgcctcgctgctgctggcctttttctttcgccgctgtctgcgccacatcacctggctggagattaaagctggcgcactgattggcgtggcgattgccggtggttacggattgcaaacctggggtatgcaaaccatttccagcagccagtcggcattccttactgcgctttacgtgccggtggtgccgctgttgcagtggctgtttctgcgccggccgccgggcctgatggcgtggctgggcattttgctggcgttcaccggtctgg

SEQ ID NO: 15955 - DNA, 577 bp, Zea mays
  Coding DNA Sequence Number=SeqID_1552
ttggcgccgttgctttcttgcttgtgcggaggcatgtcaggtacgcggaggtacgggaagactgggaattggagttcggcccgcaccgattctcatacaaggacctgttccatgcgacgggtggatttgagaacaagaatcttcttggcattggaggatttgggagagtgtacaaaggggagcttccgagatcgagattgaagatagccgtgaagagggtgtcacatgactccaagcaagggatgaaggagtttatcgcggagatcgtcagcataggacgtcttcagaaccgcaatctcgtccagttgcttggctactgtcgtcgcaaaggtgagctcctactggtatatgagtacatgcccaatggaagcttggataaatacctgcataatgcaaaagagggcaactctgcgttgagttgggctcaaaggtttcgaatcatcaagggaatcgcatccggcctactgtatctccacgaggagtgggagaaggtagttgttcacagagacatcaagggaagcaatgtgctcctcgacagcgagatgaatggacggttaggcgatttcggccttgcaag

SEQ ID NO: 15956 - DNA, 420 bp, Zea mays
  Coding DNA Sequence Number=SeqID_1553
tgcttgacggcctggtctgttgcgccgcggtcggcgtgaccgcgccgtcctgcgggttgatcctgtcggtcaactactttggcgtgagccagttgctcgaaggcctgcaaggtgccctggctcgcggtcgcaacccggctgcgatggtgatcggctcggtggccgccacccagcctggcgctgagcagcagccgatgaccggcgccatgcttgaaggcgacgaaacacgggcgctggacctggccaatgaccttggccagccccatctggcctacgcctgttccaaatatgccatcacccaccatgcacgaagcctggcatcgggctggggccagcgtggcatgcgcctgaacgtggtggcgcccggcgcggtgcagaccccgttgcatcaggcgtcgctggagcatgcgcagtttcggc

SEQ ID NO: 15957 - DNA, 216 bp, Zea mays
  Coding DNA Sequence Number=SeqID_1554
ctggtaggcttcactgatgatcttccttcactgctctttctcctttgccgcaattactccctggtagcaaatttttacaacatattagtagtacttccgggtatggaagcaagtggaacaagcaacatgaattctctatgaatggttgtgttatcattggcacccttgatggcgctaatgttgaaataagagaaaaggttggcgaagaatatttct

SEQ ID NO: 15958 - DNA, 380 bp, Zea mays
  Coding DNA Sequence Number=SeqID_1555
tcctcgacgaggaaatggttgcccgcactgtaaccactgctcaggagaaggcgaagtcggggaaggagacttccaggagttccaagactacgacgagttttagatgtgggttggcggaaacccccaatggcccgtatcaggtgcactgcactcacgtggagagactgcatcgtcgcctgcacaaggagcaggagcgccgatgccaggagcaggagcagcaggactcttctccttcacctcagcaggaggtggagtatgggaagcagccttcccctgcaccacagccagagatgccccgtgcaccaccacagggcatcccggttgcaggaggagaccctgacggagacgacaacgatgctggtggcagttcgagacacgac

SEQ ID NO: 15959 - DNA, 318 bp, Zea mays
  Coding DNA Sequence Number=SeqID_1556
tcaaggacccttcctatgctttgttttatttagacagtcggatacccattgtacgcaccagttctgagtcggttgttcgacgacagtggaaggcccccgaggggaccgttccaggtccgtcccccggatggaacacgacggtccgctctagccgcgcgagcagctcgagcattccgccagcagccaaggggttggtgatctggaccccctagctcaaccctctagagccaatccttttcctagaagttacggatccgtttcgccgacctcccttgcatacattgttccattggccaaagtctgttcacctggaagact

SEQ ID NO: 15960 - DNA, 491 bp, Zea mays
  Coding DNA Sequence Number=SeqID_1557
cgctgacgacggaggctgcctatgccgccggcgacgaagacgacgaccaacctgatgctgatgggtcggcggcgttggcaagtcatcgaagagcagtcctattcaagcatagggctctggacgactacttccaggggaagctagtcgagtggacggagcaagtgatggagagaggcgacgtcatgcactccgccgccgtcgtggcgccggaggcagaccaggaggtcatcgctctcgcacgcagggccttggcccaggggcatcgcagcgtcttggtggacattccgcaggtgcacatggatttcgagccgctgcggccccaggagatcctctactacatcctgtgccagctccagcaggatcgagcgtcatcgccgccgcaactcgggtcgttagaaggaagcccagacacattggtgaagcagtatctcctctacagaagcaaacgggagatcagccatggaaaagagagtctactcggccaaactgag

SEQ ID NO: 15961 - DNA, 543 bp, Zea mays
  Coding DNA Sequence Number=SeqID_1558
gtttctgaactaagggtgcttatgggtggtcattcggagtgatgccatacgggatggtgacgatccccatcccttagataaaaaaccctccatggttttttaaaaacctcctagctggcccaaaggatggccattccattagtaaacaggccgaggagccttaacaacccattcaaagcaagaaagagtttctgcagattctgggtgagggggcccttcccccaggtgggttccgtgggctcaatcagtttttgaaagaagaccatggcccccccgaagacaaggagggcctagactcaaaagccggtttttacctggaaaacaatggggagattgtgtattctattttgcaacaatgaaaactttgttgggtggtagggttcccaaaaaattaaaaacaaagggcagggtgttgggcttgcaaggatttgttgcaactgttggtcaagcccgaagttgaagccccttttcaaactgttggggttggaaggggggcccccagtgtttttcaacaggtcgggccctggaaatgtgtattggtaa

SEQ ID NO: 15962 - DNA, 462 bp, Zea mays
  misc_feature (44)..(44): n is a, c, g, or t
  misc_feature (62)..(62): n is a, c, g, or t
  Coding DNA Sequence Number=SeqID_1559
cgcgctgatcgagcagatcgacgaatgcagggcccagacacgcnaggcgcgcgcgcgcctgnacgagtcggtgggccacatgggtgaccttgaagaccagcgccgcgagctggagaacgagcgccgcgccctgctggagtcgcgcgaggaggcccgcatgaacgcgcgcgaggcggccgaccaggcacacgccctggccttgtcgctggaatccaaacgctcgtcgctggcctcgctggagcaatcgctggcgcgcatggaaacccagctgcggcagatcgaggcgcgtcgcggcgagatcgccacacaactggcggcaggctccgatccgatcgccgagctggaagccgagcggcagacttatctcgaccagcgcctgctcgtggacaagcagctggtcgaggcgcgtcgcgcgctggaagactgtgatatcgagttccgcaagctggaacagcagcgcca

SEQ ID NO: 15963 - DNA, 559 bp, Zea mays
  Coding DNA Sequence Number=SeqID_1560
ttaacaacgtcatcacgtttcctccatcaggcgcattcgtcgtcaatggcgacatcgaggtgcagccgccccagcgagtcaatttcaggttcacacgcgctgctctgagagggaacaactgggaggttccttttccgccgtttggaaaaggatggtttgacactgtctatttggatgatgacatacgggttgctaaggacataagaggagactatttagtggttgagcgtgctccatattcttgggatgtgtagtttctgaagtccaaaactggtcaaaggaacgtttagagaaccttatgctttcccaaccaagtatacatgctattccgtttcctatcatgtatgccaaaatcaacatgttcactccttgatggtagcttattatagtactccaatcttttttaggaacacgaggggacagcgccttatgtatggttgcaattaaatcattttagcacacaggaactagaagtctagaatagtaacacaagtttagcaacctggaacataagttcatgtagatcagaaggaagtttgtgggcgtatcattcagttaa

SEQ ID NO: 15964 - DNA, 401 bp, Zea mays
  Coding DNA Sequence Number=SeqID_1561
atgtacaagcggattttcgtcgggctcgacggcagcccgagcgcgcgtctcgcgctgaacgaggcgatccggatcgcggcggcgtccggcggcgaggtcacgtgcgcgtatgtcgtcgaacacaggccgcagctcgtcgatgtcgacgcgggttttgcggccgaacgcgccggcgacgtcgcggccgtcgacgcggcgacgcccgtgctcgacgacgcgaaagcggtgctcgagcagcagcacgtgccgggcaccgtgcgcgcgctcgacgcgtatggcgaggacgtcgcagcggtgctgatgcgcaccgcggccgaggcggatgccgatctgatcgtgatgggaacgagcgggcgccacgggctgcgccggctgctgctcggcagtgtcgcggaatcgct

SEQ ID NO: 15965 - DNA, 527 bp, Zea mays
  Coding DNA Sequence Number=SeqID_1562
agctgttcaatgagctggcctcgtggcagcagccgctgtggcttatcatcgatgattatcatcacatcactaatcccgccgtgcatgaagcgatgcgctttttcctgcgccatcagccggataacctgacgctggtggtgctgtcccgcaatctgccgcagttgggtattgctaatctgcgcgtgcgtgaacaactactggagctgggcagccagcagctggccttcacccatcaggaggcgaaacagttcttccactgccgcctgagtgcgccgctcgcgccggatgagagcaaccgtctgtgtgatgatgtatcaggctgggcgaccgcgttacagctgatcgcactgtccacccgtcagggcgcggcatcagcgcatgactccgctcgccggctctccggtattaatgccagccacctttccgattatctggtcgaggaagtgctggataacgtctatgccgccacgcgccattttttgctgaagagcgcgttattgcaatcaatgaatgatgcgctggtcgcc

SEQ ID NO: 15966 - DNA, 234 bp, Zea mays
  Coding DNA Sequence Number=SeqID_1563
gctatacccgagtcagcaccctggacactagggcatgtttgggacagcttaattctgaagagcttttttataagaatctagctttctggataatccagtgacagtgatcaatatcacaaggatgtcagattaccggaaggacgccccacacgtccctgtacaccatcccgcaagggaagctgctgacgcttaagcagagggccgaccccgagacgtacacggactgcatccact

SEQ ID NO: 15967 - DNA, 251 bp, Zea mays
  Coding DNA Sequence Number=SeqID_1564
atgcctgcagctcgacagcggtaaagatgtgctggtgctgatcaaagcgccgtggatccgcctgacgcctgacgccgccgatggcgataatcagctgccgggccttgtccacaccatcgaacccggcgagacgcagagtgaagtgctgattggcgctgacgggcggtgaaatggctgtgcgccaccgtccccagccaggtgcttcgccagcttaatgtgcagcccggcagcgccgtgaccgcctgttttga

SEQ ID NO: 15968 - DNA, 576 bp, Zea mays
  Coding DNA Sequence Number=SeqID_1565
gtgaagtccagcagctccgacgagtgggccttcctcaagcccttcacaccggagctttgggccactgttgtcgccttctgcatcttcgtcggcgccgtggtgtggatcctggagcaccggcacaacgacgagtttcgcgggccgctgaagaagcagatggtcaccatcttctggttcagcttttcctccatgttcttcacgcagagagaggacaccgtcagtgttcctggtcgcttcgtcgtcatcatgtggctcttcgtggtgctcatcatcacccagagctacacagccagcctgacgtccatcctgacagtgcagcagctgtcgacgggaatccagggcctgagcgacctcctcgcctccaacgaccccatcggttaccaggtcggctccttcgctgggagctacatgaacaaggagctgggcgtcgcggcgacacgcctccgggagctggaccccgacgactacgccgacagcctgcagcgcgggcccagaggcggcggcgtggcggccatcgtcgacgagctgccctacatggagctcttcctctccagcaactgccagttccagacggtg

SEQ ID NO: 15969 - DNA, 383 bp, Zea mays
  Coding DNA Sequence Number=SeqID_1566
gtcgctgcaggtagtgcgtacgtcaccggcagccaaggccaccgtgcgcgtggataccgcgcggctctacggcctggtcaatcgcgccggcgagctggtactggcgcgcaatcgcctgctcagcttggccacgcgcagcggcgacgaggcgctgcaactggcggccgccgagctcgaccgcattgccgacgagctgcatggcgcactgctgggcatgcgcatgcagccggtgcgccggctgttccagcgtttcccgcgcatcgtgcgcgacctggcgcgccagctcggcaaggacatcgagctggtgctggaaggcgaggacaccgatctggatcgcggcctggtcgaggccctggccgatccgctgattcacctgctgcgca

SEQ ID NO: 15970 - DNA, 254 bp, Zea mays
  Coding DNA Sequence Number=SeqID_1567
tgcagcatcgcagctggcaaatgatggccgccgggctgctggcggtgctggtgttctcgcggctgtttggcatgcatgagctgtggcagcaactgatgctggatggctataaccgcgtggtgaagaacatggcggaagagggcagcgagctgtttggctacagtctgtgtctggtggcatcgctgcgctatctgtggcaaacccgcccggcgctggcaacggcccgcgccagccgtcgcgtggtcagcattgag

SEQ ID NO: 15971 - DNA, 452 bp, Zea mays
  Coding DNA Sequence Number=SeqID_1568
tgacgacgaacgatccactttgactcacaggcctactatagggaacggccctcctgattcaatacatgactggaccaaagagtctgacattggtgtgaccaatcagaacgaccccattcaattttgctccaagaagaattggcgactacttagatgccaaaatgggttgcgcatatttgaagaacttctggaagtagattaccttgcacgaagttgcagcagagctatgagggccgttggtgtagttgaagccacatgtgaagccatttttggtcttataatgagcatggatgtaacaagatacgagtgggactgtagcttccgtaatggtagtttagttgaagaggtcgatggtcacactgcaatactatatcataggctgcatctacactggtgcccaatgctagtctggccacgagatctttgctatgctcggtattggcgtcgtaacg

SEQ ID NO: 15972 - DNA, 235 bp, Zea mays
  Coding DNA Sequence Number=SeqID_1569
gaaagctgccatcgacaaagcctttaacgacatgcgaaaagacggtacctacgacaagattgcgaagaagatcgaacccatgttgtatggctattctgaagtaattctcaaaggcacgctggtgactcttgagctggcgctcagctcggtggtactggccgtggtgctgggcctgataggggccggcgccaaactctcccgcaatcgcccgctggcgatgatttttgaaggctac

SEQ ID NO: 15973 - DNA, 461 bp, Zea mays
  Coding DNA Sequence Number=SeqID_1570
atctttccaagctgaccaggaccagccccattgagatcattaccatcatcatcccccaacaggtcatcttcatcatcgttaaaccccttttcatcattatccacaactcataacagctttgcaaggccagagtcatttatttctgatgagcagagagctgcgactaaggatgatgatgtttaccatttcatcagctatttaccttttgaaggtgtcctgtatgagctggatgagctgaaggaagggcctgtgaatcttgggcagtgcggtggtgcggatgaccttgattggctacgggtggtgcagctagttattcaagaaaggatcgagcgatactcacagaatgggatcaggtccaccataaagaacaggaaagaggtgtactgtgctggagtaactgtagaagagaagggagcaaattttgcaagagatgaacaagacttccgccacagaatcattga

SEQ ID NO: 15974 - DNA, 131 bp, Zea mays
  Coding DNA Sequence Number=SeqID_1571
aactatatggttgtgtcgtgacatctagggacatggtttctcacaaggatcccaccaaacaatttgacaaagtaatccatctctcttgaccataagtccataagtggatttttttcaacagcctcagccct

SEQ ID NO: 15975 - DNA, 485 bp, Zea mays
  misc_feature (208)..(208): n is a, c, g, or t
  misc_feature (233)..(233): n is a, c, g, or t
  Coding DNA Sequence Number=SeqID_1572
agggagtcagacatcttctgcagtggggtgtctgcgccgacggagctataggctaccgtcggcacacatcaagatcgtgaagcattccatgggggagaccgcggacaacaacaccgagatgatctcaagtgaggtcccctttggttgttctccaaaggcatcgtcagtgtttatgtcgtcaatagcagacaacacttggttcagacantgctgtctaagactgtgcacgacanccggcctcctcaacttactcatccatgtcgtcactagcggacaacgcgtgacaagctgagtgaggtgagaaaaacttcaatgttgatcgtgtgcaaattgtcgtgaagtttgccaagtactagcggttccatgcgtattagtcacaaatctctcaaggattctagcggcttgtgtggacaaccgtggatgagcctgcctacaatgcaattgttcggtgagatccaattgaggcatgttttcctatgtaatct

SEQ ID NO: 15976 - DNA, 443 bp, Zea mays
  Coding DNA Sequence Number=SeqID_1573
tgagcacctgatcaccggtgagcatgatgctttatttagtttcccctacagtagtcttgatagcctttggtattcaaataaagtatacttgatttgagttcaatctggttaatcattcataaaaacccgggcttttttatatgatggcaatctttatgctaaatgctaatgcccacttttgtataaatctgagaaaatctaatccatgtttgtgtggttctgtcttaagaaattttgttttcccttgtagctctatttcattcatagtttttgttttcccttgaatcctttatcagtatcgcagtggcaattttttgttttagctgtagcagctgagaatgtttttttggctggatgctaatttttttgttgttctttctaaagacgaaattaaaagtcattgccccccttgtttgatgtaatgtcttgttcaaatctaggca

SEQ ID NO: 15977 - DNA, 51 bp, Zea mays
  Coding DNA Sequence Number=SeqID_1574
gcctttaatttgtctaattccctcgacttcataccagtatgccatcacaaa

SEQ ID NO: 15978 - DNA, 373 bp, Zea mays
  Coding DNA Sequence Number=SeqID_1575
atgcaggctttccagcagcagttcaacgatgcctggtttagcgaaatcgaacaggccaatcagcagctcggcagcgtcaaccagcattcgctcagcacgctcaagcagagccgcaatctggcgctggcgattgccgcgttattaatggcgctgctgctgctggccgccgcgctgctgatgcgcggcgtgttgctgccgctgcgtcacgccaacgcccagctggcacaaatcgcgacgggcgatctggtcgccagcccggcaccgacgcgtcgtcagtcgctggaaacgcgccagctgctcctgtccatcgataccatgcgtcagggtttgcagcagatcgtcagcgacatcacgacggtagcaacccgggtgg

SEQ ID NO: 15979 - DNA, 159 bp, Zea mays
  Coding DNA Sequence Number=SeqID_1576
gctcttgttcattcaggtcccatgaaaagatgtcagtgctccttttggacagtattgttgacaaacatgcaatagatattgaaaatgattacctcaaaatggtcaaggtaagaataattttgcttccagtccttgtgtgtcttcagagtgcaaaggaga

SEQ ID NO: 15980 - DNA, 201 bp, Zea mays
  Coding DNA Sequence Number=SeqID_1577
gaaaagaggtcttcaaggtgataaagagaaagccatccataagttatgcaaaaagtggattagtactagacaagattcatggagagatcaaattccgtagggtgcactttgcatatccttcccgccaggataagccaattctccaaggattctcattgtccatccccgcaggcaaagtcatcgctctggtaggaagcagtg

SEQ ID NO: 15981 - DNA, 219 bp, Zea mays
  Coding DNA Sequence Number=SeqID_1578
agcgcgaatcatgattcgctccgtgctccgtatcagcaggcaggggaaggtgaggctgaccaaatggcacaccccatacccacagaagcagacacccatgaccagcacagagattagtacgcgcgtcctgacaagaggccccaagcggtgcaattccggcgactggcaagagctacagagttgtgtacaagagggacgccagccttgacttctgcaggg

SEQ ID NO: 15982 - DNA, 170 bp, Zea mays
  Coding DNA Sequence Number=SeqID_1579
gtgatggttaaggagcatggtcaaaattctttcaagtttttcatggcatataaaggctcctcctacggaaatgcaagtcacttagtgcccttgctatggttcatgcagaggatggtgatgctggacaacagtggatgattgacctctggatagctggtctagaagggcat

SEQ ID NO: 15983 - DNA, 556 bp, Zea mays
  Coding DNA Sequence Number=SeqID_1580
atctcttgctcgatcatcatacacacatacacgatcgaccgctccagcctccagctcggtgtcgtatagtagtgtatatggcaatgagcgagccgagctccgacacctcgtgcacgtcctcctgctcgtccggaccctccacgtccaccagcccacgcgcggcgccctcctccgctgccgccgccgcatcgggcggcggcaagaaacgtcgtccgcgctcaaacgacggcgggggcggcgggtccaggtccaggtccagctccgcccccgacgtaccgcggcgtgcgcatgcgggcctggggcaagtgggtgtcggagatccgggagccgcgcaagaagtcgcgcatctggctcggcaccttcgccaccgccgagatggcggcgcgcgcccacgacgtagccgcgctggcgatcaagggccgcgccgcgcacctcaacttcccggagctcgcgaacgatctgccccgcccggccaccgccgcgcccaaggacgtccaggccgccgccgcgctcgccgcggccgcggacttccaggcgcccgccaatgcagccgccg

SEQ ID NO: 15984 - DNA, 325 bp, Zea mays
  Coding DNA Sequence Number=SeqID_1581
gtgggtgtcctgctctagacatatatatcagattcagaacagagcagggttttgccctgccgttttacgtttggtactcgcgacagctagagtatttcgcatttatctatctacgtataataaagttgcagttccttccatcttttatcgaaccctaacggacggaacgagctttatcaaatcaaacaagaatggaggagcgtcttgcgaacgcttcgaatccaatcagactaaaaaaattatggcggactcacatttgctcggcgccactaacctgtaaacgatttcgtgtggaccaacgaccaaagtgctcgagtgcgcttaa

SEQ ID NO: 15985 - DNA, 263 bp, Zea mays
  Coding DNA Sequence Number=SeqID_1582
atgaaactgtggttgccgggcgttgccgccctgttactggccctgaatgcgcaggcggaagattaccgggtggtctactcgcccagcctgtcgctggaagtctatatcgataacgttgccagtaatgcgcccgacgactggtgtaaagagacgctgccgctgcgcatcgtgtccggcaaaagcagcgacaccagcattcttaccagcttcctgccgcgcgtcggtacgctgctggcgaaccagtgcggcctgctggatgagat

SEQ ID NO: 15986 - DNA, 262 bp, Zea mays
  Coding DNA Sequence Number=SeqID_1583
tgatcattaccgaggcgttgtcacccgaagcctttgaacaggcgctgcgtgccaaaggcgcgtattaccatattcaccatccttaccatatcgcgatgcacaacggtgccgcgacgcgcgagcagattcagggctgggtggcgaaccgtttttactatcagaccaatattccgctgaaagatgcggcgatcatggccaactgtccggatccggcaacgcgccgtaaatgggtacagcgtatcctcgatcacgacggtcgtaa

SEQ ID NO: 15987 - DNA, 278 bp, Zea mays
  Coding DNA Sequence Number=SeqID_1584
aagccacgtcgcctctggacacgtggctggattatgttgagcatctgcattctcacgctatcgatctgggcctggaccgtattcagcgcgtcgccgcacgcctcgacctgctaaaacccactccgtttgagttcaccgtcgccggcaccaacggcaaacgcaccatctgccgtacgctggaaaccctgctgatggcccgaagatatcgtgttggcgtctacagctcgccgtatctggtgcgttacaccgaacgcctgcacctgcaaggtgctgagctg

SEQ ID NO: 15988 - DNA, 565 bp, Zea mays
  Coding DNA Sequence Number=SeqID_1585
agcctgctgccggttggcgtgaaaaccgtgcagggcagcttccgtcgtggcgagatggtggtgtgcgtcggcccggacggccttgaagtggcgcgcggcctggccaactacagcgccctggaagcgcagaagatcattggccagccgtcggatgccatcgaaggcctgctgggctacagcgcagaaccggagttggtgcaccgcgacaacctggtgctgcgggtaatcggtgtggcggcattggtgctgccgatgctggccggggccgaggaaatcgggcaagtgtccaccgtgttcaagttcctcgggccgaatgaccgtattgtggtcgaggcgttcgacgaccccaaggtcgagggcgtgacctgctacctgtcacgggccaagactggtggcgtgaagggtgggttgggcctggcggaagatcgggcggaggcatcgattgcctgtcgtcaggtcgggccgatcagcttcaagggtgagctgaaggatggcgaggaagtgttcaaggaacgcacctcgctggtgttcaagaccatgcaggtggtgcgctttttggacaaga

SEQ ID NO: 15989 - DNA, 453 bp, Zea mays
  Coding DNA Sequence Number=SeqID_1586
ttggagcccagtgatgttggaacctatgttttactctctaacatgtatgcaaaagccaaccgatgggatggcgttgtgaaggtccggaagcatatgagggagaggggcgttaggaagtcacctggtgttagttggattcacgtgggaagtgatgttcatgttttcacatcggaggagaaggtacatccgcagatggaccaaatcgccaaaaaacttgaagagctgatcgaccagataaaagctatcggatatgttccaaactttgcagtggtcctacatgatattgatgatgaacgaaaagaggagcaccttatgtatcatagtgagaaattggctctagcctttggccttattcacacacctaagggagcaactatccatatcatgaaaaacctcaggatatgtgatgattgccatgttgctatcaaactcatatcagttgttactagcaga

SEQ ID NO: 15990 - DNA, 277 bp, Zea mays
  Coding DNA Sequence Number=SeqID_1587
gagatattaatcagggctaccatgaattgctacacaatttttggcagatgcttccagttgaagttaacttggcttcaatttcttgagaagttatatcttggccaccattaattggcagttttggcccctgaagttggtgctttgaagaatatgaaagtgcggtcatttaacaacaacatgctagtttctgtccctgtagaactgcggcaatgtgttatgctggaggaattatcattagaacataacaagcttgtccggcctctattggatttcaggt

SEQ ID NO: 15991 - DNA, 387 bp, Zea mays
  Coding DNA Sequence Number=SeqID_1588
acgaactgcgcacgccgctgaacagcctgctgatcctctcgcgcagcctggccgacaaccgcgacggcaacctggacgacgagcaggtggagtcggcacgcatcatcaacgatgccggcaccagcctgctgcgactgatcaacgacatcctcgacctgtccaagatcgaggccggcaagatggaactgtccaccgtcgattacccgctggcacaactggcgcaaagcctgcgccgcaatttcgaccacgtggcgcgcgacaagcaggtggcctacgaggtcgtgcttcaagccgggctgccggaacagatccacaccgatccgggcaaactggaacagatcgccaacaacctgctttccaacgcattcaagttcacgtcgcacggca

SEQ ID NO: 15992 - DNA, 266 bp, Zea mays
  Coding DNA Sequence Number=SeqID_1589
atccggccaagaaactggtcaaggtgtccaagaacatggaggaggagcacctgaccagcaaggccaatcccaagcgtgcctaacgaaccagaggtccctgtgcagcacgaggatcacacgggaccaagaccctggggagacgcgacacgtggtctccactccagacggtagtgccccctacgaaaagggccaatccatcggtgtcatcccgtgtggcgaggacaaaaccggcaagcctaacaagctaaagctctactgcttcgcca

SEQ ID NO: 15993 - DNA, 287 bp, Zea mays
  Coding DNA Sequence Number=SeqID_1590
gttctcgacacgcacatcacttgggcaccgactccaccccctcggccaggatgacgcgcctgttggtagcaagagatcgcccctcactaagcccccccgcgcaatccgcaccggcccagtgatgcgtagttctggttccaccgctcaggaccattgtgcagtcctgatcttccgcacgacacggtgaaagagcagacccgccatgttcctcacacttgacccctggacaaggttccttaccgcaaagcccggcgcgaggaggacgaggatgcacagcagcgcgtcct

SEQ ID NO: 15994 - DNA, 255 bp, Zea mays
  Coding DNA Sequence Number=SeqID_1591
atggcacagcacatcgctgcactcgtcaccagcaagcaagctcaccggtccggggcagcagcaggaggaggaacggacggacatgcagagcgtcagcagtacaccaaagaggctaagacttccagctgtgcggacatcgatcagcattcaggactcaggaggcggccgtcatcctgtcctgcctaccatgtggccaaggagaaggaggaggagcaccgtgagtcgatccccatgacgtcgctgccggcattgaag

SEQ ID NO: 15995 - DNA, 349 bp, Zea mays
  Coding DNA Sequence Number=SeqID_1592
aagtgaagcttgacgagacggtgaagctgccgaacctggtctgcgacggcgtgatggtggccacgccggccggttccaccgcctacaacctctccgcgcacggcccgatcctgccgctggacgcgaacgtgctcgcgctcaccccgatcagcccattccgcccgcgccgctggcgcggcgcgatcctgccgcaccgcacccgggtcagcctgcgcgtgctcgatcccggcaagcgtccggtcagcgccaccgccgacttccacgaagtgcgcgacgtgcgcgaggtggcggtgcgccaggccgaggggcagggcgtgcgcctgctgttcgatcccgagcacaacctcga

SEQ ID NO: 15996 - DNA, 291 bp, Zea mays
  Coding DNA Sequence Number=SeqID_1593
catgcgcatggattaaggaaaccccattgaagctggaattgcggaacagcttgtcggtcaagttgctcagggtcgtgctgctgtcggcgctggcggtcggtgtcgtgctcagctgtgcgcaaatcgtctacgacacctacaagacccgccaggccgtgaacaacgatgcccagcgcatcctcgacatgttccgcgacccctcgacccaggccgtatacagcctcgaccgcgaaatgggcatgcaagtgatggaaggcctgttccaggacgaatcggtacgcatggcctcca

SEQ ID NO: 15997 - DNA, 350 bp, Zea mays
  Coding DNA Sequence Number=SeqID_1594
aacggtccacgtcgcggtggcaacaacagcaaccgtcgcggcggtgccccgcgcaacaacaaccctttcatatgttggtggtgcgcgaagtgtccggcagtattcagaccgtcgcgcgaattaaacgcaaggtgcgtctggcggcaggtcttgatgcggccaaccatctctcggctgaggcgatgcagcgcggctggcagtgcctgcgtctgttctccgaacagttgcaggacattcccccggaacaaatcccgcgtggtggcaaccgccacgctgcgcattgccagcaacgcgcaggattttctgactcaggcggaacagattctcggctgcgcggtgaacgtcatcag

SEQ ID NO: 15998 - DNA, 253 bp, Zea mays
  Coding DNA Sequence Number=SeqID_1595
ttggttgcatttttcatggctccttggtgacttctactctagatgtatgttcatacaaaacctcactccgtggtctgaaaatgtcaacatttttcaggccgttccgtttcttgttggatgcccagcatgcttgaggaatttcttgaatctcttctgtgagatgtcttgttctccaaaccaaagcctcttcattaatgtgacttcagtaaagcagattaatagcactatgactgttgatggcatagattactat

SEQ ID NO: 15999 - DNA, 402 bp, Zea mays
  Coding DNA Sequence Number=SeqID_1596
gacggccgccattctggcgatcgaagcgccgaccggcgtcggcaaaaccttgtcctatctgattcccggcattgcggtcagccgcgccgaagagaaacgtttagtcatcagcaccgccaacgtggcgttgcaggatcagatcttcagcaaagatctgccgctattaaagcaaattattcctgacctcaccttcaccgcggcttttggtcgcgggcgctatgtctgtccgcgcaacctgaccgcgctggcagccactgacgatcagcagggcgatctgctgctgtatctcgacgaacaggcggtgaccggttcgaaagaggagcagaaattctgcgcgcggctggagaaagacctcagcagctataagtgggatggcctgcgcgatcacagcgacgtggcgat

SEQ ID NO: 16000 - DNA, 385 bp, Zea mays
  Coding DNA Sequence Number=SeqID_1597
aagctgagtccgaagagaaggcagaaggaggcgaggcaaagcagagcgtcgacgagggtgcctctgatggcaaggctggagaacctggtgtgttggagcaggccgtgcaagagattcaggctgtcgccgcagctttgcagcagacagctgaacccgaagctgaaattccagctgagaccgccgctgctgctcctgctgctgaaacttcggctggaggtgacaggcctgaagaaacgaacggggaggtggagaaagatgacccgaagaagcggctcgacttcgctgggttcttcgccatgctgctcgagaggttctgctccccggccagcaagaagaaagattaagttaagtggttgcaggtccggcttgtggatttctcgttctg

SEQ ID NO: 16001 - DNA, 365 bp, Zea mays
  Coding DNA Sequence Number=SeqID_1598
atgctcgacaaactcgatgccgcgctgcgatttggtactgaagcattaaacctgcgggcgcagcgccaggagattctggcgtctaacattgccaacgccgataccccgggctaccaggcgcgggatatcgactttgccagccagctgagcaaggtgatgcagaacggccgtgccgaaggcagcagcctggcgctcaatgtcacgtcatcacgtcacattgaagcgcagaccaactcacagcccgcactggatctgctgtaccgcattcccgatcagcctgccgcggatggtaacaccgtggatatggatcgcgagcgtacgcagtttgcggataacagcctgaaataccaaaccgatctcaccct

SEQ ID NO: 16002 - DNA, 284 bp, Zea mays
  Coding DNA Sequence Number=SeqID_1599
gggtctaacctaccctggcacgagtgcctcccgaacaatgcatcgtgggactcgaatccggagaacattctgctgaccccagagctcgatcccaaggtcgactacttcaggctggccaagctgtgcaagagggacgcctgcgccggcgacggcgacagcatgcggctgtcgcgcatgacagggactgcggggtacatggcgccggattgggcgctgaacgtccccatcaacgccaaggtggacgtgtgcagctatggcattgtgctgctggacattgttatggg

SEQ ID NO: 16003 - DNA, 584 bp, Zea mays
  Coding DNA Sequence Number=SeqID_1600
atgatgatgcagtcgccgccggtgaccggcaaagcctggtggagcctgtcgattcacggcacctccggcgtaccggatcgcccggcggtgattttcgtgcgtcacctgccggacagcagcggtttctgggcggtgattgatggtcactatctgatggactttatgcgcgccatcggcgagtcgaaccgttatcagatgagcctgcgcttcaacggcggcagccccatcgccagcggtccggacgaccagccagagctgctgtacctcagcagtgcaaattataaggcggagtccagccgctatccaatcagcgtcagcgtgacggtacccgctgccgagctgatcaaagcctggcgtcaggcgctgcttattttcctgccgatggccgccatcttttcgatattgctgatggtgctgaccgccaactggctgcgccgccgcctctcatgggcggatgaaattcgccgggcgatacgcaaccgtgagttcacggtgcactatcagccggtgtacagcaccgggattcagcgctgcaccggtgcggaagcgcttatgcgctggcagcggcccaacggcgaaatgat

SEQ ID NO: 16004 - DNA, 581 bp, Zea mays
  Coding DNA Sequence Number=SeqID_1601
gacagcctcgtgcacggcctcctcgacgcggcgacggacgtgctggcggccctcgagcgcgccggcggcggcggcggcgacgacggcgacgcggcgcgggcgagcgcggtccggctgctggactccgtgacgggggcggccggcgcggccgtgctggagcggctacggccggggctcttccgcgccgtcacggcggtggtgcgcgaccgggtgtcccccgccgcgacgcggtccgcgctgcgggtgctcctgcacgcgtgcccgctgggccggaaccgcgcgctggccgtggaggctggcgccgcgcgcgaggccatcgagctggagctcgacgcgccgccgccgccgcccggcggcggcggcggcaggagggccacggagctggccttggcgctgctggccgagctgtgcgcgtgcgcggacgggcgcgcggccgtggcggcgcacccggcgggcgtcgccgtggtggcgcggcggctgcttcgcgtgtccgcggccgccgacgcgtgcgccgtgcgcgtgctggcggccgtcggcggccgggccgcgtcccccgaggtgctgcgcgagatggcgcgcgt

SEQ ID NO: 16005 - DNA, 468 bp, Zea mays
  Coding DNA Sequence Number=SeqID_1602
tactcggtccgctgtcggataaatatggccggcgtccggtgttgctgttcggcattctgttctttgccgccgcctgtgttctcaccacctgggtgagcaacatcgagcagttcgttacgctgcgttttatccagggcatcagcctgtgcttcattggcgcagtaagctatgccgcagtgcaggaggcgtttgacgaggcgttagctgtgcgcatgatggcgctgatggctaacgtggcgctgctggcaccgctggcgggtccgctggccggtgccgcctggctcacggtgggcgaatggcgcagcatgttctggctgtttgcggtttgcagcctgctggcgtttgtggtgctgtggcgcatcatgccggaaaccgccggcgatcgcagccactccattgcgttaccgaacctggcgcgctgctacggacggctggcgcgcgataagcaggtgatgtacggctccttcg

SEQ ID NO: 16006 - DNA, 206 bp, Zea mays
  Coding DNA Sequence Number=SeqID_1603
ggccccgcccgggtacaatccattgcaaatatttgttctggatttaggtctctgtaagctaagtatcgttcgtttacgggaaactaatttttttagaccagtaattcagaatgctgacaagtaaagcttgtagatgtttgtttctttctcctagttttttctgttagtagtggttgctcatgttcctattatgcactgagtaaaag

SEQ ID NO: 16007 - DNA, 358 bp, Zea mays
  Coding DNA Sequence Number=SeqID_1604
gcaaaaccgccaaattactttcacatgaacttgttattgtcttacagacttttgaccattatacatatgattcaggaattccggtaatctgtcgggtgtcccggtgatactaaatgatcccctttatttgttcactagctggatgcccgtacgttgcaacgggaatatataatatcggtatactccgataacttaaatacaaaatctatgttatattgttatgagaaaatgtttcataatcaatttgtgatcctggtcatacataaattttgttattttaatctagttgtttcaccattacattgcaaccatcagtatcatgcagacttcgatatatgccacgatttatatggtctca

SEQ ID NO: 16008 - DNA, 519 bp, Zea mays
  Coding DNA Sequence Number=SeqID_1605
gccaagctatcgacatgaggacctagccccctcgccttacatgccctcgacacccgcaccgaggcacagacggcgaacgggcggagcttggcctgggcggaggcacggacgcgtggggtggagctcgaccaatggccctgaccgaagctcggtagggtgggccgcagagcttcgtcctagagtcggcggggcagggaagagcttcgtctggcctcctaggtcgctggggtgtggggtggggaggatctttgtcctggggcgcggggcgggcaagggcagcgccgacgagtcggcagtaggccaaagcctggagcagttgagcttcgtcctaggcggtgcgacggatcagcggacgccggctgggcgctggggtgttctccggcggaggcgtcctggcgtctcgggagctgagctaagcactttggccgtgtttgtgaccctgtccctggccagcgcggcccgttcatctgccaggctagaagaccaaaactacctaaacgcggaatccctgcgccacga

SEQ ID NO: 16009 - DNA, 565 bp, Zea mays
  Coding DNA Sequence Number=SeqID_1606
ggaagcccgctgtccaggcaagactcgggacccgatgcttttggtttgttgggcaacacatggagagctactaggcgtattgacttactacagggtggatacagtccaacatattggcatgaagaagggaacgaagacacccaaggaacttacccaaccccacgcggaacacacagctatctggagacgccttgagaccatatgaacgctggagggagaagcaccacggcgactgagaaggatggccaatctgatataggcagaaaagagtagacctatgaagatgacataacagataaatgcccgaagcaagaagaccatactgctgagctgcaggagacctacgccagctagagacaagaaggcctgaaggcgtatccagaaaaacgtgtgttccaactgaagaaaggaagctactcggaggctcagtctcaacatagggacaggaagctagcccacctgaaatccaagctatgctactaatgaggccaccaaccacatgaaggggggcccaaagagtgacaggaggactgggggacttaaccgaaggacatgccaggcagcg

SEQ ID NO: 16010 - DNA, 582 bp, Zea mays
  Coding DNA Sequence Number=SeqID_1607
gcgcgcacaatcgtcaggtgattatcgaagcgatacgcctgcactgtgagctgacccgtgccgagctggcgcggctgacggcgctgacaccgcaaaccgtctctaatatcgtcgctgaactggagcaggcggaactgctcaccagccgtcatccgcgcaagcagggccgcggtcagccggcgattccggtgacgctgaatccagccagtgcgttttccatcggcatccatctcgaccatcagacgctactgattgtgctggtggacctcaccggtgaaatccattttcgccgccttattatggtgcaaaaaccgcagccggatgccacattagcgcgcattgccggggtgctggcggagatcaaacagcagaccgggccgcgctggcaaaaagtgctgggtattggcgtgatgagtggactgccggtgacgctggagaatgatgccaccgtcgcggcgattggcgaacgctttcgcggcgtggcgcgtcatcttaattcctttatttatctgtatattggtacgggcctgggcgcgggcatcatcatggatggccatgtgtacagcggccatgcgcacaacg

SEQ ID NO: 16011 - DNA, 399 bp, Zea mays
  Coding DNA Sequence Number=SeqID_1608
cccactttgtggtgccggaaatcgaagccatcgccaccgaaaaactgctggagctggaagcgcaggggcaaaaagtggtgccgacggcccgtgctgcacgtctgaccatgaaccgcgaaggcattcgccgtctggcggctgaagagctggcgttaccgacttcaacctatcagtttgcggatagcaaagcgcgtttcgtcgcggccgcgcacgagatcggttttccctgcatcgtgaaaccggtaatgagctcctccggtaaaggccagagcttcattcgcgaagccagccagctggatcacgcctgggattatgcgcagcaaggtggacgcgcgggcgcgggccgggtgattgtcgagggcgtcgtgaagttcgattttgaaatcaccctgctgacca

SEQ ID NO: 16012 - DNA, 251 bp, Zea mays
  Coding DNA Sequence Number=SeqID_1609
tgcttttaagtgaaaccatttccctcctatctatgtattaagggtgtgccggagcatcatcattgatgaaagggttgtgctaaatttcatgcagcgcatgtgtggcattgcgaccctaacaaaggctatgtctgatgctgcccgtccagcatgtatattggaaacaaggaaaaccgcccctggtttacgtctcattgataagtggccagtaagcatacatttttttattcctcgtattgcaattttatttg

SEQ ID NO: 16013 - DNA, 253 bp, Zea mays
  Coding DNA Sequence Number=SeqID_1610
gggcagactccctgggactataggtcctagtcgacgataacagatgctgcttgcagccttggatatttgtggagtgaacgcattgttgatagcatatggataagaaagtaatgtaattatctggagatgtgtaattatgtggcaatattatttgcaacaatgatgcatggagtactttcatgtatgatactgaggctttgcatttgatttgcttctatttggaaattatagtaaagcgtcgagcatacatatt

SEQ ID NO: 16014 - DNA, 320 bp, Zea mays
  Coding DNA Sequence Number=SeqID_1611
agcgcagccacgtcagcgtgccggacagtcgtacgcatgacttgccgcgcgtgctgggagctgacggcgcaaaaatgctgcggttgctggatgccggcgtttcgctgtgcatttatggtgaaaccggcagcggcaaggagtatgtcagccgtgctctgcaccagcaaagccgctggcgcacgggcaagtttgtcgccatcaactgtgccgccatccccgaagcgctgattgaatccgaactgtttggctaccagcccggcgcatttactggcgctagtaaaaatggctacatcggcaaaattcgcgaagcggatggcggc

SEQ ID NO: 16015 - DNA, 201 bp, Zea mays
  Coding DNA Sequence Number=SeqID_1612
atggtcatcgtcacggagacgaagcagcaacgtccattctccacgggtcgcaacctcgccaagctggctttgcatcggccgtgcagatcggggctccactgccgtctgccgcaggctccagtccctcctccgcctttggccagagattggatctgtggccaccggcccgacatcatggagatttcagaaagaccaagtggg

SEQ ID NO: 16016 - DNA, 128 bp, Zea mays
  misc_feature (65)..(65): n is a, c, g, or t
  Coding DNA Sequence Number=SeqID_1613
tgtgtgctcctttcctgtccggccgctgttgggcggtgtgcgtgccctttttctcggccgtgctngggtccggggtgctgtctgctcgcgtgggccttcgcgctgcttggctgggtggccggccccgc

SEQ ID NO: 16017 - DNA, 441 bp, Zea mays
  Coding DNA Sequence Number=SeqID_1614
agcgcccggacgcttaatttgctggcttttggggaagtgttggcgcggcagcttggcctgccactgctgctgtggcgccatttgctggtgctggccattggctggctggttggcgtcagcgtggccatggccggttcgattggatttgttggactgggtatcccccatttggtgggcctcaacggcctgaacgattattggtaccttcttccggccccggcgcttgcgggcccggcggtacttctggcggcggaccatttggcccggctggtgcttaccttggcccaacttccgaatggggtgggtcctgccacggttggggggccgctggttatcctggtaataggaaagtttttgggccaacttcgggtggccccagtccaaccaccaccgggaatggccaataacctttaaccagccagacctggttccgttggccgg

SEQ ID NO: 16018 - DNA, 364 bp, Zea mays
  Coding DNA Sequence Number=SeqID_1615
gaacagtatagattagcatcctcagtttggaaagccagatgtttagcgtcatatgctgacaaattacttttacagtaatacaatgccatagatctccatttccaccctcgaattgtgtaaacaatagtaacaattgatttccatatggtaatctgaattagtactgtatttaccacattttgttctatcaatttaacagtgtccctactggtgcacgatgtaagaatttctaatgctcattaagataatcaaaatcgaaaaacgataatccaaagtttctatttcaatttataagcatcgagtttcttttgtattgttgttgttttccactctactaatgggaactgtctattcttgcagtatt

SEQ ID NO: 16019 - DNA, 425 bp, Zea mays
  Coding DNA Sequence Number=SeqID_1616
gatcatccggtggtggttctctaacacccacggcaaaatcaaactgaatcgctgggacaatggcttagtgatcgtagaaatgctgccgccagtggataccacgcagtttgaaaccacgtcggtacgtaaactggcgacccactgccgtgaattaatgtctgctaagctggaagagttgaacgctgaagtcgccgaacgcgaaaaaaacgggtgcgcattcatgcgcaccgggtcccggatgcgcatcgacctgacccggacacacagccgcgcctttcgggcgcttcacaacacgattaaaaataacaacatggacacggcgtcttcacgccacgctcaaaagctttctgccggtatggcgctggcttccagcgttatgccttacgccgcccgcgccgccgcgccattgggcgatgtacctttgc

SEQ ID NO: 16020 - DNA, 368 bp, Zea mays
  Coding DNA Sequence Number=SeqID_1617
atgaggcgccgcgtcaggtacattggacggcatcgtgatgaagctcccaaggaggctagtgttgatggctacgacacagagtccagtgtcagggaggtgcagcagcctccagcgacgcaggaagttaaaaggagcgaaagaaactgtaaaagaaagcgggaggcggaagcgagcagcaaggacaacaacggagacgagggcaagaagaataacaaggttcagggcgccagcaagaagatttcaaaaaaggcgaagaagcggaccgtcgaatccaaggacggtgaccctcggcacggcaaggaccggtggtcagccgagcgctacgccgcagcagagaagagcctgctcaacatcatgcgctcccgaga

SEQ ID NO: 16021 - DNA, 196 bp, Zea mays
  Coding DNA Sequence Number=SeqID_1618
ttgcttagagatgcagtccgaacccatcgaccgccttggtgagcgcgtgctgatcaccgacgaaattggtcgcaacgggaggacgcttttgtgctgcaatcaggcttcctgaacgtgctgaagctcctgtggtggagtgcgcatgcctcattggccaaccaaaattcaaggtaccgttgctgaactcacaactaat

SEQ ID NO: 16022 - DNA, 502 bp, Zea mays
  Coding DNA Sequence Number=SeqID_1619
tgcctgcaggatcttttcgatgagatcgcgctggagagcctgccgctgctgcgccgcaaagggctgacgctggtggtcaacaatcagctggccaacgacgagatgcgctttggcgatcgccgcgcgctgcgtaaagtactgaccacgctgatgcactacgcgctcaccaccacgcagtggggcaagatttcccttgatatcaaagccagcgacagcaaagccaacagcgtgctgttccatctggtggataccggctcaggcctgaccggcgacgagctggccaacgtcgatttcccttaccttggcgaaaccacgcaggatcgttacggtcaggcgtccggcatggcgtttttcctgtgtaaacagctgtgcaaacagatgggcggccagctggagattatagccaaaccggatatcggcacgcgctacaacattcatctgccgctggcgctagagcagcagagcgagcaggaagagaaactgctggaatgcgtgactgcgc

SEQ ID NO: 16023 - DNA, 364 bp, Zea mays
  Coding DNA Sequence Number=SeqID_1620
ctgaactcaggcatcactggcgcggcatgggcttttacaacagctttatagaaccggtaacgcataccctggataggacacgcggagatacagtgcagaccgggcttgccatgtggtaaccatagaaaggaagtcaaggacccccaatgggggtctcaaactatgcagcaatagaccagagacgcattcgccatacttccaggcctacagcgaacccacgttaaatataggccggagttaaacgctctagacaaaacgaatcccatattgggtatgaccttaaccattacaataggtctcgtacacatgaatacccccggtcgcccgggaatgcaacaaaatctattagatctacgccgctttg

SEQ ID NO: 16024 - DNA, 357 bp, Zea mays
  Coding DNA Sequence Number=SeqID_1621
caggtgctcgacacggaagccggcacgtgcgacgtcgtgctgcccgcgcacatcgtcgacggtatcggcacgtggttcaaccgcgcggtggtgagctcgcaggcgttcgcgaagcaggtcgcggcgctgggcctcgcacccgatgcggcgccgaacgcggaccaggcgctgaagctgcgcacgtggctcgcgaacgacatggagcaggtgttcgcggagatgctcgatcctgcgtcgcgcgcggtgtcggcggtctatcacctcacggacacgctgtgggcgctgcccgcgttcgacgcattcgggcgcaagcacggcgcggcgtcgctcgcgatcgtctacgacgcgcacgcgact

SEQ ID NO: 16025 - DNA, 158 bp, Zea mays
  Coding DNA Sequence Number=SeqID_1622
atgagtctgcgtaatattgttgccatcgatttaggcgcatccagtggccgcgtcatgctggccagctggcaggctgaccgtaagcagctcagcctgcgcgaagtgcggcgtttcgccaacccgcgcgtgcagcgcggcgattatgactgctgggattt

SEQ ID NO: 16026 - DNA, 251 bp, Zea mays
  Coding DNA Sequence Number=SeqID_1623
agtactgcgtctcttgtgccattcacggcaagattgtccgtgttcgttctcgtgagggtcgccgtaaccgtgctccccctccccgtgtccgctacaacaaggacggcaagaagatcacccccaccgttgcccccaaggtctaaatatgggaataatggtgtttgggcgaagtctggttacgtttaacggcttcatgtaaaaatttgattagatgaatacccgggacagaaagaatcctggcggctaaatga

SEQ ID NO: 16027 - DNA, 267 bp, Zea mays
  Coding DNA Sequence Number=SeqID_1624
tgcattgcgtccatcctgtcccgatcgagttcgggccccgcctgttgttttttgatgttttgactatgcatggggcccctttttttttaaaaaaaaaaaaaaaagttcaaaaaaaaaaaaattaaaaaaagttattccgcgataaaaagggccttgggcaagggggggcgataggagttaaagttgtttataactacccccaaagacgagattgtgttgccccctgtttgggggagcttggggagctttttgcgttgcagggctgtt

SEQ ID NO: 16028 - DNA, 527 bp, Zea mays
  Coding DNA Sequence Number=SeqID_1625
gaatctgcacaaacaagacctcagtcggatccccacggggcaagcccctctgccggccctcctccgcatcccactctcgccggccgccgcagccaaggcaagaggacgcctccccacacccgatctcccctcccacctccgatcgctacgaaaagcccacgcccgcctcgtccctccggccctcccctccgcacgcctcgcttgccgcgctatttcaaatcccgctcgaaccctagtaactacctaccccgcatggtcgatcgtgccgccgcgcgggcacaggcggtgagctccgacccgccgccgcctgcactgctggagcccgacccgcggctcagccagcccggggccgctgatgggcaagaggtcgcttcggcgggtgcgaccgcgggtccgccttccctgccccaggccagcgacgctgaggaagacgctcttgcctcgccagcggggcagccgggcgagcggtgcagagcgatgatggaggtggtggccaaagacggggcgtggaaggtgaccaagctggt

SEQ ID NO: 16029 - DNA, 179 bp, Zea mays
  Coding DNA Sequence Number=SeqID_1626
acctatctcgagtcgcgagccaaagaaagaacttgcatcttggaggggcccagtggtatatcttaatttacccacaaggatgtgatgtctgcaatcacctctcactctttctttgtgttgccaaccatgataagctactcccaggtagatgcttaattttttgttcaggatggagtcac

SEQ ID NO: 16030 - DNA, 298 bp, Zea mays
  Coding DNA Sequence Number=SeqID_1627
gcagcttcgccaaaggcggcgtgaaggtggaagtgcagccgggcttaagctctgaagtctccacccgcgtgaaggcgcatcagtatgaagccacgctcaacgcctggggcgcggattacttcgacccgaacaccaacgccgcgtccttcgcttacaacccggaagatggcagcaaaaccattgcttatcgttcagactggcacatcccggagctgagcaaacagacgctggcggcgacggccgaagccgacagcaataagcgcgttgcgctttatcaggcgatgcagcgcgaagtgct

SEQ ID NO: 16031 - DNA, 296 bp, Zea mays
  Coding DNA Sequence Number=SeqID_1628
gtgtcctgtgcttgttgtgccctccgctcctgctgttggcgtgggtgcatcctgtggcggtttgcttctggctgttccgcccccagcgccgcgtttgtccgtgcggtggtcgtgcctgcccctggctcgctgcgggtgtgcgtttctgtggtctctctgcccctggttctgtggggtggctggtgcttgtccgttggctcctgggcttgtgtgccgcggccgcggcgcccggccccgcccgccgcccggcccccgggtctgtgtgggctccggcagcgggtggtcggtgtccccgt

SEQ ID NO: 16032 - DNA, 332 bp, Zea mays
  Coding DNA Sequence Number=SeqID_1629
ctgcaggccgaaagtctggttaaacaggtacctaaagggaactactttttgatgggcggttcgccggtggataataacgcgcgtctttttcgtgcccggcagatgaaaatgttaaaaccctacatcgataacggcagcattaaagtggtgggcgatcagtgggttgatgcctggctgccaaaaaatgcgccgaaaatcatggaaaacgcgctgaccgcttacagcaaccacattggtgccgtcgttggcttcaacgatgccaccgccggtgggggcattcaagcgcttagcgcgccaggaccggcgggccaaagcgccatttccggtcagga

SEQ ID NO: 16033 - DNA, 172 bp, Zea mays
  Coding DNA Sequence Number=SeqID_1630
gtgggtcctgtattaggtttctaagctgggcgccctctaagtatgcaggaatattcggattgcccctgctacctctagggcgttcaaaggagggcctcgctgaatccaagctgcaaagcataagttaaacaagtacggtagtcctataatggcatgtcctactcatagaccc

SEQ ID NO: 16034 - DNA, 195 bp, Zea mays
  misc_feature (108)..(108): n is a, c, g, or t
  misc_feature (131)..(131): n is a, c, g, or t
  misc_feature (138)..(138): n is a, c, g, or t
  Coding DNA Sequence Number=SeqID_1631
gcccacaacgacctgaaatggcgcaacctgctggtcgacgaccagaacacagatattcttcatcgactgccccaccggcgatttctggcgcggcttcatgtggcggcnccggatgacacaccacttggagngcctggncaaagtggccaaataccacctgtcggcaacccaacgcctgcgtttctacctgcaata

SEQ ID NO: 16035 - DNA, 254 bp, Zea mays
  Coding DNA Sequence Number=SeqID_1632
accccacgatactgattattttgtggcaaaagatgttatagaagggatcaggcttcaggctatggagaatatcaataaatattatgttaaaacaataaaatggcgtgacaagccagggcatttagtacttcggagagtggccaacccagatatagtatgcaagctacagttgaagtaggaaggaccttttctggtataacttgtactctgcggttgattgtggatctgtttccttacgattgtttgctcctcca

SEQ ID NO: 16036 - DNA, 480 bp, Zea mays
  Coding DNA Sequence Number=SeqID_1633
atcgtacgctgattgactacggcatggaacataaatctgtgcttgacctcaaagaaaagatgcaaatctttatagtggaaactctagcaggcacaaccatcactcttgaggttgaaagttcagagactatcgacaacatcaaggaaaggattaaagaaagtgagggctttcccaagggtcagcagtgtctcatatttgacaacaagcagctagaggacaacagcaccttggcggacaacaacatttccgaggggtctaccctcctccttgtcctccacaggcttctcggaggaactatgcgtatctccataatcatatcaccgggtgagcgtatcactctcgaagttaagaggtcagatacgatcgataatgtcaaattaaagatctatgagaagacccatattcagcccatacagcaaaggatcctatgtgaatggagcatgaatatggagggctgcaagacccttgcagactatgaca

SEQ ID NO: 16037 - DNA, 169 bp, Zea mays
  Coding DNA Sequence Number=SeqID_1634
ttttttgatgggagtacgtttcagaactgttaaaatcttgatttgctgttcttctaatcagggaacacgcatacccaaggcacatagcgctggtaattgctcagatcctgatggctgttggtcatttcctctttgcaatggcttggcctcgaactatgtacataggaac

SEQ ID NO: 16038 - DNA, 227 bp, Zea mays
  Coding DNA Sequence Number=SeqID_1635
tacggaacgcatcgctcaactgctccacgaaaagcattctcgctatcggcaggtccaattggagccggccaactgcgctgcgattccggacggcctgatcgaatcgctgctcttgggtcacacgaaaggtaccatcacaggcacggactgtgcgcatagaaggctatgcccaacaggcggcggtcggcacgctaggcctcgacaaagtcggtgagctgacgctgtac

SEQ ID NO: 16039 - DNA, 225 bp, Zea mays
  Coding DNA Sequence Number=SeqID_1636
gcgcggtggtgctcccgcagcataacggcacgagcggcggcggccgccaaggcgggcaccgtggccaggcaggtcttgtagcgcattcttgcaggcgacgaccacgactgctacgtgttgtacacgcaggacctccatgtgttcctcgtcaagtgcactgacggcctcgtggcgctctgcatggccgactacgccgccgggcgtaagcaccagtgcacgttttgg

SEQ ID NO: 16040 - DNA, 247 bp, Zea mays
  Coding DNA Sequence Number=SeqID_1637
gaaagcaaactgtgccaggtacgcggtcgccaaagcgcggctgggcaggggagtctgccaaaacgcgcggagacgccgcctgctgcgcacacctggtgctggcgacagaagtcaacaaagcgcgggcggccaccgcaggctgcgagacaatctcctgatggtgaacggaaccagcagggggaagctcaccaggctccagtcttatgaacagctagctcctactgctgccgtgacaccggtgcgagca

SEQ ID NO: 16041 - DNA, 246 bp, Zea mays
  Coding DNA Sequence Number=SeqID_1638
ctgcaggctattcaaaatgagagagaaattgagtcgttgcgtaaaaaaatgacattctgccttgaagcaaaagagaatcttgaaaggtatatagatcatttatcaaatcatttggtttcacttctccacattgacaatattgttaattctgacgctcagatggaacttaagactttggttgatgcaatagcttctgcgagtcaacgggaggcagaagctcatgaaactgctatcggtttggccaaa

SEQ ID NO: 16042 - DNA, 553 bp, Zea mays
  Coding DNA Sequence Number=SeqID_1639
aaggcaatcttcatcgccacggatattaccaaggacgatcaagtcagcgcagcggtcgccaaggttgtgagtcgtttcggaggcgtggactttttggtgaacctggcctgcacgtatttggacgacggcttcaagtctccccgcgctgattggcagactgccctcgacgtcaacgtggtgtccggaatcatgttggcccagaaggttcatccagagatgaaggcgcgtgggggcggtgcaattgtcaactttacgagtatctcggcaaaggttgcccagacggggcgttggctctatccggtttccaaggcggcaattttgcagctgacgcgcagtatggcgatggacctcgcgccagaccgcattcgtgtgaacgcggtgtccccgggctggatctggtgcaggttgatggacgaaatgagcggtggcaatcgagcgggtatcgacgaactcgccacaccgttccatctgttgggacgggttggtgatccggacgaagttgcgcaggtggtgctgtttctgtgctccgacaatgccagtttcgtcaccggcg

SEQ ID NO: 16043 - DNA, 135 bp, Zea mays
  Coding DNA Sequence Number=SeqID_1640
ttctaaattgcgcaaacaacatgggatcgctaaaatgaatgtccgttggacttctaggctttactcgcgaaagcctgaatactcactgaacttttgtagcgtcaaaggtccagaacccataaacatatatgttgc

SEQ ID NO: 16044 - DNA, 81 bp, Zea mays
  Coding DNA Sequence Number=SeqID_1641
acgacgacgggctcacaactggattgaatgaagagctcgcgtccgcgctcgtgacacgcgttggctgggtggtggctgtgc

SEQ ID NO: 16045 - DNA, 348 bp, Zea mays
  Coding DNA Sequence Number=SeqID_1642
tccgttacctttgctccgcgatccgccacctcaatcggttccgctgagctcgctccctccgaacgcgtacccgtcgcggcagttttcgcccccaccacgcccaagctcatcgtcgtcgtgcaccgcgcctcctcccctcaaccaacgtcgaggccgctggccacgagcgcgcgcacgccatctgggcgctagattcactacgcacccgcgcttgccctgcctcctcctcctccaccagctgaccctgctccagatgtggatcccgagttcgagtcctcgctcgaggccatggtgctactgcagcgctccgtcgcagatctccctctacgagcaccgacggaggatccg

SEQ ID NO: 16046 - DNA, 225 bp, Zea mays
  Coding DNA Sequence Number=SeqID_1643
gtaagttgcagtctgcggttctcaaggatgccatctcccagattgttggggcactaagaagaagaataagaagctcaccgagactgttgaacttcaaatcagtctgaaaaattatgatccacagaaggacaagcgtttcagtggctctgttaagttgccccacatccctcgaacaaagatgaatgtgtgcatgcttggtgatgcccatcacattgaggaggtaag

SEQ ID NO: 16047 - DNA, 208 bp, Zea mays
  Coding DNA Sequence Number=SeqID_1644
agttcttcatgtgccacgcctgggaaaaccttgatgcatgccagatcattcggctggcagctcatactccttttgccacctggcgtctgagcgatgaggcctgtaccgagcgctcttcccaacacaagcacatcctgagcggggaagggcgcctgatgcacattcatctacttacccatctgggcggtatgtcacaccgattcgtggg

SEQ ID NO: 16048 - DNA, 263 bp, Zea mays
  Coding DNA Sequence Number=SeqID_1645
gatcttccagtagatatcgatgggatcatgagcctgtttatggttctccactttatggacaacaatatgatttctggagtgagtattcatacttctgcgtcgatcgaatagcagttttactcgctttggagagctgcatctgttcatgaagggtaatacaagggcggcgcttatgagcacaatgtttatcacttctagcttcgtgtagcttgtcatatgggtcagtcaggtgggaactgagtaaccgtctagggatgctgccc

SEQ ID NO: 16049 - DNA, 400 bp, Zea mays
  Coding DNA Sequence Number=SeqID_1646
ggttgagtgcatagtatcccctacaagttttgcaaagaggaccagttcatcaaagagcattaagagaggtaaagccagggttgatacagttaacaactcgtactccaccgaccacaggggatcttgtgtggttacaggtggcagcttcggaatccccggtaagatgaggcagttgtccacatgaaatttaaaggacatgtcaaaaagctaccgtcaagaaagttggtataggaagtttgtagttaatagcaagatttatgtcgcagagttatacagggtattgaatgcagttttaatggcgttcagaaagttagtggctgtacttttcaggcatgcaacatagttggtccttctgttcccaagcacaaaggttatgtatgctcaatatagatcgcaccaa

SEQ ID NO: 16050 - DNA, 325 bp, Zea mays
  Coding DNA Sequence Number=SeqID_1647
accactgtcgtcttccgtgctggatccgcctagaccgtgcgccggtggcgtcttctacgccagatccacgctagcccgcgccatcgtgcgccatttgcatgtcgggacgtcgtcttctgtgtcggatccgcctctggacgcctgcgttccacgccgaatccgcacccgcctcgatccgaccgtcgtcgtaccagtgtaccactatggtccacgcaggacctacccgcctggcatccacccatctccagccaacatcgtctctgatgaggacctgtcccgtgcaaactgctggccagatccgctccaggctgaccagattcgtgtc

SEQ ID NO: 16051 - DNA, 313 bp, Zea mays
  Coding DNA Sequence Number=SeqID_1648
aatttacctgcgctgaaatcggcggtggagcacggcgctgacgcggtgtacgtcggcctgaaagatgacaccaacgcccgccactttgctggcctcaattttaccgataagaaactggcagaagccgcgcgcttcctgcatcagcaccggcgtaaactgcacgtggcgatcaacaccttcgcccatcctgacggccttaaccgctggcaaagcgccattgacgtcgccgcacagaacggtgccgatgcgctgattctggccgatatcgccacgctggagtacgccgccagccgctatccgcaggttgaacgtc

SEQ ID NO: 16052 - DNA, 252 bp, Zea mays
  Coding DNA Sequence Number=SeqID_1649
cacatctcttacttgctgcacgctgccgggccatgttcgaacaccgcaggcctgccactcggcggcgaacagcccttttgctctaagcttcttcagccacgttacgaaagttgcgcgcctgaatacctgcaagacactggatgtctccgccgtggctgtacacaaggtgaacctcgtcttgcctgattgtgaagagcacaatgctaatgctccaaactacgcctacctgcttgacgcatccgagactgtcgg

SEQ ID NO: 16053 - DNA, 296 bp, Zea mays
  Coding DNA Sequence Number=SeqID_1650
cccctcccggaacacagaaggagagcgaacacgcacgacaagcacaggcgagcaaacggccaccccaaggcccgaagaggtagacaggccccgcatgcggagagaggcaacgaaagccccacccgccccaaaagagcatcgaacgaccggacgcgcacgggagaggaagcacaaccccgaagagaaggaccaccccggaaggtgcagaaggaggcacccgaagaccgcacgcggacgaacccccccgcaaaccggagccctccgggcgacgggaccaacgctaagcgcgacgattt

SEQ ID NO: 16054 - DNA, 367 bp, Zea mays
  Coding DNA Sequence Number=SeqID_1651
cgtctggcgggcgggattttcctatgggtggcatgtatactcggcctcaggggcaaatggctccacaagggcaaatgacatccattcctggtgtaagctctttccagggaatgggcaatgttggccttacaccgcccccgcctttagctctcgccgcctcgaggtggctcggcaacacagtggccatccctggagcaaaacaaggattgtactgaacctgggcgttcgggtgcccctaggtttgtagcatgtaaatccatctcgaagcaatatcagcgtatctagactcccgcccctcccccgggattttttctcgattattgctcaggcagctagggtttaatgctatcccgtcactgtggtttcc

SEQ ID NO: 16055 - DNA, 226 bp, Zea mays
  Coding DNA Sequence Number=SeqID_1652
atggacggcgccctgctatccgaacaacataacgctgctggtgtggaggttacacccatgcgtgacctccacacttgccagagcgctaccgccccctactgttcgttttatgccttcctttgtgggcacttacgccggctgtcccagtaaagctctagatcgggggctcccttgcagggaacgatttaatgctttgctgtatctcaaccccaagaggctttattag

SEQ ID NO: 16056 - DNA, 133 bp, Zea mays
  Coding DNA Sequence Number=SeqID_1653
agtgcaccgggcattccggcatgtccgggcggctcccggcatctttcggctggcatcggtcagatccgcacggcacaactcccgggaagcggcgcgcattcgccaatggtaggccgcccggagccgtgtccac

SEQ ID NO: 16057 - DNA, 97 bp, Zea mays
  Coding DNA Sequence Number=SeqID_1654
tactcgcgccttgtgtcgacctgaagctgataaaggaggcttatcagaagagaaacagtgtgccgctatagcatgctgtggccaatgatacacctag

SEQ ID NO: 16058 - DNA, 591 bp, Zea mays
  Coding DNA Sequence Number=SeqID_1655
acattaacctgaatcatgcccgcgccgagcgctgggttcaggaccacttccgcgtagatgacgattttttcgatgagattcattcggcctcaccgcgcacccggctggcgcagcaaaacgatgcgctgctggcggtgctgaatgacgtcaccttcagtaaagaggagcgcagcacgcaaaatgcgacgctgtggatctggtgccggccgcaggtgatggtcagcgcgcgctatcgcccggttggcatgattgaacgtatgcatcagcagattgatcggctgtgtttcagcgcgccggatgcgatgctgctgtggctgctcggcgaacaggaagcgcagctggagcaggtggtgcggcgctccagccaggcggtggatgcgatagaagagcggctgctgagcgcggcgatcaaagccaaccgcagcgagctgggccatctgcgccgcatgctgctgcgcgtccagcggctgctggcgccggagccggccgcgctgtttcgcctgcttaaccggccgccaaactggctcaaccgggagccgctcaatgagctgcggattttcaccgaggagttcagcgtagcgcttaacgatc

SEQ ID NO: 16059 - DNA, 572 bp, Zea mays
  Coding DNA Sequence Number=SeqID_1656
gctttgtgttctcattgcttaattttaaactgacatttatccttgtgaaaggttatttttaaaattgtagaggatcatccaagggatgttaacgcccaaatggaaaattttagcattgtctatggtgacgagtctgtgcctcgcttgtatgagaactctcgaatatcttcggatcaacttcctggccaatcaggtattgtgaagcgggctgtggcgcttggacgttaccttcagaacccgttggcaatgattgcaacactgtgtggacctgggaaagagatactttcttggaaactgcatgctctggaacagtttctaactcctgatgagaagtatgaaattgttgagcaagtaatggttgatgcaacaaatcagataggttttgatgtcaatcttgctgctagccatgagtggcatttttctactctacaatttattgctggtttgggtccgcgtaaagcttcagctttgcagaaagatctggtaagagagggatccatttttagtcgcaaagagcttgtaaaacctctaggcaggaaagtattcatgaatgcttctggatttttacgtgt

SEQ ID NO: 16060 - DNA, 490 bp, Zea mays
  Coding DNA Sequence Number=SeqID_1657
ccggtcgtcagcgtgtacaagttaaaagggaatcagctaggctactccggcaacgtgatcaactttcctcaggaggtgaacgagttggcaaccacgctgccgcaccgcgtcgccgacttggactgtctgatcgcagtgcggtcccagggagctgggggctacatcgacttccaggtccgcgccgggagggtgcgcgccgcgctcctgtacttgaagacacaccatcgctattacagcgacgtcaacatttcggaggaaaacctcgcggagctccccgaagatggctgtgtcttcaaccaggtaccaggcttccaggatccccaccctgttgctgacacggtcccggacgtcgatgaccccaccgccttacatctcccacaccttgcatctccgggtggcgtgggcgccgacgccgtccgccccgccccgccgcctgaaggccccgctgctgaccctgaggtgcacgaagacgttcccgacatccatgtca

SEQ ID NO: 16061 - DNA, 557 bp, Zea mays
  Coding DNA Sequence Number=SeqID_1658
ggcgagagtgcagcggcccgacgtcgtgtggagcctgtcgtcgcgggtgctcgccgggatgtggcttaagacggtgcggaacccggacgtaaggattggcggcggcggcggcggcacgtcctgctgcgctccggtgtcgcccccgccaccagtgcacgccctgcgcgccttgctccaggacctcagcgacctgcacgagtacgccgaggagatcgcccgcctgcccaacaactgggacgcgctccgcctgccccggcaccggcggctcgtggagggcgagctagaagggtcggtggcgctgctggacctgtgcggggcggcgagggacggcctcgccgacgccagagaccaggtccgggacctgcgcttgctcctccgcagacaccgcgcggcgagccacggcggaccacgccggggcggcggcgccgccgccgctgccgccagcgccagggcggaggcgtgcgctgctgggtcgctgaagaaggtggccagggccatcaggcgggagtcctgctacaggcgttctgccgttggtaacaccagagacgacgacctct

SEQ ID NO: 16062 - DNA, 180 bp, Zea mays
  Coding DNA Sequence Number=SeqID_1659
accgtggagtttcccagattactcggctcggagcacaaaccccttttgccagctggcgtgatacctaagaggaccggacctatcgtccttattaccaattgcgtaccatgaatggccaatggcgccagaggcggggttttctacttacgcatctatgcggcatttattaccgtggattga

SEQ ID NO: 16063 - DNA, 310 bp, Zea mays
  Coding DNA Sequence Number=SeqID_1660
atgcgttctggttcgagaaaaacgacacgggatcccagtaatcgacgccaggcaaaagcgagaggcacctccgctccgctcggcttgccgtgggttccgtcggcccggcccctcgccactgctgtagagtacgccctttcctctccggtcgagtcagccgcgctcctttacgcctcgccgctgcccccgccaccgcaacgcctggtgcccgggggccgggccgggtcgcgtggtggatcgacgctgtaccagtaccaccctgcctgccggccggccggcctttggtgcgtcgcgtggcatgtgctgcttg

SEQ ID NO: 16064 - DNA, 348 bp, Zea mays
  Coding DNA Sequence Number=SeqID_1661
agatggttggcggtattcacccgaagaagggtggcgaaacctggaccggttccaagggtgaaaccctgccgatcttcgcaagcgttgccgaagccaaggaaaagaccggtgcggacgcatccgtgatctatgttccgccggcaggtgcagccgacgccatcatcgaagccatcatgccgaaattccgttcatcacctgcatcaccgaaggtatcccgggcctggacatagggcgcgtcaaggttcacctcgaccgttccacgtgaggcttggtcggcccaaactgcccggccatcctgaccccggaagattgcaaaatcggcttattgccgggctcaattttcccaag

SEQ ID NO: 16065 - DNA, 564 bp, Zea mays
  Coding DNA Sequence Number=SeqID_1662
acatattcctgattactccaatttgtgctttggcaacctgcaagtttgaatagcttggacattgatttatggttatatttccctcttttgctttgctttcataatccagaagaaacagctgagcgcgatgttggatgaggaccccgctttgatggagaagagggatgccttggtcaagaggctagagctgtacaaatctgcaaggaatgagatcgactcggtcgcatggaaatgattggcttgtgacagctacatctggaatgtatgtaaaatgtacaaccgcagcagcacacgtgtgattgcagtagaatgttcaattcttttttacatttgaatttactctggaggccttgtacgcagttttcactcgagtctttgccggacatgcttatttggccgtcttggccttaacacgattgtgttatgcgtggatgatctggtctccggttgatataagagagtgtatatgtattcttttgttgattttattactgccttgatggcctccaaacttctattgggtggggtgccaggctggacaatctgtcagatgctacaaaatga

SEQ ID NO: 16066 - DNA, 283 bp, Zea mays
  Coding DNA Sequence Number=SeqID_1663
gttttctaatctatacaggtcatatattatagcatcacatgctggaatcgcaatctcgacacagaggaccatttatgtcgattggcatgataggcttgttacagtcacagcatcctatcataagcatatgaatgcaagaatttagatatataaaaagctatatgaggatgatctctcccgagttaatttgagctccccatttcgatatgcaggccttacattcccaagcgaaccaggtgttgctgatggttagatgcatccgcaggtgcaatagactaatggt

SEQ ID NO: 16067 - DNA, 254 bp, Zea mays
  Coding DNA Sequence Number=SeqID_1664
ggtcgggccgatgccctcaaataaaagaggctgtattattcttgcgctggatatcatcttgctgattgctttgctgaagtttttggcttatagcgaaaaagcaaatgcagggttggcattgatggcatttgtcggtgtggtatggcttaccgaaactattcacgtcacaattaccgcactgggtattccaattcttgcggttggaatgggattgatgaataccggagacgcgctgaaatcttttgcaaacccaa

SEQ ID NO: 16068 - DNA, 487 bp, Zea mays
  Coding DNA Sequence Number=SeqID_1665
caatcgggccttgcgaaacgactgtggccgaaccatggacatctctgaatgcgcttcttgctattccaagtctgaggatagatgtgagaactaaatgcgcctattatgcctgctgcctgataaaattgggagcgatgcctcttgctgcgactataacccgagcagggaggcattgagggtattaacagatagagaccctgtttaagagggggaaaagagagagcaacttggagagggtatgcatgctgtagggtagagactaaagctgagtggacaagtccgcacttgacactatatcaatggtgacacagtgaatccatggggacagcaaaatcataaggactacgctggacactgggtccctccagggggtgcgagcactgttcagggtatgggcagactctaccattgatggatgaatctagagtaacacttcactaggacgtgatgatgaattcagggttcagggacccttcaaaaacagatg

SEQ ID NO: 16069 - DNA, 322 bp, Zea mays
  Coding DNA Sequence Number=SeqID_1666
gcagacgtactgctcggaagatctcggcggcttctatctcgacgtgctgaaggatcgcctgtacacgagcgcgcccgattcgcgcgcgcgccgctccgcacagaccgcgctgtaccacctgacgcacgggctgctgcgcgtgctcgcgccgttcctgtcgttcaccgcggaagaagcatggaaggtgttccagccggccagcgacaccgtgttcacggaaacctactacgcgtatccggaagtggccggctcggccgcgctgatcgacaagtgggcgctgctgcgcgaagtgcgcggcaacgtgacgaaggcgctcgaggaa

SEQ ID NO: 16070 - DNA, 560 bp, Zea mays
  Coding DNA Sequence Number=SeqID_1667
ttacgcgttgatatgcccggcggtatagcgcacttcatcgtcatgccaaacctgaaagagttctacagccgttatcctgacatttacctgatgaccggcgtcagcgaccggcaggttgacctggttcaggagggtgtagactgcgtgatcagaaccggagagttacttaactccacgcttgtagctcgtccgctcggagaatttcgctggataacctgcgcctctcccgactatctcagggagtacggtattccgcagtcacctgaagatctgtctcatcatcgggctattcattatttttccggacaaagccggcgtacagacgaattgcgttttgtaaagggaacagaaacgctgtccgtatcggtcagtgggcaggcagccgtcaacgagacggggctttatataaaaatgtgccttgaagggttcggactggcgcagcttgctgaaaatgttgtagcagaacacctggagaaaggaacgttggttgaagttctggccgactggcagccgccgtctgttcctgtcacgctactttatcctcatcaacgttttctttc

SEQ ID NO: 16071 - DNA, 579 bp, Zea mays
  Coding DNA Sequence Number=SeqID_1668
gatgatcaatgcgtttcgggccgatccggcggcggcaccgctaccgacaccgagcggcaaaatcgaaatcttttccgccaccatcgccagctttggctatgaaaattgccccggccatccggtgtggcgcgcgccgcagcagcagccggatgcggagcatccgctgtggttgatcgctaatcagccggccacgcgtctgcacagccagctggattttggtgactacagcctgagcggcaaacgcgaaggacgtgaggtgtgcagcctgcatccgcacgatgccgccgcgcgcggcattaccgacggcgacattatcgagttgtacaatcagcgcggtcacgtgctggcctgcgctcgcgttaccgaaagcattatgccgggtgtggtgcagttgccgaccggcgcctggtacgatccggtcgatcccaccgcgctgcgaccgctgtgtcgccacggcaatccgaatgtgctgacgctggatatcggtacttcatcgctggcgcagggctgtagcggacaaatcaccgtggtgcaactgcgcaaataccgcggcgaactgacgccggtgcaggcatttat

SEQ ID NO: 16072 - DNA, 295 bp, Zea mays
  Coding DNA Sequence Number=SeqID_1669
gatcatcgccaaagctaatccggatgcagtaaagggcttccagcatgaggtgaaaaatgccggcagcgcgtcgccggaaggcgagggcaactgggccaaatcctcctttgaggatctggtgcaatacaacgacggtttcaaaaccaatctgattggcacgccgcagcaaattgctgagcgcatcatggagcagaaacgcgctggcgtggatttactgctgctggcgtttctgcatttccatgaagaggtggagttctttgggcgggaagttatcccacgcgtgcgagaactggaa

SEQ ID NO: 16073 - DNA, 307 bp, Zea mays
  Coding DNA Sequence Number=SeqID_1670
cctggcttggctgggaaacggcattgaacaatgccctggcccgtggccagggtgaactgctggcgcagatgcgcgagcaatggccgttcttccgcacccgcattgacatgctcgagatggtgctggccaaggccgatgcacagatcgccgaggcctacgacgaacgtctagtgcaaccgcacctgctgccattgggtgcgcacctgcgcgacctattgtcgcagtcgtgcaaggtggtacttggccttaccgggcagccggtgctactggcgcacagccccgagacgctggaattcatcagcctgcg

SEQ ID NO: 16074 - DNA, 145 bp, Zea mays
  Coding DNA Sequence Number=SeqID_1671
gagaacgtggtgttcatgttgtggagcggaacctcgtcaaggcagcagcgggccgtggagaggcatccaagactcggcgccggcaacggtacagaccgcgcccgccacaacggctgtgtgcatgggacggcatccatgcgaggat

SEQ ID NO: 16075 - DNA, 276 bp, Zea mays
  Coding DNA Sequence Number=SeqID_1672
tgcgccgcataacctgattgacgtgcaggcgctgggctgtgatttcctggtgtgctccgcctacaagttctttggcccgcacgtcggcatggcctatatcgcgccgcagtggctgcaacgcctgcggccgtacaaagtcgagccggccaccgatgtcggccccggccgtttcgagaccggcacgcaaagcttcgaggcgctggccggcgtcgcggcggcgatcgactatctggcacagtgggggacgccgggcgcgccgttaaggcagcgtttgca

SEQ ID NO: 16076 - DNA, 428 bp, Zea mays
  Coding DNA Sequence Number=SeqID_1673
gacctatgggatcctccgcccaattttccgggaatcgcgccggggccatcacaatccgttcgccgcgtccccaacaatctcgagcaccgggccttccaaagaacaccaacaaggaccgtgtggctgctgctcctcaaggcgcgcaccgcactgtcgggtgcctcgcctcgctagcctccgtcgccatcacactggccggtgccgccaggcactgggtgggtgtggggaggaccggcgtggtggtcgccgccggcaagagccccgtggtgcgctccaggttctacacatctttcatcaatgccttcctcatcatctccttgctcctctgggccatcgaggttgccatgtacttcaatggctgggacctcgctgcttccacgctcgccctccccgccctttgcattgagtcattgtacgtctcttggttg

SEQ ID NO: 16077 - DNA, 574 bp, Zea mays
  Coding DNA Sequence Number=SeqID_1674
gtactcgccggtgtgtcgatcactaccgtctcgcgcgtgcttaacaagcatgcgtgggtgtcggaaaaaacccgcacgcgggtggagcaggtgatcgccgagcatcagttcagccccaacctgatggcgcgcggcatgatatcgcgccagagctatacgctcgcggtgatcgtctctgacatcactaacccttacttcgtcacgctggtggcgcagattcagcaggcctgtctggccatcggttacaaaatcaccctgtacgatacccagtcggccaaccgtagccctcagcacgacgatgacgaaagcgcaatttttcagtcgattatcgatagccagatcgatggggtgatcgtgctcggcggccacagcgactatgcgccgattccggccggctacctgacgctgctggaatcgctgatggacaaaatggcggtggtggtggtggggcagccgcatcctgctggccgctggccgtgcgtgatgcgcgaccagcagcactgcgtcgggctggcggtgaatcatttgctggcgcgcggcctgcgtgatatcgcgtttattggcggttcgcgca

SEQ ID NO: 16078 - DNA, 523 bp, Zea mays
  Coding DNA Sequence Number=SeqID_1675
tgcactaccgtttcccgtcggaaagctggatcgatgaaaacaattcgttcctcaacgtcacgctgaacggtacttttctgcgcaacctgacggtgaacaaagtcgggctgctggagagcgcctggcaccggctgggcggggatgcacgccaggagcagtacacgctgaagctggagccatacctgatttacggcgacaaccagctggcgctctacttcaacatcaagccaaaggcggatgcgccgtgcggcgtgctgctcaacaacaacatcaagagccgtatcgaagaggattcgtggatcgatctgagccacacgcgccacttcaccatgctgccgaacctgtcgtacttcgtcggtgcttcgttcccgttctcgcggctggcggatttttcgcagaccacgctgctgctgccggaggcgccgggtgatgccgagatcgccacgttattggacatggccgcgcgcgccggtaacgctaccggcgtgccgctggtgcagaaccaggtgttgtttggtctgcc

SEQ ID NO: 16079 - DNA, 573 bp, Zea mays
  Coding DNA Sequence Number=SeqID_1676
ggtacccctgagacagcgaacagtgtacgagacagcaatgtacctttagtttctaatgctgcgaatgaggaactagttgtacaagcaccaaaaatcaagtatgaagatgaaattgacaaactgttggatgaacttggcccaagatacactgactggcctggatctgacccgttaccagtagatgcagatttacttcctgcaaacatgccaggttacaagccccctttcagagttctgccatatggtgttcggccatctcttagccgaagggacactaccaatttacgccgtcttgctcggggactgcctcctcactttgctctcggacgaagcagacaactccaaggcttagctaatgctatggtaaagttgtgggagaaaagttctattgctaaaattgctttgaagagaggagtacagcttaccaccagtgagagaatggctgaagatattaaagtaagtacagaaagtgtctcttgttagatttgtacaatttggatagcatatgtaaatatttacatcctagttagaaatattatttgatcattagcaacagcacattacagattcgat

SEQ ID NO: 16080 - DNA, 417 bp, Zea mays
  Coding DNA Sequence Number=SeqID_1677
ctgcaggcattttgagtggtgatgagctggtggtcaccggcatgggcgctgactgtgatattatcgcctgctaccacacaggtggccttttggacagactggatctagtcattgctccccaatgggtggctaccatgcggggcaggatatggtgctcatctggtatgtcgcccgtttcaaatatcctccgcatagggttccattgcaacttctttaggaagccatgaatacgactgatggcttaactggacttctgaaagggttaatgcttatatcaagaaaggttgcaaccccttcattgttgcacacagtgagtggcagagatgaaaactggaaaaacatgtcgagcttttgtgttgaagatttaccaagtcttctgaaggtgtcgttccagtgttgcaagagccggcgaatttc

SEQ ID NO: 16081 - DNA, 543 bp, Zea mays
  Coding DNA Sequence Number=SeqID_1678
tgaacagtccgctggaggatctgctgttcgtctccgacgataacgagcgcaaaaactacctgcgccgcttcgagcattaccttaaaaaccagcaggcgtttctctattttcgtcgtaacgatgaagcgcgtaaaagcggacgctggaaagtgatcggagaaacccgggtgtacgcgatgctcgatccccgctcggcggaagcgcaaaacctgctcaacagccgcggtttcaagctggtgctgatgcgtcagaccgaagaggatgagtactggcagctgttcgatccgcaggcgcatccctgtttcccgctgtcgcgcaagatccagtttttagtggtgctcagcacgccgcagcagaaaatgcccagcgcggtgatgccgggtaccgaagtggggcggcgcgtcaaggcgaaagtgttccagcgcgccagccaggcggagttcagcgcggcggtgaaagcgcgctatggtgcctgcattattaccggcacgcgcttaaccgagcgccacagctggccgtgggtggaagcctgccatatcgaca

SEQ ID NO: 16082 - DNA, 518 bp, Zea mays
  Coding DNA Sequence Number=SeqID_1679
gaggcctcgactttgtccacacggctgtgcaaggcgttgaaccttgcctccagctcctcggcgcgttgactggcgagactgctctccgcccgtgccactttggcctccgctcgcgcagtctgcgcttcagcgatggcctgattcgcctccctcctctcctccgccagctggcgccggaggtccatcttctcggcctccatggcggcaactttctccgccagcctgcggtttttactttccgcagccaacttctcccggacaacatccgcatgctgcgcccgaagcctctcgacttcggcatccacgtccacagtcaggacacccgacgccacgcggtcggtgaagtcggccgcacccttcgccccttccgccgtcgtcggcgaaggggccgccaccggagccgggacaagagacagttgccccacatcagacctgatgtctgtgtcgaagtcggccacatgcgccccctcctcgccagcacgcaccggaaaaggaacatttcgctccttggcgggctc

SEQ ID NO: 16083 - DNA, 136 bp, Zea mays
  Coding DNA Sequence Number=SeqID_1680
gggactgcaccttttttagctcactctgagcgagtgcaattgacacgctatggatcttatcgagcacgatccatggtctggtccgcggcgagaatatagcgcttgcgcactatacgagacaggtggccaggacgaa

SEQ ID NO: 16084 - DNA, 410 bp, Zea mays
  Coding DNA Sequence Number=SeqID_1681
accaaggctggttcggagcgtttgcgcatccaactggagcgtctgaagtcggtcgagcggccgcgcatcatcgccgcagtggccgaggcgcgggcgcacggcgatctgaaggacaacagccgaataccacgctgcgcgcgagcagcacgggttcaacgaaggtcgcatcgcggagctggaggcgggtttgtccaccgccgaagtgatcgacgtgacccgtctcaatgccggcaccaaggtggtattcggtgccaccgtggaccttgaggacgaggacacggacgctgcggtgacctatcagatcgtaggtgacctggaggcctacatcaagcagcgcctcatcgaggtgtcgacgccgatcgtccgtgcgctgatcggcaagagcgagggcgacagcttcaaattcaccg

SEQ ID NO: 16085 - DNA, 270 bp, Zea mays
  Coding DNA Sequence Number=SeqID_1682
tcgttgtgttgtgacggcccgtgccgtgcctgcctcgctgccgtgcagtcatcaccggtgcgaagagtatacggtggtcgggctacatggcgtgctcttcaaccgtcttctgcggttgtttctgaatcaccagtctgctggtttccgccgcctcggttgtgtggtctcctccctgcttttcgttggtcatgggccgcgggcgctcatcttccggttggccgtgtttttccaaagcaagtgcagccgtgtctgctcgctcgcgcgtgatgc

SEQ ID NO: 16086 - DNA, 526 bp, Zea mays
  Coding DNA Sequence Number=SeqID_1683
gtttcaatctcactatataatgcattaacaaactcacactttaatcgattttttttcagaaaatcaagaaattgaatatttctgaacatctctaccattactaattttaatatttttagcactaccatctataaaaattttatatatgacagaagaatatacaaatccttccctcacagtaaaaacaataggacatcaatgatactgatcttatgagtattcagactttactaattatgaattcgattctttcttatcagagagaaatttaattcgattattagatacatctaatcatttagtattaccaatcaaaatagctattcgattactagtatcatcagaagatgttattcattcttgaactatcccatcattaggagtaaaagttgatgcaattcctggacgaatcaatcaaattataataaatattaatcgaactggtattatagtaggacaatgtagtgaaatttgcggagcaaaccacagctttataccaattacaatctcagcaattacagcaaat

SEQ ID NO: 16087 - DNA, 173 bp, Zea mays
  Coding DNA Sequence Number=SeqID_1684
gagaggcccgagaccgggcggaacggccgtcctaggcctctcaaacaggcgcaagtggcccgccgccagcacagcgacggtccacaataccaaacggagcgcgggacacccgaacggtccagcaacaaaaccatgggaacagcacgccggtggacgccaaaccgccgaagcac

SEQ ID NO: 16088 - DNA, 352 bp, Zea mays
  Coding DNA Sequence Number=SeqID_1685
cggcacaggctcgtcgtgactcgtgcgcagcgtgcaagtgccagccggactgcatatatttgcgccttatttcccgcccgataaaccagacaagttcgcacacgcgcacgcgcaccgcgtcttcggcaccagcaacgtgatcaagattctcaacgacctccagccctactaccagcgcgaggacgccgtcaattcgctcatttacgaggcggacatgcgtgtccgcaatcccgtctacggctgcatcggcgtcgtctctattcttcagcactgcctcctacgggactctctccagcaacgtgcgctatatgctcctctactctatatttagcgcacggcatactattttagg

SEQ ID NO: 16089 - DNA, 320 bp, Zea mays
  Coding DNA Sequence Number=SeqID_1686
atgattaccctgtctcgcctgtatattcacccggttaaatcgatgcgtggtttgcagctgtcacacgcacaggtgctggaaagcggtctggccttcgatcgcatctttatggtgaccgaagcggacgggacctttattaccgcccgccagtttccggagatggtgcgtttcacgcccgccctgcgcccgacgggctattcatcaccgcacgacggcagccaggcgctgatccgcttcagcgatttcagcgccagccggcgccacggaagtgtggggcaaccagttcactgccgcatggcctacccatcaaccagggctga

SEQ ID NO: 16090 - DNA, 281 bp, Zea mays
  Coding DNA Sequence Number=SeqID_1687
gatcaccagggtccagttgtggatacatttcatgctgacatccccaatgcagatctgggtttcagagtctagtggtatgagtgatcgcactttcaggtgcaccacgagctcatgtgccatttttctagcaatccttgggttggtggagcttcctgttattgctgttgttggaccattcatcaacattatgtttgaggacaagtttgtgcatttttcattcctcagcaccagcagtggtcaagcattggcaactcctcatggtctaacgaagactgctggta

SEQ ID NO: 16091 - DNA, 253 bp, Zea mays
  Coding DNA Sequence Number=SeqID_1688
gtgctgaccgcacgcttattatatatttgttaatccgtttgataaagccgggattccgctgctggacgttaccgcagccaactgggcgctgggcaataaagccggtgagcagcagcgtgcacgttcaccgcattttccggagggtacggtgcgccaccagaccgggcgcgataatctgacttacatcgaccactggctgccggggcgcatccatcagcgcacgcgcgacagcgtacgcattttgcagccgcta

SEQ ID NO: 16092 - DNA, 567 bp, Zea mays
  Coding DNA Sequence Number=SeqID_1689
atggccgagcagtatcagctgatccgccgccgagacgccgaccagcccgagccgttcgaggcccgtgtgctgcccgagctgctggcgcgcctgaagcaggccgggcacagcaatgatgccctggcacggcaattggccaagctcgacatccagctggtgctcaccgctcaccccaccgaggtggcccgccgcaccctgatccagaagtacgacgccatcgccggccaactggctacccaggaccaccgcgatctgaccccggccgaacgcgagcaggtgcgcgagcgcctgcgccggttgatcgccgaggcctggcacaccgaagaaatccgccgcacccgaccgacgccggtggacgaagccaagtggggctttgcggtgatcgagcattcgctgtggcacgccatccccagccacttgcgcaaggtcgacaaggccttgctggaggctaccggtctgcgcctgccgctggaggcggcgccgatccgcttcgcctcgtggatgggtggtgaccgtgatggcaaccccaacgtgaccgcagctgtcacccgcgaagttctgctgctg

SEQ ID NO: 16093 - DNA, 262 bp, Zea mays
  Coding DNA Sequence Number=SeqID_1690
cgacattccaatgcagcgactactgcacggagctgctcgtcgtctatagcgcgacagaaggatatgtgatgcgatgtggtggtgctggaacagaggcacgaccggcaggagcaagtgccacgccgacgtttggacggagcgagcaagcgtggcccggcgacctgctgatggcggcaaaggagatggcggcaggagcaagtgtgggaacgaaggcagggacaacaggagcaaatggcacgcctacatccaaacggagcgtgag

SEQ ID NO: 16094 - DNA, 248 bp, Zea mays
  Coding DNA Sequence Number=SeqID_1691
ctgcgcttcgcagagcgccagggatggcatgtagagatgatgtcggaaagaccgccggatctcggcggctacaaagaagtgatcgtacggatcgtgggccaaggcgcgtatccccgcctgaaggtccaataaggcggacctcacgggcaacgcgtgccggccaccgagacgacaggggcgcattctcacattcgcgtgcacagacccggtgatgccggaagccaacgatatcggcgagggcgagatca

SEQ ID NO: 16095 - DNA, 329 bp, Zea mays
  Coding DNA Sequence Number=SeqID_1692
gcttcgtgggcccagggcgaaccctacggcgcacgataaaaggagacgttggagaggctttcctcccagtcgtgtcgtccccccggccccgaccccctccgttggcgaacgactccgggctccactgtcgctctcgctcccttccctcccacgcaatggtggccgatcgcctccgcctcgcgctgctgctctccgcgtgcctctgctccgcgtgggcgcgcccacgcctcgagccgaccatccgcctgccgtccgagcgcgcggcggccgacgaaacggatgacgacgccctcgggacccggaggcccgagaccatcagagaagaaaac

SEQ ID NO: 16096 - DNA, 204 bp, Zea mays
  Coding DNA Sequence Number=SeqID_1693
atctgatttgatggaggcgctcgttccacgcctcgctctacttaaggagcagctctaaatcggaaggatgatatcttgcatttccgagacatttgctagaattttgttcctaagcaatccgctagcgtttatgatgctttacgtttggaacaagcatagccctttcatccatatgactatatgagctttctaggtctgttcacc

SEQ ID NO: 16097 - DNA, 360 bp, Zea mays
  misc_feature (27)..(27): n is a, c, g, or t
  Coding DNA Sequence Number=SeqID_1694
gttgctttatcaggtttccacactatntgacgaggaagtgcacttttttcagtgttagattgttcaacttctcagggacacaagcaccagacagtacaatagaaaccactatgctgagtgagttgcaaaatttgtgcttacaaaacggtgatgggaacacaaccagtgtgctagaccaagggtcagtggatctataagttaaccactacttcaagaacttgctcgatgggaagggtcttcttagctctgaccagattctcttttccagtgaaaatgccacggcaactactaagcctttggtccaattttatagtgttaatgagagagttttctttgtagaatttgcctatgccatgatca

SEQ ID NO: 16098 - DNA, 304 bp, Zea mays
  Coding DNA Sequence Number=SeqID_1695
tgcagtacccacagatgcatgaagatattgttgaaattgaacagtcagatgcagatggaggagcagcagcagcgttccacggccagaagacagacgccgcgagcctagtcgggagagccctgtcttgcttcaacgatcgctacatctacagcgggtgccagggcgcgctccggctgggccccgagggcgcgctggacgtgccgccggggtcggtggacgccttctgcggcgggccgtgcctggcggagacgcacctcgtgctgcgctgcgtcgacggcatcgtggccagcttccgcttctacaa

SEQ ID NO: 16099 - DNA, 418 bp, Zea mays
  Coding DNA Sequence Number=SeqID_1696
catgcctgcagctgtgacaagtacggggtgccgcacacctcaccctctcgggaccctatgtggtggtggtggacgtcagcctggagggcaacctgactctgagcggccggcagatgtacggtggatatggaccagcccaggatgatcggcaaaggtcgctagcatgctcggttagagtgtgtagcttcatgagcgtgggctggacgttccgtggcaagcaggcgatagatcatggccatcggcgaccgccgctgacgtagagcccgacaaggagacgctggagaagattggggccattccggctatcaaggagttggttttcctcaagctctgccaaacgccaagtaacacggctgcgccactaccactagcacggcgtcgcgtctccctcgcgcagcatggtccagtgcagccgtac

SEQ ID NO: 16100 - DNA, 189 bp, Zea mays
  Coding DNA Sequence Number=SeqID_1697
aaatcgcaggtttcaggaaagaactgcatgacgctataagtgaagctaagcaaaaaaggggctggtgattttatatcaactcgtgctttgttcattgtcagtcgctgaactcgttgactaggcactctgcaacttacgcctgagtcaacaataaaagcatagcctcaccagcatgagactggttctttg

SEQ ID NO: 16101 - DNA, 216 bp, Zea mays
  Coding DNA Sequence Number=SeqID_1698
tctcagccccctctagccaaattgagcccgcccctaggttcgccagctcctccctgtggtaagacacctacccgctgcccgagaaccgggccaccggcggccaggtccttccccgcggacgaccggttcatcccgccgtcaaccgtagcgcctttccccccccccttccactctcgctggcgtgtgggccccacggtgatggcatcatccccgcac

SEQ ID NO: 16102 - DNA, 273 bp, Zea mays
  Coding DNA Sequence Number=SeqID_1699
caaacgctgggtgcgcagacctggtttgccggcctgcgccgcgatcagtccggcagccgtgccagcctgccggtactggccgtgcagcgtggcgtgttcaaaatcctgccgatcatcgactgggacaaccgtcaggtgcaccagtatctgaagcagcatgggctgaagtaccatccgctgtgggacgaaggttacctctccgtgggcgacacgcacaccacgcgcaagtgggagccggggatggctgaggaagagacgcgctttttcggcctc

SEQ ID NO: 16103 - DNA, 216 bp, Zea mays
  misc_feature (171)..(171): n is a, c, g, or t
  Coding DNA Sequence Number=SeqID_1700
gtgacgatgtatataggttctctaatgcatatttctggcttgtgaatttcttcattttggcttgtgaattgaccccagatttttataagactacatgcccagatctttatagaatagttagaagcgagggtcaaaaagctctaaaatatgagatgcgaatgggtgcttctntgcttcggcttcacttccatgatttctttgtaaatggaatacacc

SEQ ID NO: 16104 - DNA, 131 bp, Zea mays
  Coding DNA Sequence Number=SeqID_1701
atgaatgccgctggctggttttccatttacgaatttggcaaaggctgtggcttttgctatcaggtgggtaaacttcaaagaatcggacctcccttcaatcaaggaagcctgccttttgacatttgtaaggt

SEQ ID NO: 16105 - DNA, 525 bp, Zea mays
  Coding DNA Sequence Number=SeqID_1702
tgatggcgagtggacgcacgctatcgacgccacgcgcttcggccgcgatgtgcacggcaagaccttgggtatcgtcgggcttggccgcatcggtgcggcggtggccaggcgcgggcatttcggttttggcatgcaggtgctgtacagcggcaatagtgacaagcccgagtatgaagcgcagttcgccgcaaggcgggtgccgctgcaacaattgttgggcgaggcgcacttcgtctgcgtctgcgtgccgctgagtccggccacgcatcacttgttcggccgcgagcagttcgcagccatgcgggccgatgcagtgttcgtcaacatcgcccgtggtgctgtggtcgatgaggccgcgctggtgcaggcgctggtcgaggggcagctcggcgcggccgggttggacgtgttcgagcaagagccgctgccggccgcctcgccgttgctggcgttgccccaggtggtggcgctgccgcacatcggctcggccaccgtcgaggcgcgtgcattgatggcgcgtactgc

SEQ ID NO: 16106 - DNA, 233 bp, Zea mays
  Coding DNA Sequence Number=SeqID_1703
agaatacccctccaggacgaccgatggttaacggaggccctgggcagaggtttttctagatttttcaataccgagaccagccctagacgaagggatgcagaactggctaccgacatagacccaaaagaagctcaacgagcacttgtaagagaccgagctaactcgagcaaagctgtcggtaccaaagaattgggggaaagccaatctagctctcacacgacctaggaaaccga

SEQ ID NO: 16107 - DNA, 300 bp, Zea mays
  Coding DNA Sequence Number=SeqID_1704
aacaagccctcgcatcaactaacaactaaagaataaagggcaaaacacttggtgcaatatttaaaccacgaacaaacccagggaatttctgatccataacaaactggcttagtaaaaaaaactaaaattactcagtaaacaacaaccgaacgcaaagagactccaggcggggacactacatgaatctgcctacttggacctctgcctcatttttcggggcttccttttaagccgcctcatccgcttttttttccacttggccctcatcggggggggatgactgcctctcggacgggtttg

SEQ ID NO: 16108 - DNA, 315 bp, Zea mays
  Coding DNA Sequence Number=SeqID_1705
gagctgggtgatgctttgcccaaccgcggcggcgcccaggttgatggcggctctgccaccggcaacgacgagccatcaccggttttgcgtaccagagcggcccatcgcgaagcagagacaatatcctcgctggagaaggcactcacctcccgagaagacatcgcagggtgtgcaggcggattgatgcggccagggcagacgtctgccattggtgagccctcgcttgacccctcccacaatcgcactgaggcaccacaagaccccatatatggcgcagggatgaagaagaagatatgcccagcaaggcagacccca

SEQ ID NO: 16109 - DNA, 351 bp, Zea mays
  Coding DNA Sequence Number=SeqID_1706
aaaaccaggtcgaaggcgaagagctgccgcacctgctgctggtggatgacgatgccacctttacccgggtcatggcccgtgccatgagccgccgcggtttccgcgtgagcaccgccagctctgccgaggaagggttgatcctggcccagcaggacctgccggactacgccacgctggacctgaagatggacggcgactccgggctggtgctgctgccaaagctgctggagctggacccggagatgcgcgtggtgatcctgaccggttactcgagcattgccaccgcggtggaagcggtcaagcgtggtgcctgcaactacctgtgcaagccggcggataccgatgatgtgc

SEQ ID NO: 16110 - DNA, 546 bp, Zea mays
  Coding DNA Sequence Number=SeqID_1707
ggtgggtgcctttgtcgcatcctgctccggcttccggtcggtgcttgtctgttgatgggtccggggggcagtccagcctgtctgggggtgtcggcgggtgttgtcgggtgttggggttggcttacctttcgggcttcctcgtggcttgttctggtggtgccccctctgcggtgtgggtttctgtgctgttgcgtttggagtgtttctggcgtcgggcgcctttcgcctttcaggctgcgcttctgttggtccgggcgttcggttcgggccttttcgctttttcgcctgctggggttggggggctgtgttgcctggcggtggcgttgggttgcctctgggttttccccgtctcgtggttgtccttcttcggtccgtggccagcttgcttgcctgctgtcttgtgggctccttggggtgtcgcggttctgccgggcgtctggcttgggtgttctcccggctgcgtttgtggcctttttgtgggcttgcctccggcttttgttggttccggcccctgtgggtctgctgtggccggtggttgtaatataa

SEQ ID NO: 16111 - DNA, 340 bp, Zea mays
  Coding DNA Sequence Number=SeqID_1708
gccaagtggcactagtatcccttaatgtggagctcagtctaattaacaaggatgaaatagccaaatgggttttgtcttttcaagttcaccctgcggcgaatgatgatataggttctgggttgttctatggattctgtggttctagatcaactcaatttcccttgcctaatgtgaaggatccttgccacaatgttagtcatcttgcaagcacttattctgcccttgctatcctcaagattattggctatgatctagcaaatattgactgcaaggcacttctattatctttgaaaatgctccaacaaccagatggaagcttcatgcctactcatattggtgc

SEQ ID NO: 16112 - DNA, 503 bp, Zea mays
  Coding DNA Sequence Number=SeqID_1709
ctgcagatccttcaggaccaggtgaagctgtgcaaggaaaccctgcaacagctggtgcgcgccgccgaagccaaccgtcgcctggccgtggtggagcaggacgtcacggcctggctggacgaggcgctcaaccgttggcacctgatgcgcccggaagccagctaccgcttgcagcgcctgcgcgacggccaggtgccacgcctgaccccggcgccggacctgacccaggccctgttgaacctgttgaacaatgccgccgacgcctgccccgatgaccttgaagtgcgcctggactgggacgcccatgacatcgtcatcagcatccgcgaccatggccccggcgtgccgccggccatcgccgaagccatcggcaaacccttcattaccaccaaaggcaaaggcttcggcctgggccttttcttgagcaaggccagcgtgacccgtgcgggcggttcggtgaaactctatagtcatgaacagggtggcaccctgaccgaactgcg

SEQ ID NO: 16113 - DNA, 187 bp, Zea mays
  Coding DNA Sequence Number=SeqID_1710
tgttcatgttcttgacaagttcaaaccgtctttgcagtgggatggataaagtttggagcacttctttatctattcagatgaaggcgtgaagcatgttgtattttatccaacactgatgtcactctgtgtacgtctgtatctagccctaaacttgtgagaacaggacccttcattttgggcgatcgta

SEQ ID NO: 16114 - DNA, 319 bp, Zea mays
  Coding DNA Sequence Number=SeqID_1711
taccctgacggaagggatagaaggccggggcaattttctagtaccagctctgaaaggttaacgagaccatgtagtgacttaataagaaaatgcactagatcaccacactgcttgcaggtccggtgcagggacagcgagctgtgcatgtgacggaccaggcgcggacgtcgaaccgcacggcgctggtgctgagcgcctcggcgtacgcggccatggccagcgccggcaaggccgcgcgcctcagggaccggcgcgttgtcgatgtccagtacaagagggtaccttgcgggtacatgaaggaccgcaacctatcgatacg

SEQ ID NO: 16115 - DNA, 221 bp, Zea mays
  Coding DNA Sequence Number=SeqID_1712
agttggacgccgaactcatgcacgacacaaggaggaatccgtgccctggagctcggcaacttcatgggagcgtgagttccgtgctagaccaagcagatggggaggtgaccagcgcgacggccacaagcaaggctcgcgcgcgcgcggttggaaggcgccgagggagcttgggcgcaggccaagcgccgaccagcagaacgccgcgaggaagcagggagacc

SEQ ID NO: 16116 - DNA, 331 bp, Zea mays
  Coding DNA Sequence Number=SeqID_1713
atgtgttcccgctggtcggcttgatctttcttgtgtttaggtcacctgtgcggctcagatggtttgtctcctgccctttcatgcttgcattgttcgcttggccaccttgttctctgtctattcctccgctccactgttccttctcgtgcggtgtcttttggtcgctcgttccattttcttctcggttgatatttgggtttctcttttttttcacttccgttccctgtatgcctcttctccggccgcgtgtctcttccggcggcggtctctgcggtggtcctggctgttgctgttgccgtggttctccttggcggttcgtctggctttgtgc

SEQ ID NO: 16117 - DNA, 202 bp, Zea mays
  Coding DNA Sequence Number=SeqID_1714
gaaggagagcaaccagaactgccgaaccattggaggacgctggcgggcaacagtgacgtcgcaaaaaaggcgacgatgcgtcggcacgccggtgacgcacgcgctcggcatctctcgggaccgccggcggctcggagtcttcctttcggccgcgcctccctccgaccagataggactttggacgcttgggaccttgcctagt

SEQ ID NO: 16118 - DNA, 272 bp, Zea mays
  Coding DNA Sequence Number=SeqID_1715
gcggccgcggacgtgcagtgcgacgcgccgccgtcgccgtcgccgtcccccgaaacggccgccgcgtcgccggacgacgctgcctgctgcctcgaggcggcgacgacgacgacggtgcacagcggcggcgacggtgggcagggccaggagaacgcgctgttcgacctgccggacctcctcctcaacttgagggacgggctgtggtggccgccggtgtggccctcgtcggcaataatggccatcgaggagtacgacgggtgcgacgtcgtcgg

SEQ ID NO: 16119 - DNA, 457 bp, Zea mays
  Coding DNA Sequence Number=SeqID_1716
gtattactggcctcaggcatcgctggcctacatgcccgcgctcgctgccgtctgcgcattgttctggctttgcctggcaaccggcctcgaatcccggcgggcgaaatggacggccgccgcactgctcgtcgccgctgcgtgctcaatcgaagtcggtgcaatgctcgttttcgccgttgcaggactgaccgtcgctgcacacgttatcgtgccgaagctgcgcaacggctggcgcacgtcggcctggctcattcttccacttctcgcgtccgccggggtactggcgctggtcgctcatggccgtgtgtcgaacggcaacgaagtgatgggcgatccggcgatcgcccatcacgttcgccccgcgcttcatgccgctctcgtcgatttcgcaaaggccatcgccgcatccggctggagtggccggagtcggctcgagatcgcgatggccatgatcagc

SEQ ID NO: 16120 - DNA, 554 bp, Zea mays
  Coding DNA Sequence Number=SeqID_1717
gaacttccagttcatcttgcgtcttctgaacaccaacgttgatggcaagcagaaggttatgtacgccttgaccaagatcaagggtgtcggtcgccgatactctaacttggtctgcaagaaggctgatgtcgatctgaacaagcgtgctggtgagcttacctccgaagagctcgagcgtattgtgacgatcatccaaaaccccacacaatacaagatcccttcctggttcctcaacagacaacgcgacattgttgacggcaaggactctcacatcctggccaacggtgtcgactccaagctccgtgaggatctcgagcgcctcaagaagatccgcgcccaccgtggtctccgacactactggggtctccgtgtccgtggtcagcacaccaagactaccggccgtcgcggcaggactgtcggtgtctccaagaagaagggtggctaatggttttattgttttcggtctggggtggacaggcgtgacggctgggtttttcatcgttatgatgagcatttcgaagggattgctttctggcatacgcagctggtgctgt

SEQ ID NO: 16121 - DNA, 349 bp, Zea mays
  Coding DNA Sequence Number=SeqID_1718
tcctcaaacaaccggaaaagacgcttttggacattttgcccccccaaatgcaggccctcaaggtcattacgacgctggacatcctttttttgcactcgcccgacaaggagtacatgggggagtttccggaacccttgtggctggcggagcccatggttaaggcggcgttttaaaaattcggcggcaggataaaagaaatccaggggtttttctacgagtgcaacaacaacctgggcctcaaaaaccccttcggccccgggattgttccgtacaaactgctcaaacccttttccaaaccgggagtccccgggagggggatccccaacagcatttccctttgatccatccc

SEQ ID NO: 16122 - DNA, 302 bp, Zea mays
  Coding DNA Sequence Number=SeqID_1719
tgattgagggtggtcgccggctgtcgggcgagatcgtcgtgtcgggcgcgaagaacgccgcgctgccgatcctgtgcgcgggcctgctcagcgccgagccggtcgagctcgacaacgtgccgaacctgaaggacgtgcgcaccacgctgaaggtgctgaaccagatgggcgtgaagagcgaagcggacggctgccgcgtgcagctcgacgcatcgcgcgtcgacaacctcgtcgcgccgtacgaactcgtgaagacgatgcgcgcatcgatcctcggacaagaccactgctcgcgcgttcgg

SEQ ID NO: 16123 - DNA, 437 bp, Zea mays
  Coding DNA Sequence Number=SeqID_1720
agctttcttttgtgcatcagactcaagtttaacctgcagtacatcagtcgagatgtccagggtcgtgagcacgtgcccatcaaagtgacccgagccaagctgtaatcacaggtataagattaggttgtccgttcaattgaaccgctcaaagttgcggtgcttatcccataccagtctgtttcagacatcatagtcgttatcctgctatatggtcacacgcttaagcccctggtgcagcttaaagcggatgtcttgttcggtaaacagccaggtacacacgttaagccgcactgaagctggtcttctatggatgctgcggtacagggctccgttatgggcggtcaagtaaaactctttagactgccggacgtcacacacctgtcagtggcagtccaaaacatgagtcgggttgttgagccattgatcagcaagcgccc

SEQ ID NO: 16124 - DNA, 223 bp, Zea mays
  Coding DNA Sequence Number=SeqID_1721
gagtcagcaaaccaatacggtggacagtcatcagagccttaatcagacacaggcccagcacaagttcagaggtgagatggacctccctgagtggcttgacattgtgaagagtgcaagatggacctccttatgatcaatcaatgcctagattatttacctgaggcaaggcattggtgtggatggctttcagaagatttatggtggtcgccaaaggaatggctcc

SEQ ID NO: 16125 - DNA, 487 bp, Zea mays
  Coding DNA Sequence Number=SeqID_1722
gtatgctattctacacaggattggtgctgcaaactgggtacccaccaatcatacttccactattgccacaggtttgggtaaatttctgtatgctgttggaaccaagtccaaatttaattttggaaactatatatttgatcaaactgttaagcattcagaatcttttgctgtcaaattacccattgccttccctactatattgagtggcattatgttgagtcagcatcccaatatgttaaactacactgactctgtgatgaagagagaatctcctctatccctgcattacaaactgtttgaggggacacatgtcccagacattgtctcgacatctgtctcaacatcagggaaagctgctgattcaggtgctgtgtccaaggatgccttgattgctgaactcaaggacacatgcaaggtgctggaagcaaccatcaaagccaccacagagaagaagatggagctggaacggctgatcgaaagactcaca

SEQ ID NO: 16126 - DNA, 236 bp, Zea mays
  Coding DNA Sequence Number=SeqID_1723
agacccctgagagcctgctccagcccagcagcggcccgcgggcgggccaccaccaccaccaggagcagcacttcataacctctctgcaggttcacaacaacgacggctgcggcggcggcaacagcagcagcagcaacaacaacatcatcctgtcgtgctcctcggtgtgctccagcgcgctgccgtcggccaacggcgaggtctcggaccagaacaacggcaacgctggtggtatg

SEQ ID NO: 16127 - DNA, 199 bp, Zea mays
  Coding DNA Sequence Number=SeqID_1724
agagaagcagggaaaatcgcggcttgggaaaatgccagggagagggacgcgccaccataggcgagcgctggggcacgcaggccgagcagggagcgcggcggccatgggagatggtggccaagctggagctgagcgcgcgcagagaagggaccaggaggaggtaagagagagctttggccagaaggacgctcggctactt

SEQ ID NO: 16128 - DNA, 193 bp, Zea mays
  Coding DNA Sequence Number=SeqID_1725
agggcgtgacccagatcgtgctgctcggcgttgcgacctcgatcggtgtcgaatccacggcccgcttcgcgcaggagctcggctacaacatcaccctggtgaccgacgccatggccgatctccggccggaggcgcatgagaacagcatcgcgcggatcttcccgcgtctcggcgaacgcggaacggccgagga

SEQ ID NO: 16129 - DNA, 173 bp, Zea mays
  Coding DNA Sequence Number=SeqID_1726
atggagctctcagcacgggctaaacctggcgacttcccgggcccaagcggggggacgactagggcttctacttctgctggggttgctgggcccaagggcgaggaccactgggctgctagcggcggtatgcaccttcctcgacgagcacgcctgatcccacctaacgggcgtat

SEQ ID NO: 16130 - DNA, 173 bp, Zea mays
  Coding DNA Sequence Number=SeqID_1727
ctcgctggccaacttgttccatatacaagacgacatgtcagacgatctatctccgtcgccgcaaatagagtacgatcgtcttctgggcggccttctcgtcgagggttttgacgacaaatcatgcagaagcaggtaccgtttcgcacgctaccacagttcaccgagcatacctt

SEQ ID NO: 16131 - DNA, 184 bp, Zea mays
  Coding DNA Sequence Number=SeqID_1728
ggtggtcaccagcattgcgctgttcctcaccggctggctggggccggatcgcgccagcatcgtccgcgagaaggccggcgtattccgcggcggtaaaccggcggtggtcggcgaggccgatatgcccgacaccattgcccaggtgtcctcggagaagggtgcgcagctgttacaaattaaccgc

SEQ ID NO: 16132 - DNA, 168 bp, Zea mays
  Coding DNA Sequence Number=SeqID_1729
tacctattcgactcgtacccctgatgatccccatatgagaaaaccgaataccacaaaggctaagcaactgctactttgggagccaaaggcctctctcagagaaggccttccgctaatggtaaaagacttccgtcaaaggatctcggatgaactcgtttctggtacacc

SEQ ID NO: 16133 - DNA, 489 bp, Zea mays
  Coding DNA Sequence Number=SeqID_1730
catggcaatcatacggtttcttgtagagcctccaaccattctagacgatgtaccctacaatgggtgaggtgcttgattaatacttcttttttgaatacatgcctgatgtcctatacaacacacaattgactatgtgtactaaggatagaaattaaactgctacttatggtggatagctccacctacgttagaattatagattgacctccctgcgcaggcattatattattgtcgttttggattggctaactaacaggtgtccatgattatttgctgtcaaccactgttagttctttttcgctttagaatctattcaacgattgctattgggccgaagggcactgccaccttcttttgcttttacttgatgcacggccattgatatgtgttccatgttgatgattacttaaaacatggctcgaatacactggttcagcctcagctcaatccatgctaaggtatggggttggatagtcctcagctgtttat

SEQ ID NO: 16134 - DNA, 151 bp, Zea mays
  Coding DNA Sequence Number=SeqID_1731
tcatcttgtttctgggtatccggcccctgttctctcctggtgtctgtacggtgtcttcgagcgtggtgtgccgttagcggtcttggctggcggctcttgcatggtctgcgccctttttggcttgggtccgcgttcgacacgctgcctggtg

SEQ ID NO: 16135 - DNA, 334 bp, Zea mays
  Coding DNA Sequence Number=SeqID_1732
cggcgcccacccacgtgagcgtgttcggcaccgcgtcgccggcgaagagcacgaacagcatggtggccccgaaggcgaacgcctcgcgctcgggtacggtcccgcgcgacagcggccaggctcgggccatgttcctcggcatcacgaacactccccgcgactacgcctgggggtcggtcaccgcgatcccggagctcctcggccggaccgtcaccggcgctccgcaggcagagctctggctcggagcgcaccccggcagcccgagcgtcgtggtgaacccggcgatggtgggcggtgccgacacgctccgcgactggatcgaggcggagccgga

SEQ ID NO: 16136 - DNA, 426 bp, Zea mays
  Coding DNA Sequence Number=SeqID_1733
aagccaaggcgagatccatggtcacgacgtcctacaccgccatcgccggagctctgttgcacgcagagcacgatccgtttccgagcttcggtgaactgacgatcaagctggggggaccccgagatcaagctcttcgagttctacaaggttgaagaccctgagcatctgtttggtgaagaccaaggatgggcatcaggaatatcagcacctgcagtacaagggcttttagaggtgttgggagaggggggtgcagacaatgtgagccaaggctttcttgaagctacaccctatggaagcactgagcttgggcgggtcctacttcaggaatcataggggctatgcaccataagaccgaaaaggcgtggagacttctcagccatgagcagaatgggcagctattaacatttgcacccctatttgtacatc

SEQ ID NO: 16137 - DNA, 406 bp, Zea mays
  Coding DNA Sequence Number=SeqID_1734
atgttaatagctgcccattctgctcatggctgagaagtctccacgccttttcggtcttatggtgcatagcccctatgattcctgaagtaggacccgcccaagctcagtgcttccatagggtgtagcttcaagaaagccttggctcacattgtctgcacccccctctcccaacacctctaaaagcccttgtactgcaggtgctgatattcctgatgcccatccttggtcttcaccaaacagatgctcagggtcttcaaccttgtagaactcgaagagcttgatctcggggtccccccagcttgatcgtcagttcaccgaagctcggaaacggatcgtgctctgcgtgcaacagagctccggcgatggcggtgtaggacgtcgtgaccatggatctcgccttggcttg

SEQ ID NO: 16138 - DNA, 179 bp, Zea mays
  Coding DNA Sequence Number=SeqID_1735
aggcggagctggctatcattcgattggacgagcgcacccggggccgcccctcgcaggacgctaccggggctgatactccacacaccgccaggaagaggggcacgcacctgctaagggctagacgggtcaccccctacccggacctggtcgcggcctacgagcccaggatctgtccggag

SEQ ID NO: 16139 - DNA, 198 bp, Zea mays
  Coding DNA Sequence Number=SeqID_1736
cggacggtcttcagcggcccgacttccgcgctcccgtcctacttggccgagttcggcttgccggtgcccgacgacgagaaccgcgccgagttcgcgctcgacctgatccgcgagctggagtcgtcgccgagaacaagcaggctgggcttttttcgcgttcgctatgatttttctatcacccgggcttcgggctgggcc

SEQ ID NO: 16140 - DNA, 214 bp, Zea mays
  Coding DNA Sequence Number=SeqID_1737
tggtgctctcgcaatctctgcaaaaccatcctcaaatgtatcttctatacttgacgccaggtgtttcctgaagctctgtttcatcagttgctgttaacaatgatacaccctgaccatgaagctcgtgttgctgcacaccgcatttttgccattgtcttagtcccatcttctgtttccccttcgattcaagccagtccatctagccgaccaaaga

SEQ ID NO: 16141 - DNA, 359 bp, Zea mays
  Coding DNA Sequence Number=SeqID_1738
aacgggtatcgggtctcgctgttcgcttgattgtaatctgtatcggcttctactgtatctataatatttttgtctatataaattgcagatgaacggcatgctttaatcccgtctatctccagcggtcttctcatctagcctcataaactgatgcaatgcaggtcgttcccctgttcctttctgagatcgcgccgacgagaatccgcggcgggctcaacatcctgttccagctcaacatcaccgtgggcatcctcttcgccaacgtcgtcaactacggcacctccaatatccacccgtggggatggaggctctcgctggcgctggcaggcatcccagcggtgctcctcactctatgcgcg

SEQ ID NO: 16142 - DNA, 53 bp, Zea mays
  Coding DNA Sequence Number=SeqID_1739
caatgcctaatgatggcagggtactgctgccagttgattcacgggagcctaat

SEQ ID NO: 16143 - DNA, 511 bp, Zea mays
  Coding DNA Sequence Number=SeqID_1740
gggttccccgcgaaccacgcagtcgccgtcggtcgcgccaccagcagcttcctcgtcgcatggggccgcaccatgcgcggtttcccgatcggcctgccgccgccgccgctgcgccgccacgcagggctcttcccgccccgagacccgccgcgctttgagttcgagctccgcggtgtggagttccgcgcgcgcccgacgccgcctgcatcatcatcatcaccatcccacctcgtcacagcccccggtgagtcgaccctccgccacgacatcgtgatccacaaggcgcacttcaccggggaattcatcgccgcgctccgcgccaaggcatcagaaggccgcggccaccctttcagccggttcgagaccatcgtcggccatgtatggcgtgccatgacgcgcgcgcgcggcctccgtgacccgtgccaggcgtccgccatacgaatctccgtcgacgggcggccgcgcctcggagttccgcaggaatacttcggcaaccaaattaatattacgt

SEQ ID NO: 16144 - DNA, 427 bp, Zea mays
  Coding DNA Sequence Number=SeqID_1741
tcggcacgagtaatagcatcctcggcctgctgtggagggaaccacttccctggactggttgagtacgccggagtgacgggcccagcctacacctttgaccactatgccgtcgcccttgatgaagtagaccgggacggtagggaatccaataacaaggcagagcgggtgaagcaagagctgtgggatttctttagatgcgaggctggatacgaggctagggtggatgtggtggccaccatgagctgtaagaagctcgtcatggacatgcactatgaggcacgaatccaggccatcgttagttaccacgaccctgtccttagggagaaggtgaccaagcattaggcccgaatcatgtcgtttatcagggaccaatatttgcagacgattccttattggtgtgccacacatcctcattgctgagagcaga

SEQ ID NO: 16145 - DNA, 538 bp, Zea mays
  Coding DNA Sequence Number=SeqID_1742
tatgtaggcctatcctgtgtgacagatcatctccgcaccgtggcctggtcgtccaagtttcgcccacacctgttggagaagtatggtgatacatcgaacatgttggagttcctgcaggtctacatcaccgctatcattgtggctggcggaaatggcgctgtgatggcgagctacttccatttagccttaatcgggccaccctagacttcactcgagaacctcaccccaggatccatctattcctgggaagagctctgcacgtggttcatcgtgaacttcgccaacgcttatcagcagcatggcgtggaggccccacccccatgtagtaagaaaggaatctagagagatgctctaggcattcatctcctgcttcaccaaggtacggggaaccataccttgtatatctgatccttttatcatcattactttccgacagggggtacgtgatgaaaagatgcttgggaagctgtcgacacatgatgtagaaagcgtcaccacactcttcactctggcagaaaagtgcgctagggccaccgag

SEQ ID NO: 16146 - DNA, 172 bp, Zea mays
  Coding DNA Sequence Number=SeqID_1743
aatgtagggctagatgcgcctccaatagttggttaggtaaacgccctgtagtaacagtggtagttatataccctggggaccacctcacatgcgggtggtaaagggaaagccaccattggtataaaaataccctcatcgcgtcggggttatccgggccttggaagaatagact

SEQ ID NO: 16147 - DNA, 314 bp, Zea mays
  Coding DNA Sequence Number=SeqID_1744
agtcaacttgcaggatattaacccccagggcgccgtaagtgtaccttctggtggattggaccggggcaaaggatccggcaaaacgccaaatcccgttgctgaccacgcttttacgcggcgtcagcgtgccggtacaggttggcggcggtattcgtcatcgtgacgatgtggccgccctgctggcagccggtgtttttcgcgtggtggttggctccaccgcagtcaagcagccggaagaagtgaaaggctggtttagcgaattcggtgccgacgccattgtgctggcgcttgacgtgcgcattgacgccagcaat

SEQ ID NO: 16148 - DNA, 263 bp, Zea mays
  Coding DNA Sequence Number=SeqID_1745
aactcaaaggttcccacacaaacattcaaaaaatccccccattttaaaccacagaacacccccacaaaaaaaaaccaaaaaaacacccaccgttttttggccccaaaacctgcggtttttttatatgcatcgacaccctgaccaggatacaaaaatttattctcccctcagacccggcgaaattccacaggaggataaagatacaacccccttttctctccaagaaaaaacgaggggtctcctgctccgaccctgaaaaggaa

SEQ ID NO: 16149 - DNA, 363 bp, Zea mays
  misc_feature (36)..(36): n is a, c, g, or t
  Coding DNA Sequence Number=SeqID_1746
gtcacagaatttatgagaggtatgtggttcggcaanaacgagcagaaggaaagaaggccctaaaggatattcttctctatggaaagtcattgcctcatttacaggtgaaagatggaagcacaggtagctttgctaactcacatgcaattccgaggttcaaaacgtttaggaaaggacctcaaactcactggtcatcgaattcatggcaaggcgtacacaatcacagaaagaggctttcgtcccctgcctcacaaggtcgagaagggtttccccgacctctcgcgcacccgccaccgcttcctctgtctctcgcagccgccgtcgcctcctctccctcgtgcagtcagaagtcagcagcccctc

SEQ ID NO: 16150 - DNA, 170 bp, Zea mays
  Coding DNA Sequence Number=SeqID_1747
atgcctgcagcccttcaggtttttggaggagtcagcaaagggttaggatattccggtggcaatggaacggtcacaggaaaagcttgcccaaagggtctttatggtacattttgcaaggtataacctttgcaaagttggagtgcgaaaacagtgggctgtttgaagctgca

SEQ ID NO: 16151 - DNA, 420 bp, Zea mays
  misc_feature (104)..(104): n is a, c, g, or t
  misc_feature (106)..(106): n is a, c, g, or t
  Coding DNA Sequence Number=SeqID_1748
ggttggccggttcttattgttgttgtccttcccgttgttgccgttcacggggttcttcggaagcggaagggccttcccggggccggggggcggggcggtttttncncgggcaacggcttccccttccaatgcaagcccaaaccaaaggggggcgcaacgaaagttcttgctggaccggcctttcaccccggggttgccgggcaagagcccgttgtcgttttccctttcggggggcaacgggttgccgccccgcaacagggaccgcttcccgaccctccccgagggccacctcaaggtcgtgctttacgtgcacaacgggccccgctacctccgcctggtggtcgatagcctctcccgcgtcgagggcatcggcgaggcgctgctcatcgtcagccacgacggctacttcccggagatgga

SEQ ID NO: 16152 - DNA, 509 bp, Zea mays
  Coding DNA Sequence Number=SeqID_1749
tagttccccgaacctctatgtaggaatctggtacaaaaatattccaatcagaaccgtggtttgggttgcgaaccgcgacaatccaatcaaagacaactccagcaaattgagcataaacacaaagggctacctggtacttatcaaccaaaacaacaccgttatttggtcaacaaacacgacaacaaaagcatcccttgtcgtagcacaaatgttagactcaggcaacttggttctaagagaccagaaagacacgaatcctgaaaactacttgtggcagagctttgactatccctcagacacgtttctacctggaatgaaattgggatgggacttgaaaaaaggccttaatagggtcctaactgcttggaaaaactgggatgacccttcaccaggggacttcacactgactattttacatacaaataatcctgaagtggttatgtggaagggcacaacacaatactacggaagtggcccatgggatggaactgtattcagcggtagcccct

SEQ ID NO: 16153 - DNA, 191 bp, Zea mays
  Coding DNA Sequence Number=SeqID_1750
acatctaattagtttccatttaggttgctgagatccttaaggatcgtgcatcgtggtatcgcgattgtcggcatgttgatgtcctccatgttatccctacgggtaacggtggaacgattgagctgatctatatgcagacttatgcactgacaactctcgcggaaccacgagacttttggacgctccgatac

SEQ ID NO: 16154 - DNA, 118 bp, Zea mays
  Coding DNA Sequence Number=SeqID_1751
gggatcctggggtgggtgccttacgtggttggtggggccggagacattgaagacgagcagcaggtcgacgcgcgcgccgcggcgtcggccgccatgaccccggcccagcggctccgcg

SEQ ID NO: 16155 - DNA, 199 bp, Zea mays
  Coding DNA Sequence Number=SeqID_1752
ctgcagctcatactaaatacctttgatgacacaatgtctaattattttatgggacttgtgccaaaaagttatgatgttgttgttaagctgaatgacaatcagactaattcagagaagtgagttagcaaaaccaatatggaaggataacctgctctcacattggatgtttcattcagcaggcctataattgttatgcccc

SEQ ID NO: 16156 - DNA, 143 bp, Zea mays
  Coding DNA Sequence Number=SeqID_1753
atggactccgagcttgaagacatggctgtgagggagctggaacagcacgcggcatggacagagctcgagggagctgcgcgcagagagggatcgagcgccgcggcacgggcgcgagctggagactcggaccaggacgcgcaggg

SEQ ID NO: 16157 - DNA, 530 bp, Zea mays
  Coding DNA Sequence Number=SeqID_1754
gataaagagtccgaccgctgtgcgctggagctgtccgacgcgcgcgttgacgtgctcggctatgcctgtctggtggcgatcatggcgatgggcccgggctatcatcgccagtcgcagcagcgcctgacgcaggtcacgcgcgacaacgaggcgctggcaccggtgatcaccagtgccggcgcgctggtcgatgcgctgcatgttatgggcgcgaagaagatcgcgctggtggcgccctacatgaagccgctgaccgagctggtggtggattacatccagcgcgaagggattgaggtaaagcagtggcgcgcgctggaaattgccgataacctcgccgtcgcccgccacgacccggccaatttacctggcatcgtggcggacatgacgctgacggatgttgatgtggtggtgctgtcggcctgcgtgcagatgtcatcgctgccggcggtggcaaaagtggaggcgcagaccggcaagccggtaattacggccgccattgccaccacgtacgctctgctgaaggcgctgga

SEQ ID NO: 16158 - DNA, 207 bp, Zea mays
  Coding DNA Sequence Number=SeqID_1755
gagcttcacatacaaaaatagtatcaacattgctatagcagtggccatagatggtgggttgattacatcggttcttcaagatgctggtaagcttgacatttattcattgtcaaggaaacagaaggagttagttgataaggcgctagcaaagcagttgcagccccatgagtacaactctgatatttttttgcctcatacacttcctct

SEQ ID NO: 16159 - DNA, 319 bp, Zea mays
  Coding DNA Sequence Number=SeqID_1756
ggccggagcccgaccggcaaatcggggcagctccaccgcctccttgctcaccagcggcggctctgtccgcccggcccacgcgtgtgcgtacaccacgtccacgtgcaccgccgcgtacggatgagtgaagaaaggcatgcacgcaggcagcacgcgccaccgcgccaggaacgcgtcgtgcaccagcacgtccaccgcgccccggccctgctccgactcagaccgtgcgagcgaccgggccgcggtgcgcggcgagaggcggcacttgccgaactggaggattgggttgacggggccttggctcgggtacgggagcaag

SEQ ID NO: 16160 - DNA, 246 bp, Zea mays
  Coding DNA Sequence Number=SeqID_1757
caggtcccaacctaaacaattctgttgtatcctcctttgatgtagtcggcagtctgctgctgcgtctcagggcctttgtgcatcagcatcatctgcgcttcaaccagaccgcgctggcgctggaagcggcgctgagtggtcagggtatcgcactgaccagcccgcattttgtgcagaacgatctggccagcggtcggctggttcccgcctggcagcgtgagatgcccgttgatgccggctggtatc

SEQ ID NO: 16161 - DNA, 312 bp, Zea mays
  Coding DNA Sequence Number=SeqID_1758
gacagggcaggtgacagcaacccttactgcggccagagtccgagtggtggtgagcttggagctgttgccgacccctcccggtcagagccccaactacaatatacgggcgcagctcaacaaccagcagccggagcagtcccattgtgcgcccctgcccactcagtaccccgggcagcccctcaccagctccccgagtgccatcgcccagcagcgccccgcgtcctcgcccggctccctcggccccccgcagggatccgccctcgacctcgctggcgactcacggcccgtgagggcgtcatcgcggtcctactt

SEQ ID NO: 16162 - DNA, 452 bp, Zea mays
  Coding DNA Sequence Number=SeqID_1759
ctcacggtcgtttatctttggcaaggtggataagggggtgacactgtctaaagccacccgcatagcgcgcaagttgggctttaccaagcgggatccgcgagacgacctgtccggtactaacttggcgcgtaaactgctgattctggcgcgtaaggcgggtcatcacatggaggtgagcgatcaatttacatgtaaccgctgctgcccgccagcctgacggacattgccgacgtggatcagtttatggcgcgcgtgccggagctggacaacgcctttcccgcgcgcgttgccaaagcgcgtgatgagggtaaagtgtcacgcttcgccggcgcaattgaagagggcggcgcctgcaaagttaaaatcgatgcggtgtacggcaacgatccgctgtacaaagtgaaaaacggcgagaacccgctggagtttttcagccgctattatcatccgat

SEQ ID NO: 16163 - DNA, 579 bp, Zea mays
  Coding DNA Sequence Number=SeqID_1760
gttctatctcacactacagggttgtcgaaatggtagatcttgtccatactcgcatgattctggctccttggtctctgcacctgtcacatctggaatatgctctcaggaaagcagagccacctcattgtgcgatacaaggttgcttcctgctgatggagatgggcatattcttgtcgtgaatgacaaaacccatcagttttatattaagcatagtcagttttgcgatcccggcaagattgctgttgttccaactggtcatgagtatgctgagtcgaattcagttccatagggcctccacatacttgagactttgtccgttccatctattctaatcagtgggcttgagcaagctttgccagagccttgggcaaatcttaatagagctctctggttagatccctttggtaactgttagtcagccaccgagcaagctctcttgcagaagtttttccctagtctggccgtcaacaatttgtcataacggctgtcctacctgcatgtcatcctgggcttgaaacacccgagatacattcagttgcaggtaagtcccataccataaaggcctgtttctcattcgac

SEQ ID NO: 16164 - DNA, 420 bp, Zea mays
  misc_feature (313)..(313): n is a, c, g, or t
  Coding DNA Sequence Number=SeqID_1761
tgtttctcagtcaggtgcgcggcttcagcgcactggagactggactggcgatcttctccaccggggtgtttcagattctgtcgatcccgctgtatgcctggctggcgaaccgcgtcgatctgcgtattttgctggcggcggggctgatctgttttgcgctgtcgatgcatttcttcgtgccgattacccatgactggggggcgaaggagctgctgtttccgcaggcatttcgcggtatggcgcagcagtttgccgtggcacccacggtgacgctgacgctgggcagtttgccaccggcccgcctgaagctcgngtctggcctgtttaatctgatgcgcaaccttggcggcgcgattggcattgccctgtgcggtacggtgctcaacgaccgcaccaacctgcactttaatcggctggcgg

SEQ ID NO: 16165 - DNA, 257 bp, Zea mays
  Coding DNA Sequence Number=SeqID_1762
gttccgatacggtctcatatgctggcacgatttccgtcatcggcgcgctgcgtcaaaccggtaccggcacgacgattctcgtcggcgtcatccgctacaccggcggcacggcgatcgccggcggcgcgctggcggtcggcgacgcgtcgcatccgctggcgacgagcggttcgggagacgtcgccgttgcttcgggcgcttcgcttggcgggtacggacagatcgcgggctcggtgcataacgtcggcacgcttgca

SEQ ID NO: 16166 - DNA, 186 bp, Zea mays
  Coding DNA Sequence Number=SeqID_1763
catgcaggatgctccacgtgtggtggcctagcgcttctcaagcgcgttcctcccacagagcgtctagttgcatctcttcccaccagttgcagcaaccactggcgcgtccttacccctctacgacgctggcgaccacatcccctgcctcccaccagcgcgtcgcacaccctgcttccgttggcacgt

SEQ ID NO: 16167 - DNA, 521 bp, Zea mays
  Coding DNA Sequence Number=SeqID_1764
tggcgcgcaagcacggctacaagctcaacgtcagtgcgcgcaatctgcgcttgcggcgcagccacacggtggcggtgatcgtggaaatgacgccttcgtccagccgcaccatgtgggatccgtacccgctgtcactgctgggcggcatttcgcaggagctgacttcggccggctacagcgtgctgctgaccacccgccagggcgccgcaaatgccgcggtgcaggcggccgacggggtgatcctgcttggccagggcgtgcgccaggacgcggtcaagctgtacgacaagatgggcttgccgatggcggtgtggggcgcggaaggcgaccacgacaaccatatcgtggtgggcagcgacaaccgccagggtggcatcagcgtggccgagcggttcctctcgatcggtcggcgccgcccggtgttcatcggcaattccgatcatccggaaatggcacagcgcctgcacggcttcgtcgacgaactggccggtcacggtatcaagccgttgctcttgcagcgg

SEQ ID NO: 16168 - DNA, 396 bp, Zea mays
  Coding DNA Sequence Number=SeqID_1765
agcagccgcaacctcagaagttgcaacatcatcaacagcagcagcaacaacaacacatgcagatgcaacaaatcctattacaaagggctcagcagcagcagcagcatcaacagcaacagcagcagcagcagcagcaacctcaacaacagcagcagcagcagcagcagcaaccacaacagcagcatcagcagcatcagcagcagcagcaaccacaacagcagggtagggatagggctcatctcttaaatggtggtacgaatgggttagttggaaaccctagcacagcaaatgcactagcaacaaagatgtatgaggaaaggttaaaattgccccttcaaagggactctttggaagatgcagcaatgaagagatttggagaccaaatcttagacccta

SEQ ID NO: 16169 - DNA, 366 bp, Zea mays
  Coding DNA Sequence Number=SeqID_1766
agcttgatgcctgcagagctgggctcgggcctcggttccggcgcggtgatcgtgatggacgagaccacctgcatggtcaaggcctgccaccgcatcgcgcgcttctacaaggccgagtcctgcggccagtgcacgccctgccgcgaaggcaccggctggatgtaccgcgtgctcacccgcatcgtggaaggcaagggcacgcaggacgacctgcaccgcctcaaggccatcgccggccagatcgagggccacaccatctgcgcgttcggcgaagccgccgcgtggccggtgcagggcttcctcgccaagttctggaacgaattcgaatactacgtgcagcatggtcgctcgatgaccgaagaccgg

SEQ ID NO: 16170 - DNA, 279 bp, Zea mays
  Coding DNA Sequence Number=SeqID_1767
atcgacttccgcctgaagacgcgttacgtcgacaagaaggcgcgacggctagacgaagcgctcggcatgatcgaagaagcgaagcgcgacggcaagccggtgtcggtcggcctgctcggcaacgcggcctacgtgttcgcggaactcgtcaagcgcggcatcacgccggactgcgtgaccgaccagacgagcgcgcacgacccgatcaacggctacctgccgcagggctggaccgtcgcgcagtggcgcgaggcgcagaaggtcgatccgcagagcatc

SEQ ID NO: 16171 - DNA, 171 bp, Zea mays
  Coding DNA Sequence Number=SeqID_1768
tatgactttattactagctttgaacttctgatgttggttggtagagttggccctcaaatttgtatgttgaaaactcatgtggatatattatctgattttacaccagattttggctctaagctccgctcggtatccagcaatttcccattttgccctttcctcatccacagc

SEQ ID NO: 16172 - DNA, 175 bp, Zea mays
  Coding DNA Sequence Number=SeqID_1769
gttgtggccttgtttgtgcgggtccgcgtcgtgacgtgttggtttctgttccttgcggcgctgcgtctccccttgggtctttgtcgggtccctgttggtttcgtcgcccgtgttcttgttctcgtgctcgtggtttagcgccttcggcctttggccttttctgtgtggcggcccc

SEQ ID NO: 16173 - DNA, 373 bp, Zea mays
  Coding DNA Sequence Number=SeqID_1770
ttatctggttatatcggttgactgcacttgagtccgaatatattatttttgatggcacctgcacgaagagtttgacactcatgatccaaaggataacactttgctcctcccttacttgaggaaaaggccaaacatcatagagataggagcagcgcgtgatatagtctttgctctatcaccgataggagtatgtgctgcttttagtagagacacaaatcagagaatatgctttttgaacgggagtctacatgaagtcatccgctatttttttcacagacaagactaatgattcattcaaaactgcatcagtatttggctctgaaatcttcagtgctctgcgatgcagtataactcgaatatagtacgttcgccg

SEQ ID NO: 16174 - DNA, 314 bp, Zea mays
  Coding DNA Sequence Number=SeqID_1771
tgcatgagtgcgcagcccaccagcaccgcccccgacctcgtcaacatcgagatcgacggcaagcccacgcaggttcgcaagggcgcgatgatcatcgaggcggccgacgccatcggcgtcgccatcccgcgcttctgctaccaccgcaagctgccgatcgccgccaactgccgcatgtgcctggtcgacgtggagatgggcggccgcccgatgcccaagccgcagccggcctgcgccacgccggtgggcgagggcatgaaggtcaccacgcgttcggacaaggcgctgaagttccagaaggacgtgatggagtt

SEQ ID NO: 16175 - DNA, 142 bp, Zea mays
  Coding DNA Sequence Number=SeqID_1772
aaatggtgctattcagtcttttcttgttaaacatatcaataactgggtgactagagcatactgccataaggttttacgtctttctgctgcaactcaagatctaccgaggtctgttgtttgtaacgtacatggtgtaaatccg

SEQ ID NO: 16176 - DNA, 520 bp, Zea mays
  Coding DNA Sequence Number=SeqID_1773
acaacatttgttctctgcattcagttaaaacgagctattgcttgcaggagctgcaccaagttcacgcttcatattcgcagagaagaatgcaaactatgttctgcttacctgaacaataagtgtcttgaggagttttttgtaaatgaggtgatctctacttatgcacagtagctctttccttgctgactccaacatatctgttaccaaatcatcctgagcttgaagactttattctggagctttgagctgcatcgagtaatcaattttcttcttgatgccaataacttgctagctggattccaccgtggtcaagccttgtgatgaaatcagatgatgatgacgcaattggcttctgtgacctacaattatgggcatgctgatgctacctagaacctcactacactggatgacaggtgaataagcagacaatagttgagtgttgtcatcaggttgcatctaccatgactgagattgtgagcttatgtatctatcgatcattgtattactcactctttctcag

SEQ ID NO: 16177 - DNA, 590 bp, Zea mays
  Coding DNA Sequence Number=SeqID_1774
aaaaccccaaatacggatggcagatatatcagggatatatatgaattcatgcgggattgtttaataaactatctcatcgctgaagaaaagatagaactagtaattaaactacttacacgtaatgaaaaagatcaagaaagtgtattagctaagattgttagtatatttgatcgcaatgtggtaaagaaaatgtttatgcccatgatgtatgggaaaaccgattataccttaaaaaaggatgttgaagatctattaaagggtaagtcggattccgagggaataaacctaatttcaaaacatatttctacatattggaaagagaattttggaaaaatgaaagatcttatggatcttatcaattatgttagctggtttggagcaggacaggataaaccggtggtatatagtacgccgtactgggtaacgctgcaaacatataagcggggaaaacgcgtaaaatgaaatacagttatacaaccaaaataacgaaaggaggttaaacacatggctaaatgcttgtccgtaacgatacatttaaaagagctaactaacttgcaattatcataaagagcttatgttcactgtggtta

SEQ ID NO: 16178 - DNA, 163 bp, Zea mays
  Coding DNA Sequence Number=SeqID_1775
caggccaacgccacgggcggcaatgcgctcgcgtttcatgcgcccgtcgacgagccggccgacgccgagcggcacaagctcgaggccgacctgaacgacggcgtgcgcaacggcgagttctcgctgcacttccagccgatcacgcgcagccagtcgggcgcgg

SEQ ID NO: 16179 - DNA, 589 bp, Zea mays
  Coding DNA Sequence Number=SeqID_1776
gctccgtcaacggtgtctacaagaccatggaggactccgtcaccggcgagtgcgaggtgatgtacgacatcagccccctggcccagtaccagctccagagccgccccgagctcgctcccatgccccagctccgcggtgacggtcagctcatcgacatcgtcaagaccaagaacttcagccactgcgagcagcgccctggctaccacttcggcatcaacggcctcaccgacgttgagcccgcctccagcaagatgggcgagttcatggcccgctcctccgtcagccgcgtcgtcctgtccggcagcctccagcgctacaccatccagtcctccgtcaccaccaacaaggtcctcctgagccccgtcctgtacaacaaccagaacggcatgggtcgtctcccgcatgaacctgaccctggactccgtgcacgccgcctccggctcccctcagggccccgctaacccccgcaagatcaaggacctcgtctacgactacaacgacccttctcgcctcaagaacgctgacatgagcgacgactccagcagttcctcttcttcatcttccagttcctccagctattcttcttcct

SEQ ID NO: 16180 - DNA, 240 bp, Zea mays
  Coding DNA Sequence Number=SeqID_1777
agatgactgatgaggctattagaaaaaacaagaaagaatctcacgacacccaagaagaagctaagcgagctgaagaggttgctgagcgcacgaggcgtatagctggactttcaccgccgcctgagccgtataatcccaaggccaatccagccatgaaggaagcattagaaacgataaggatcgccaacgaagctgttgaagaagatgttctcatcaggcacaacagattttccatcatca

SEQ ID NO: 16181 - DNA, 306 bp, Zea mays
  Coding DNA Sequence Number=SeqID_1778
tggtcgcgctgctggcgatcttctcgcacgggccgatgccgctgtattccacccgcaccctggcggtggcctgggagatgtggagccagcaccactggctggtgccgcatctcaacggccagccctacagcgagaaggcgccgctgctgttctggctgatccatgccggctggttcgtgttcggcgtcagcgacgtgtggccgcgcgtgctggaagtggccttcggcggcatcgagctggtgctgctgtcgttgctggcgcgacggctgttcccgacccagccgtgggtggcgaaagcggcgccgt

SEQ ID NO: 16182 - DNA, 270 bp, Zea mays
  Coding DNA Sequence Number=SeqID_1779
atggtgctgctctatccggtcatcagcatgcgcgccggtctggcgcatgaaagttcacgcacccgcctgctgggcgcatggccggatcaaaaaagcattgatgcttattcgctggagacgcgcgtgcacggccagacgccgccgacgctgctgatccacgctgctgacgatgagacggtttccgttaataacagcatggtgttttttagtgccctgcgggagcacaaggtgccggcggaaattcatttttatcagaaaggcggccacggc

SEQ ID NO: 16183 - DNA, 267 bp, Zea mays
  Coding DNA Sequence Number=SeqID_1780
aaatggcgctgaatgatattcgtaaatatcgtatccgaggtctctagcttaggggatttcagggaattgcacatttcctcgatcatctttttcaggatggacagggcaagacaggaacacttattgctatcaacgcccagaaagggcttactgctgagaaagacaaggcactgaacacgctgcttgatgaaacggaatatttttatgcagattgcatcaatattgtgcgtgccattcagcgtaaatatccggatgcccaagtgtcac

SEQ ID NO: 16184 - DNA, 164 bp, Zea mays
  Coding DNA Sequence Number=SeqID_1781
ggtacagtatgttcatcaatgtccttcctgcttctcatatcaatcttactgatggtagtgctgtctttaatgtacatcaactcaaccaagttcccagtggcataaattacacatcccaaaaatcaattggattctaagccagccccatttatggcagcattttc

SEQ ID NO: 16185 - DNA, 323 bp, Zea mays
  Coding DNA Sequence Number=SeqID_1782
ctgcagcacccttacattgttgaattcaaggaggcttgggttgagaagggttgttatgtctgcattgtcacgggctattgtgaaggtggagacatggatgagctgatgaagaaatcaaatggtacctactttcctgaggaggtattgcttaaatggttcgctcaattggtgttggctgtagattacttgcactcgaactatgtcttgcaccgtgatctgaaatgctccaacatatttctcaccaaagaccaggacatacgccttggagactttggcctggcgaagactttgaaggaagatgatctaacttcatcggtatgatg

SEQ ID NO: 16186 - DNA, 292 bp, Zea mays
  Coding DNA Sequence Number=SeqID_1783
aatgcctgttgcctaattcttgttgttatcatatgcagtcatatgatggaggctttggtatggttcctggttctgaatctcatggtggaggaactttttgtgctgttgctgctctccatctaatgggcttcatccaagttgatttggcatctgacttaagagattctacatcaatcgacacatgcatgctcctcgaatggtgtcttcagagacaagtcactgatggagggtttcaagggagaaggaacaagctcagtgatacatgctatgctttttgggttggaggcgtctt

SEQ ID NO: 16187 - DNA, 460 bp, Zea mays
  Coding DNA Sequence Number=SeqID_1784
tgctgtttatgttgaccatcggaactccttgtcgtactcgaccctgcaagcctccatctcgtcgtcattccgtgcgtcagcgagaaatctcaagagtcggtaagacggagccagcagcgtggtatccaccaagtacgcgacaaaaagctctgacatcctgcgcgactcaagttcgattcgtcaaaatgattcagtcgaggaaaagatcttcagcaattgattatcgaagaaaagaaggcccctgggtgacgtcaagtggaacccgtagtcgtgcttgcgactatcgcgtcgaattagtcagggtaagtaaatttgttactcgtgttagtggatggtttgactaggtttaatatttattagactacctgagtcgttttagtaatttggtcgatgtcataggatgaaaaagatctcaatatgtctcaatatgtctcagtgtttgcgggattgtttgtgttaa

SEQ ID NO: 16188 - DNA, 180 bp, Zea mays
  Coding DNA Sequence Number=SeqID_1785
ctttggctttgcaaccccgttcactccgttaaccccgcctattttccggaagcgttcgaaaaagccttggaataagttgttccttcccttggcccaaaattccttcaagaacttgcccttggccccggccttgttggccaccccgaaaccagttgttccggccggccaaaccatcttgtt

SEQ ID NO: 16189 - DNA, 285 bp, Zea mays
  Coding DNA Sequence Number=SeqID_1786
gtgcccttgaggctcagttcctcggcaaccaccagactcaaattttgtaccttgagactgctttccgccagcttgctcagggcggtctctctgtggatgagtactgtcatcagatgaagacgatggtgaacactctccacaccctcagagcccccatcaccgatgagaacctcgtgctcaacctcctacactgcttgaaccctcgcttcgatcacgtcacgcccatccttacccgcatgagcaagaacaatctacttctcgaggagcttcgcctctctaccactg

SEQ ID NO: 16190 - DNA, 292 bp, Zea mays
  Coding DNA Sequence Number=SeqID_1787
atgcagctgcctgtcgacgagcggcaggaccacggccgggcaccgcggcgacggaacggcgggcaccaaagcgagacagggggcgcgcgcgcccacacagcggggccgggcacccactcgaatctgctctctcaccaagcggccctctgccacgaggactgtgaccgggccctcggggcccgccgggcgagccgccagccacccgccacgccactccggaagtggcccaacggcggcgacaccgctcacgcgccgcctggcgcagcgccggtccagaggagcgacacgcacg

SEQ ID NO: 16191 - DNA, 204 bp, Zea mays
  Coding DNA Sequence Number=SeqID_1788
cgcatcgctggcgaaatcgctatttcccaccgtcggtgcgcctggtattaccgcgctgcgtctgggactgggcacgctcatcctgtgcgcgattttcaaaccctggcgcctgcgcttcagtgcaaagcagcgcaaaccgctgctgatgtatggactggcgctgggctgcatgaattacctgttctatctctcgatccgcaccgt

SEQ ID NO: 16192 - DNA, 313 bp, Zea mays
  Coding DNA Sequence Number=SeqID_1789
aacgggtctggcttttgcgctggcctcggcgtctccgctggcgatgctggaacgcgtgctggagatgttcaatctgcgtctctactttagcgccctcgcctcggctgaagcgctgccttacagcaaaccgcatccgcaggtgtatctggatgctgcggcaaagctgggggttgatccgctcaactgcgtggcgctggaagactcgttcaacggcatgatcgccagcaaagccgcgcgtatgcgttccatcgtggtgcctgccgccgaacatcgccacgatgcgcgctgggcactggccaatatgcaactggaa

SEQ ID NO: 16193 - DNA, 321 bp, Zea mays
  Coding DNA Sequence Number=SeqID_1790
ttccgtttcttttcttctgtctccaccatgagcaaccgttgctttttgattgggggcatatcgacgacgacagactatcaaaccaaacactggggttcttcaatggtgcgacaagcctggcgaaccaaaaacacaaggagtgggtgtgtttttttttcacgcttttttattgtgcccctatcgggcacggcaagcatccttatgcactaaacggttgtccagctctcctacacgaaaaaaggggctttgcgggtgtcctgccacccgttctcgttgaacattccagctgcttctgagcacgctgggaaccggcctttaaag

SEQ ID NO: 16194 - DNA, 223 bp, Zea mays
  Coding DNA Sequence Number=SeqID_1791
taaacgtgggcttacaagtattcctacttgtgctggtcctgctgataccctgagtctagggtattgaatgaacaattttctgaatgttgtgttttttacaaaatttatactcactccattccaaactgcagttcactctagctttgttctaaggctaactttgatcaagtttttaaaaaaatatgacaacatctacaagttctgccctattaagacataattc

SEQ ID NO: 16195 - DNA, 502 bp, Zea mays
  Coding DNA Sequence Number=SeqID_1792
agatgatagccgcattctggagccccatgctaaaccaatcatttccctcgctgcttgcatcattcgaggacatggcgtttctcccccccggtcttccgcggaaccgtgccttgctctgcctttttgcctcatcttctcatcaaccaccggcgaccattaccgacggccgccacggcgccacccatcgccaacgaaatggaaatgcatggctgatggctcctcagctcggtctacgggatccattggacatgccaacgcgccggccctcccggtccacggacatgggcgctcgcacggcacttggcaaccttctggcatctacgtcgttggatcagtgcagttggacgacaaaagtccataagtgcccgttgcggcatgtggctgtggctggccggcagcgatcgagcaggcaggacgtcatacggttgcaccacccgttcccgcccgacggccgttccaccgcgtcgactggagctagatggccggcaacgtcaaaccgaat

SEQ ID NO: 16196 - DNA, 259 bp, Zea mays
  Coding DNA Sequence Number=SeqID_1793
agactgcgtggcgagcatatcgtttgggatagtcgacgattgacaacccagcaggtcgtggtccacgttggtttgaatatcggcccccatattggtgctgatccatccgctaaaccttgcataaatgtctactcatgcaatttctatgtacagtcatcaatcatggatgcggtgacataatccagtatgtcattgggctgccgtcacagcagatcacctggggctttgagcaccaatgcttatcaagccgtagttcagg

SEQ ID NO: 16197 - DNA, 324 bp, Zea mays
  Coding DNA Sequence Number=SeqID_1794
tgtcagtacaattaacttatcgcagacccagatgacagccacagcaccttagctccccctaccttcgcaaatccaggaccactattcgagaccgtgaaagatttgcaggcagccgggtcaacaatcaggaagctgctgtccatcgactggtacagggagcatataccatcaagtaccacaagtccacaacggacaccaggaggtaactgttgctactcccgactccgggaaggacgccggccgcttcacggcggcatgggagcagtgcaaagctaataaggctcaggaagacgtcgttgcagcatgcaacgagtcagggatcag

SEQ ID NO: 16198 - DNA, 288 bp, Zea mays
  Coding DNA Sequence Number=SeqID_1795
atgacggccgaaggccatatcatttttgccatcgccagtgcgatatttgccaaacgcgccgaactgacgccggtgatggccagtgccgactggtggcatctggtgccggctgcgctgctgacctgcctgctgccggatatcgatcaccctaaatcggtgctgggccagcggctaaagtggctgtcgcagccgatagcccgcgcttttggccatcgcggctttacccatagcctgctggcggtgacggtcagcctgtggctgtttcagattaacgtgccggccgactgg

SEQ ID NO: 16199 - DNA, 564 bp, Zea mays
  Coding DNA Sequence Number=SeqID_1796
gagcgtgcaggtgatcctccacgaggacaactcgctggaagtgatcgacgacggccgcggcatgccggtggacatccaccccgaagagggcgtgccgggggtcgagctgatcctcaccaagctgcacgccggcggcaagttctccaacaagaactaccagttctccggcggcctgcacggcgtgggcatctcggtggtgaacgcgctttccacccaggtggaagtgcgcgtcaagcgtgacgccaacgaataccgcatgaccttcgccgacggcttcaaggccagcgacctggaggtcatcggcagcgtcggccggcgcaacaccggcaccaccgtgcgcatctggcccgatccgaagtatttcgactcgccgaagttctccgtcagccgcctcaagcacgtgctcaaggccaaggccgtgctctgcccggggctgctggtcactttcgaggacaagagcagcggcgagcgcgtcgaatggcactgcgaggatggcttgcgttcccacctggccgactcggtgtccgagctgccgcgccaaaggaagagcccttgtgcggcacc

SEQ ID NO: 16200 - DNA, 266 bp, Zea mays
  Coding DNA Sequence Number=SeqID_1797
ggcgcgggccgcgatcgagggcatgctctgcgggctcggagcgggtctcgacgccgtacgcgccgtgggcgtacgcgagaagaggctgctgctcatcggaggtgccgcgcagaacgaggcggtgcagcgcgttgcggcgcaggtgttcgatgctcccgtcgcggttcccacgcccggggagtacgtcgccgacggcgcggccgtgcaggcggcgtgggtgctgaccggttcacgcccgcaatggcacgtcgcgatcgtcgcagagc

SEQ ID NO: 16201 - DNA, 519 bp, Zea mays
  Coding DNA Sequence Number=SeqID_1798
atcggtttcggcttacaggagatcgtgaagaactttatctccggtctgatcctgctgaccgagcgtccggtgaaggtcggcgatctggtgagcatcagtggcatcgaaggggatattcgccgtattaacgtgcgtgcgactgagattcagctgggcgataaatccacggtgatcgtgccgaactcgcagctgatttcgcagaacgtgcgtaacgccaccatgggcaacgcgcagggcgtggtgacgattcagctgaccttcccgctggatatcgatccggtgcaggtgcgtgaactgttactggatgtgtaccgcgagaacgagcgtattctcgaaacgccggagccgtcggtttcgtttaaagatttgacgccggccggcattgtgctgagcgtgaccggcaacgtcgccagccagcgccagatttccggtgcgaaaagcgatctgctgtttgatatcctgacgcgcctgcgcaaagagggcatcgtgctgtctacgccgcagaccatgattatcgaa

SEQ ID NO: 16202 - DNA, 459 bp, Zea mays
  Coding DNA Sequence Number=SeqID_1799
gcggcttcggtattgacctgcttaacgccctgagccagagcaccggcctgcgtttcacgccgcgctgggttaataatccgcagcaggccgccagtctgttgcagcagcagcaggtgatgctcaacctattacagccgctgtacggggacgatgctaaccgcaccgcgctgccggtgtggcgcgccatctggggcatttacacgctgtccgacaggcagccgatggactggtccgcgctgcacgctcagcgcgtcggcgtgctgcgtggcgatctggcgcagcgtctgcttccggctgagatcgcgccccagctgttcgacgatcgcgcccagctgtggcaggccctcaacactggccagattgatgcagtggtggataacgtgctgtcggcgcgctggcgcatggccagccatgagggcaaccgcgtgcatctcgcgtttgtggccagcgatatcgcct

SEQ ID NO: 16203 - DNA, 568 bp, Zea mays
  Coding DNA Sequence Number=SeqID_1800
ctggatatgcggagctagaaacactccatttgtcaggcctcagacgcgagtgtcacttcttcctgccaagccacagccacagccacagcagcaggccagcagcagcgaccagcgaggggtcagtagctatcttgcaagcaatccagctagggaagaggcaatggcgtccaagcaagtgctgctgctcctggccgccgtcgcgtgcctcgcgtcgctggcctccgccacgccgtggacggtcggggacgcaggcggctggagggccaagttcaacgagaccggctgggccaacggcaagacgttcgtggtcggcgacaccctgctgttcgtgtaccccaaggagaaccacacggtggtgaaggtcggcaaggacgccttcgcggcgtgcgacctgagcgccaacctacatgtgggcaacttggtcagcgcaacagacatcgaacagctggggcatcccggcatggagtggttgatgtgccacgagcctgatcaaagcctggtcggcatggatttggccttctatgtggttgaagcctccacctcaagggaggcaatggccacgattcct

SEQ ID NO: 16204 - DNA, 431 bp, Zea mays
  Coding DNA Sequence Number=SeqID_1801
attccgcgccgacctgtattatcggctgaatgtgctgccgatcgaggtgccgccactgcggcaacggctggaggacctgccggcgctgtgcgaggccatcctgggggaactgggcagccagtatgaactggaggccgaagcgcagcagctattggcgaggcatgcatggccggggaacattcgcgagctgttcaatgtgctggagcgggcaacgctgctggcagatcagccgcggctgggggtggaggatctgcgggcggcattggggccgttgagcccggtggcgggtgaacctatgcggcagacttaccgtgaggcgtgtgaggcatttgagcgcgagctgattgccggggcattggccgaacatgcgggaaatgtgccgcaggccgcgcaggcattggggttggggcggtcgaccttgtacaagaaga

SEQ ID NO: 16205 - DNA, 287 bp, Zea mays
  Coding DNA Sequence Number=SeqID_1802
agtcgactctgcagttttctacaggaagaatctgaatcctccatccggcccggcccggcccggcccgttggaggggaccgctggttgccgacagagccatatggacgacttgttggttacgctgttccacaacttggcacagcatccagagactggcactggcacatgtcggccgcaggcttgcggtgacgcttacagcaggacactgaagagatggcacggctggttggtgcaatctcagcttgccatgaacatgaagcttgcaccggacaggacgaacaagttca

SEQ ID NO: 16206 - DNA, 524 bp, Zea mays
  Coding DNA Sequence Number=SeqID_1803
agccgtcgatgcgtgcaccgcagatgttccggcccgccggggccttcgatccgcttgccggacatgccgcgtgcacgcgggcgcgccgcgcctcacgcgcccgcgcggacgggccgccggcatgcgcgggaggtgcagcatgacgcgcgcgacacacgcaccgccctcgcagccctccacgtcttcgacgccgtcgaaacgcgcgaagcccgcgacggccgccccggaacccgacgacgacgcgcccgcgacgctcgacgcatgccgccgctgctcgctgtgggagcacgcgacgcagccggtgcccggtgcggggccgacgaacgcgcggatcatgctggtcggcgaacagccgggcgaccaggaggaccgcacgggcatcccgttcgtcggcgcggcggggcgcatgctcgatcgcgcgctggacgaagccgggatcgaccgcaagcacgtgtacctgaccaacgcggtcaagcacttcaaatgggagccgcgcggcaagaaccggctgcacaagacgcccg

SEQ ID NO: 16207 - DNA, 171 bp, Zea mays
  Coding DNA Sequence Number=SeqID_1804
taccgtccagctccagaggacctgtgccggcacctgctccagtgattgatactcaggccgaggataccgcttttcaccagtttgagactcagggcgcagcagtccctgacgatgatgatgatgatgatgatgatgatgatgatgatgatgacgacgactttggggtcccgc

SEQ ID NO: 16208 - DNA, 288 bp, Zea mays
  Coding DNA Sequence Number=SeqID_1805
ctgcagagcctaggctcgttcgaggcggtggcggacaggcaggcaggcagccctccgttcggcttggcttgggcggctgccgcgggcgtcgtcgcgctcgtagccactgaggccggcggcggtggcaacgtggcagtgcggtgccgagacaccgttccatcaaggaggctggggcaccgaacagcgaacaacgaagaagagcagctgaacagaactgtccagaagcgtgcagaggaggatccgctcctgcgcccagggccgcggaccgtccggccgagggctgtggac

SEQ ID NO: 16209 - DNA, 373 bp, Zea mays
  Coding DNA Sequence Number=SeqID_1806
gatgaggaagccagtagctcaccaactagtcagtgtgcagaagttgaagagtacaggtcgttcctggacaaggccgcggtggagatggcggacgacaagaagcggcggcggctggcgagcgcgtggcgcctgtgcacggtgaagcaggtggaggagcacaagtgcgtgctgcggctgcagccggtgtgggcgagagacatcgtcttcgcggcggcgtacacgcagatgaccaccaccttcgtcctgcagggagacacgctggacccgcacgtgggaggcggattccgcgtgccggccgccgcgctttccgtcttcgacaccctcagcgtcatgttgtgggtgccgctctacgaccgcctcgtgagaaaagatg

SEQ ID NO: 16210 - DNA, 213 bp, Zea mays
  Coding DNA Sequence Number=SeqID_1807
acattggtcacggtcgtttggcgaagcgtggtgttctggcattaatgcctagcattaatgaattcccgtataccgagcgtgtcgtatctgaaattactgaatccaatggttcttcttctatggcttccgtctgtggtgcttctctggcactgatggatgcaggcgtgccgattaaagccgcagtgctggtatcgctataggtctggtgaaaga

SEQ ID NO: 16211 - DNA, 166 bp, Zea mays
  Coding DNA Sequence Number=SeqID_1808
ccggcacgacgctcggaggaagccaaggccatgacggctgcgatgcaccatccggcgagccaggagccctcacggccacaccaccaaccacgaagcccctcaccattcaacacaaggaccagcgatggagattcagcaccagaaaacggcccatgaaggagaaaag

SEQ ID NO: 16212 - DNA, 442 bp, Zea mays
  Coding DNA Sequence Number=SeqID_1809
aagcggtcggcaagatccaaccctttatggttcaggcccacgtggaacggcgcgtaatgttcggcccccgcgcggcagtggccgtggaccaaccccccccccttccgtggcgggccgtgcttgggtcggcggggtttgttccgggtccggcccgcccgtttccccagttgccggcccaggcccttctccaacggatggcccttattgggtttcgcgtccaaaagggcggcggcgcgctttgcctttactggcagcccggcgaactggtttccgtgtcggcgtggcggttcttacccccgggagttcccccccccccccgccacccaaaacccaccgttgattttcccccaggccgggttaactagggctaatgtgtccttcttctgccaaccaaaaaaatattttcccccgtcgtcgtttggaacggtctcctcgggctggt

SEQ ID NO: 16213 - DNA, 378 bp, Zea mays
  misc_feature (108)..(108): n is a, c, g, or t
  Coding DNA Sequence Number=SeqID_1810
gaacgccaggacgacaacggcatgcactgcctgctggcgttcaacggcgagcttcgcgaggaggccacgggctgttacctgctgggcagcggttaccgcgcctacacnccggaacacggcttcaacagccccgactcgatgccaccggaagaggtcgggatcaacccctacctgtatgccctgggcaacccggtcaagtggggggaccctaccgggcataaggcgcagccgctcgctgacagtggcgtggctgagtacgaagcatccccctcgatggtcgtatctcccctagcctgggtcggtatgggtgtgcaagctatcggcctgggtgcacaggtcgcgggaaaggtacttgaaaagaaagaccccaagctctcc

SEQ ID NO: 16214 - DNA, 267 bp, Zea mays
  Coding DNA Sequence Number=SeqID_1811
atgcctgcagcgcattacagaagataaaagcgcgctgctgacgacgttgaattatctggacgaaatgcgccgcaaaaccgagctgtcgctgggtaccaaagcgccttatcgtggtcacagtgatatcgcacgccgctggcacagcattcagcaacatacccagcgtctgcgcgacgccaatcagcacaatggcatgctgttgcagcatcagatgacctttaccgaacaggcactttcggtgctgaaaccgcatcagacccagtcctt

SEQ ID NO: 16215 - DNA, 257 bp, Zea mays
  Coding DNA Sequence Number=SeqID_1812
tttccgcccatgtgtctcgtggctggccgcccgctcttcggcccagctgttttttcctggcgctccccggctcccggtgctgtggtgggtgtgtgtccgcgcttctctctcgctggtcggccttggtgtcctcttcttggccctgtcgcggctgctcggcctgtgtttgttgcccctcgccgcccgcggtctgtctggccttccgcccccgctgtgtgtccccgcccgcgtggctcctgctgggttgtgtccgcggg

SEQ ID NO: 16216 - DNA, 214 bp, Zea mays
  Coding DNA Sequence Number=SeqID_1813
accacgtgctgggagcctactgcgaggctcgtcggcacgcccccgcgcgcgacgagttcaactcaaccccaaacctccacctagcaagattcactgcgctgcaggccactctggcccacaccaaggggatggacgacctgaactcactctggacatgcatggcgcaatgcgacaccacatcctacaacgttgtcatcgtcgagagcactgaggg

SEQ ID NO: 16217 - DNA, 176 bp, Zea mays
  Coding DNA Sequence Number=SeqID_1814
tggtagagtaccacgacacgatgagggccatcggtgactgcccgatatatgttagcgacaagccggggaaccacaactttgagctgctcaggaagcctatactccccgacagctctgtgccatgcgcgtagctctccgaccgacccacacatgaatgtctcttctccaacccggcg

SEQ ID NO: 16218 - DNA, 194 bp, Zea mays
  Coding DNA Sequence Number=SeqID_1815
tggtgatgagcgtgacgacggtcctgctggtgagctttggccacgtctcttggctggtggcgatcgacgtcgcgctgtgggggctggcgtttggttcaatgccgactggctggtcaacctggctgtcgcgcgcggtgacggacgacaccgaatcgggcggcggtactgctggtggccactattcagctggcgat

SEQ ID NO: 16219 - DNA, 487 bp, Zea mays
  Coding DNA Sequence Number=SeqID_1816
tgggaatccccaaatgacaaattgtttaaaaggggggcaatcatgcgggttgcattacagacgggtttttttataatcaaagacttaccccccaagttttattggtcctcagcataaacataatcaaagatttacctgccaagccctaccgtttttgggcagagcgatacaaaatagggggccagctaaaccagttgaaacttgcatggggtagtcgatgcaaattcatccaaaaaccgtgcttccagccaaggtcagaaaacagccaagctgccaagggcagtttttagttgacatgaccccaggctttgcatcaacaatatcgcgacatccaggggggaaaaagttgtaataacaaaaaactgcaagttgcaacatgggaccagtccaaacatgtaaggacacaaaaaggggggggctttttattcccccaatcccgggaaagggagggcggggcccaagaaggcgtcttcctcatttgggacag

SEQ ID NO: 16220 - DNA, 168 bp, Zea mays
  Coding DNA Sequence Number=SeqID_1817
ttcaccaaaactttccacttcgtggaggaccaccgcaccgaccacgtcttgtcgtggggggaggaccgcgcccccttcttggtgtgtgcgtccgactgagttccgcctgcaccttctccccagctacttggcgcaatcatcttctttaacttctgaaggcacttgtgc

SEQ ID NO: 16221 - DNA, 556 bp, Zea mays
  Coding DNA Sequence Number=SeqID_1818
tgaccgagacgctcttttcttggcccggcatcggcaaatggctcatcgatgcgatcagccggcgcgattatcccgtcgtgcaaggcggcatcttgatgatcgccacgctcgtgatcgtcgtgaatctgtgcgtcgatctgctctacggggtgctcaacccccatattcaaaacgcggctccccaaagcgtcacgccgccaagcgggcgcgcactcgcgctgcgcgagttctggagcaacttctcgcgcaatcgcggcgccgtcgcggccggcgttatcgtgctcgtgctcgcgatcgtcgcgctgtttgcgccgctgatcgccccgcacagcccgatcgagcagtaccgcgattacgtgaagattccgccggcctggctcgacggcggcaactggaagttcgtgctgggcaccgacgaagccggccgcgacatcctgtctcgtctcatgttcggcgcgcgcatgtcgttcttgatcggttgcgtctcggtcgtgctcgccctgcttccgggcatcgtgctcgggctgtgcgcagcgttcttcggatgggccgatac

SEQ ID NO: 16222 - DNA, 222 bp, Zea mays
  Coding DNA Sequence Number=SeqID_1819
gggtcgggcgccaccgatgatgagggccgcgccagccagagccagctgccgctcgataggttcctcaactgtccgtccagcctcgaggtcgaccggaggatctccctggggcctgggccacgacatgacgcgccgggcgatggcatttggtctttgttagttaagggaaggatgctagatagtgatccacaagataagagacaaccgcatgctcaagatttt

SEQ ID NO: 16223 - DNA, 176 bp, Zea mays
  Coding DNA Sequence Number=SeqID_1820
tttaaggaatttcaatcggtgtcgtcctcctggagcttaatactggtaaaaaacccggtcacgcattgaaacccatgggttaccaaaaccctggttaattgggtaaggccatggctcacccaggggcttaagcccgggacccccgggaagttggtgaccgcccggcttaccaagaa

SEQ ID NO: 16224 - DNA, 237 bp, Zea mays
  misc_feature (202)..(202): n is a, c, g, or t
  Coding DNA Sequence Number=SeqID_1821
atacaggactcactcacgcgctctgctctgttagtagctacggaagagaattaggggatcggatcgctgccctccagcagctcgtctcgccattcggcaagaccgataccgcgtctgtgctcatggaggccattggctacatcaaattcctccaagaccaagtcgaggtaattaattaattaatcaccttgctaggattctntttttctctatctctcctgacatcagttctcatca

SEQ ID NO: 16225 - DNA, 184 bp, Zea mays
  Coding DNA Sequence Number=SeqID_1822
gggcaggccattcaatccacggccaggcgcaggccccggacggcattgtggtgaaaacgcgctccttggcccggcgagatggagttccaccacttccgcggggaaggcaaagggcgtgcctcctacgccaacgtgggcggcggggttctgtggatcgagctcctgaagcggagcctgaagcttg

SEQ ID NO: 16226 - DNA, 197 bp, Zea mays
  Coding DNA Sequence Number=SeqID_1823
tcagcccctcccctcatatagaggggctgtgaattccgggtgttctaatgaggggtccgggtccccgtgctgcagcaagggtttctcttcttcggcgctgccgttccagtggacccctccgatctggctccaggcagcttccactgcggtaaatgttaaaccgcccctcccacattcctcagtggttcgattttcgc

SEQ ID NO: 16227 - DNA, 346 bp, Zea mays
  Coding DNA Sequence Number=SeqID_1824
cgcacgacgtgcgaactgacgcggtggagcgcgcgtttggcgcccagacctccactcaaacttgctgcgctcatttcctgcgagttatggcgcaagaagtggacatggtgggaggctcggacgtcctaacgatgcatagcgactacaataaaagaaaaacacaaaaaggagacaagtggtaccagagccggtggatggcgaccagcatgccggctggagggcgctacgaccgctcggtcactccgccgcgatgtcaacgtcggggaagatcacgtccgtcgcgctggggaacgcgcggtgaccggggaggcggtttcgagcgcgtcatcgagagggtgacgccgtc

SEQ ID NO: 16228 - DNA, 188 bp, Zea mays
  Coding DNA Sequence Number=SeqID_1825
tcctgtgtgcatccgctccaggtacagcaaaagttcattatggtacctcgctgtccaacgttgactggctacacggggcgctgaatcgctgccgactctcaccaacctgtttatcgttttggggctgaggggagccctgaggaagctagaggaagagggcacatacaagagcatttctgaagcttctc

SEQ ID NO: 16229 - DNA, 577 bp, Zea mays
  Coding DNA Sequence Number=SeqID_1826
tcaaggtgccccacggaccggtcgacgaccgcttcctcttcctctccgacgtcctgcccacggcgtggcaggcggtggagtacgccgacgtcgaggacggcggcacgctcgccgtgatcggcgccggaccgatcggcgacatggccgcccgcatcgccatgcaccgcgggctgaaggtgatcgtcgtcgactccgtgcgcgagcggctcgcccgcgtgcacggccggggtgccgagacggtcgaccacaccgaggtcgatggcgtcggcgaccgcatccgcgagctcaccgacggtcgcggcgcggacgccgtgatcgacgcggtcgggatggaggcgcacggctcgcccgtcgccgagaccgcccagaaggcgctcgccctgctccccaagaaggtgcaggagaagatgatgctcaacgccggctccgaccggctcgccgcgctgatgagcgccatcgactccgtgcgccggggcggcacgatcagcatctccggcgtgtacggagcgcccaccgacccgctgccgatgttccagctgttcgacaagcaggtccagatccgcatgggccaggccaa

SEQ ID NO: 16230 - DNA, 249 bp, Zea mays
  Coding DNA Sequence Number=SeqID_1827
ggatttgggcatttggttgcctgctgctgcgcggtgaggctgggcggcgctacgattggcggcctctgtggggttgccgggtgcgctcgtcctggccgccgagggcaagttcttcagcaacggctacgacctcgcgtgggcgcgcgcggggccggccccggcgctggggcaccgcctttccgcgagcgttccgcggcctcgtcgccgacctgctcgtgctccccgtgccaacggtcacggccgtcacgg

SEQ ID NO: 16231 - DNA, 434 bp, Zea mays
  misc_feature (235)..(235): n is a, c, g, or t
  Coding DNA Sequence Number=SeqID_1828
ccgtgcggccgacgcggaagcagcgggctgcggatggcggcccgacctcgccgccctggtgggcgaggcggacgtggtcctgacggtcctgccggacgccgcgacgacggagtccgcgatgaccgaccgggtcctcgcggctgcccgcccggggaccacctgggtcgacctcgcgtccggcgacccggacacgacacggcggtcgaggagccgggcggaccggcacggcatcgcnccggtggccgctcccatgggtggttcacccgaggacgccgagcacggcaccctccggctcttcgtcgccggaccgagggacgcgtccgaacgggtccggtcggtcctgacggcgatcgccgacgacggaggtgtccgggaggtgagcgaggaccccgcggacgcgcagacggtgaagctgctcgtgaacgcgctgtggt

SEQ ID NO: 16232 - DNA, 360 bp, Zea mays
  Coding DNA Sequence Number=SeqID_1829
gtctgtggaccttcggaaccctggactttcgtaacagtgaccggggcacagattatggcggcaagactcaccagcggcgaaatagctctggtgaagtggtccatcacgctgggcaggtcgccatggtcacgtccatgtgcgggtcggcgtcgaggatggccggagttggctggaccttgtgcgcaggcgggggagctcgtcggcggttaggattccagcctaatcacggcgggatagctcaatccagtgagctggggagcttcatggcagctcggtctacatgcggtggcggcaggccaaagtccagcgaggttacgctcgcttctccggcgaggcagggtctcggctcaagcttgggaa

SEQ ID NO: 16233 - DNA, 260 bp, Zea mays
  Coding DNA Sequence Number=SeqID_1830
gttgccatcaacgacatgtctagcagtacaccgccgccaccaccgcctccagcttctgccaccaccagtgtagctgctttcccctatggcgtgttgggctatggtggcatagccccccttcccaccaccatcgcacactgccaccaccatcgttcccttcccatctgccacaacaccccttccatcatcgatctccaccttggtgccaccagcgtcaagcatgcccacaatgacatgctcccagaaactctaccactaga

SEQ ID NO: 16234 - DNA, 273 bp, Zea mays
  Coding DNA Sequence Number=SeqID_1831
tttaagcaagcggaagaaagccaggaaggggcgggctaaccattgggtaaggaaggggctggcggggacaaccggccaggatttcttggcaataaggttttacaaggctggtttcttggtcaagtacttggcttccggcaggcgggtggagggttggccggcgggcgcaatgaaaagggaccggtcgttgggaagttttttggccttcaacggcaaggcaatcggccaggaaatggtgtggttcaagaacaagatcccttggccggtggtgaa

SEQ ID NO: 16235 - DNA, 149 bp, Zea mays
  Coding DNA Sequence Number=SeqID_1832
gcaggcaagggtgtttaggcgggtacgacgtggaggagaaggcggcgagagcctacgacctggcggcgctcaagtactggggcccttccacgcacatcaacttcccgctgagcttatatactgtgcttgtactactatataataatggt

SEQ ID NO: 16236 - DNA, 592 bp, Zea mays
  Coding DNA Sequence Number=SeqID_1833
gtgtgcaacgcgacgagaaaccggcgccggccgaaccggcgccgctactcgacgtgcgcggcgcggtcgccggctacggcggccggaccgcgaagggccggcccgcgaagctgatcctgcacgaagtcgacctgcgcatcgcgcgcggacagacggtcggcgtgatcggcgaatcgggctccggcaagacgacgctcgcgaaggtgatcgcgggcctcgtgccggcgacggccgggcagatcctgttcgacggcgaaccgctcgcgctcgatatcggcaagcgcacgaaggaacagcaccgccgcgtgcagatcgtgttccagaacgccgacacggcgctcaacccggtgcataccgtcgagcgcacgctcgcgcggccgctcgcgttctatcacgggatcaagggcgcgcgtgcgcggcagcgcgtcgcggagctgctcgaactcgtgcggctgccgcaggcggtcgccgcgcggcgcaccggcgaattgtccggcgggcagaagcagcgcgtgaacctcgcgcgcgcactcgcggccgagcccgacctgatcctgtgcgacgaggtcacgtcggcactcgacaccgtggt

SEQ ID NO: 16237 - DNA, 273 bp, Zea mays
  Coding DNA Sequence Number=SeqID_1834
gctgcgccgcggacaggagctatctctccgcctggctcgccgcatcgaatcgtccgccgctgctttttgggagaaagggctttgagaacgggcaaggctttgagctggccgctccccgcggggaagccggcgccagccagccagccagccagccagccatccagcctccacccccgccggcggggagcccaattatggtcaataaaccatacacgccccggccgaggtaggcaggcaggcaggcgggtatcggccaaatcctctcgcaggact

SEQ ID NO: 16238 - DNA, 194 bp, Zea mays
  Coding DNA Sequence Number=SeqID_1835
ctggctatttacttgtagctaatagggacagatggcctgggctgatctttattaggcttgttattcatgttcttctattttcccaggattcatctgctttagctcaattgggatggccagatatgcggataccaatcttatacaccttatcatggccagatagaatctatcgccctagctcaatttgttaaatc

SEQ ID NO: 16239 - DNA, 371 bp, Zea mays
  Coding DNA Sequence Number=SeqID_1836
tgatcctaattctgctactgttagcagggatggcttagcaaagcaaatatattctcagctatttgactggctcgtaaacagactaaatgcctccataggacacgatacatcctctgaccgattgattggagtacttgatatctatggtttcgaaagttttaagactaatagctttgaacaattatgcatcaatttcaccaatgaaaaacttcaacagcattttaatcagaatgtcttcaaaatggagcaggaagagtataacagggagcagattgactggagctacatagaatttgttgacaaccaagatgttctagacttgattgagaagaagcctggtggaattattgcacttcttgatgaagcttggt

SEQ ID NO: 16240 - DNA, 557 bp, Zea mays
  Coding DNA Sequence Number=SeqID_1837
atgccgcacggtagacaatcgttaaacagcgttctggcagggttccgtccagcttccaatccataggagaagaacaatggatgtcctccttgggaaggcaggttgttggcatacatccgcgacggaaccgtcattagagatctccagtgctgctgccagtacaatacggctcctactaagtttggcgcagcataacagtgggcttggcaatcgaaccgccacctgtaaagccggtggtcatgcccagccggacgccgtccgggcaagtgacggtggactcctcggaccgcatcgaacacctcaggcgcgtgcgcggtaacgagacatccaagtccacagacccaaaatctccccgcttgaacattgaaaatccataggggaatggtctggtgggagaaaaactaggaaagagaacggaccacgaacccacctaggtcaggagatttgaagggaccggacgaacgttgttccggctcgtggaaatcccagatcaactgctgctggtggcaactttgtgccatcagttgttttcgtcttctcctctattgtatcatgtt

SEQ ID NO: 16241 - DNA, 332 bp, Zea mays
  Coding DNA Sequence Number=SeqID_1838
aatctgtccagccagggtggtccgcggcgtagggcgcgtaggccttcgcgcggcgcggggcaggccgacacggcgccgggcaggcgggcacggggcacgtgagttcgcacccgcatgcttggttcgttttctcctcggccccgaccggggcctggaccagagcccccagcagacccatcgccgcgccggatctggtggcggccgcccggacggcacggcggacgtcgtccatttccgatgcatgatcctcgctggtgttcgtgagtactgctccttgatcgatcgagtgcgtgtcagctctgtctggtgtggcgtcgtccaatacgtgcacg

SEQ ID NO: 16242 - DNA, 597 bp, Zea mays
  Coding DNA Sequence Number=SeqID_1839
ccagctgccgggtcgtgtcgaccagtgctctgagatctcgctgcgcgctcagcgccgcctcgccgtcgtgcgaataatccttggacgacaaggaggcggcggtcatcacgtcaccggcggcggcggcgtcctcgcacgccacccgggcgctcttccggaacgccgtggcgacgcgcgcggaccaaatgctcgccgccgacgaccgacgcgccgcgccgccgaccgcgggcacacgccgagacatcgccaccacgacgcgctccagaacggcgacggtgagccgccgcgcctcctgcagcgcgtggccgccgtccagcttctcggacagccttgagccggcgcggcggcgctgcctcctggcgtccgcgcacgccctcttcgccaggcgcgcgtacgcgcgcgcggcgctggcggccgccgcgctgtccccgcgccgcgcggccgtctcggcggcgaccgcgcgcgcgcgcatgccgcccagcgcgtcccgcgccgcggcgcacgcgtccagcagcgccacggacgcctccagctcgtcctccacctggcccgcgcgggcggccgactgcgcgagagactccgcgtgctcgtcgtaca

SEQ ID NO: 16243 - DNA, 573 bp, Zea mays
  Coding DNA Sequence Number=SeqID_1840
agttatcgcggcctgtttaatgagaaacagtatctttcatatgggcggagactttcaacgtcgacgcacatttgccacactgcccattcgctcactctggcaaggtcgtaccccatggctgcccgtctgcaccgctacgcccgcctgttcctggtcctgctgctggcctgcggcccgggggcctgtgcgctgttccaggcacgcgacccggtcaatatcagcgtgatcggtatcgaaccgctgcccgggcaggagctggaactgcgcatggcggtgaagatgcgggtacaaaaccccaacgaggcgccgatcgactacaacggcatcgccctgaacctggaggtgaacggccagccgctggctgccggggtcagcgaccagcaggggcacatcggccgttatggcgaagcggtggtcgtggtgccggtgagcatcacggcgttttccttcctgcgccaggcctatgggctgggccgggtggactcgttgcagggcctgccctatgtgctgcgcggcaaacttgccggcgggctgctgggcaccgtgcgctttaccgacgagggcaagctggac

SEQ ID NO: 16244 - DNA, 583 bp, Zea mays
  Coding DNA Sequence Number=SeqID_1841
gcaactacctgacgctgaacgtgaaggacgagctgtcgcgtctgaccgggatcggcgacgtcggcgtgtacggctccggcgactatgcgatgcggctctggctcgacccgaaccggctcgcgtcgcgcgggctgaccgcgagcgacgtgatcgccgcggtgcgcgagcagaacgtgcaggtgtcggccggccagctgggcgcggagccgacaccgaagaagaacgatttcctcgtgtcgatcaacgtgcgcggccggctgcgcacggtgcaggaattcggcgacatcgtgctgcgcaacggcgacgacggccaggtcgtgaagctgtccgacgtcgcgcgtatcgagctcggcgcgggcgactacacgctgcgctcgtacttcaacgacaagcattcggccgtggtcggcatcttcctgtcgccgggtgcgaacgcgctcgacgtcgcgaaggccgtctacgcgaagctcgacgaactgtcgaagcgcttcccgcccggcgtcgcgtatcgcccggtgtgggacccgaccgtgttcgtgcgcgaatcgatccgcgcggtgcagcacacgctgatcgaggccgt

SEQ ID NO: 16245 - DNA, 553 bp, Zea mays
  Coding DNA Sequence Number=SeqID_1842
tgacggagaaattggcggctgcggaggccgaggagaatctcaggcgtcaattggcggcggagaggaaggacgcgaaccgagcctgtgctgaggcacaggctgcacaagccaaggctaaacttgcgcgtgtggaggccaatctcgcccgccaaagcgccgaggagaaggaaacaagcctctgcgacctactcaaccgcctggacaaagtggaggcgtcgacgcgcacggaggtcgagcggacgcatgcgcagctcgtggacgcgtaccgggagctgggtgcgcggaccgccgctttcgaagtgttcggccaagaggtgggcctccgcttcctcgagtggctacaggaggagttgggggtgctcccgaccatcgtgacgggcctcatgtcctttgcctccctcgttacctgcgagggggccgtgaatgctttgtcccgcgaggggtgcgggcatttcgaggtcgtcgaccagtcggacgaaggcttcgaacgcaaaatcttcaaggtcgaggaccctgtgttgaagcagtcagcgggggctctcttcgatagaat

SEQ ID NO: 16246 - DNA, 200 bp, Zea mays
  misc_feature (173)..(173): n is a, c, g, or t
  Coding DNA Sequence Number=SeqID_1843
ctcgtcgccggggtcgattcatcgacgcagagctgcaagatcgtgatccgggacgccgacacgggcgagctcgtgcgcagtgggcgggcctcgcatccgctcggcacagaggtggatcccgatgcgtggtggcaggcactcctgaccgcgatcgccgacgccggcggtctggncgacgtcgcggcgatcgctgtcgccgg

SEQ ID NO: 16247 - DNA, 203 bp, Zea mays
  Coding DNA Sequence Number=SeqID_1844
gggcaatctgccgaatccggtcgcgctgatcgcggtaattgccgcgctaggcatcgcgccgttcgcggcgctgatggtgacgagctatacgaagctcgtggtcgtgctcggcctgttgcgctccgcgctcgggatccagcaggtgccgccgaacctcgtgctgaacggcatcgcgctgatcctgtcgctgttcatcatggcgc

SEQ ID NO: 16248 - DNA, 532 bp, Zea mays
  Coding DNA Sequence Number=SeqID_1845
agcatccccgttgctactgggatccccgtgacctcgattgccttttcttacgtggactccgccggccaaacccaaatttgttgtttttgggggggttccggtggaaaaattaaacccggtgatccagctgggggactccaaagtgctcccggaactgtccgggacgattggcaacgtttacggcccccccgtcataacctccatcaagtttgtcccaagcctcaaaaccttcggcccttttggagcatggggggacgggagtgaccctccgtttgcgatcccccggacaacaaaggagggccatcgttgggttttttgcccgaactggggttttcctccacgcccttggggtttacgggcgatccctgtgatgagactttccccaaaggggcagctaactgctttgctagctcccccggctttttttgggtccccccccgttttttttcctactgctacctgttgggttttgaaaaatttcgataaaaaaaggacccccccaaaaattggcccttgaatcgatcccttaagg

SEQ ID NO: 16249 - DNA, 184 bp, Zea mays
  Coding DNA Sequence Number=SeqID_1846
atgcctgcaggcttgcctgtctgttatactactttgctgttgaagctctttggtatgcaacatgataacggtggttgattttgattccaggtgacatatgatacagctgggttcctggagaagaacagagacccattgcactctgagtcaatccaactactctcatcatgtacatgtgaacttt

SEQ ID NO: 16250 - DNA, 539 bp, Zea mays
  Coding DNA Sequence Number=SeqID_1847
cagctgtaacgatgccaacgccgggggctgccggcgcgatttcacccagcgggacgaaggcaccgcgctgggcgtcggctggcacaacgatcgctggtcagccgatatcggcaccacgccgctcggtttcaccgtcactaactgggtcggcggcgtaagctggaagaccgacatcgacgatctcggggtgacctttactgcttcacgtcgcccgatctccagttcgctgctggcttacgccggcgcgcgcgatccggccactaacggcggcaaaaactggggcggcgtcgtcgcgactggcggcggcatcggcctgagttacgatcggggcggcgcgcacgggatgtgggccgatctcagcgcccatcaaatcagcggtgaaaacgtggcggataacagccgcgaacggctgatggcaggctattactacaagctgatcaatagcgacaaccagcgcgccaccatcggcctgaacagtatgctgtggcactatcagaaagatttgagcgactacacctttggccagagcggctattaca

SEQ ID NO: 16251 - DNA, 182 bp, Zea mays
  Coding DNA Sequence Number=SeqID_1848
tatcctttctccatcgatgggctgggtgtcagccgaggcccgttagcgtgctgctctggctctgtgactttgttcgcttcttccgccgcgtccttcgaggagttggatgttcgctcgctcgcggtaccggcgtccggtctcttacttctggcggtggctagttctaggcatctgggcggcct

SEQ ID NO: 16252 - DNA, 263 bp, Zea mays
  Coding DNA Sequence Number=SeqID_1849
tgcagcgcagtgtcacacgtgaactgctgtcgcatggcctggtgccgggtgtggtgcaggtgccgccgaacggccagccgattgtgctgatggccgatgcgcaaaccaccggcggctatccgcgtattgcctgcgtcatcgaagccgatctctatcagctggcgcagattcgtctgggagaaccgattcacttcatccgctgcacgctggaggaggcgctgctggccaaacagcagcagcaacgttcgcttgatcagatagcc

SEQ ID NO: 16253 - DNA, 506 bp, Zea mays
  Coding DNA Sequence Number=SeqID_1850
gtcagcgatccttattacttcaacgatcttgattcgaagtactacagctcgactgacggctacgccacgcagaaattcagcgtaggctacgctgataccaactgggatgcgacgctgtccagcaaagacttccaggtgtttggtaataccagcagccagaacgtgtaccgggcgatgccgcagctggatgtcaatctgtaccagaacgatatcgggccgtttgacggtcgcatctatgcgcaggcggtgaagttcactaacgtcagtaaccgaatgccggaagcgacgcgtttgcacatcgagccaacgctcaacctgccgctgtccaacggctgggccagcctggataccgaggcaaagctgctggcgacgcattaccagcaggataacgttaactactacaacgaaaatatcgataccacccgcaccaatcagctgaaagagtcggtcaaccgtaccctgccgcagttcaaggtagatggtcgcctggtatttgaccgcaatat

SEQ ID NO: 16254 - DNA, 190 bp, Zea mays
  misc_feature (107)..(107): n is a, c, g, or t
  Coding DNA Sequence Number=SeqID_1851
actgcaacctctcgttgctcacagagtaaaaaaaattactctcatctgtgtgcaagcagtctatcaaaagaggcatgattggggcagccaacttttgacaaccctgnaacacatcagtgccttctgtctcatcccggggcactgtaggttgcgggttaatccaaaattactaggactgcaagtagtaggt

SEQ ID NO: 16255 - DNA, 355 bp, Zea mays
  Coding DNA Sequence Number=SeqID_1852
gattcaatgcaggaattccatgtctatatcatcatatgtagctttgaatatgcctatcaggattgcaaaaaatataaattgggagatcccagatcatttcactatctcaaccagtccaactgtattgcgcttgatgggctggatgactccaaagaatacacggaaaccagaagagctatgggtattgtgggtatgagtactgacgaacaggatgcaatatttagagttgtggctgctattcttcatctgggtaacatagaatttgcagaaggaagcgaagacgattcttcagtacccaaagacgagaaatcccaatttcatcttaagacagcagctgagcttttcatgtgtgatg

SEQ ID NO: 16256 - DNA, 549 bp, Zea mays
  Coding DNA Sequence Number=SeqID_1853
ccggcttctcaccattgaatacatggacttggcggagcagtcattgcaagctcttaaaaaaatatccctggagcatccaactgcgtgcttgcgagctggtgcactaatggcagtcctatcataccttgactttttctccacaggtgttcagagagttgcattatctacagctgctaatatgtgtaggaaacttccttctgatgcatcagattttgtaatggaagcggttccacttcttactaatctactgaactaccatgattcaaaagtactggagcatgcttctgtctgccttacccgtattgcggaatctttttcaccatttccagaaaaattggatgagttgtgcagtcatggattggttgcacaagctgctagcttagtgtctgttagcaactcagcaggacaggcatccttgagtacatcaacatatacgggtgtgattcgtcttctctcaatatgcgcaagtggatcacctctggcagctaaaacacttctccttcttggaattagtggcatacttaaagatatcctttcaggctctgggtt

SEQ ID NO: 16257 - DNA, 132 bp, Zea mays
  Coding DNA Sequence Number=SeqID_1854
ctgagctgcttcctttcttggaaatcggtcccaaatgcttctctcctggcgcacccttcccaacgctccacatgaaaagattcttccccggtacatcgccaataccggatggcacatccaccgccagatgct

SEQ ID NO: 16258 - DNA, 194 bp, Zea mays
  Coding DNA Sequence Number=SeqID_1855
gtcccaccaccatccataggttgttggactatcggcggccagaggtggagtcccttgttgagctcttcgtccgccgaggcgccagtgaatctatagagtggcgcatgccgcagaaccaccacgtagactcctcgtttcatcttgttcgctcatgtcgccaaccacaattctctggcgtcgtgcgtcgtaagctt

SEQ ID NO: 16259 - DNA, 337 bp, Zea mays
  Coding DNA Sequence Number=SeqID_1856
ccctaaatggccctctagtcggcggccctcttctctctctccctcaatttagcgtttcactgttcactccctacaatctcatgactgtgatttggttgttgcagaaggtgaaggacccgcagctgcggagcatgctgctggacgaggcggcgctgacggagggcgacatcgaggcgatggcgtcgcggttcctggcgcaggtggcggacggcacctggcgcggccgcgggtggccagaggtgtggacggactacgccgtctccaagctggccctcaacgcctactcccgcctgctggcctccaggctagccggccgcggggtcagcgtcaactgctt

SEQ ID NO: 16260 - DNA, 550 bp, Zea mays
  Coding DNA Sequence Number=SeqID_1857
atgaaaactcgtgtgccgcaccttgcgcaatggggcgcgtttaccgccgtcaccgaaaatcagcgcctgattgcctgcgaacctttcttcgccgatgccgatccttccccgatgatccacactctccctgaactggtgtactcggataaacgcatccgtcagccgatggtgcgccgttcgtggctgaagtcgcgtgaaaacagcgatcgcacgctgcgcggccgggaagattttgtcgccgtggactgggacaccgcgctcgatctggtggcggaagagaaccgccgggtgcgcgaccgctacggcgcttccgggattttcaacggttcgtacggctggtcatcagccggtcgcgttaaccacgcgcgcacgctgattcgtcgcttctatttccagggcggcggtggcgttgatcagcagggtaactacagctggggcgcggcacagttctttctgccgtacgtgattggcacttatatgccgctcaccggccgcgtcaccgactggccgcaggtggtggagcaaacagaaattttcgtcgcctttggcg

SEQ ID NO: 16261 - DNA, 426 bp, Zea mays
  Coding DNA Sequence Number=SeqID_1858
ttacgcgcgcattaatgtccggagaatctatgaacaagcctgccgctaccgcgctctttcatccgcgtaaccgccatcagggccgttatgattttgctgccctgactgccgcgcatccgccgctggcggacaaagtgcgccccaacggttacggtgagttgtcggttgatttcgccgatccgcacgcggtactgctgctgaatcaggcgttgctgaaactgttttataacctgaactggcagctgccggaaggctatctgacgccgccggtaccaggccgcgctgactatatccatgcgctggcggatctgctggccagcgataacggtggcgtgctgccgcgcgatctcgacgtgatggatattggctgcggcgccaactgcatctatccgctgatcggtcacgcggagtatggctggcgcttta

SEQ ID NO: 16262 - DNA, 267 bp, Zea mays
  Coding DNA Sequence Number=SeqID_1859
agtggaggaggcgttgtctaaccaacaatatataaactgagagatgagagcaattctgattgactggctaattgaggtacaaagggcatggaccgtacaaatagttctgatctgaaacagcacgttttaatattttttgttggtctcttttcctggttcactacaactggttggagtgacagccatgcttctggcttgcttgcaaatatgaggtctctgttccggtcggttgaggaccttgtactgatttttgactgtgcctacaca

SEQ ID NO: 16263 - DNA, 197 bp, Zea mays
  Coding DNA Sequence Number=SeqID_1860
tgcccgagcacgaattgcgcgcgcggctcgcgcaggccgacgcggccgtcgtgatgaagctcgcccgcaacttcgacaaggtgcggcgcgtgctcgacgagctcgggctcgcgaagcgcgcgctgtacgtcgaacgcgcgacgatggcgacgcagcgcatcgtgccgctcgacgaagtcgatccgatggcgtcgccg

SEQ ID NO: 16264 - DNA, 531 bp, Zea mays
  Coding DNA Sequence Number=SeqID_1861
gtggataaagcatgcgccgaggccagccattccctcaagcgcgccaccgacgcggagtcggggctgaagagcttgcgtggctacgttgacaagacgaaggcctccacccgcgtcggggtcgaccgagcgcatgcgttgcttgttgacgtgtgccgtcagctcggcgtgcgaactgacccgtttgacaaattcggtgaagatgtgggtctccgcttcctcgggtggctgcaggaggagctggagacgctcccgtctgtcgcaaccggtctcatgtcctacgcctcgctcgtaaccgaggacttcaatcgtgggatcttccaggtcagagacgagatgctaaagcggtccgccggggcgctttacgataggatgtggggcccgcacggtcacgacactttccgggagaggatgatgaacgatgaagaggtcgagaacttcggtggccttggaagctcgctgacccagatagaggacgcggggacgggggctgaagagcaattggtgcctcaagccagccctgcgacggagact

SEQ ID NO: 16265 - DNA, 178 bp, Zea mays
  Coding DNA Sequence Number=SeqID_1862
aggctgtcgggcgtcgtcaagtgggcggtctgcaccagcgttctcgagttcgagctgctcaacctgcagatcccgaccatcagcgtcgtcggatcgctcgtgaaatccggcatccgagtgctagtttcagccggcgaccaggactcggtgatcctctgcgaaaaaccggacgctggtg

SEQ ID NO: 16266 - DNA, 528 bp, Zea mays
  Coding DNA Sequence Number=SeqID_1863
agccgccgcctttcaagctgaaaagaaaggcttccccgaaacttttaaccaatttttttaaaaaaagaaagaacccgatggattttaagaaatgaaaaaagcccgggggttttgattagccttacccgttgaccaaaaaagggctgcgaatgagaaatttaatatgccgttaaggagtaaagagctagaattgaggccgccagaagttttcccccctaagaagagggaagaagagagggtttttcccctagcccttagtgtcatgcccgctggtccgaagccatttttcctggggctccggtttaagatattgtttgaaaaagcctaatgttccctgggcccttagggggtgattagtctttagctaaaccggggggtttttatccctatagatttaggttttttttttttggggctatggaattggataataccacccccagctttgcttattttttagctaaaaagtttgctgtttttttccccgcgattttaggttttttttttttggccatatgtaattggata

SEQ ID NO: 16267 - DNA, 462 bp, Zea mays
  Coding DNA Sequence Number=SeqID_1864
gctgttctgcgtgcgagcgacagctgggctcctggtggtcggcacatggacgtcgggctcaactcggctgacgtccaggtgtgggacaccagctccaaccgactgccgagaacactcagaggtgcgcatgaggcacgggtaggctcgctggcatggaacaacagcgtcctgaccaccggtggcatggacggcaagattgtgagcagtgaccgcgaggattagagaccacgtcgtgcagacgtacgaggggcacagccaggaggtctgcgggctcaagcggtccggatcagggcagcagctggccagcggaggcaacgacaaccttctgcacatttgggatgtgtcgatggcatcgtccctgccatctgcgggccgcaaccagtggctgcataggctcgaggaccacatggcccccgtgcaggcactcgcgtgccgcccgcgcccgggccatcaaattctggc

SEQ ID NO: 16268 - DNA, 236 bp, Zea mays
  Coding DNA Sequence Number=SeqID_1865
ttgctcttccactccggtctgtcgttgctcctgtcggggttcgcgtcggtggggtcctggctcggtgtgtccgccgccgccgtgttccgtgcgctggagcgctcgttccgggcctccgccggcgtgcggccggtgccggtcgcctcgctgcccccgctgccccggtcgtggtcgcgtccctcccgctcgcgtgggggtgctcctgccgcttgtgccggtcgttccgtgcggcttgg

SEQ ID NO: 16269 - DNA, 234 bp, Zea mays
  Coding DNA Sequence Number=SeqID_1866
cgatacaggaggagacgtgacccctgcggttaatgagaacagcaccctgccgtcgctaagtggcggactttacgccttcttttttgatgttgacggcacgctggccgcgcttcagtcgcagcccgagtcggtttccatccccgcatcggtgcgccagcatctgcaacaaatttctaatttaagtcacggcgcgctggcgctggtttccggccgtccgatcagccagctggatga

SEQ ID NO: 16270 - DNA, 414 bp, Zea mays
  Coding DNA Sequence Number=SeqID_1867
atggccgacgtgcttgagcccgcctccgacgcgccgcgcgtgcgccgcccgccgccgccacccccggacagtccggaggaccgctcgccgcggcttcccccgcctccgcccggcgggcctccggcgccgagccggaagcggagccgctccccgccgccaccgcctccgctcggctcgtcgcggcctcagaggtaccgggaccaccgtggcggcggcgggcgaggcgggagcagccccagcccgccgccgtaccggggcagccgccgtcactcgccgcccaggaggtccccgtcgccgccgttcaagcggtcgcggagggacgacgggtacgaccgccgcgggggccgagggagcccgccccgttacgggtacgatgataggaggcgaggttatgaccatgatcgaggtggcggc

SEQ ID NO: 16271 - DNA, 352 bp, Zea mays
  Coding DNA Sequence Number=SeqID_1868
agtcatgaggtgtcattttcccggccgattcgtctgctccatccgcgttttccctgttatctggtgccgcgtcgcgacggccacttcatgctcggcgccaccatgatcgaaagcgacgatgccagcgctatcagcgcgcgcgccatgatggaactgctcagcgcggcctacaccctgcacccggcgctggcggaagcgcgcgtcatcgaaagcggcagcggtctgcgtccggcatggccggctaatctgccggaaatccactatcacaacggtattttttatcttaacggcatgtatcgtcacggttttctgctggcaccaatgatggcagaacagctgatgcagcgcctgt

SEQ ID NO: 16272 - DNA, 484 bp, Zea mays
  Coding DNA Sequence Number=SeqID_1869
atcccggcgagatctacgagctggtgccggaggaatacgtcgcgaacacgtacgaccggctcgtgcgcgtcgacctgcgcgatccgtcgaaattcaacggcgacgtcgcgcagtcgtggaccgtgagccccgacgggctcacctatacgttcaagctgcgctctggcctcaagttccactcgggcaacccgctgacggccgacgacgtcgcgtggtcgatccagcgcgcggtgctgctcgacaagggcccggcagcggtgctgaccggcatcgggctcacgaaggccaacgtcgccgcgaacgtgaagaagctcgacgaccagacggtgtcgatcacgaccgatcacaagtacgcaccgaccttcgtgctgaacgtgctcggctcgtggcccgcgtcggtggtcgacaagaagctgctgctgtcgcaccagcagggcaacgacttcggcaacgcgtggctgaagaccaacgaggccggctccgg

SEQ ID NO: 16273 - DNA, 169 bp, Zea mays
  Coding DNA Sequence Number=SeqID_1870
gcagaagggcaaccaggtgtggattgaggtggccaacaccggcacgccgattccggctgaagagcaggcgatgatctttgagcccttttatcaggggagccagcagcgcaaagggccggtgaaaggcagcgggctgggattaagcatcgccaaagattgcctgcgcagg

SEQ ID NO: 16274 - DNA, 488 bp, Zea mays
  Coding DNA Sequence Number=SeqID_1871
aaagtgctcgttgaacctggcctgctcagcaatggtgactttgagacggcaccagccggcggtttcgtaagatctgcgtctgttgctgagggtgcatcgtcaatccctggttggacaatcaatggcacagtcgagctcatttcagcaggccagcaccagggtggcatgatcctgattgttccacagggagaccatgctgtaagggtaaggaatgatgctagcgtttggcaggtggtggacgtttaaaaaggttcggagtatgctatcacaatcagtgctgcccggacatgtggccaactggaggcactgaaagtttccgggctagggggggtgtctcagacagtagacctgcaaacggtggaccacaaaaaagggtgggaagcggacgcggtggcttttcaggcgacggaaaagcaggcacattttccaatcatgaaccctggcatggaggaaggtcccacctgtggtccttacccaatccacggtgc

SEQ ID NO: 16275 - DNA, 458 bp, Zea mays
  Coding DNA Sequence Number=SeqID_1872
gttaagccttacagttttcagttggcattttccccattcaaaaacaaagttggttcagcagaaagccttacagctttcagttggcataacccccattaaaaaacaaagttttttcagcagcttgttcgcacaaatatcgcccccttccgggggccaagaaatcgggcggcaatttttcaattcggggagcacatttagacatgtccctccaaaaaaaaacagcttttcctggaaaactagagcaaactcccttactggggaacaaccgtttcatcaaaaagattaccaaattggccgcctcttttagtaaaaggcagcacaaactttggaaccatgacagttttgattcagcacaaggccacattactttaggggttcacatacttggggacataccccattactaattgggccaccttccttgggggggattgcacataaggtttaatcttggcggg

SEQ ID NO: 16276 - DNA, 203 bp, Zea mays
  Coding DNA Sequence Number=SeqID_1873
atatcgacctgcagagcttaattggtatagtgcatgtggagtatcagcagatcttactctagttccttcgttagctattgctgaagactttgaaaccgctaaagcttcttcagcaaacagaatacggctttggaataagggtgtagattctgaaagctttcatactaaatatcggaggcacgaaatgcgtcgttttggacgtg

SEQ ID NO: 16277 - DNA, 249 bp, Zea mays
  Coding DNA Sequence Number=SeqID_1874
gtttgagaattcacgaaggctccctcaactcccgcaaacgtttcgcgatgtacgtcttctggtcctcaaaaccagcgagcagccagcgatctatttctggagatgccagagccagcatgttccttgggacgtgaaaggtgcgtgtggttgaaggtgcaggttggaagtagaagcggccaaaacttgggagctcctcgattccgatggattgaggatgtagcgcgacgcgcttcggacgctatcgatctg

SEQ ID NO: 16278 - DNA, 191 bp, Zea mays
  Coding DNA Sequence Number=SeqID_1875
agcgtagtgcccgtttgcgccgctttggtgactctctggaagaagtaacgacgacatactacttcggcgcggcgatgctgacgctgttcctgatttcacgcttcatccacaacaatctgctgattggttgtctgggcgtggtaatgctggtgggcccggcgctggtgtcgctgctggccaaagagccaccg

SEQ ID NO: 16279 - DNA, 204 bp, Zea mays
  Coding DNA Sequence Number=SeqID_1876
gggccgtttcgctgctttaccgcgcccccggccccctccgcgcccggcatcgcgtcgcacagccccaggggttacgtcaaccccgtccgcctcggcagcgtcgcctcggggtagcttttggattgcatgttcgtttccatgcatgtgtatccttgcacgcaattattggatgaaataaacaccaattagcttcctccgtattta

SEQ ID NO: 16280 - DNA, 358 bp, Zea mays
  Coding DNA Sequence Number=SeqID_1877
ggatcaggacccagcccacgggtttatactttaaggaacaaaatttcctttccaagcacgattggggggggttttattttaaagctaaaagttacaaggcgaaccctgtcctttcaaaaaagggggaacaaactccccccggcttccaggtttcgctttatttggcttaaagaaggaagggctggccaaactatacaaggggatggttttcgaccccgggggttcctacaaatggctaactaacaaaaaacgcgggaatttcctcacagaagcttataatcccatgggaacaaaaaaaaaagaccccccgaggcatataaggcccccatccttaatttgctttccaggttattctggg

SEQ ID NO: 16281 - DNA, 252 bp, Zea mays
  Coding DNA Sequence Number=SeqID_1878
agtttgccgtttttggtcatcccatcgcccacagcaaatctccgtttattcacgccgcttttgctgagcagaccggtattgaacatccttacggacgcatctgcgcaccgctggaagggttcccgcaggcgatagaggcgttttttgcggccggtggcaaaggcgccaatgttacgctgccgtttaaacagcaggcatgggaattcgcggatgagctcagcgaacgcgcggcattatccggcgcggtaaata

SEQ ID NO: 16282 - DNA, 372 bp, Zea mays
  Coding DNA Sequence Number=SeqID_1879
ggtacattgaatggccttatgctcttttatgtacaattggtgccgctatattatttggctcatttaatccactacttcttgtacacaatagcacttatagtgtgttagcatactaacaaatagaaatctgtgatatgccccacgaagtgaacatatatggtgtttactcatagtaggcatgggtgtcattatcattacacaacaacatttctattttggaataattggcgagaagatgacgtactgagcgcataaagaaggatgacgttctcagcgatgctacacaatgaaagttggatggtttgacaaagaggagaacaatgctgatacactgtccatgcgcctaggaaaggatgctacgtttgtccgtgc

SEQ ID NO: 16283 - DNA, 282 bp, Zea mays
  Coding DNA Sequence Number=SeqID_1880
aatggtaccaaggtgaagtgttgatggtttacttcaggttcgagctgatcgaatccaatatcaattagaagagatggaaaaagctcttagtgaacggtgcaaacactttgaacttaaattcttgccatttgcatcagttgaacttccttgaggcacctggctttccagtctccatagtattattagtatgaaaaaagaaaaagaaaaaaaggagaaggaaggggtaggaggcccagcccaccagtcagcccatataatccttcctctggcaaccctaggttg

SEQ ID NO: 16284 - DNA, 497 bp, Zea mays
  Coding DNA Sequence Number=SeqID_1881
gctcagtacgacctttaccatgaacgacgcccaggcgagaacgacccaccgctggtctaagatgcgggggagcgaccacgtcggtgcggtccggacatcctggttgccggggcatcctacactagtcacgaggctggtgcctctcccgatgttcagtgcagtgagcctccggatcccaggactgcgtggaaccatcgacgttgcgagggagcaacaccgtgtccgccgtgcacgtgcagttcgtgtcggcggtgtgcggtggaatggcgtccagacgccacgggttgacgcccacagaccgggtgcgacccacacgctgccgcgagaaggaaacgaggagaccatgtccgacgtgctcatcgaccgtcccgagctcgaagggctcgggcaatacgagttcggctggtccgactccgacaccgccggcgcctccgcgcgccgcggcatctcggaagaggtcgtcaccgacatctcgaacctcaagaacgagcccgagt

SEQ ID NO: 16285 - DNA, 419 bp, Zea mays
  Coding DNA Sequence Number=SeqID_1882
gcttactactagctagtcagtccgttgctgcagctggtggtggtacccgcctactactctggaccgtactaactggttggtgatgtaatccggatcgagagggggggtttgggttgttttgcgaggacgacgatccgctcgctggcgcgcacgacgaacggtgctgttgcggcccacgaaagtgctgtcggaacccatatggcgcatactgggttgaatgaaccaacttgtcactgttggggtccggcggcaacgacgaccggggcagctaatgtcgggacggcggacgtcctggcgacgtccatggctcttcttaccggttggtgtccctataggtctccgggtgggtctggtggcgtcttggattcaatggtagcagtggctgtccctgtccttcaccgtctagcgactaccgcgga

SEQ ID NO: 16286 - DNA, 600 bp, Zea mays
  Coding DNA Sequence Number=SeqID_1883
aaggccgaagaagatgtcaccaatataatggtgttggctgagcaggcggtggctcttgagatgaaagccacgcagcgtgtcaacgacgcggaggcggtgctgctgaaagcggagaaggtcatatcctcggttgacaccgtggtggagctaacatcacttgctgaagagcagaaaagcgctgaagaggatagcgtttctgaagggtatgagtatagcagcaatggcactgatgatgttcctgtgagggatgaggtgtcaagtatcgagcgtctaatggtaggtgacttgactgttgagggcattgagcagcttgaaccatcccgtgaaatatatgatgaagcaagcagcgataagatgtccgttgagcctcagaaagaagctgagcctgattcagacaagttgaagcaagggaagaagcaggaaatggaacgaaaggagttcaccaaggaaccactgagtgctcaaaaatcactgaagaagagatcatcccgcttcttcccggcatctttcttctcctccaaagctgatggagagtttacacctacatctgtctttcgggggttaatgaaatcagtgcaaaaacaggctcccaagcttgtt

SEQ ID NO: 16287 - DNA, 217 bp, Zea mays
  Coding DNA Sequence Number=SeqID_1884
gttagtcggatcttctccagcttgcgtcaggttgctctctctctgtgcttcaccggccgtctcgcggttcggggcccgcggcgtcttctggggcctcctccgcctgcccgtctccctcctgttcgcgcggttgtctctcctccatccgcccgcttgctgcagcctgtgctctgctgtgctgttcaattcgccggctttgtatgatgccgctttcggg

SEQ ID NO: 16288 - DNA, 400 bp, Zea mays
  Coding DNA Sequence Number=SeqID_1885
agcgtcgcctgcttcgcgagtggttcgcggggcagccgttgtgcgtgcgcgagccgttcgaggaacgggcgtctcgctttgagttttgaatctcgcggcgggttcgggcgaagtgttgaacgggtctcgcctgggcctttatatattcgggagagggaccggtgacggttctttactctgttgctcgcctcccacttaggtttttgcaacctgagggaatagccagagaaaggaaaccgcgcacctggtgctctccagcgccacctgttctgcttggtgatggccgaccgggtgaccgttgtttggccaggcgacccgtggcctttctccaccgtcacggcggatgatctggaggcccttgttattgtcccaggctcggtccgacttcgccgaaagtgga

SEQ ID NO: 16289 - DNA, 245 bp, Zea mays
  Coding DNA Sequence Number=SeqID_1886
attggtccagtatgcacaagagataacccaacattagttttcagcgaaccgaattcaccaccggggactacgtccaagctgaaccccgctcaagaggcatacctacgctccggaaggggcgcattggtgaggttgctagaactagaccgcattcacggcagggaacaaaactgcggacggtgaaactcacatcgaagaggacgacagggaagggggggcgactgtgtgaggttggagagccaaaa

SEQ ID NO: 16290 - DNA, 307 bp, Zea mays
  Coding DNA Sequence Number=SeqID_1887
cattgcccaacattcccgagttaaaagatgcaactgatataaatgagagagatgagcgtccttcatggcgacgacaggagaaggaaggccgctggaaatggatgtacgagccgccaacgagcaggaaacctgttcgcactgggcttcgtcctaagaccggcaagcaagcccggaaaagagcaaggagtgatgagatgcctaacgaccctgaaaaactcctgaatgagtttagctgttgtatctgcttccaagtgatggcagagccactcactgctccctgtggtgacagcttctgcaaggcttgtct

SEQ ID NO: 16291 - DNA, 581 bp, Zea mays
  Coding DNA Sequence Number=SeqID_1888
gctttcaggcgaaattgccaggaaagatgaatagggtccttgttaccaaagactcgacgtgtatttgccggcagagatgggatgccccaggggtttccatacgtccgagtgttccggaggcggggccaccatatggacgcccagacgggaacgggcaggcgagagcggaggcataccgggcgggggagggtccagctgaggggtcctgcagcgcagcagaccagcgacagcgcggcgggggggagggggtgtgaagaggggaatcacatgaaactctttctaagcttcggtcctacgaggcggggcttcgtcgggaggggatacgagccgcgggagaacgtcgccttatatttatagaatccgtgcctgccgcgcgggcggcggcgtcctccgttcgcacgagcgcggcgcccccagacgagcctagggcgcacctcgggtacatccaactgcgccccctccagctctcgggacgacatcttctagaagaagctgtgagcgacgatgaggcgaggggtggaaggaggatggcgagcagacgcaaagcggggcggatggcaatagaaccttgtcatatcgtg

SEQ ID NO: 16292 - DNA, 150 bp, Zea mays
  Coding DNA Sequence Number=SeqID_1889
gtgcaagtgcaaaagcagccaaagcacagcatctgtaagacgctgagaaggctggcccagaacagggaggctgcaaggaaaagcaggctaaggaagaaggtgagcgagtctcgacttctcttttgctgcatgcaacaggcttacatccag

SEQ ID NO: 16293 - DNA, 567 bp, Zea mays
  Coding DNA Sequence Number=SeqID_1890
gagctgggtcagtctcgatgtcgaagaaaatgacagcgtagaacgctacagccacaagatttttgattccgcgctggcgggactcagccgcgtgcgtcagcaactggatatgcaggtggtggctcaggcggtgcaggcattgtcacaggcgcataaagtggccttctttggtcttggcgcctcggcggtagtggcgcatgatgccaccaataaatttctgcgttttaatctgccggtcatctggtccgaggatattgtgatccagcgcatgagttgcataaatagtggaccaaatgacgtgtttgttctgatatcgcatactggccgcaccaaaaatatgatagaactggctcgcctggcgcgtgtaaacgcttccaccgtgttggctatcacctcgcccggatcgccgctggcagaggaagccacgctggcgctgacgctggatgtaccggaagataccgacatctatctgccgatggtttcccgcctggcgcagctcaccgtggttgacgtgctggcaaccggttttaccctggagcgcggtaccgctttccgtgagaatctgaa

SEQ ID NO: 16294 - DNA, 426 bp, Zea mays
  Coding DNA Sequence Number=SeqID_1891
gcgaaacagggtggcggaacactttcaggtcgggcaccgcaagcagaagcgctgggagggtctgctcggtgaagactggtccgacaagcccatctctttcgaccaaggcgaccaccccaactgcgtatcgagcctaggaaggtacccgctcgtcgtcgaccctgtcgtcggcaacgctaggctcaccaaggtcttcatggacggaggcagcagcctcaacatcatctacgccgagaccctagggctcttgggggtcgatctgtccacgatccgggccggtgcagcaccttttcacgggatcatccccgtgctcgccgactttctccgcgcaaacgccgaaatttttgcgtggagtccctcggacatgcccggcataccgagggatgtcgccgagcactcactagacatccaagcaagtgcccgacc

SEQ ID NO: 16295 - DNA, 164 bp, Zea mays
  Coding DNA Sequence Number=SeqID_1892
gagtattcttgatgggcctccttccattgggtgaaacgcttttagggaattgaagagcaaagaggctgagttgcttctcaataacaaacttggtcaggagagcaaggagcagctatcacaggttagagtttgctcttttgttctgtggtatcagtacataaggg

SEQ ID NO: 16296 - DNA, 499 bp, Zea mays
  Coding DNA Sequence Number=SeqID_1893
tgatacaacctaccgcacaaacaaatataacttgatatgcgccccatttgttggtgttgaccaccattggcaaaatgttgtttttggctgcgcgttcttgttagacgagtctgtaacttcctatgcctgggtatttaaatcattcttggagtcaatgggagggcgatcaccaaaatcaatattcactgatcaggatgaagctattatgcaggcagtcaaacaggttttccctaatacgcaacattgtttttcctactggcatattctgaagaatgctcaatctcatttaggctcactaaatacgtcccaagcatttcaaaggatgtttaccaagtgtatgcaaggatctgactccgaagaggattttaaggaatcctgggccccgctgggcccccgggacaagctacccgacagcgattcgctgtggggcctgggccccttccatccccccccccgctcggcgggggcccagggggcttttgatggtcgactttttccg

SEQ ID NO: 16297 - DNA, 422 bp, Zea mays
  Coding DNA Sequence Number=SeqID_1894
acctgagaccctcaccgtagtagagagaggtaggagcagagcttggggtggccgccgcacggtaatcggatccacccggtgttcgaggatccactgagggcttggggagttcctttgttgtgcttggagggtgctcgcggccaagggttgagggatctaccaccggggtgaccagaattcctcaccatgcttcggactccaccgcgctcagcgagcagaggacaaggacgtactaatcaagtacaatgtgtgaacaggtatcttcggacatgagttaaaaccacaacgtgaagaagcacagaaggggtacgaaggatggcgcgaagccgaagctgtcgtagaagagcttcggcatgatagcggaaagggaaaccgacttaaagatgaaaaggctatttagacctcgatgaatcgttatagag

SEQ ID NO: 16298 - DNA, 210 bp, Zea mays
  Coding DNA Sequence Number=SeqID_1895
agcacggcaactgacgcacggtgtacatacaggatcttacagcactgcttgtgactactgacgaatcctggttcagtgtagttactcatacgagtcagcgatccagatgtggcagctatgtccaccgggtcctaccaacatacagtattgagaccatcgtgggcacctatatataaagatggaactgactcatggtaagatcatcagtga

SEQ ID NO: 16299 - DNA, 360 bp, Zea mays
  Coding DNA Sequence Number=SeqID_1896
atggcagcacaagccaccggcgggagggcaacccggcgcggcgcccagcctgcccgggcgcccaagagcctcaccgtccgtcagaaaaagatcctcgaaaccatccagcggtccgtgacggacaacggctatccgccgtcgatgcgcgagatcggggacacggtggggctggccagcctctccagcgtgacccaccagctctcccagcttgagaagctgggctacctgcgccgggaccccaagcgtccccgcgccatggaagtcctgatgccgctgaccctggacgaggggtccaccccgatttccggcgtcgaacagccccgcgggctgaaggccgtcggcggactcgcggtgtcggaa

SEQ ID NO: 16300 - DNA, 216 bp, Zea mays
  Coding DNA Sequence Number=SeqID_1897
aagatccaatggtcgaattactcagcagtcttgagcaaattgttttgacacgtgatgcacagactcccgtatcagaaattgcactcaataccgtttccgttcccgaaccgcagcgtttacgcgagatgaccggcatgcaggtggatgaattcgcccgcgtgatgggggtgagcgtctcgtcagtaaaaagctgggaagcgcaacgtacgcgcccat

SEQ ID NO: 16301 - DNA, 394 bp, Zea mays
  Coding DNA Sequence Number=SeqID_1898
gctgacttgccttacagctataggtgtacatttgctacacttgctagaatggaatacatcaatagatatgagacattgcattttacaagctatagttcaacagatataccataatgaggtcgaggtcacggggcttctcatcgatgctttacccttaacagagcttccagaaaagaaatgcaagcgatgtggtttgtatgaggagggcacatttaagcctgatgctgtctttgatgaatgggagatgtgttcgagtgatttcaagggcggaaaatacacccgctttaaggaaggccagttcaatgcaacattcctatgcccaaactgcactgcctctactgtaattgacgtcaaagatgcttctttcgtgccaggacatggaaaccctagacca

SEQ ID NO: 16302 - DNA, 470 bp, Zea mays
  Coding DNA Sequence Number=SeqID_1899
agcatgaatatgcactcgctggatttgaatctgctgcaaaccttagacgtgctgctggtagaacagaacgtgacgcgcgcggcgcagcgcctcaatctgtcgcagccgtcggtgagcgcccagctggcgcgcctgcgggtgctgtttgacgatccgttgctgttgcccggtccgcgtggcatgctgcccaccgcgcgcgccgaggccctgcgcgagccgctgcgtctggcgctggatgcgctggagcgcgcggtggcaccgccggcagcgttcgatccggcgcgcgcggagctcacctggcgcattgccgccaccgattacatgtcatcggcgctgatcctgccggcgctgaaactcattcgtgaagcggcaccgcgcagccgcatggcggtcttcgcgctcaatccgccgcaggtggcgcagcagctagagaagggcgagctggatgtggtgtttcacaccggcgacaa

SEQ ID NO: 16303 - DNA, 210 bp, Zea mays
  Coding DNA Sequence Number=SeqID_1900
aatagcatgtctgagaatgccgaactgttatggggcgcacgttttaaagcggctccggcagccagtttaaccgcgctgtcgcgtagcccggattattactttgcgctggcgccgtacgacctcgccggttgccgcgcccatgcgcgcgagctggcgcgggccgggctattgagcgctgacgagctggataccatgctggcggcgattgac

SEQ ID NO: 16304 - DNA, 362 bp, Zea mays
  Coding DNA Sequence Number=SeqID_1901
ctcccataggagtgtcaactccctacgccgtgaggtactttcggcgaccccaggggtccccaaaaccgctccgcaccaacggtggaggggcactaccatctccttcggggcatccgactgccccaaaaacatggcaggggccggcgtgctgccactcatcaccgcccctgttgtcgccaacatgaagctacatcacgtactgatcgacggaggggccgacctcaatgttatcagccacgcagcattcaagcaactgcagatcccagggtctcgactgggaccctctcactcattctctggagtgggcccacaaccggtgtatcccctggggagcatcgcactcccggtaacatttgggaccg

SEQ ID NO: 16305 - DNA, 472 bp, Zea mays
  Coding DNA Sequence Number=SeqID_1902
ggcgattgcgcagaacaaccttaattcgctggagaacccgctcagcgtgattgaggggctgcgtcatgaaatcgacaaccgtaatctgatgcgcgaacggctggcgcagtacagtgaaatcaatgaccgctataaccaccagctgatcgccagcgccgaaagcgattatcgtcagatggtcggcatggccatcgtgatgctgctgatttcggcgctgctgctgctgctggcgcgcatctgggtgaagcgcgtgctggtgacgcgcatggcggataccaccgtctccatccagcgcattgcgcagggcgatctgacgcagcgcatcgaggcgggcaatgagaacgagctgggcctgatgctgaaagagctggaggcgatgcgcgtgtcgctgatcaccacggtttcaggtattcgtgagggcgtcgggcgcatttatgctaatgcgcaggagatcgccaacggtaacaataat

SEQ ID NO: 16306 - DNA, 382 bp, Zea mays
  Coding DNA Sequence Number=SeqID_1903
gcatcggcgattacgtgctggcacacgcctatctgcgtgacgaccacgtgctggacagcgtattaccgccggatatcccgatcccgagcattgcggaggtgcagcgtgccctgtacgacgccaccaaagcagtcagtggtatgcccggcgaagaggtgaagcagcgcctgcgcaccggtacggttgtcaccacagacgaccgcaactgggagctgcgctactccgcatctgcgttacgcttcaacctgagccgcgcggtggcggtggatatggagagcgccaccattgccgcacagggctatcgtttccgcgtaccgtacggcaccctgctgtgcgtctcggataaaccgctgcacggtgagatcaagctgcccggccaggc

SEQ ID NO: 16307 - DNA, 214 bp, Zea mays
  Coding DNA Sequence Number=SeqID_1904
tcagctacgctttgcacctcgtgctcgtgttcccgctcctccttttctcgctccgggtcaacgtcgacgagctcctcttcccgggccgccgtccgctcgcagcgtgcacgcgccggttcgtgtccctgacacccgtgctcatgccggtgctcttcgttctggccatcgcaatccccagcatctgtacgctctttgagtactccgggtccacgtt

SEQ ID NO: 16308 - DNA, 553 bp, Zea mays
  Coding DNA Sequence Number=SeqID_1905
agcaggcgatcttcgagccgttcattcaggtcgatcagggcagcaaccgcgccagcggcactgggttaggcctgaatatctgccgccggctggcggtgatgctcggcaccgagctgcacgtcgagagtgaaccgggtgacggcagcgtgtttatgctgcgcttccgcgcggaagcggcgagcattgaacatgagcagcccgccctgccacagccggtggagccagcaaaacaggctgcactgcgcattctgattgtcgatgacaacgccaccaaccgcctgctgctggcccagcagctgcgctacgccgggcaccatgtactggtggcggatggcggtgcagcggcactggcgctgtggcgcgaaaatcagccggaccgcgtaattaccgactgcaacatgccggagatggacggcttcgaattcacccgccagctgcgcgccgaagagaagcgcctggtgcgacgcgcggtaccggtttacggcctgacggcgatggcggaggagcgcgtggctcagctggcgcaggacgccggcatgaacggttgtctgtt

SEQ ID NO: 16309 - DNA, 229 bp, Zea mays
  Coding DNA Sequence Number=SeqID_1906
cctggttgtccgaactgctgcttggcttcatagtgaccaaactatattgagttcctgcactgacatgggtggagtaaggctataggatgtgagaattggaaaaattgtcaaaactcttgaaaccaaggcttctgtcactagtgcagaagtaagccaggatggcaggttcatcactactgttgatggctcaagtgtaaaatttatatctgtcaacagatacctctgaatg

SEQ ID NO: 16310 - DNA, 558 bp, Zea mays
  Coding DNA Sequence Number=SeqID_1907
gtggaccttacaaccgtgagtgacggcgacagcagctcatcaatctcatggtcccccgtagcagaagagatcatcgtggaggcagttcaagtcttgcaccggctggtgcgaaccaccggcgatgccggtaaggcgcttaggcgcaagatctcggagaatctccatgttgtcaggaacatgagaaagatcctggaacatccagggagccacacggagctactcaccgacgcaattggagttcttgcctgcttagctttggatgagaccggaaaggaagggatcgggagctcgcctcgggtcatcaggaagcttgttccataccttgttgtcgaaactccatcagcaccatcgaatagagtcgagctagccaagtctgctgttgaagcactgcttgttcttgctgtggacagccaaaggattgccttgaggatccttgaagaactcaaggttgaaggcatgcagcaacttgttgatatgctttcttctgactccacagagctcagaactatggctgcaagactcttggctgttttacgtgtcatcaattctgttgcagaa

SEQ ID NO: 16311 - DNA, 348 bp, Zea mays
  Coding DNA Sequence Number=SeqID_1908
tgctgattgaggtgggtccgtcacagcaggaaatcccttatccctatgtgattgatggctccgacctgtcgctggaccgctccatgagcgccagtattgcgcgccatttcccgacgaccgagctatcgcagattggcgatgaaaccgctgatggcctgttcaacgccgacgcgctgttcccgctgtcgcatttcgacgcgctgcgcaccgatttctccctggcgcgcctgcgtcactacaccggcaccgcagtagaacacttccagccgtttgtgctgttcaccaactacacgcgctacgtcgatgagttcgtgcgctgggcgattgagcaggtgcaggaccccagca

SEQ ID NO: 16312 - DNA, 208 bp, Zea mays
  Coding DNA Sequence Number=SeqID_1909
ccgagcgcgagcgtgtgagttaaaaacggggaggcgcggaggcggacaggggcgggggaaaagcggccacagcgagggcaccaccccggaaggggacaacaacgccgccagcgacgaccgcgggaagccggcgagccgacccagcaacgagaacaaacgcaaggacggaacgcaggcgagcccacagggcaagaccaagcacaagcgc

SEQ ID NO: 16313 - DNA, 190 bp, Zea mays
  Coding DNA Sequence Number=SeqID_1910
tccttaggccctgactatggtagacaatcactttcaagtcttgctgaaattgttaatcaggggaaattagtttctgatgaaattatcatcaatcttttgtccaaaaggcttaagaaaggagaagaccagggagaatcaggatttattcttgatggttttccccgtacagtaaaacaagcgtatgtggtta

SEQ ID NO: 16314 - DNA, 294 bp, Zea mays
  Coding DNA Sequence Number=SeqID_1911
gccttcggcctgtggcgctacatcgtgctcggcgccagggtggtcgacgtcaagttcctcggcggcggcgggctcacggagctgtggagcggcggggcaagcctctgtgggaggtcggcgtcgccaccgccggctccgacaccgttcaggtacgagtgcgattcgcttatttgttgctcgttcttcaccagttcccgccgcttcgggggcaagcctctgtgggatttagctttgttgattctgcgtgcccggacgacgacggactctgttacgtttacatactaccagttcgag

SEQ ID NO: 16315 - DNA, 484 bp, Zea mays
  Coding DNA Sequence Number=SeqID_1912
tgctgatcttctgctattcgatgctgaaccaaagccagaatgcgaagacccagatcagtcgcaaatggtagcccaatggactgtcacatgcaacagaaacccatgctgtgagaccatgtggcttgaaacgttgatggctcttgttggggagcagtttgatgaaacagatgacatttgtggaattgttgctagtgtccgtccaagaggagataagcttgcattgtggactaggactgccagcaatgaagctgtccaggtacacattggcaagaaatggaaggatgtcatcgactacaatgacaagatcatctacactttccatgtcgtctcgagaagggattagccaagcacaggtggccggttcccccgtgtaagttgcagacgaagatggtcgttgttgtttggactggacagagggtgagagtggagttttgtgctgagttcggcgtgagctttcatttaattgagcctcagcttacttgag

SEQ ID NO: 16316 - DNA, 219 bp, Zea mays
  Coding DNA Sequence Number=SeqID_1913
atcctccctcaatccggcaagtggtgggcacctacgcgacggaggccagggcgctggcgctgaggctgctggaggccatatcggagagcctgggcctggagcggagccacatggtggcggccatggggaggcacgcgcagcacatggcggtgaactactacccgccgtgcccgcagccggagatcaccttcgggctgccgggccacgaggtctcccgtg

SEQ ID NO: 16317 - DNA, 524 bp, Zea mays
  Coding DNA Sequence Number=SeqID_1914
tgcccaaggtcagtttcaccaaggtttctacgaactgaagtattcgttcgacaccctcgacaatgtgtacttcccgcaccgcggcgaggatatcggcctgaccttgcgcaaatatgaccagtcgctggattccgaccaggattaccggcagtggatgttcaacctggacaaggctatcagcagcgggccgaacaccttcgtgctgggcgggcgctacgggcgcacgctggatgataccgaagtggtgacgtcgagcttcgtgctgggtggcgcgcgggagctgtcaggcttccgtcaggactcggtgtcggggcagaacgtgagcctgatgcgcatggtgtactaccgccgcctgacgccacgggcctacgtgccactggacttcccgctgtacatcggcgggtcgctggagcgagggcgtgcgtggaacaacgacaacgagttcgacagcgggtacatcaacgcggcgagcatcttcctggggctggagacaccgctggggccgttgaacttcacttatggtg

SEQ ID NO: 16318 - DNA, 223 bp, Zea mays
  Coding DNA Sequence Number=SeqID_1915
gagaagcatgcggactccacctagcaagccgaatgctaattactggctgggtcagttgtttgacaacagaggcatcaaggacgatgcagcgtactattgagccactggagcttagaaactacccgaaatcgccaaaagcggcgaaggcacgtgttaagcttggggtgatcatgcaggcaaggaccgatacaacgaaggcgacagcggtctaccagcaggtggt

SEQ ID NO: 16319 - DNA, 449 bp, Zea mays
  Coding DNA Sequence Number=SeqID_1916
aaaatgggcagcagcacgagtgaaaaaggagcaagaggaggaagggagggagggccaaacgccacctcgtgctgccccgagctcccggcctccgcagtcaggaacatccttctttctcccgagctcctactcctccacgtacgctcggagcttgccataggacgccagtcgtcagccatgaagcggctcctgaggcggctctcccgcacggtatcggtatcggtggcgggggaggacggaggcccggcggcgcggcccagcagcaaacacaagcaccggaggaggaggaaggggaagaaggcgggggcggtgccggagggccacgtgcccgtgtgcgtgggcgaggagggcggccccgcggagcgcttcgccgtgcgcgccgagctgctcggcgagccgcccttggccgcgctgctccgccgcgccgcgcaggagtacggctacgcgca

SEQ ID NO: 16320 - DNA, 562 bp, Zea mays
  Coding DNA Sequence Number=SeqID_1917
gggcgtaggaacaaaccactctactaggcatctgacagagttgaatctgatgatcggcgacgatggggcaggcccgctgaccaccacgaggcacgagcgacaacggaggcggagctcgaggagggccaagttcgccatctacaacgtggtggccacctcgtcctcgatcggagccgtgctgttcgtgctcttcctcttgttccgcggaagcctcgcctacatattcaccgacagtgacagcgacagcgacgacgaacaatctcgagatgattcaggaacaagatatcgtgaaggttctcattctgcgagttcttctgggcttggagaagatactgccattcacagatttgtcggatcaacggtgcaaaatgcatgccaccatgggttagtcgatccaactgtcaacctaaaggaggctatggatgatataaacgagatcaacgatatgtatagacgacctggcatgggtccgaagaagcatggcccatcagccaacgggccggcccggcacagccctctggatcacttttcgtgccgggccagctcgctaggcacgctcaaa

SEQ ID NO: 16321 - DNA, 120 bp, Zea mays
  Coding DNA Sequence Number=SeqID_1918
tgaaccggggtcaaaatatcaaggatcagatacctatattcaaaaggggctctactaataagggcaagcaacaatgaaccctggaatagctggctagggacttccactaaatcacttgcc

SEQ ID NO: 16322 - DNA, 181 bp, Zea mays
  Coding DNA Sequence Number=SeqID_1919
ggagaagcacgcacttcggtcgcctccgagcgatcttctccggcagcggcggcggcgcagggacgcgcgggcgcggcgggcccatacgccgtgagtcgcgggccaagagatgcctgagcaagctgctgcgcagctttgggctccggtgcaagctgaactccacgagcgcaaagacgacgcg

SEQ ID NO: 16323 - DNA, 493 bp, Zea mays
  Coding DNA Sequence Number=SeqID_1920
agttgcccgcgcctgcaaggagtcccgagtccgatgtcgcacgacctcgagacgttcgcaaccccgcgcacgcaactcgccgcgcacgcaaggatcgacgagtccgatgtcgcacgacctcgacgacgtcgcaactccgcgcatgcaactgcccgcgcacgcaactccccgcccggacgcgcacccgcacccgccaggtggcgccccgcgcccgacgctcccgccaaccggcccgggggcgcacggcggccccgccccgcgcctccaggcccgcaacggggcacggcgaccgccgccacgaggcctgacggtggcagcggcagcgcagcgccgccgaacccgccgctgcggcagcagcgggtcgatcccgacggcgatgaagagcagcgtcaggtacgtgatcgagctgtggaagacccgcatcggctgcacgtgctcgacgtgctggatcgcccgcgagtacagccggtgcgactccacgacgaaccagatg

SEQ ID NO: 16324 - DNA, 131 bp, Zea mays
  Coding DNA Sequence Number=SeqID_1921
acgcctagaagcacttcctcaagaagctggactctcgcagctccgagtgtgccggccatcggctgcacggctactgcacggctgactgggcctagtgcgctgacgatggtggctcgatcccgggcgtcgat

SEQ ID NO: 16325 - DNA, 193 bp, Zea mays
  Coding DNA Sequence Number=SeqID_1922
cgggttcaacgccaaaaacattctgggcaagggccggttccggaacctgtaccggggcccccttgcccaccggaccacggtggccctgaagccgcttaaggaccccaaccccttgggccaagcccaatttcccaccgaagtggaaattatcaaccttgccctgcacccgcaacttgttggccttgtccggttt

SEQ ID NO: 16326 - DNA, 194 bp, Zea mays
  Coding DNA Sequence Number=SeqID_1923
atgagccaaaaccttgccctgctgtcgcaggaagagaaagacaaagtaaacgtcgatctcgccgccgctggcgtggcgtttaaagagcgctacaacatgccggtgatcgccgagatggtggagcgcgagcagccggaagcgctgcgcgactggttccgtcagcgcctgatggcctatcgccaggcatcgctcag

SEQ ID NO: 16327 - DNA, 206 bp, Zea mays
  Coding DNA Sequence Number=SeqID_1924
tgcagttttcagcataccttcgactgccttcagatgttagtcctcataaaagagatatgtttgtagaagaagttatgggactagtagagctaagagacttgaggtgtgctatagtgggcgctcctggggtaacaggcttatcatctgagcagcgaaaaagacttactatagcggtggaactagttgctagcccttctatcattttc

SEQ ID NO: 16328 - DNA, 393 bp, Zea mays
  Coding DNA Sequence Number=SeqID_1925
ggcaattgctgcaaatgatgcgcttaggccatcacagttttttgttttttcattcctcatttggtgtaagcacgctaaagtatcccttgcacacgctccttgcattcgactcaaggcagcacgctcttccagttgcatgggtcataacccgctcagttactaagaaggacacattgaaaacctggcttaaaaatgtaatcaagaaatgcagcaatgttgaggtgcagcgggaaatttttatcctacttggcaaaaccatatgcaatatatggagtgagaaaaaccctatggatgccctagggctattgtttcaaggctttgttggtccaacagcgttcatccaatatttcgcgtcattttgggttcccatcttggtgatgtggctcggctcca

SEQ ID NO: 16329 - DNA, 143 bp, Zea mays
  Coding DNA Sequence Number=SeqID_1926
tatgtacttatggtgttgatgacggtaacgcagatcaaattcatgttatcgtggcatctttgtatcaaagagatgcagaagaggttattctcgcaatgatgcattccccatgtcttcgtctccctgtgacatccttgggcggt

SEQ ID NO: 16330 - DNA, 255 bp, Zea mays
  Coding DNA Sequence Number=SeqID_1927
ctgcagtcggtcacgctgggcggtaccggtaaaaccagcggcgatcgccatccgaagatccgtgaaggggtgatgattggcgcgggggccaaaatccttggcaatattgaagtcgggcgcggtgccaaaatcggcgccggttcggtggtcttgcagccggtgccgccccataccacggcagccggcgtgccggcgcgtattgtcggcaaaccagccagtgacaaaccgtcgatggatatggatcagcacttcacc

SEQ ID NO: 16331 - DNA, 422 bp, Zea mays
  Coding DNA Sequence Number=SeqID_1928
tcaacaaccacatcgagtcgtcggggcaggacctccgctacttcgaccaggccgcgaacgagaagtacgtgccgtacgtcatcgagccgtccttcggcctgacccgtgcgctcatggcgttcctgctcgactcctaccacgaggacgaagccccgaacgcgaagggcggtgtcgacaagcgcaccgtcctgcggctcgacccgcgcctggcgcccgtgaaggccgcggtgctcccgctgtcccgcaacgagcagctgtcgcccgtggcccgcggcctcgcggacgacctgcgcaagcactggaacgtcgacttcgacgacgccggtgcgatcggtcgccggtaccgtcgccacgacgagatcggcacgccgttctgcatcacggtcgacttcgacaccctcgaggacaaggccgtcacggtg

SEQ ID NO: 16332 - DNA, 405 bp, Zea mays
  Coding DNA Sequence Number=SeqID_1929
gagtgtttgctggtgaccgatgcccgcgcgctcggcaacgacaaaccgcatcatctgtatgtggcgcgcaaaggggatcaaccggtggccgccgcacttgagaccaccgcccctgacggctattctggcgcgatacagatgctggtcggcgccgattttcacggcaaagtgctgggcgtacgcgtaattgaacatcatgagacgccgggtctgggcgataaaatcgagctgcgaatttccgactggatcaacagttttaacggcaaagtggtgcacggtgccgacgataaagcctttgccgtgaaaaaagacggtggcgaatttgaccagtttaccggcgcgaccatcacgccgcgcgcggtggtcaacgccaccaaacgcacggcgctgctgattgaaacgctg

SEQ ID NO: 16333 - DNA, 390 bp, Zea mays
  Coding DNA Sequence Number=SeqID_1930
tgcagcagcatacacgcgtgctggtggtgtatatcggcggcggtacccccgtctgctccacgctgctgatgggaccgcagtggcgtaatcagtccgatcgccgtgccagcctggttggccttagcggtttccgtgtcggcggtaccgacctcgatatcatgctggcattcaatacgctgatgcctctggtgggtctgggcggttatacgcttaagggcactgccctgcccgcgctgccgtggtggaacgcggtgtcgattcacgatgtgccggctctaagccccttttactcggctgccatcggtaagctgttgcgcgctctggtgcgtgatgccgaccagggcgatgaagtcgctcgtctgctgaaagtttggcccctgcagctgagca

SEQ ID NO: 16334 - DNA, 424 bp, Zea mays
  Coding DNA Sequence Number=SeqID_1931
ttggcatttcgccaggctgcaactcccccgactcaactgcgtcaccaagttcaactgcggcaccagtgcacgggggggaaatatttggcagtgaggtgcagaggattgatggaacaacacaactggactgggattcaattatagtttctgatgagttggatgaagaaggaagagaacaagttccatgcgaaaatgaggtatattgtaatcttggactcaattcagatgatgaggctgcaaaaaatagaaagtatgctagattttatagcagtggtacaacttctcattcgcaagaaagagtggatattgacaacgaagaccaccatggtgatgaggcatgtgaagactacattccagatgagaagagggtggtgtacaataggattaatccttctatgcagccaggttgtttgtttcctaacat

SEQ ID NO: 16335 - DNA, 232 bp, Zea mays
  Coding DNA Sequence Number=SeqID_1932
gaccaggcgggggtcacctttctatgcccgtgtcgccgccgccgtgttcctgctgctgctatcccccgccgagacctcccagatcggactgggccccgccattgccgcctggattaacggatcgccggcggctagccctgacgccgacgccgccgtcgacgccgtcgccttgggcccgtggagccaggagtacgcggagctgcaggcgctgaaagtggccgtcaccgacgac

SEQ ID NO: 16336 - DNA, 389 bp, Zea mays
  Coding DNA Sequence Number=SeqID_1933
atgaggcggtcaagcgcccgcgttttactcatccacgcgcggcgtgagatgcggttaaggtgtggccacgacccgagatccgcgcgaggtggctgtggatccgcctggcgcggcgctttccgcgcgacgacggagaccgggaggtggaagagggtgattctgactgcgcggggcccgccacacagcgactttgagcgcgaggaaacagaacgaaggctacgcctggtgactgatcagtgggaccgagcattcagtgaggcgcgagaggagagggagcggccgacaagtggggcctgcgtgtcatcggtagcgctaaggaatggggagtctaacggggtggccatcctgtcagccgcgagcgcgcaggtgaggtggttgggccgcgcagc

SEQ ID NO: 16337 - DNA, 347 bp, Zea mays
  Coding DNA Sequence Number=SeqID_1934
atgaactacctgagcctgatggacagcagcgacggccagggcgccgccgcgctgcgccagctgctgagcctgtacgctaatctcgccgaagcggcggtggcgcgccagattgacggtattcgccactgccagcttagcgcggtcaatcgccgggtgccggaaccgggcccggtggtgtttgcgcgcggcgtcagcatcacgctggaggtcgacgagcaggcgttttccggtgccagcccgtggctgctcggcagcgtgctggaacgggtgtgcagccggctggtggcgctgaatagctttaccgaattcaccctcaacagccagcagcgcggcgaggtaggctactg

SEQ ID NO: 16338 - DNA, 373 bp, Zea mays
  Coding DNA Sequence Number=SeqID_1935
tagtcacgacccgttgaggtcgaatgacttacaggttataatacgtatgctttgactgatcgcgggcagtgcatgcctatatgagcagatggcttctagtcatttcgcgtttactcttattgatttatagtttataatacatatgctttggttgatgtcagacaatgcatgtatatatgtggatgtgtgtaatatgttttggcaatacatgttagagggatcgcgtttgcgattaaataacaagcggttgttgatgtgtgcgatttgtagttcgtctaattacgttttggtcgatgtggtgcatagtggtgtttaattagatgtgggcataaaatgtttggattatatgtcgtggcaaggtcgcattcgcgtt

SEQ ID NO: 16339 - DNA, 405 bp, Zea mays
  Coding DNA Sequence Number=SeqID_1936
ccgccctcctttggcaagtgaaagaacgctcctttattggatcgacctaaaacctcatggtgtcaaaaagagctactccgctttcctgggctcaaaatttcccagtcggttggattacaaaatgtctccgcgggcgttctctaagtttttgatgtatctcctctctcttggcatcgcctcaccaacatgtttttacagggcataagcctcattgtgtttattgcgaaaaaacatgtgctcacactgtgcacatattaccgcctcactcccgggatgctggtggttcttctttcgcgcccggtggtgcgatttcttttgctccccttgtcagataccccccgtgtaggctctcccaggggggcctctcgtgtttgtaacaaatacatttcaggtgtttccccgtct

SEQ ID NO: 16340 - DNA, 83 bp, Zea mays
  Coding DNA Sequence Number=SeqID_1937
gggtttgcaccaatccggcctcatgtcgctatgctttgctggttgtcttctccccaggcttagtatatatgggtggtccgacc

SEQ ID NO: 16341 - DNA, 389 bp, Zea mays
  Coding DNA Sequence Number=SeqID_1938
acaacgggccgagagagcaagcgccggaaatgtacgcggcacagaggcaaccctacacccgaaaacgatgggacgacgacaacaagaaggccaggacgcagggtgacacccgcatgcatgcccaaggcgatagcgaaggatcatccacaagacccccgcaatggccagggggagcgccgagcccagcagccggagcacgcggagcgcccgagcagccgaacaggcaccagcgcagatgacaagggcaccactccagcgaacggcacagggcagggagaagcggaggccagcgccaaagagagcgcatcaggcacacggcgcgcacgtagccgccgagggggacagaaagaccacggccgggcggctgcaaggaggcaagcctggcacag

SEQ ID NO: 16342 - DNA, 174 bp, Zea mays
  Coding DNA Sequence Number=SeqID_1939
gtgcttctcatgtccggcgcgcggctggggctcttcggggtttcgttcctctgtctctcgccgcggtccgtgttgcttcctttggttcttttgtcctgcggctgctgctcggttggcgggtcctttttgggctgctccctgttttcgggggggtgcttctgtgtcgctcctcgc

SEQ ID NO: 16343 - DNA, 467 bp, Zea mays
  Coding DNA Sequence Number=SeqID_1940
gtacgccagattttgtccggcctgacgcgctttaacgcggatgatgtcgagggcgatctggcacatcactggcaacacgatgcgcagggccgcgaatggtatttctggctgcggccactgctcagctggcacaacgacgaaccggtgcaggcggcacagctggtccagcagttgcaacgtatcatgcagacgccgcatggcggccgtctgctggcggcggaggaacacatcgatgcgccacatccgctggcgctgcgtatccggctgcgcaccagcgattactggctgccgcagcggctggcgcatcagttttgcctgctgccgcatccggaacatgccgataccggcagcggaccgtggcgcctgacgcactttacccgcgagctggtgcggctggagagccatgcgcgctggcaccatcagcgtccgctgattcatgtggtggaatactggattacgccgcacct

SEQ ID NO: 16344 - DNA, 416 bp, Zea mays
  Coding DNA Sequence Number=SeqID_1941
agattggagaaaaagcgcagcgcaggcgaaaagggggccgaaaaggcgagagggagagggggaatccaccgcggtgctgcctggcggtatttgtattgcacttgcacttgcaccgagccagagtccgtgcggcgacgttgaatggcgcctggagaggaggctcgggtcaacaccgggtgctgggttggtggcggtgctcgcgcacgacgcgaacttgccgggcacctactgccgtctcggcgagacacaaaagacaacacgacggcggcgtacggacggacggatcgacagctacgtatgtgctgctactagaagtagaacagacgcagagacggacgggaccggagccagacggccggcagaaatgatccgggccgggacctcccgagccatttctgctggattggaggcttgga

SEQ ID NO: 16345 - DNA, 208 bp, Zea mays
  Coding DNA Sequence Number=SeqID_1942
gatcggccacgtggcggtcggcacgcaggaacagccgcgcgcgtgccgactgcacccgatcaacccgcgcaccaaaccactgcgagcggcgatcgagctgcatacccgggatggtgaagctctgctgaccgctgccgaagccgctccagcgcgcgctgacgtccatcgacggattgctgaacgcgtactggtattcgccatacaggct

SEQ ID NO: 16346 - DNA, 538 bp, Zea mays
  Coding DNA Sequence Number=SeqID_1943
gtggcgcatccagcaaattaggcatgatcaggtggtagtggtgccggcacccgttcgctcagcgcgcctgcccttttggcacggcgacagtctcgggcgttcggcgacactcggcgaagccattggccgctatttgcgacatgccgccagcggggtgttgcccggcagcgacaaccttgacgccaatgcccgacacaacattcgtgcgctcatcgacgaacagattgccgccacaggcttggtgcctgacgatcgcaatttgctgattgagcgctgtcgcgatgaaaccggcgactggcgcgtgattttgcattccccttatggtcagcgtgtgcatgcgccatgggcgctggccatcgctgagcggattggccgccagatgggcctcgatccggccttggtcgctagcgatgatgggattgtcgcgcgcttccctgacagcgaaggccgggtgccaggcgctgaactgtttttgtttgcgccggacgaactccagcgacaggtgacggctgcggtgggacattctgcgctgtttgcc

SEQ ID NO: 16347 - DNA, 354 bp, Zea mays
  Coding DNA Sequence Number=SeqID_1944
aacacaaggcgaggaaacggcacgggcaggccgggcggcgcgcacgccaacccagcaagaacgacgcggcggacgcagaacagcgccccagagcggacaacgcgagagagccagagcgcaaaacaagcgtatgaaggcgaacagggaaacgaggccaagaccgaggaaacgggagccgcggcagccagacgcggcggcgcgcagcaggagcacgagacaccacagaggggacaagggacaaagaagaagaggcacaaacggccgacccacgccaacccaagcgaacgggcagccggaggaaagcaacagaacgcaggcaaggccggcacaggccgcggcgagacaacgaaaaca

SEQ ID NO: 16348 - DNA, 241 bp, Zea mays
  misc_feature (76)..(76): n is a, c, g, or t
  Coding DNA Sequence Number=SeqID_1945
tatcatcgctctacttaattttgggcaacggccaagacggatctcatgtatcaaccagtcgcgttattcatcggtntgcgctacatgcgtggacgtgcttcagaccgtttcggtcgtttcgtctcctggctctcgactattggtatcacgctcggcgtgctggcactggtgacggtgctgtcggtgatgaacggctttgagcgcgagctggaaggcaacattctcggcctgatgccgcagg

SEQ ID NO: 16349 - DNA, 483 bp, Zea mays
  Coding DNA Sequence Number=SeqID_1946
gaagcggttcgaggcctcgctgttccgcgccgacgaccgcgccaactaccagcgcttccagacggcttacaaccgctaccgtccgcagctcgtcgccattgcgaaccaggtcggcacgtcgcgcagcgcggcgcaggctgcgttcgtgcagatgacgccggtctggcaggacgtgctcgataccgccaatgcgctcgtcgcggagaatcgccagcaggccgatgtgtccgcgcaggcgatccgcgattcggtgagcggcgcggaaatcacgctggcgacggcgctcgccgtgatgctgctcgccgcgctcgcgacgggctacagcctctatcgcgccattaccgtgccgatgtcgcggctcgtggagatccacgacacgatgagcacgggcaacctcacgcagcgtctccggcttggccggcgcgacgaattcggcgtgctggagggcggcttcaaccggatgagcgacgaactcgcgagtct

SEQ ID NO: 16350 - DNA, 337 bp, Zea mays
  Coding DNA Sequence Number=SeqID_1947
gattatcctcaaagtgttatggcggaagctgtccgtatagctcccggtaatgaccagtacgatagcacattatattaaacggcatcgccgtgaaaacccaacgttaacgaagaagctgtatatggcacaacaagttcaactcaccgcaacggtgtccgaagcacagcttggacaacgcttagatcagactttggcggaattgttccctgattattcacgttcccgcataaaagagtggatccttgagcgtcgggtcagcgtcaacggcaccatcatcgataaaccgaaagagaaagtactcggcggtgagcgggtggcgattgatgcccagatcgaa

SEQ ID NO: 16351 - DNA, 143 bp, Zea mays
  Coding DNA Sequence Number=SeqID_1948
tgtcctcgaacctatccagacaggtcttaaaatcagtgaatagaatggttccaataggctctggtcaacgaaatcttataattggggacagaccaagtggaaacccagcaatagctatcgatgttatattatgccaaaagcaa

SEQ ID NO: 16352 - DNA, 240 bp, Zea mays
  Coding DNA Sequence Number=SeqID_1949
gtgcacgcgggcttcgggttcctctccgaaattgcgcgtttcgtccgcatcctttcgttgcacaagttccccttcatcggcccctcctcgctccatatcgaggtcatggggttcaagatcgccgcctagtaggcggcggtggccctgggcattcccgtcgttcccggttcggaaggcgcagtgcgcctcgaggtcgaagcgcggtccctcgccgccgagttcggctttcccgctctgaaa

SEQ ID NO: 16353 - DNA, 147 bp, Zea mays
  Coding DNA Sequence Number=SeqID_1950
tatggtggcctgatatatgagctccaatgtttagcaaaaagaatcgtcagcctttgttgtgttgcatctggatgcaagcgtaattggagtgaattttctcatgtccataaaaaaatgagaaaccggttagagcaccaaatgttaaat

SEQ ID NO: 16354 - DNA, 322 bp, Zea mays
  Coding DNA Sequence Number=SeqID_1951
gattaatctcatatcactgttatagatcatggaggcgtgtctcgtgtatgtcggagtataggaacgcgctcttgtaggaaatgttctttatatgtgaatgtaggaatctggagtgattaaagtgaaaaatattgtgaggactcaaggtaggtctagtgtatggcccaaagaattaccgccgggagattgtataagagatgggtttactgccctatactatagccgagatatatcccagatgtgtaatatacgcaaacgtggtttattctatcgaaaatattttgtttgttcacagccggttatagtgcctccgagtcgctta

SEQ ID NO: 16355 - DNA, 257 bp, Zea mays
  Coding DNA Sequence Number=SeqID_1952
ggcaaccgccacgaactgtactggggcgcacgctgcgacttccgccgcttcgtgtcgccgctgggcgtcgcgcgtttcgtcaccggcgacatggggctcggccacgcggtgctgcccgcgccgcagttcgatgcgaccgacgcattcgtgcgcggcgtgctcggcttcgagctgtccgacatctaccgcgtgaagttcacgcccgatccggccgaacccgagaagcgcatccacttcatgcactgccgcaacgcgcg

SEQ ID NO: 16356 - DNA, 434 bp, Zea mays
  Coding DNA Sequence Number=SeqID_1953
aaactactgattcaagactgcggagtagattcccacaaaaacagtacttattctggttccgggagccatatgcgactgttgttcttgttacttgtgaggaccttgatgaattcaagaccattcttaagcctcgcctcaaattaattgtgcaaaatgatgaacgagaatggttcattgtgtttgtgtcgaaggcccatcctaacaatgatcaagcaactaagatggcaaagaaagtatatgctaggctggaggctgatttcaacaccaaaaagagagaaagatgctgcaagtttgatctccatggacctgacacggaattctgggatgattttgactctaaaatggtggactgcatcagaaacactttggataggcgggttcagttttatgaagaggaaatacggaggttaagtgagcaacggttcactccaata

SEQ ID NO: 16357 - DNA, 441 bp, Zea mays
  Coding DNA Sequence Number=SeqID_1954
cgatgccatcgaggccaagcttggatgacgcggagggcccatgtggtgggtgggtgggggagagcggcgatggcacgctgagatgcgcacgctatacaccgatgggggagggggactcgacaggggaggtcacgagtcgtcggaagctgcagcttggtgaccgtgggaagggacaagatttgtcgtcgcaagcatgggggagcgtcggtggcaacataccttccgatgtagtccctaccggcggcgaaaatctagatctcgagcgagcggggaaggaggtgctgagcacgagggtgagatccgggtctagggcgcatgggggtgggggcgacatcgacggtggagcttgcgtgattgataggagcgggggcacgatgtcgtgggtggaggcgcgagcgcgagcatccttgggaggtggtgtcgcgggcacaacgacgaaaa

SEQ ID NO: 16358 - DNA, 251 bp, Zea mays
  Coding DNA Sequence Number=SeqID_1955
gcccaaggcggcgagaggagacccaggcccgagaacccagcgggggagaccgacagagggagacccgagcgcccacactggaaggcaagccgaacaaaaaggcggggccacagcacccaaaccgcgcgcgcaaaggacccagcgggcacaagaagggacaacccacaccggaaggaccgccaccgacgcgggaaaccgtggaaaaaccccaaaacaaagacgcaccgggcaacccacaccggacaagcacc

SEQ ID NO: 16359 - DNA, 137 bp, Zea mays
  Coding DNA Sequence Number=SeqID_1956
cggcgcaagagcactcacggagacgctggtcgcaggagcgctactggtcggtttcgtaggggggattggggcggccggatacatgtacaaggaccagatcaacactttcctgacgctgctttcacggtacattgacg

SEQ ID NO: 16360 - DNA, 191 bp, Zea mays
  Coding DNA Sequence Number=SeqID_1957
gaaaaagatctcctccgaaattcgatcgcgcagcgtcgtgcagcatgcacgtcagcatcgactccactacggaaaaggtctctcggcgtcggcggccaccgtcaccggtgcggtttttccgatcgtctctgcgtgtgccaggagcggccgccgccagctcgtccctgtgccgccgcctagtagcgcgcgga
